United States Patent Application Publication US 2008/0083042 A1 - sequence listing, part 2

SEQ ID NO: 3464 - DNA, 1097 bp, Zea mays
ttgcatgcctgcagatgtggtgcaagagaggataaattcagccactgaaagatcaatgcccaaatctgtctcgaaaaaacacagccaaccaagatgtgctgaatggtctcgtccgtttgatcacaaaaggtacaggccatggggtgtggaagcccccacttagtgagacgattcacagtccagcaacagttattctttgcaagccacaagaagaatttacactttagaggtgcccggctcttccatatcctcttccaaggtcgaaacttaacaaagcccaagacgaaagcataatatgccgactgctgtagcaaccagactgggtgagcttccaccagtgctggtccggcacatcctgttgaagaaccaccccacccaccaaatcccaaaccagcaggtaatcagccaacgcccgcacagtcagggccgctcttatgtcagaaacccaggcttgattgagaagagcctggaccacagtcctacttttaattgccctttttggaatcactttgaaaagagagagggctacctcagccaaattttttccttcaagccacgtatcagtccagaaatatgttgattttccatctcccacaacagagataaacgccatattgaacagggccctagcctttggcgggacagaaataggaaggccagcccaaggcctacttggatctgttttttgagcccagagccagcgaattctcagggcccagccaagtacttcgaggttgtgaatgcccagaccaccaaactccaaaggacgctgaacccttgcccatgacaccagacaatttctttcattggcatgctcctgttctttccaaaggaaacccttacgccttttgtcaatagcttttaacacccattttggaaggtcaagagcaatcaaatgatggattggggtggcagtcagaaccgtccgtaccataacaaggtgtccagccttattcattaggggggccttccaacccgggagatgatctgcaattttatcaatacgaggcatgaccccattcttgttggtgtatggatacatagtggcagcccaagataagtgcagggaaactccttaatctgacatgacagcacat

SEQ ID NO: 3465 - DNA, 994 bp, Zea mays
tcatgcgggaacccgtcacgttgcccaccggcatctcctacgaccgcgctgccatctcccgctggctggccacgcctgcgccggccggcggccgcacctgcccggtcacgcgcgtgccgctcccgccgcagccccagctcactcccaaccacaccctccgccgtctcatccacgcctggctcgcgtccctctcccccgaggcggaggtcaacgaggacgtggccgcgctgcgggggcccgtgcccggcgcggaggcggtcgtcgcgctgctgtccgacgccgccggggctcaggttgaggcgctcaagaggctgcgggagctggtggccgagtgcgaggacagcagggcggttctcgagtcccaggacggggtgttcgacgccttgtcccgcgtcgtgagcagtgccgatgcgtgctcgacggcgcgcgaggaggcggtcgggctgctcgcgtcgctccggatcccggagccggagctggccggcgtcgtggccaggcacagcaacctgggggatgcactcacggccgtcctccgctcgtcgaatctgaagtcgcgcgcgaacgccgctctgctcgttaggtccctctcggaagtggcgtggccggcctgggtcatcgggctgagccaggagcttctagcggaggttgtccgcgtggtccgcgaccgtgtctccacgcaggcgaccaaggcagcactgcacgccctcgcggcgctctgcccctacggccggacccgcgtcaagatcgtgggcgtgggcgcggtgccggcgatcgtggacctcctgctcgacgaccccgagaggcgtgtcaacgagctcgcgcttgtggcgctggaccggttgtgtacgtgcgccgagggccgcgctgagctggtcgcgcacgcggcggggctggccgtggtgggcaagaaggcgctgcgggtgtcggagaccgcgagcgagcgggcggtgcgcgtgctgcgctccgtggcgcgtcacgcggccacgcctgccgt

SEQ ID NO: 3466 - DNA, 1246 bp, Zea mays
acattcggcctcggtcccggggtcctctaggtcgactgcagcttgctaaggctacacggcttgtcggattcagtgtcatgcagttcaccatggaccttaacgttaaaagagagaaaaatgcatcagccagcagagctgaaagaaacgttgcaagcatgtgtcaggactcgggagaatggttcagtccaggttcaagagcgcgcgcttacatgtgggagacctgtgtggccgcccagccaacgttgaacaccgccgcgaagaagctgtagcccacggtcctcacgaggtacgattccgtccccaggatggtgcacagcaggcagccaccaaagaccgaggagaaggagaagccgacgaggaccgaccctccgatgtgccatagcttgaagcggccaaacctgtcgatctgagcatgtagtagcagatcgttcacggtcagttactggtgaaccgtacacgatgtggtagagttggggcgcagtttacgcgtgcgtaccatctcgcctgcgaggatcgtcatcagcccgtccgcgacctggcccgagagcatcacaacggcggcggccctgcgccaagaaacgcaagccgcggcgccgttggttagtcaggccactggcgcgagcgcgcgcgcgcgcgcggatgtgttattggcagagagattgtgcaggggggactggggagggagggtacctgggagcaaggccgatctgctgcaagaagaggagcaggtacgtgaaccagcatgcccacgtgatgtcgttcagcatgtggccgacgccgtaggacagcaccggccaccgtcccaggggctgggcctccgccattgccgcgtcgtcctttgcatcggccatggacatggagagctagcgcttgctcggctcggtaagtcgctagtgtactcccaagaatgccttctgtcagctacagctgtggatttcgaggcaacgggaagtccggaactgcatcgtcaggaacaggaataacaatcaagaaagaaagggacaaagatgttcgtgctgcttgtgataaataaataaataaaagggcgagcagatgtaacagtctggccacgttgcaagcgtgcatgaacgaaatgcttctaatctctaaaccaagcagaggaaactctctctctctctctctctctctctctctctctctctgactgaatccagtcgaggaggaaacaaaacaaactcaacaacgcatctctgcaggtcgactggtgaggcccaccagcaccgag

SEQ ID NO: 3467 - DNA, 1057 bp, Zea mays
aagattgaacaggcagttacattacaaaacatcgttgacaaagtgccctaactccccagaataataggataggctaccttgggaagcacaattcgtccggaatttgcgacatcactctttgtcaactccttgcgcaaaatgacttggtactctccagagttgaacttctgaaagtcatgtatgtcccaagcacaaggtgacacaggaaggaaaataacttgttaattacgagagaagtgtttgtctatctactgtaccatgaccgagtaactagaactatgtcaatagaattcaaaccagttattttctttttccgatgaacttagcaaatgcagatacgccataagagaagaatatgcacaataaaaaaaaaggacatggagtgtgtgttagatgtatcacattattcacggaagcacaactttcatggctctgcttcgactcaggaagagtgccaactgtgtcacgatgaactttgccactgtttctagtgtccatttcatcactgctcctaactattgcaggcaaatcctgtgtatcacacatcagagtagaagtaaagattatgaagggtaatgaaatcagtaaagtttattataaccctgaaggttcatgtctatctatacctctgaattctcgggttctttggcagatatagatccttccatgggcgtcatgtgggaacaaatatttggtccaagggacattgtagtgaaagagtcaaatccaaggctagatgcacaacctgttgtttccatagaatatgaagaaactagctgaggcagaggcagaggcgggattgtgaaagattggttctacatcagaggataacaatcgggacatgctgactattgtgacgcaccagattagttggcccatgcttaaatcaatgtggatacaggttgatgctacattggattctaatatatgtaccatgcaaccacagaaaataatatgatgatacagaaataaactgccaacttacgtaacatgcttgaaggccaaaaggacattaaaacaacaaaggcgaaatcaaacaaactaactgcaggtacca

SEQ ID NO: 3468 - DNA, 789 bp, Zea mays
gcatgcctgcagttaggctctgctggtttggtaaggcctcacagttccagatcatgctacaaaagtagagaattttttgaagtattcgtcagagttgttgaacactatcagttgaaatttctaattttctataaaaagaacattactatcacacaaggctctagaaaaataattctccatctgtggatggctatggaaggtggaaaagaaaacagtagtgcattgctaaatgagtatatgccattcaaaattttggatatgtaaattacaaagcatgatgtttcagccacgctgctccaaatctgaagacctatctttaccctactataaatttcagaatgtccattgatttcgtggtaaaatgtcatctatgcctccacagtctggtatcctcgttcatgattgaacatctagacaccttggcacataaaaattccccactatatagtgaatccttttttgtgcttagtgttggaaattgttgtgaagaacagaaaagatcgtgaaatcattgttttaacttcactgtgatggttagtagtagggttttgcatgctctctaaatatttggaagttgaaataatcggttgatttttggcaggttatggaaaacataaattttgtgatgtttgcaaaagagttgtgttctcagctaaacaaccgttcaagcatggctgcatctgcttcggcttaaaacgctttaagtcagcatggcccagtcacgtcctgatactgcaactgtgtcaactaggacacccacaaatgcattggtgaatgcatctttgcttc

SEQ ID NO: 3469 - DNA, 1177 bp, Zea mays
accttttgcagtggtcacacaataacccatgatgtgaaatacagctcgattacggtattggatgaacttccatataaagaggcaaatgcagattgagagccagagagtcataacccaaatgcgcttccagttctcctcaaggaagtacatgaactcttgccagtagtggtaaaatggacctgtgcccttggttgatgcaagcttcatgctaagagctttgctaagtttcgaactatgtgttgttgatcttgcagcagcttgagatggtgattgcagcaaaagtgcctccagatcctcaagctgttaattgattagcatgagttagctatggacagccaaaaaatgttatttttatgagtaagaatagggcattggacagacctcaatgtatcccaggttgtcacggtcaagttcttccataatgagtgctgtgtactcatcagctcgttccttgagtttggaaagcttgtttgctgatgcactgaggctaataatctgcaagagcatattatcacttgcttagaatctaacaacgtacagcatgaacatattaggttttaaattcttgattcttctgactgacctccttaacctcctctgctgtgatccttccatcagcattcttgtcaaccctggacagaaaagattaacacatggtaagtgccaaattaaattgttgaatacacaacagctgcatgtaaactaacgacaatagttttgcttcatagttattttaagataacatgttcgtaaggccaagtatttttcttatgtggagctagacttcgataactcatcatacacaattatgcatagagaaggaaattgtgccaggaataataagatattaatcaaaattactaacatatcaaagaatgtccgcagacggttgtcaaaaccctgatcacttagttggtcccagaaatctttcagctcatccttagtcagcacctgcttcgttatccctctcttccttgctaatgaatcgaagacttgcattgcaaactcatcagatccatccatccctgcacaatccaaagcaatgcttgtattagtgttgttcaaatagctgtatgcagatacgaattcaataggaccactgaaattaccaatgcatttcccgaatctcgaacgtagcagcacgccatcaacttgtagctggttgaaccgtttctcc

SEQ ID NO: 3470 - DNA, 1161 bp, Zea mays
ctgccaactgcatcattatgaaggtaatcatagcagaagtgtgcaataaatgtgagcttagaatgaccttagaatgaagtaagtgggtattctgcaagttacaaaaaactgttttaagataaatgttttcttcacttgagttctaatcatgtctgctgaaccgcaatcttataatcaataataaaatgtttctcatacttgctccagacttatttcaaacttttttggcaccttattatggaatgggatgacatattctacaattttatcttttcacactatttcacttgttacaaatcttacctttctggttgtttgccttttacttattgtgtgttgttacaggcaaatgatggatccttcatggaagaaccaggatctggtgctgtggctaccattggtgagaagcaggtttctgttggaacattagattggattagaaggtacatatgagttttttgttctacagctatgccctatgctaaattcactaacaacatgagacacttctaatcgtctcttgttcctggtataccaccttatgtaaatgctatctgttttaaagttttctccctgcactgtcttgtaaaagtgtatgttgagtctgtttgctagtaaaattacaatatttcaggcatggggtcgttcacaaccccttcccacaagcagagcattttggccagtctgttgcatatgtagcagtgaatggtgctctggctggtcttatttgttttgaggataagctcaggggagattctcgtcaagttattgacacactatctaagcaaggaattagtgtatatatgttatctggggacaaggaaagtgctgctatgaatgtggcttcagttgtcggtatccaggcagataaggtaatatcaaccgaatcttgttgtgttttgttcttgtaaatgacttaattctctatagtaaaatgtggctaggcccgactaacttggtctattgatacaacacccaaccctgagttaggattagggtttcccggggtgagactataattacaagggactaacccccaaaccctaacgggtactctaacatttggcactcaagtagccagaatgaacatgttatgggttgattgctgtctgttgctgttagctgcaccaattacatgacgcgtagtgatcttggagatgc

SEQ ID NO: 3471 - DNA, 1149 bp, Zea mays
tgttgcggcaggaaggaggcgtcggtgctggtgatggcgtgccgccacctctgcctgtgcgccgactgcgacaaggtctccgacgtgtgccccgtctgccggttccccaagagcggcagcgtggagatcaacatgtcctgacaaggacctatgctatgcaaggacgtcgtgtcgaccaaaatcatcatcggcggggcagggcggggtatacacagtgactagtagatggtgtacatgtcagcatactttttccttgacttgggatttcttcttcagatggtaaaggaggagatcaatatgtcctgacaaggacctatgctatcgatcgaagttggcggggcggaggtatacacagtaactagtactagatggtgtacatgtcagcgtgcttttccttgagttggcatttcttcagatggtaaaggagacgatcaggtttgcgtattgcaaatcttttttttttctagtgaaaaggttggccctcgctctgttggcattaaagcgtaacaaagcaacatttttttttaaaaaaaaaaatcgtttaggcgcgcccgacatacagcttaggctgaagagatcacggccttagtttatttttttgtcggtttccgaaaatgaagagtgcaaggtacgtgctgcgtgccaagcaggaaaattgttttttttttaaaaaaaaatctggaaggaattgtgtcagaaagaacagacgtgaagaagaagaagaaatggtggccggccggatctgagtccctgttgcagttgcaggcaccaagcacccggcaatggcaatggaggcacatggtggacgcgcaatcatgggccgcgccgggcgcatgccgcacggcgtattctcgtaatggaacgacgacatacgcctgcatcgtgaaagaagccacgaggataatcctgaaaggatgcgtgtatgtagcatgcgcacagcatgctcggcctgtcatagcgtcccgttgcctcgtctacctactacgtactactactcactgttagcattgccttgcaagaaataattacgcatgtaccggcagatacatccatgtcccggcggcacaaatggacgccacgaaaaatgatggggaatgtacgtatgccaagggggaaaaaggagagcaaaataggggaggggccctgtac

SEQ ID NO: 3472 - DNA, 1137 bp, Zea mays
cagcttgcatgcctgcagcggctctccctagcgagcactctacgcagaggcaagactctctctcccccttgttctggcgtgtgcctctctctccctttaaacactgttcacgtgggtccactttcaattgttagtagataaaaagtatatataaaaatgatattttatagtgtagtgggatatagggggagtatttagggggaaccgctgcgggagatgaaaaaatagggggtgaaatgttgatgatgtgacctaaaaaagtgatatagagggaaaaatttagggagaacggttgcggatagtctgaaggccggcagcgcccacgcatgcttgacttcttgcgccgcgttcacaaccaagccaacgtagaggggaccgaggaccgaggccctcggcgaaatccgtccacgcgctcccggctcccgcaccccactccccgtttttctccgcaccgccctgctccccgaccccaactgctgtctccttcctcgggtaatgcgaccgcgcgccagagcatgctccgcccggagcccgcgctagggttcctcgccgccggccccgcgcgcgcgtgcaagccgccgcccgagcgccgccgcaagaagcagccaccgacgcggcggaggcgaccggccagtgccgcagtaaaatctctctctctctctcttccttttttttggtcctcgccgcagtaaaaacctccacaggctctttgctctcggcgcggcgcgtctcgatcaattacttaactaatgaaggcgcagcagaagtcaatagatcaaaatccaaattccaaacgcgcgtttgtctattgtgctactaccgctacgctactaacccacatgggatccgaggttggcgtttggcgatggcgtcgtcgaaaccctccggccaagcaaagcataacaaaaaagaaaaaaagggcaaaaaagccgagcgggtttgaacgaagcgaaagcggagctgctctccccgcccgcgctcgctccatcgctttactatcattttgctcttttggtcgtttctcagcggctcacggatcgcgcgcgctcccccgctcgtcgtggcgcggccgcgctccacgtttcaatccgtttttgctgccgtgcggtgacgtgacgcctctaccgttggcgcttt

SEQ ID NO: 3473 - DNA, 866 bp, Zea mays
agcgagcgcctccgccgcgcgttccgccgggagctcgacgtgctgctctccctccgccacccgcacgtcgtccgcctcctcgcctactgcgacgagcgcgacgagggcgtgctggtgttcgagtacgcgcccaacggcgacctccacgagaggctccacggcggcgcgggcaccctcccctgggcgcgccgcgtggcggtcgcgttccaggtggcctcggcgctggagtacctccacgagggccgcgacccggccgtcgtccacggggacatcaaggcctccaacgtcctcctagacgccggcatggacgccaagctctgcgacttcggcttcgcgcacgtcggcgtctcggccacgatgggcggccgccggccctcggaccgcgccgtcatgggctccccgggctacgtcgacccgcacctcctccgctccggagtggccaccaaggcgagcgacgtgtacagctttggcgtgctgctgctcgagctcttgacgggcaaggagggccgtctgccgcgagacagggcaccggatcacggccgcggtgagggcctatgcttatcgattgtgaacaactggcgggccgttgtggaccaaaggcttgggaagagaacttcgaaggctgcttgaggtcagcccgatcttggtgccaaaattctatcatgtccaccattttccaatgcataatagtcccattgggtacttccattacctgtggtcagggaggccgaaaccttcatggatcttaaatttgcgcttttcatactctttacacaagggtatatatagtggtcttacttaaccatcctcaaaacttttctctccatttctcatttactgaacatacagaaaccttgcacttatag

SEQ ID NO: 3474 - DNA, 552 bp, Zea mays
cacagtggctcaagaaatcaccagttccttgcaacccgccgaatatgtggtatactccatcgacatacacaacaagacaaattgacaactcgatggcatgacaaaattttctatcagagatctagtgattctaaaacctcatctcactgcgccaattcttgtggctaactaccctcaacacaattatagcaccatcaaggacatatttacacactactccataggcatctaacttaggacaccatcttgcttgcggtcgactctcgatccagcggcggaggtcttctcctggagcacgcgcaccacgtcggccatggacgggcggagcccagggctgtcactgacgcactgcatggcgagctcggccacggcggccgcctcagcggcgtcgtagtctcctcccagcctctggtccagaacgcccggcagttgatcaccatcgctgagcttaggcctcaccgcggccgtgagccggtgccctgtctcgcggcagacggcctccttgcccgtcaagagctcgagcagcagcacgccaaagctgtacacgtcgct

SEQ ID NO: 3475 - DNA, 1234 bp, Zea mays
aggttgtatctagcttggtttgtctaatactctgaactttgatgtatttctgttatggcccgtttgtttcgttggaattgaattccattttaataattataatttagacaaaactaattaagtttatatatttatatatgtaatatatttgtatattatcctaaataatatgagagagatagttatatactatatttatgttatagcgaagcaagtacaagagtgtgctataagttgtacatcagaaaaataacatgtaaatctatataatcaattttcatctctcaccccatgaatttgagataggcttatatgataattttagaaagtgatggaatgtcacattctaaaaaaaatagtttgttccattagtaagattccaattcctcaaaatgaaaggaaacaaacgggagaaataatagaaattggggcatcctctattcctcttataaaaaatgtcaatggcaaagatatctaacgaatttatgacttatgagcacaagaactaagatcataatccgatttagctaagccctcacaataaatttggcacaggcagtcaaccggcagaaaacttgtgtgcttttagatttcaaccagcagctagcacatactcctactctcaactctccgcacagaatggaaacaaagaagaaaaaaaaggagaaattggcagactactctctagtctctacgtactcggccatctcacatttgttattacagcaaggagaaaaaaggagtaataaatgaagaaaaggaacagagtttctcacccctttgcggccaacgtactcggccatctggccgctggcgatcgccccgaccatggcgcccacgttggacagcgagccgaacaccgagaactgcgcggcggcggcgcggtcaattattggtttggttgtagacaaaaagagaccagagcgagagagaaagagcaaaaggcaaaaacgaagtagtggaagtcagaggcagagatgcaggaggacgtgcctcggagatggagaggttgaggtcccggatgatgctggcctgcgtcggggaggagtagccgccggtgaagccgaactggatggggccgagcgcgacgatgagcgtgcagaggaaggcggagacgtgggactcgcgcaggacggccatggaggaggtgccggcggcgttgaggctggactggcgcgaccccatccccatccggtaccagctcccgctgttgggcagcagcggcttctgcagg

SEQ ID NO: 3476 - DNA, 1133 bp, Zea mays
tagtggcactggacactggtattgtcaatgtctgcacgtaaacgcagccttgttgtttttccttttcacccctggcccacggagatggtgacaatagtctagctggagaaaatcaacagctccagccatatgaaagtgtctgtactctgttggcaaccgaccggcagcaaagtaaaagcagcagcaaatcgattgtaaggtaaaaattgcattacaacaaccatgtatatcctcaccgacaggaaacatgtattaaatatatatataatatgtgtatatatggtatacatagtgtatccgtatgaatcatggaagcgcttgccccctttggggcgcctcgtgtgatgcatgcgatgcgagaccaaatggaaagcaacaaccggaagaaatgcaatgggtacgcgcgcgtacgtagacgagcgacgacacgagtttgctggcgatacgccaacgaccaacgcctcaaccaccggctcgcgcgggcgcctcgctcaccgcgagcagagagagcggcggcgggcgcgggcggtagtagggcagccacgcctagcgaccttttcatcaacaacgaaacaaagcacaaagcaacaaggacgacgacacagcacagcacacagcagacaggcgcgctcgctagcactcgggcgtgagcgagtggtccctgcggaagtcgttgcagtagtagtagaccatgtggccctgctgcgcccagcgcatggccgcgtactgccgcggcgtgagcccggcccccgcgggggacgccggcacgggcctgcacgcgggcggggcgctggcggagcagccggcgacgacgaagcggtcgaggcgcgcgacgaagggctggtagcggtagtcggcgcggtggcggccgtcgtcggtggcccagtcggaggcgtcccagatggagccgtagacccacatggggcggtccgggaaggtgagctcggtgcggcgctcgtagcggcggacgggcacgtcgtccacgaagaaggtgatggcgtcggggttccacaggatggcgtaggtgtggtaggccgccgtggggtcgaaccagaggtggaaccgcatctcccgccccacgatgcgcccgtcgccgctgccgcgcacgtacacgttcgtctgcaggcatgcaa

SEQ ID NO: 3477 - DNA, 1360 bp, Zea mays
aaacctggccaaacagttctacttcttctcctcatcgttcgccgcctcctcttcctcttcctcctcctcgattgcgtactcttcgtcgtcggagtcgtcggagtcttcgtcgtcggagtcaatttcaatatcgtagtcgcccttcgtgtgaccatggctgaaacttctcagctcgtccctcccgccatccgcgttcaagaactccaacccgtataccgtgtctctgtgcttcacgaccagccagcgaagcagcctgtcctccttgttcagatagtggagttcttgcgggaacgaagggggaaccatcatggtcatttgcataagatggccctgtaaatggggaatggggaaggcgatctttttaagacaaccacacagcaacaggttctcaagccatacacaagagcagataaaaaaaaagaatcatgtacagatatatcactttttgttgtccaggcaataggttcaaacaaaacttggtacttggcaatggtccaagcttcacagttagcctggcaatggtttaagcttcacagctagcttggaaatggtttaagcttcacagttaacttggcaatggtaaccaataacatccattatggccctacccctattagcatatttagccattctacatctgctctgctgcttggcaaatccttagaagaggaattgataaatcagggtatgcaggtaaagccacggcaagggtctaaggttcaccttaaagcagctaaaccattttttggctagtaaatcatctcatcacaaaatactttcattaatcatgatgaagtataaacactaataaattctatctacaagccaactctgcttaaattagcactcaatgattcttagaagctttttggttacctatttccttttttgttttttgggggacagttatgctcctaggcaacccagttacaaattgagcatcctttgcccactctaaaaatactcaggcctacattctctaaagttataacagcataattttcctttctaatcagagctagctaaccagttccagccttactattatatattgtgtttagcgagaatgggtcaatagtgtcagttaacattatcaagaggacaagtagacaaccaaggatacactacacaaatctgacagggaccaagaacaaagtcagaatactgacacccaagacccaacgatggcttcttatactgaaactcatcccagttgcatacaagctacagccacatctgtgtctagaggttgatgcagcagtagcacagcacttttttttctaatttccacatgacactgtaaggtaaatttaattgcttatctcacaacaactgcctaaactccaatgtttagtaaaaa

SEQ ID NO: 3478 - DNA, 1049 bp, Zea mays
cagcttgcatgcctgcaggcgcgatggcaagttggcaatggagccacggacgcccggacaagcactcagctttccgagaccgctgtcggctcgcgcacactctaataattaaacaaaccagttagacaggctctctccctaagccccaaccacttgccaccaggttaatcatcccgagagcgatagggaatccggccctcggattattctaatactactgctactcggctcctcctgataattgcagagctcctcttaaaaaaaacccgccatattctgcgctgcgctgtgctgtgcgcgcgagcgcaggaatgagatttgtgcaggtggcacgagctggctggtgggcctctgaccgtctgattggcgggaccacctgtgggctgtggctttgcttacagattctgcgagaacaaaacaaataatagccagaggagaggagaggaccctaagcaatccggtattgtgttgtattgtattgacggtaaacttacccctcgtgcaacaactgctagcctggttttgtttaattagtccaagggcgcgttggctgcgaggatctcgagacgtactactacctctgcctctgcctctgcctctgccgaccgatccacaacgccacatgctgctggaatgaatgattagccccgggagctggagctgcgtgctctttggtggtggggtgggttttttttttaagcgatggtacagtacatgtgaggataacgggattgggacaagacaggcggagagggggtgttatctggcggagaggaggaatgtgatcctgatccggatggatctgagcgccggccgtgtgttgagttgcttcgatggtagaaaaaatgaccgggcgttgtaagtgctgagtggttaacatgacatgatgatcggagccacggtgaatacgtctctgctgaatggtgcttgggatttttagtaacggcgacagtgagtggatgaaaaggaagaaaaagctccccccccccgcggccgaagttttgacctgttgacgaagagaatcgcgacacgtagtggaactgagacat

SEQ ID NO: 3479 - DNA, 1224 bp, Zea mays
tcggtgtggtggccccgcgagctgatggcttggtagatcacgtccgactccttgaacgcgtcggcctccacaaccacggcgttcgccgccgcctcagtccagaacaccctgcatcgcatcgcatcgcatcgcagaatcgcagcagagtaagagaacgtacgtgcagaatctctctgtctctctctctctcacacacagagagatacagaagagagacagagagtactcactccttcatgatttgcttgagcacggtgctcttgccagcacccatgccaccgcccatcaggagcaacaccgggctgcggtcgctgtgcgcagccgggaccatcacgtccgtgcccgcccggttgtggtcgtgctggcagtgcacaccgatggccttgagctcctccaccagcgtggtgaacagcctggtaaccttcagctctctcgtcaccctctcgaacctcatcttcctgtatgataagaaccagcaacagaatccatttctcacgtatccgaagacgacgcaaaacagaggtcaaattttcatccatattctccgaaaaatgaatcgatcataaaggaaaacaaacattgttatgtgtagtacgatgttttcacatcttgcattgtgccggatcggattaattacctagtggcctccattaccattcttctgagctttcttctaggctgctcgtgtgtcagaacctgattttattttatatatgcaatgcaagtaaacccaacgacgacgacattagtatatatgcgtggcacactcaataattattgtaatataaaatcaccaggaggacttgggttatataatatacctgcgtgattatgtgggtcgcatatttccagtggaaggagaagtagccgaggatgcacttgtccatctcctcgatgagctgcacgagcagggcgtccgggttcatcttgttgtggaagaaggcgagcaggttctgctcgtagccctccgtcttcttgaggtaatcgtaggacagcgcgcacaggtgcgggcactcgttcagatcctcgaaaccgatttgcgtggctggcaggggaagaaatttcgtccggggaccggccggccggcccgggatacattcattcattcattgaccgtagtaaagaaaaggaaataaaacccaaaagcaaacccgccatttgcatgcagttcgtcgtcatcaaccgatgtaacgtatgcaaaagctagtaacaggatgtgtgaat

SEQ ID NO: 3480 - DNA, 727 bp, Zea mays
aaaacccattagggacaagatggaacaacaatgaacaataactaatgaaataacagttatggctgctaaaggttagtaaaatgaatcacctggaagtcagaaagaccatctgcaccagcagcagcctcctcctcagccttctccttttccttctcaacatcatacttgggcttccatgtcttctccagaatggaggtggcaactttctcatcatcagcaatcaagatattgtcgaacaggatgccatcctgcattgtccagatctcaatcccaatagcagcaattggatcaaaatcaggcctgtcaagctcaaagtactcagggttgggtatctcctgaggcttccagattcccttgtagttggggttgtcaatcataggtgcatgccacttgcccttgtaagcaggattctgcttcatcggcctcttccactcgccacatccaggtgcctcttcacacttggggttgtcaatctttggcgcctcccattcaccatcctgctcatcgtcccagtcctcaggcttggctgcctcaggatcatcaatctcctcaggttcatcatccaaccatccctcaggcttggtggcttcctcatccacaatttccatcggggcatgcttatcccagtcatcaggctttactgcatctggatcaggaattttagctctctcattccagttctgcggcttcttgtcatcagggtcaggaatggtcttggatgggataa

SEQ ID NO: 3481 - DNA, 1160 bp, Zea mays
ggatctacggcagtaacattggtgaaacaggtgattgatatttcaaaacttaccttggtgtttgcacatactgaagtttttgacagaagtggtagaagtacaactaaattactgaatgagctagacatgtttttgttagggattggaccttgtaatcggaaatcttggggactcaagagcaattatggggagaagagacgcctctaacaatctaactgctctgcaactcacagttgatttgaagcctaaccttcccagtatgttcaattcttactttgatcatttcattgaccctgaaggacgtatgaatctgcatatttgctctttctttcctctctgtcctcgaggtgcctttgttcgaactatgacaccaataagatacttgtccacattggtgtttcctttgggttgtcgaagtatttaatccttatttcttcttttttaggggaagctgcgaggatacaacaatgtaaaggacgggtctttgctcttcaggatgagccagaagttgccagggtatggttgccaaataatgactctcctggattggcaatggcaagagccttcggggacttctgccttaaagattatggtttaatatctgttccagagatatcatatcgccgccttaccgaaaaggatgaatttataatactagccaccgatggggtatgcaccagtcaatacatgtgactttagtttccagtccctgctcggagtagctgtctttttatcaccttcacagggaaaagttttaacaaagtatatctgcatcaactttctcatatttgcaaagctcaatgcatgtaggtatgggatgttctctcaaataaggaggctgtcgacatagtagcatcagccccatctcgtgcgacagcagccagggcccttgttgactgtgctgtcaggtcatggaggttgaagttcccaacatccaagagcgatgactgtgctgttgtctgcttattcttgggtcacgagaagtcggccgactcggttcaagggagtgaacccaatgtggagacagcagaacccaccgtggaggtttccagttccacacaggattccagtgcaggggttgacgaagacattgcagatgctggcatgcatgtatctagtgcagtgcacatttccgaggccacgctgcaggcatgcaagat

SEQ ID NO: 3482 - DNA, 1122 bp, Zea mays
atcgacggcacgaagatgagcgcggcagcgacggcgagagagacggccacccatggcgacgggaagaagtgcagcacgaaccctccgcaccacccgctgacaagccggccccggtggcccgctacggcgtcaagcatctcgccgtagtcgtcaggaagccgcgccccgacggtctcctcacctagctcccggaacaaggccaccagctcggtgtccgtgcgccgcgtgctggcaaggacccctcgcttgcggagcatggccgcgtcctgtgggcaacgaatcaggccctccatccgcgctacgtgcgccgtcacgcatgcgccgtgcgcccagtagaagtgtttctcgaaggccaggaggttgtggagcacagccgcgctgtactcgtggacgtggaagcacgggacggtcatcacggccaccgggctcgccgggtgtcgccagaaccacatgtccaggtcgccgcagctcgacgacgcctcgcggaaccacaccgctgacctccgaagctccatggagcaggggaacagccgctccgactccttcttgatcttgaggagcttccgtggcgtcgagaggacgaagtacttgtccttgggcacgcgggaccagtggaagaggtgcaggacgtggtggaactcgccggcggcagcgctgtaggcggcgcgacgcgcgcgcttggggcagatgtcgtcgaaacatccgagcacgagctcctcgacggagttccggagcttgagcccagggcacgaagcggcgagaagcttgatggctctgaacgggacctggttctcgagcacgagcatgtcgagcttgatgtcgtcggcgtgctgcgccacggccatgtgcagtatgaagtagtccttgctgatggacgccgcccgcgtcacgctgtcggcgtcgtcgcctgtgccggccttgctgagcatcaagctcaccaccaggatgaagcagctgtccagcagcagcatctccagcagcttcgcctcgtcgtctagaatctccacggcgggcccgtccgagccgtcgtcggcgaactcacagcggaggcggtcgcgctccaggcagagcgcctcgacgtacccgtccacgtcgaggccgcactggtcctgcaggcatgca

SEQ ID NO: 3483 - DNA, 1218 bp, Zea mays
tgtgtacctcatgtctgatacttctggcctctctcatggtccttaccttggaacaacaactttctgttccttggcttctctgctcatcttgttaattaaggcatctgtttatagtccggcgcaggacattgggcctgagctctcgccgtcattaccagatcacaagctcaatctcaagaatctatggggaatgcctgtacttttcctgtcttccttggtgtttgctcttggccatgttattgttgcttacagaacaagcggcagggctcgacggaagcttctcattcaccgcattgaccctgaatcggtatgactgccatgcatttggttttggtcttctaaatctcataaagtcatcaatttataaataacttgagattctttctttacaacttgatcactggttgatgttaactttgattatttatgaatttttcgttttcctactatttttgttttcagattttagcatacaagaatgccttttctggatgctacaaggttccacggtctcctacaccatacagcggaaagctttttacaaggagtgaaagtgagactaagagaaaatcacttatccaggacgatcgtgatttgccaatcagttttcttgcagacagtgatagcatgttcattgcttgccaggggatcactatacactacaaagtttccgatccagcagccagcctaccttcatcccctggcttcttttcagagagagatactcatcacgatgtaatttcatcaagcatttctcctagaagacagaggcatgagagtccaccatctgcttcctctaatacccgtcgcgttctgaataggagctttagccatcaataccataatacttcgctatatgcaccactattggtagaaccagtggcatctccaactttgttggatgatattcctctgatgtgtattgatgatggcaatgctgatggatgtctgaatcatgtgggctttgaccttgaggctggagggcagggtaaattcgctgtagttttggtgcatggatttggagggggagtattctcgtggagacatgtttccaatttgttagctcgacaattgggatgcactgtgatggcatttgatcgcccaggatggggattaacatctcgacctcgtaggaaggactgggaagataagaagttaccgaatccatatgagctggagtctcaggtgacccttttctccactcaatgcaagtctagt

SEQ ID NO: 3484 - DNA, 730 bp, Zea mays
aaggtatccatgcataatccttccaccaaatgcaagtttcatcatttacatatatatatagttggattttgacattacagtagtagctgcttcatgtgtcatctctcttttggtaataggttctttcgtcagtttatagctttctttgccacacaccaaatggcaatggctttattccggtttcttggagctgttttgaaaacaatggttgtggccaatacttttgggatgtttgtgctgctcattattttcatttttggaggatttgtcatacgtagaagtaagtatgcgcaattctcattcattttttatttctctaggcacaagaaatctataaaaatcctatcatttgtatggatggaaaaataaccttttaacctctgattacgatgttaacagatgacatcaaaccatggtggatctggggttactgggcatcacctatgatgtatagccaaaatgcactatctgtcaacgaattccttgctagtaggtgggctagtgtaagttttttctatcactccacacatgctcatttttttcttgaggctcatataaccaggactcactttttattaatataatatcgtggggccgggcggtcgttccagtgccgaccaagttttttttatataaccatgatttaatatactaatcttggaaaggtgtttttttagttttggattaatgataggctttttttttactacagccaaacaatgacacgatt

SEQ ID NO: 3485 - DNA, 1237 bp, Zea mays
ggagaagctccccgtggcgccggctcccgcgcctccgcctcccgccaccaccggcaccgacgaccccgacgacctcgtctctctgagcctcggcacgagggccaatagcggtggcggcgcaccacgccgcaagggccacgagaggtcggcgtcctcgtctggtggcaccgctgatgagatgaccaccgccggtgccggcgccgacgacgaaggccaccggctctccctcgggctcggcttcgggcgcggtagcgggctgccggcgtcgacggtggccacggacgacgacaaggccagccacgcgtccgtccggaacttgagctccgacagcagcggcagcgccgactacaacgacaacgccaagcctgctgacctggccgccgcgggcaccgctcgtaagagcccgagcgccggtgccggcgacggatcagctgatgacgaggtgcagcagcaggccaagaaggctagggtttccgtcagagtcaaatgcgatacacccacggtacgtgacaataatacctaggcttatgaaacttgagaaaatggcacacagtgttaggttattcctgacctaatttttttgtttcggtggtcatcaatcagatgcccgatggctgtcaatggcggaagtacgggcagaagatctccaaggggaacccgtgcccgcgcgcctactaccgctgcacggtggcgccgcagtgcccggtgaggaagcaggtgcagcggtgcgcggaggacacgtcgatcctgatcaccacgtacgagggggcgcacaaccacccgctcccgccggcggcgacggccatggcgtccacgacctccgcggcggcggccatgctcacctcgggctccaccacctccgccgcctcggcctcgctcgtccacggccaccaccacccgctggcggccgccgccgcggggctgttcggcccaaccaccatggtctccaccgccgcgtcctgccccaccatcactctcgacctcacctcccccgcgaccgcgccgcactccctcatgcactcctcgccctacgggttcgagtccaaggcggtcccggcggcgtggagcagcgggtacctggcgtacggcggcgccggcgccggcgcccacccgtcctcctactacgccaagagctcgccggcgctcgggcaccaccagctgttcggcggaaacctgagcgtgccatcgagaccggagcagaatggtacgcccaatcgtacctgcaggcatgcaagct

SEQ ID NO: 3486 - DNA, 1056 bp, Zea mays
ggttgcagctgtgctttagctaaagcgaacgccgtgtatgttttttttttctggtcaactaaacattgttgtgtatacatacataaacagcaatcgaagcagacaataggcaacaaaataacgaattaatgctgttatcaaatgagccagcaacggataaacttgagatgctgccctagtagccgttctcaaactgaagccctcaaggcttcaaacccatcaattgcttgcaactccagccacaatcatactaataattacacttgagcgcagccaaaatagcaataaaaaagttgagcaaagagtgcacctgctttgcttaattgctctgcacgctcacgacgtccaaccgacgctacagcctacagcggcgtgaaaaaagaagagctgttttttaactccacacacggaacaggaattaccaaccgaccgacccagtgtacccgattcggaccagatcttcgtggaattcaccagatctatctagagaagaaacagggaaacaggaaaccagtaccttcccgccggtcgatgagctgatacgtagcgcgctcaggcgactggcccatggggcggctggcctcaggcggggcaagctaaaaagagccctcccgcccgccgcggttcgggctctccttcctgaacaaggtcgagttcggctccggatccggctgggccacggggaagtcggaggcggacgggtgcggacggagacgggggcggagaggtgggggtgagcggacagagcgaagatgggcgtggtcgctgtggatggaggcgaggcgggtgggtgggtggacgggtgaggccgtgagctgaggtgaaggcgaggtgaggtgagggagatggggtggtggagtttgacccgacgcggcggggggtggccgggtggggcccgcgcggccagtgtagggcgcggtggcgtcgaggggaagggtgcggcgcggtgggtggcggccagcctcgggatccgggtccagcacgggcgcacgcgcacctggcgatcggatgggcgtcggccgatacgaatatgcacgcgcacctggcgatccgggt

SEQ ID NO: 3487 - DNA, 1229 bp, Zea mays
ccccggtatcctctataggcgacctgcagtggtacccaccactgaaggaagggttgattcagaggacaccctttccttcctcttcttcatggtgacaaccttgcgcctcttagcaggaaatatcagtggcctgatgtgttccaggctatgatcaggtctatcaaatattaagagcaacatgtaaggttgtgctcttaccatgaaaagttgaaaggaatttcaagctgagtgctatatgttaatcatctagttggaaaaatagttcaagtggacaagtagatcgttggctattgccacgggctcatgaaaacaaaatattgtcatcagtatatcatgattagttatctattttacacacagcacttcagataaagttaataggtagagaaaatgtaattaagccaagttagtttgactgctacagaaacccattaaacgctaagtagctaccaccacctatcaaccagctagttaagcacaactacgcagaatggggagagaagcagacaagacctgagcttctccaacggatttcccataaaaatgccacacttcgggcaacactttatgttgtctttcgcaaccttgtcatatatgcatttcctgcaaactgatcaaaccacgtcgtcataactcacctatggctgaagcaatgtaagttcaggatgtttacgaattgctagcaacagtgcgattttttttttttgacggcgctaggcactgccattgagcagccttatccaggtccaggcgacaaaatatgtgcgcattggagaacaacaatgcgattttctttctttctttctttctttcttgaaagcactaagcggtgcccttgagcagcgacaaaacatgcgcgcaaggagagtaatcgcactcagtggttcaatagccaatgcaaaaccgattgcaatatcaaaatcgaacggaacccaatcggaacaggcaaactgcaacagggaaagggatgccattcccatccccggcggccaggacgcccacatcgacagactgggggaagcgcctctcaaaaaggagtcgcattggagcttacaggcgtgtaggcactcggtgaaggcggtggcgtcacggaggagtccgccgcagatgccgcagctgacgcacggcgcgacgaccgagccgcgcacaagcgactccggacccgtgccgccgcggcccccctcccgcgcggcggcggcgcgaggtggctgatcagactgcaggcatgc

SEQ ID NO: 3488 - DNA, 1066 bp, Zea mays
tacgccatggatgtgaacgtggagagggcggaggacgtgctcacgcacaagcggctcctggagcaggccaaggatccggctcatcgcccggctttcgcggtgcggtccgtgcaggtgatgatttttgtatgcattttttaactagttataaagtagacaaagtcaacacatgtttttctcgtttatctattcgcaatatggttttgcctactgttcgttttttagttggttggttcacttggtcgtgacaaattcctgcaatggagaattccagttctctgatcttttccttactatacttatgtcatccgtgcgaaggctgccctgctggactcacctgagttattcctttgcgtctattccttcgaaacagaaacggcactgtttcacctgattacttttttaagtggactaatctttcattgagatgagctcattgcctcatcgtgctccttttgataggaaaatctaacagatcgtcgcgagcttttcattgccaaaagcatgaaagtaatgtcatggttttgcattgatgccttgctgtttagggtctgtttggttttcgatgttcagagtggcaacaatttgagtagtcagggtactggctgggctaacgggaaatttcactgtgttccaagctgaagcttgtaatggtttcgttctacttcactatctcaaatttgggttctctcagattctgactgcgtgatattatcttaatacaagcatattgtatttatgcatttttctgtaaatgcataatcatgacaatagttcaatgtctatgcattttgtgtttttgaccaagtaaccgtacctacaaattagagtttaagttttcagcatgtgccaatacccttgctttaatcgataatatgttattgttcctgaatttaaactcttaattctgtacataaactttattttttttatttttttaactaactgctaaattagcaattaatatgaaggccttcaactattgttggtcattatccttattggagtcttgattcattaggtatctccaattcttgatgggaatcagactgattctgattcgaac

SEQ ID NO: 3489 - DNA, 1109 bp, Zea mays
gctccttgcacggacccgatcagtctacctgcaggttgtactggccagctggtgcaatgtaacttattttccccatagaacccggtggaagagcaacatggtgctgcatcaatgtgttctcaaaaacagtctgcaacacacacccagtccgcaatcattaggatgtaaacacgggttaacagcatgcatttacatatcacagacagctagtcttcagaatgaagccatagatggaagtcaatgtcataagaacttacagcgtatagatctccacctgtgatgacatctccaacacctggaaatatagcacaagaaaacctatttagatagcatcaaagttcaaatacaacttagagataacaaaaacagcatgcaaaaccatttcaacaatggaggtactatgttaagtcactacctagcttcgttggctgaaattcccacaatacatctttgtcaagggcaggaactgaaacaccacgaggaatatacacatctcctgacttaatagcgatggtttttagaggtcgctgcaaacataatagagggcgagtgaggataatagacaaaaaataatgtaaatggccgcaaaagtaagccctgtcgtgttcagcacacctggataccgtcaaaaatgtttccaagaattccaggtcccaattcaactgaaagaggctgcatgggaatagccattacatgttaaatgatagcaaaagaatgatattaaaagatatagtaagatctgaagacaactaaaacaaacctttcttgttctcaatacagggtcattaaccatcagtccagctgtttcctcataaactgcaacacgcaaatgacggcactcgcgaggttagtaccgtgtattcaactggaaaggagcttttcatgcccatgggtgaataatttattatagatgatctgccatgttgcataccttggattgtagctgaatcgccctcaagacggataatttccccaatgaggttatcatgtccgacacgaacaagttcatacatggcagcaccacccattccatcagccacaaccacaggtccagagacctgcaataacccagcatcaaggctaatcaaagtggggcttgttatatacat

SEQ ID NO: 3490 - DNA, 1147 bp, Zea mays
ttgcatgcctgcagtctaccctcctgcaaagggcccatcctcatcatatattggaacaccaaattttcattggctggaaaatgggtattcttacctaaacggtgctgcttctcagaaaagaagaaatagtggcggtctgaataatacatttgcagacagcttcccaagtacatcttacaccggcagttcatgtggcagtggtgattttcaccattttcaatgggcagaaaaggttttcaattcatatggaccgtatcaccagcaaggtgataacctcagtcatccatatggcttaggtttatcacatcatcaaagatctgatatcgctcatccatatggcttaggtttctcacatcatcaaagatctgataaactcaacacagcaagttacgtggagaggatccgaatgagacctgatgttggaaattcagtaaatttttttgatttatcttcctatgctcgcttgctgaactccccgttcttgtcctcacaatctgatacatataaatccattgatgaagtgatgggaagagtatgcatgctgtcaaaggatcaagatgcatgtcgctttctacaaaaattattatcagaaggcactcaagaggacattgataaaatctttggtgaaataattgacaatgttggtgatcttatggtggatccaactgctcactatttggtgcagaagatacttgaagagtgcaccaatgaccaaaggacacacatgattcgtgaaatcactaaagcacccataaagcttcataaagcttcttgcaatgtgcatgggtatgaacacaataacctttactattttatcatccctatttgttgggttttttttaagaaaggcaggcgtgatgcagtgttgagagctgtcttactgagtgaccaggtcgtgggttcaaagcatttatctcttctctagaccccactcatgtgggaatctcctgatactaggtctgctttttttttatttgttggattttttttctttgatcttgttgtgaaaaatttcaggacccgcgttgtgcagaaggttatagacaccatgaatacccctgaccaagtgtcaatgttagtgtccgccttaaatactggaatgatgtgtttaatgactgattcttatgggaatcatgttgtggaccac

SEQ ID NO: 3491 - DNA, 1121 bp, Zea mays
tccagtggccgttatctcttgtaatttcaaggaaggctttgacaaaataccaattgatctttcgcctattgttccactgcaagcatgttagtcgccagctgtgtgcagcatggcaaatacaacaagtatgaatgaacccttttcctcctgcaaaaccagtttaacatttttgtgtacgccaactttgactggatattaactcttggacaggcattccggtctgtcaagattctagggacaccaattctgcggtcatcaattctttgtcgtagcatgctcaagtttgtaaatagccttttgcattatctaacatttgaggtaaaccatacatatcagcatgctaaactattcttttgatcatgctaaaccacagataacaccatgcattgtctgacgtttgaggtaaaccatacatgttgggcaagttctaaactattcatttggtcccaggttcttgaaccaaattggcatctgatgcatgaccgccttcaaacagcaaggagcatagatgaggttttgcacttctttttttcaatttggggtgttttttgcaaataaaaaaatctgcgatgctaaccgtgcggaatgccttaccttttgatgttaatactgcttgcaggttatccagatccatgatttcttcctccagaagtgtctaaaagaatgcttgctgttgtcgcctgaactccttgtggtgtgtccttttaccctttctcttaaaactaaaagaaaagaagataaaacagtaacttttggttgatagctttttcttggtaccattcaagatttttttttgaaagaatcaattcttatcattgttctatttatttgcattcacagaaagtcgagaagctgaaaggtttatgccttcagtatgccacttccatccagatcttgatgccatctatcgatgtcgctaactctgagaacacatcgaagtctaggaagtcaagatcaagaatcgataaatcacaggacagagaccagcagctgaaactagcatcagagaatgttgtcatgtcagagtcgatcctgtacgtatccgctcctctatctacccttgaaacgctggtattaaattaagttccaccctaacatctaacatcgcattggtcttggct

SEQ ID NO: 3492 - DNA, 1316 bp, Zea mays
ctctggtgacagcttgtttgttgagattggaactttttcgttgctgcaataatgacaaatgtgttcatatatgaacaatctttctgtatcattggtctgcggtttaactggttaccactttgtactcttgtgctaggtgagtttagtcttcctatttggagttatagtgtcgcgtacaaaatggcatggtttcagggtcctgttcttctggatgtgtgtcagtgtgtgtgatcgcacttgcatatttgtttgggcaggttcagcaaattgtccgcgaggaggagtgggatgccttcatgagtgttctacggaaaccattaccagcgacttttagaatcaatgcctggtaatgctggttactctgaagtgaaatcatgaattttcactgaggtcttaatttacttgtcggattccttggcttgagtaactccacatggaccactgtcgtcaaagatattcatgttctcttggacgtgatgcccatcccttcttctcgtcctgcgcccggagccttttgttatcgaaggctggctgctccatgacttgtatatctggttaatctgccattcaagtagtcatgtgcaaatgtggtattagatagtttatttgcagcctgcgctttatggtactccaataagggacctgtacttctgaactatcttaggaatgggtgattgtcacttattataagactcatgcagtttcagggtaacttcaagtgtgccattaccaaacctttcagtgtaattactgccaaaagtttattccattaggcaataccatgctattctcacaggtttacatctttactttccttttcagttgccagttttataaagatatctgttcaaagttagaaaatgaatttaggcgatctttggagagtgaggtagccttttctctgtcgtctatgattttctccttacttgatcattgacattttttaatttacaatttaataactcactgcaaaggtcagtgatatgcatggagaagatgctataactcccttgccttggtatccatgcagtcttgcatggcacctgaatttctcccggaaggaattgaggaaaaatcaggcactcgaaaggtaattaattgtagcatggtgtttaagtcttgccatgacatgaatcttgcttggtctatgtagcgtaaatacgagacacttttgcctttgcattagtgaatatatggtagggatttggggtggggtggagatgtctgagatggtcttgaagtgggcttcaaactgagttgtattgggtcagaagaatcaggatatccaataagcatcagatactggtactgcgtgc

SEQ ID NO: 3493 - DNA, 1310 bp, Zea mays
gcagcaccgctatgggggagcacagctcatcgcctacttctgggacaggaccttctgcgtggagcgactcttctgcgctgctccccttctgcgccaactttacgcgactatccacccagagtactatgtctagcttcgtctccgccatcgactccgcgctgttggaggttgggcgacgcgtagaggctggcctctcgtgcggttgcttcacctccagcattgccaccaagcaggaggttcaaaactctggtatccggcaaggggcgtatggtgcggccgtagactctgtctacacgagggatgccttccatagcaaaacatttcttgactacatctcagcactaggaaagaaaccactggccggtgctgatcttcttgaccttgctaccgcaaaagcacagctgagggccttgaatcgctcaaggggctcaagggacctccctgagtttgagatgtttgagggcactgatgagattacaaaaatgacacacacagatggagatgatacattgagtcgagggaaaaagtcaaagcgcatgaagagttcatcgaagaagaaaactgacatttccaagcatttagatggactcaaaactggttctgttgctgacagcagaacattggccaagaaggcagtaggtgatgctttgagtgagagaaaatctggacgcacactgagatccacgagtaagaaggaagatgctttagagggtttgaaaaggctggcaaaggatggaattcaggaattaacagggaaaagcaaagacgcccccattcttaaagaaaaaaatcaggggcatggggcaggctctgcacacaagaagggtagaatcacagaggatgggtatcatagacttggagatagcaatgccgaggatcccatttttcctggcaagagaagattgggacataatgaaaactcaataagcaaacgagtgcccatctcagagcatggtaggaagaagaagaaactttctgaactcatggcagagacaggcaagcctaattctgcatctagtggtaagagcaaaactcgagggaagcgttcgttgcatgattcagctgagaaaactgaggatcctgaacatcactctaaggatacattgatgactaggaaaagaaagaagctcaacacattgggggatttgtcttcactgtcagagcctctctctcgtaagaagtccacaaaggttggagaactgatgagcaaagtagctgggagcagcatgttacaggctgcacctgctgtcaaagctaatagtgcagtgtctcagacaaaaccacgaagggctaagtacaggcaagtaaat

SEQ ID NO: 3494 - DNA, 710 bp, Zea mays
ttggcatcctagtcgcgcgcctccagagtctcccggtgcctcctcccgccgaggtgtgactccagcattttctcgctgttgcattgcaggtcgcacaccgagcagtagaacctcaagtgctcctcgcgcctggcctgtgccttctcccggtgccacgggcccccgagatggctgtagtagttcaattcagtgtagcacttggcccggcagagtgtacacgtccatctgttctccggcacatcctgcttgccgtcttgctgcgagttcgtcgcgatgatcctgctcctcgcaggcgtcgcttttgtgtcaggctcagggctgctgctgttgctctgagatggttgcagtgctgcgacatttgactggtgccgcttgccggcaaggtgttgctcaagttggcgctggctagctgggttagcctggcagatagtgcagctccattgcccgagtggcttctgcttcttgacaggtgagcttggggtggtcagcttccttttcaccccagcggaagttccctcagctgttggctgtttcacaggaatgtttgtttagactccacagcactagtgagtaatactgaatctcaaaacaaagaataaaattggggagaatagtgtatgcactgccatgggtttcggaaactcactcaattgtgacttggttcaatatgtctgtgcttcgttcatgccggcgggggtgggggggggggg

SEQ ID NO: 3495 - DNA, 1050 bp, Zea mays
tttgtactggtctattttggacccttctctatcttcttaacttaataggacgcacgagcgacaaaattccaccaacaggaccgtagaggaaacaggaatgttgaaagggcataaaaggaaggtagatgaaaaaggacaaagggttggctcatggcacaaagtgggagggttggcccatgttacctgttggtggtgacagggttggctcatggcacaaagtgattgcgtgatgtcaaggaaaacagtattccataattgtctggtctacttttgatcgaaaggtagagccaaagaattgcactctgaaagttaaacttcacaggcaagcaaaatcaagactcaaccagcaacaaacactgaaagaaagtaataacaataatgttatattaactcaaaattattaatatagttaagccgcatttcactatctctgagatagaatagtgggttggctcagtaggaaaagaaaaagaacatcgggtacaaaatatgatgaacctgcaatggataatttaatcaaatgtattattacttagcactttagctgagtggacaacaaaaaattacctcaatttctcagggctttcctccttacaagtctataccctatgaggttatgacactgaagtttagcaagattcttcaacatgcaattcttttggaccaggcatatttcaggtttcataacatgagcctctaacttatactcttattgctaattaatacagataggtgattgtgattcaatcaactatcatcatcatgccctaggtgaaaaaacaaacatgaatggcaacaataatgtcatgtgagaagcataaccagcatctatcactaccaaccagtactaagtttagtgatgcagctatatgtctaggagtgtgtcactaatcagtgctaccctccagatcaggtgaaaattcacagttaacaaattgacactggctaagaacatcgggattgcaacatgaaacagaaagggaagaaatggcacgcaccgctgccgctggtcatttgtagactccctgaactcaatgtccctctgtcgct

SEQ ID NO: 3496 - DNA, 1187 bp, Zea mays
ttacacacactacaggttccgccctctcactgcctacttggcagtgaactacctcgatcgcttcctctcgctgtctgaggtgccggtaagaatcgcaggatcactcttaaatcacaaaaaccatttttttagttcagtaatcagtgatgtgtatcgccggtgcatgccgtcatttccaggacggcaaggactggatgacgcagctcctcgcggtggcgtgcgtttctctggccgccaagatggaggaaaccgccgtcccgcagtgcctggaccttcaggtgggtaaccgttctgcgtgttcggcattgcagcgaagatgcacaccttatctctctctctatctctctctctctctctgtgttgttcatgcatgcgcaacaacaacaagcaggtcggagacgcgcggtacgtgttcgaggcgaagacggtccagaggatggagctcctggttctaacaaccctcaactggaggatgcatgccgtgacgccgttctcctacgtggattacttcctgaacaagctcaacaacggcggcagcacggcgccgaggagctgctggctcttgcagtccgcggagcttatcttgcgtgcggccagaggtatacagtacagacgcaacggacatggctgccgttttaacatttgtcgagggaaacgggtgcatggaccatcgatcatcacgccgtttcgtacgtgctcttgtgaactaacgaacacggtctgtgcgcgtgctgttgcctttgttgcgcgacaggaaccggctgcgtcgggttcaggccgtccgagatcgccgccgcggttgcagccgccgtggccggagacgtggacgacgcggacggcgtcgagaacgcctgctgcgctcacgtagataaggtacgtagtgcattgaaggcagcaaagcgccgccatgcatgcggaatgcgatgcgaactcggttccgtcgtctagtttgtttaagctagtaaaacaaatgcgatcgaggccacacggggtcggttcgagatccagacccattcatggctggaaatctcgtactagccgtgcttggcgtaaacgcgccggccccggtaacagatgcgtacgtgaagcgcatttatgcccgcgcgtttgggtgtgtgagctccattgggtggcgggttatttaatgcgcgctgttgcctgcctctgtggttctgtgctgtgtctgc

SEQ ID NO: 3497 - DNA, 1258 bp, Zea mays
gcctgctactatcctgtctggctaaatcatattcaagcaatacatggatattccagctgaaaaatgaatcacatgtcagtaaaccggcagcatccagaaagcacttaaattcgtgtatgaagcagcaagtcagtataactgcaagagcaatgtgtttgtaattacttcttcagttgaataaaatgaatatcaaggtacaactagaaacacataaaatgctaagaaagatgtcctgggttcaactattaaatttatcaattacaagatactagagcacctgcattctgaggtcaaaagtaatatggaccagggagttgtaaacacttcagatctaaggagcaagtaacataccatgattctaggcagattttcgaagtagccaggccagcatgtagcagagggcagcatcaatagttgataatgcaacaataaacatagctaccaatacaagagtaagtgtggccgtcttcagctgccaatgatgacgacttgattaaatcaagaggtaagaaaatatcttttttttatgcagcagctttaaaaaattttaaaatcaaggcgcaaaatcatcacaatcatgtacaatgcaaggggcataccgtgtgtagaaagcccggccactccaggtgcttcagttgcctcggctgctcagctaagaaagctaccaatcccttgaaacccctaatagtacaaagtaacagaattcaatttcacattcagacaaaccaacaaggggggcaatcctcacttacacagcaaggtctctgaccactgccagccaaaacggctcatcatcatcatccagctggtactcattggtccggagttcctgacgtccatgttctgacatagctgcacattttcggaagcttgcaggagcagattggtgaacagttggccgcgtcttggcgatggcgacctaaaatgtcaagcatgtaaactgacgacatatggaaatagcccgtaattggttcgagccattgatgatacagcaccttgagaagtggcggactcctgcggcagtacaacggagccgcgctgcacgacggcagcggagacagacctgagaaggaaagaaattcggggaagagtaacgaacgaggcaaccaagaaagacgatacatcaagggggtgaagttaggcttgagcggttgcaacctgcgagcggagccagcgctcctgccgacagagcaaccattctcttctcccggggactctgatgccagaccacagagacgaggcgctgcaggcatgcaag

SEQ ID NO: 3498 - DNA, 586 bp, Zea mays
gcacaagctccaagctcccatgcggtctatgcaaacaaacaattgaagatgcacggccagggcatgtctcagcccatccaggcattcaaacacgccctatatggctgtattcctttacactgtgtaatgcatgtgtgcaaaaccagatcagagttattgttacatgaaccgctacaggatctccacaagatcaggctgtggcaacaggattctgttcctcgaccttgctctctccaacctgttccagtatctgtgcaggcacaacatccttccctttgtcctcctgcacatgtgcaggctcctcttcattcgcgtttcccttgccgccttcttccagctctttcagctgcctcaggatgtcttctctcttggcctgtaggtcatgcaatttggcatcgatcttctccagttttgccttcagcttcaccggatcaatcgtcttctcctttgcacccttgtgtttcctcttcttctctttcttttccttgtcctccttcttaccttcttcgtcttcatcgccatcggcctctttcttcttaccatcttcatccttgtcaccctttggttccgatccatccttttcttt

SEQ ID NO: 3499 - DNA, 721 bp, Zea mays
gcatgcctgcagattattcagatttcttacactagtagtgagcttgatttgaattttgcaagcactgaagaactgaagagcgccagaacttttaccaagcaagcattacagcaatgacgcagctctaactaactttacaaccttacaacttggcagagattaatctaagctccagcgtcccctcctaatagataatctaagaagaatcagaatgcttaggaacacctgcctctgttatttgacttgttgcagctccgggcagaagacagatcagtggccgttggacattgcagtagtggtgacaccgtcacctttcacgtcatagaaccttcggtacttggagtcaacgtgcgtgagataatatgtgcctacagatagcaaacttgtgtcttgactggtcacgaaatctttcgccccataccggtgctccatcagtttcagtacctcgataaatttctttggcgggacctgcatggaacagaccagcggattcgtaccaatcttaaggttcatggggatagaccaatgcagcaattgaactatattatagcaacctaacccaaaccactttatgttaaacgcagtggacttcagtgataataattggagaattttttttggaaaaaaatcaataatacttaccacatgtcttgccttcaatttcttggaaacatccattatgtttgcaatgtttagcaagctgaaagggtgatggccctca

SEQ ID NO: 3500 - DNA, 1032 bp, Zea mays
ccccacatctttggcaatggtgctacatgtcaaatacacaaaagtaaacacaactcctgctgagaccataatgtaataattatttcacttttcaattggatggcaaattcagaaacacagtggacatggcaatgcgcatctaatttattgaaacaaacaggtgggacatttttaggcagtagattcaaagtttcatagcaagtatttcgcttcatgattggccatatttacaagcggaaaatgagaaaaggaaagacgatggagaacatgaaccaaacacagtgattatggtttcgacaatcaacaatcaatgaatttatttaatcgatttgctttgcagacttgtagtccaacacttcatgagttttgctagtggtggagcggaaataagcagcatacataaacgtaacagaaccaaaaaaaaaagttccatgaaataaaccaattatgtcagttttatgggattatggagaactaaaatactaaattaaggttttgaataacaaaacagaaaaaggagggttgccgggtaagcatctattcagagtacgatcactgcaagggagaaacacaagagattaccttcctagtaaacaacgagaactgaacagaacaaccctgacagtgggatgcgtccaccacccaggtggcgcctcgcatggacggcttcggcggcaacccaatcttttccaacatagctgcctgtgtggataaactctcttctccctgcgatcatgaggaacctaaggtaaatctcggatttggttatcttcgcaaagaaaaggtaggccaacacagatttagatttaatttataatgctcgtgcagaacaaaggctggtccgaggactcattccttgattaccaataagcagataataacttgattaccaagtagtagagaataatcgatccaaggcagatagatctccccaccactccaccagaccggtggaagttaggcgggcggcgtcagtaacctgccgagcgtggatccgctgaggcaggcgacggcggggggcggctaacgcgg

SEQ ID NO: 3501 - DNA, 988 bp, Zea mays
aaatttaccatatgaaggaacgagagctctgaacatagcatgtactttaattccttattagttagaacgcttataagtcgatcgccagatgtacctgaaacctgggaggtacagtgtgttcatcagcttcactagattctgaacttgctcgcactgtatctcgaaaatcctcctcccctcgctgaagctgctgccgaaggccgtgcgcgagatcacgtcgccagtgaggttctggaactccggccagacatctatctccctcgctccgtcggaccccacgtaacccgcccatctagctatcaactcgtctgagcacgaagcaaacgcgggcaacattttctgcggggcaaccaagcatcacatccgacggcaaatgtaacgaactcttaatcgatcaatccgtccaagaacaagctagcataaactgttttaactgtaagagcagtgaccttgagcttctcgaggtgaaaggccgggctgatgagcttgcggtgcgcagcccatttctcgccctcgtggttgaccagcccgctggccagccgcctgacgatgccgtcgtgcttgcgtttctggaagtgaccaagcttgttggccaggatctcccgcaccagcttggggtcgttcacgatcacccttggcgtgggaccgagccaagtgacggaaactttacctgcaattcatatttattttccttcgctggcaaagtgccaattgcattcattgtcttactgtgcaaatgtatatgaactgtaaactcttctcaaacaacgccgcgtgagtgcaattctaccatgttccctgatgacgttgtagtagaggcgattcacgcgcggcgtgatgtcgtgcgagagcggcatggccttggcccgggcagccacagccaaccgcgcgagctccttgaggtcgccgaacgggaagcggtaggccgtgccgcggaggccctgcgaccgcagggcccgaccgagcctccgcgggacgatcagggtcg

SEQ ID NO: 3502 - DNA, 1339 bp, Zea mays
tcagtaggaattatgtggatgcagggctgcgatcagtttcatcaagccaaggatggagatggatgggttgaaaccagattttcatcctccatcaaggtacacttgtgtcttgcttttacaatttattatatggaagaacttacgaacatcgttgatttttgtaatttaactgctgaaaacttgtatgagtggtttcaaacaaatggagtgacgtaaatcaaagacaactggcaattgtgtgaattctgtaattctgctggtgtgaatatttgttgtttacagagataagtatcagtttgttttgaactaagctagtcttacgcttttttaggctatttttttggtttgaggttccgccattttaggtgtaacagaccaagtatttaagacatttaaccatatgtcaaatatttgaagttgctatataggtggattcctaaagtacacttggtcttggtcattcagcttctatctctattcaatttatttgtttcgcgtacagaacctttggaagctactcgattatagaatgcctattttccctatgaaaacgttctgagatgtttcttttagttcattgtatttgtatttgagcaatgtgcaattttcacttcagatggaaataccacgagcctttgtttgtgccgagagcaaaatatttgatgtgtctgagtgggctacctgccaggtgagcgtccagctcgatccaaccgattactgttgctgctattttgatgtgtgacttacagctttgaatattcacatgaaatacttcattgttccattttggggaatacgaatttacttcacgaagaagcgggtttactttcctaacggaccttactgttgctgatcatgcagggaatggagtgtaagcctaacactcacggtccaacttttatggtaaacatggtcggcgcagataggatgcctcagagatcctacagttcccggtatcccttcagcttggacgcagagatgatccccgacgatgaattcgagatgtggcttcagcaggcactggcgtcaggcgtcttcgctgacagcccgaagcgcaggaaaagctggagcccgttcaaactgcctcaaaagggaattaaaagttggcgaaggtcgtcatgagggtgtggcattatgcagcagctggggtctaggcggctacagcattggaaagaaggtgataatacaaggcttcatgggtgtaaatagactgaccaacaatttgcctggatggataactaatttttgttccgaaggagaaaaaaggtgaaaaagaaacactctgaacgaacaggtataaccccatgagttgaacttggttccctctgcaggcatgcaa

SEQ ID NO: 3503 - DNA, 594 bp, Zea mays
cttgcatgcctgcagcacagtaattaatgctgcatccaagtaatcactttcaggttgtttagtgtacagtatctctactgggaatgttcttccaagaattgtgaagatgttactgggaaaggttctcatcaacaataatttcatgggcttcatcaagcatgataacagaatactgggaaaggttctcatcaacaattatttcacgcagaagcataccatcagtcatgtacttaatcactgtgtccggacctgtacagtcctcgaaacggatagcataaccaacttcctctcccagccgacaaccaaactcttctgccactctctttgcaactaacattgcagccaccctacgaggtcgtatgcatttccttccagtgattccgtagcaacgcacgggtatatacctagttattatatattcccgatgcgatgttgacgctccatatatgcttgcccagccagtactgtactgcggatgccggaccacatgccatggaattcaagatgattcgaggaaatttatggcacggccatgcatggggctgctctgtgttatctggacgtacgaccttccatgacaacgatggatccagc

SEQ ID NO: 3504 - DNA, 1199 bp, Zea mays
ctgctcggtccctgtgagcctctacagtcgacctgcagatccatctcctgggaagaaaattttacgccacatgtcagtactcgagcaagctaagcaattaaacttccagggagataaactagcgtgcagagtattgctgaactacactaacccttctttgcatatattcaacttcagcatacaagagctcattctgcatgcaagaaataaagggtgtattaattgctcatcagcacaaaagtcaaaatcgattacttaaaagcatattggttcctcataggcttggatgtatatatatgcacagctgcacacatttctagtctttgaaacaaattgcaaaaatgcctactttcattaggattttttttaaaatattagtgtcctcatttaaactgacaaaagaaggttacacatatactccgatccatctacaagctattttacatatctgtaccacagacagatatatcacacagttacttaatgcatacctttctagctctaatcttgtttatggccttctccagcttgccctccatctgcttaagctccctgaggcccatggtgtggattgaatctcccactatggtcctactagaccatttaaacaagttagactgcatatactactacaccttttgttgttgcgtaaaagaaaagccgaaacattgtatattagatttgtagaatttggtctaaatttgattgctgatacctgtttgcgttttgcaagctatcgatcgcctggcgcagcttgaaggactcctgctggtagtgctgcaagttaaagtatggatatatatatagtcagtcatcaaataaagcttcttctgcttgttgtgatgaataactgaccttatgctgatttttagagtagtacagaaaattaaaagaacatgacagagaatgtttagacttgtttgagctgaggaactattcatgatatactagctgactagctagatgccaaatcactaattgttgtttgcatcagtgaagcacagataagctccttgcaaaaaagcccttaaacatttctcaattttattttacgtttaaacagttatgtatataaactgaatatctttggacagaatcgttatgcagccatttcctaggatttccccatatgaataccggcgtggtttttaaatcgacaacataatcatgcccataaaaagcaagtataaagagagagc

SEQ ID NO: 3505 - DNA, 1356 bp, Zea mays
agccctcctgtgaacatcccttaaagcagcttctatgttgttttgtgagtctttctgaacttctgtcaccggccttggattgaaactctagaagatcattgacatcaaattcaacatgctgtggccgatgattatgttatcaactatactaatatccagaagcatgtggacgaatttaccatgccaatggaattgcacttttgaaccaattcatggcatatttcgtctaccaaacgaagcgggatccgcgaaaagctcagacaagtccagctgtgaatggttccaccattgaccattttctggaaacaaaaggtggacctcagtaggaagactactaactctaggaaccaccaaatcttttgtttacacttttctgtacttatttcaacgtaaaataaaagtgatattgaaagcaaaaaaacaaagatcaggatatttaactatagaatcaccttgttaatcatattccattgccccaagcttggtgcaacggttttctcctttccagattcgtggtatttcagctgaaaaagttgaaatacaggttcttggaattatttaaaaaatataaaacacaaatcatcaaactgagaacgttgcataatagataccataggtggaggcagaacacgggcttgcacattagccatctggttggccacagtgatcccaaacacctgtgccatcttatcagcagaatagttgttgtggcgaaccatctacacaagataaacattttacttatgacactttagttgatgtgacaaaacatcagaaataacaaaagataagacgaaagggaacaaaatgctaaatttcaaaagaaaatattcagtacaaaaagtttttttttctcgaacgcgcaggaggactgcacgtcattatattaagagaggaaaaggtccaagagaaccaaagtacaatgcccgtagggcaaacagaacacttgaccacaatctagaccctactcgtaatagcaggaataccaaaacttgctagctgcttagccccagccctctcccaacaacttaactcagtacaaaaagttactcatttaaatgtgaacacttgccactcgaaaaggcattgttgtcgaagccaaagttatcttggcctataccttaataatgctctcctccctatcctgaggacgtttacaggttgccttcagtatgttggccacctgtgtgtcgctgagcttcctagggtacttctgcccttcaatgattttgcacacctgaaaaaaaaaacattatgataaaactatcacatggtgcaccaggtgccgtgcagaaatcaccaaagatgaaaatgttacctccattggtaaatatatcggcttagaatcgttgcccg

SEQ ID NO: 3506 - DNA, 1387 bp, Zea mays
tcgacctgcagctaatcacttcaatagtgactgaatcaagaaactatatagctctaggcgttagctaagctttcctgtttgcatgactgcacttaaaggtgtacttcattgaaggaggaggtcaaaagttttcgcttttcagaagtataaagcattcccctttttacatacaactaggacggcattgttcaaatttataagtagcttctcagctcagcagttagcacctatgcagtccactatccgataactattctcaagtggctatctataataatgcttccttggaggcacggaataccatatcaagctcatggaaaccaccttgtgtactacgttggcaaaaggcgttcaaagtatcgccatagctcgcaatgcactgtatgcaggcagttgatcctcagttttggttaataaattaataaaaaaaaatattttattcattttgaaactcagctaaattaacgagtcattagtttgctgttcaacataaagcaatcacacacgtctatatcacaacattttactgcacagaagttttcacattttaactgtcaagcattttctggacctttcgatttcgtaaatcgtaagaggctttgtcagacacaaacatgaccgagtgcacaatctaaacagaatattcaaggaagcaaacaaatacaactacaagcaagagatttaatccaagatagtagttcctggtttgctttacctccattgcactgccgttactcatcagatctgctgaaaaccaccgagcatggccgttgcgcccacttcccttaccatcagcctccaagatcttgctcttacttcttgaactcttggacacctaaaaatcacaacaccaattgatcaaccacggaacagattgccgccaattgggacaacaggacaccagagcacccaccttcgtggaggcgccgctccacaggaccaggctccggcgcgccgccgccgcgtccccttcaagcagaccaccgctgtccatgttctgccagaacgcgtcgacgagcctcctcgccgacgcggacggcagcgtcccttcggcgacacggttgccgctgccacggcaatgccggctccgggacgactccgacatgtccccgcccgcgctggtccggtgccgcggcagccgcaccgcgggccgcctggaccgcagcctcctccccaccgccgccgggtccgagccccccgacgacgacaccgcgcggcgcttccggatcttgttggccagcctcactgtcgcagcggcggtagcctcgtcagcacctgctccttcctccgaatacagcctcggcattgcaagctaagctcccaagattcttctcgcctcctcctcctgctgttcgccgacaccagccaggaagaagcgcagagcaac

SEQ ID NO: 3507 - DNA, 1228 bp, Zea mays
aaagcggcttatgctccaaaggtttcaggaagaggtatgatctccctccctcccctatgccttgttcggttattcctattacacatggattggataagattggaaaaaattaagaataagtttgacttgtttgggatttaaaaccacccaatcccacttaatccacatagattgagagctaaccgaacaagccctcacaagtttcattgccacacattcccatcgcatgctttcatgcttcgctttcttttcttagtttgttgagttgttttcagttttcttagtctgtacacgaatacgatatgcagcagggccagatatttttgaatcaccaaccatattatcctgctttgcatgctaaaattcctcaaatcaaattttatgtccgatcgagaaatcttatttggaatttggcaagattagtttcacattaaattctgtagtaaactttggtggtaataagagcaaaatggcaaaacactgccatgtctacacgagatgtggttgaggctatttaataacagtgtcaacttttttgaagacctttctctaaatctacactgtattacattattctggaggacaactacgtataacatgttggagtcccatgtgacacatgacttccttaccacacacctttcaagtttcattttgcatgcaacttttttaatcccgcaatctaccatttgtagaaccctgggttcgacttttcacaggctcagttcagtggaacctgccctgacccaagaaccttcatgggagggatacgctccgagtgaagcaccctacctgcctatgtacgtttctactatatcctcggcatcttgatagatgcagcaggcgtgcttattatgtctgtaaatcggttggtgtctgttatggagataattgtcatggaaataattgtgatgtgtgaccatttgtgtgcaagcacattttgcgtgcttaattctagtttatagttgtgatcttcattcaggaactgtttgtttcagcgttttcacccggtgggtaaatgggtaacatttagtgcatgtttgggaacacaatattttcctagtttcaagacaacactgtggtatttaagtatagcatgatattttaggccaaaaggtgtttgagagcacatctaaaaatatatatattttaaaccatagttttatcaataccacgatatttttagggtctaaaaaactttagtttggaccaaagtttctcgctagaa

SEQ ID NO: 3508 - DNA, 944 bp, Zea mays
tgcatgcctgcagggtggtgagaagagagagcgcgtccttggtagaggagatcgatgttgggagcggcggcgcggaggaggacgccgatgggaggaaggtggggagcgacccccggtacgataagatccacgcggcgcggttgggcgagagctcgaagaggttggtggcgagcgacgatataagctggagcagcgattgcgcgcgcggaagcggcggcaggagcggtagcagcgacggcgaggtgattagggttggggcagcgctggtgccggcggctgcactcgagggcaggctaccatgtgaaggcgaggatgtgggattcaaggggaccggattgggcgggagcgacggcgacgaggttgtgagccccagcctcgccggggagggcaggtgcgactgcatcatcgcggcggctcgacggcggagggcgctgcaaacggacgcgagttcgagagagtgcttgataagctcaagccaagcctctacttcgtgggctcatgagccgaaaatgggcgggcttgctctagtagttactagcatgtgtttgggccttttatgtcttgagacccaactagtccgcgttaaaagctctctccttacctacccacccgccgcttcgtccaaatccctgttggcgtggcgggagacaagcagcatgccgcctccggttctcgtgcaaatcatcaaatcaaagtaaccatggacggcggatcgtccacaccggcgagcaccccacctacggcggcggagatggagtaccggaactggaagaggaatgcggctgtgctttacgacctcgtcatctcccacccgctcgagtggccgtcgctcaccgtgaagtggctcactcgctcccatcgaagtcctcggctcgtcgtgggcactcacacctccgacgaggccaatggtcttggacgcggtgcttccgctcccacctcgcctc

SEQ ID NO: 3509 - DNA, 1188 bp, Zea mays
ataaaggagtgacgggcacgtcggcgtggcaggtggcgcggcgccattgggcggggccgccgatcgacgacctgcgtgcgcgcgcggcgggagaggctgttacaaaaacagagaagctcacatcggccaagtggtttcgccatctccgccgcccctggatcactcggtgctctcctctcctactctcccattcagattctctaagaaaaaaaggtctagatctagcgagatcgtggtgtagtactagtagccttgcttggcgcatcgttgtttgttaacattacatgcttactgttgcccgtgtgcgtgtatcaccattgtatccatccatccatgtttgtttctgcatgaaacggtgcgtgcgcgcgtgttgtcccgggtgtagaaggctgccgcgcgctctggacgaagcaggctcatctcgtgctccagtgcggcagtgcaatgcaaaaactgcaaggccaacctgaagccttgaaaccatggggccggcaaggcggcaaggcatcggcacggccgaaagttgatggatcatgcgtctcgcgtctcatgtgtattattcgcatggcgaaatcgccgcggtggtgtgtatatataattatttatttacgcactgcgcggcgaccgacgaagatggcgtgcgtgtcgtcgggtagggggggtggcaaacgctttggcgcgtggtccggtgctcggttgcttaccagctagagcttgaaaggtgagacgctgttgtttttagatgcatgccttttgcgtgcaggggagagcgagggaaggatagctagccagacggcccctccattgcctgtagtgcagggtgttcatggctgctggtgttcttggtcatacagtatgatcgacgacggcgagacacattcatttggtagaacatacgccgcccgccccgataagaaaaaaaaaaatcgctcgtctaggttgccgagaatgcacgccttcaggttgtactccctccgtttctttttatttgtcactggatagtgtaattttgcactatccagcgacaaataaaaagaaacggagggagtataaattattaatgctatataggacatggagttcagagttttttatttcaaagaaaaaatcagagagataaagagagagagcgctgctgatctgtatatagaaagtagctaggtcgagtcttcctagttcctactagtt

SEQ ID NO: 3510 - DNA, 1007 bp, Zea mays
aaagtaaaattcaagatcgtctcaatagcaaaaaaggcagcgtggggggcatggaggctgaacgactgaagcatacggcatgtcgcatcgcatggtatatctaaacaagaaaaagggggaaagaagcgatagcgataggccatgtggacgtgtcacatgctggtcaggtggaagtcaattaggtcatgtaaagaaatgcagaatggccatgactcatcagagggagatgggaaattgccgaccggtgtataatacgaagtcttggacgtggatgagatctggaacttttttattcctgcattgcctcaaatctggggtaattttccttttatttttatttttttctggtaggagtacctgggagtctgggacaggtcagaggcagctgctgctgcggatggacacgcgacacatccgcagcggctagccaatgagcggcgaccaagggagcaggtagtaggccgtgttctaggctggccttttccatcgcttttctcgccggtattattagcgcggatcgttcatcgttcgggattggggttctgactcggaacctgatcagtgagtgtggtcttctgaaagcgagcaaaggaggatggggttctccttcttcacctcccgagccggtgctcgactgctggacgggatcgcgcgccccggcttctccaccgccgcgcttctgctcacagcggccaggtgcgagtgcttcctccgtcgctttccaccagaaaccccccgattttgctctctctctctctctttttggaggagggcggttgtcgcgtgatttactgctcctttttctgttcacccatctgtttcttcccgtccctttgatttgctctcctgttcgaccatcgtcgtcaactgtgaaggccataggatcatgtttcttgggatccatctactgtgtttggatagggaaaaattcataccttcggtttggttccagtatttcactttgcatatttgggctgcatttgcgagctgaaagattcgctaccgct

SEQ ID NO: 3511 - DNA, 1099 bp, Zea mays
gcagacagcggtggagaaagagagcaggacaagggcatcgcttggcaaccacaccacgacgccaacatactatcagctaaccaacagctccgttgccttttcctgtggctgcgagctaacgatccagtggaagtcacagaaatcgcagagaaatcaaacagcgaagatatctttaaaaattgttgtgcgattccgcgaaattaaactaataaaagtcataaagtttttctaaaaatagttacagatatactttattattcaatatactaatatatcaaactgtagaacctaattcatccatatgctaagacaagaaaattggattttttgtacaacttaaaataacgtgtttcatacttttaactattaagttcacaaaaacaggactcaaaatattcatacttgggttccagtgtcattttagacatttttatccttctgcgctctctgtgcccttatgttttttttttttttttgcatgtgtacgcatgtaatctatagatagaaggttaaaatatctaaaacgacattgaaactaaatgtaacatctgtttaagtcttattttttggagtcaatattacgaacgataaaagtaggaatcacattattttgcggtcccagaaatctatatctatctagccttctcctttcccttgcccagtttacttactacccacgcttggcgcgtgcatcggatcggatcccggccccgcgtcatcccttcctttccacggcccggtcgtcgactgtctcgcgctccactttccacggcgaatccattcttaaatgatctacactgctgcataaacccctgcggccgggtagtctcgaagactccacctaaaacggccaggccagacttggtcgtgccggcgtgcggcgtgcccccgagctagctgtggacctgggagccacgacggcgatcatgggctcttcttccggggcgccgctgctcgtcgctcacccgagccgggggaaggaggacctgggagatcagcgccgcctccgctggtgctgcggcgtttcgtcggaagggcggtgggcggaggcgacggcggaggccgggcggctggcggcgctggcggcgcccatgatcgc

SEQ ID NO: 3512 - DNA, 979 bp, Zea mays
aacgtacttggagggcactctttgatcttcatcatcagagtaatttctacatattagagcgcgacgcaattgagctcattcagcccatccatgttagccgaaaaagatagacctttcgatatagcacattaacggtcacagacacggagtccttgttaggttgcctagagagagtcatgctcgcttcatagagaggtccagtccaaccacgacggtgtgccctgttatcgcctccatcatcgaggtgtcgtaccggtcttactaccgggctggtggcgatgcgatacagtggtagcgacaggccgcggcaacgacatctgagggtatgggttgccctagtgtgcaatctgcgatggagggcggtcgtggctgcggtcgaggcccgggtgcacacgacgatggaggtatggccgacctagagacgacaatgggaatccgatcctcaattcctggtagggaattcctcattagcagatggggacggggaagaaactccccctagggatataaacgggggaaattcatcccccaatgagtaaacagggatggggacggagaagcattccgtatccccgtttcacgcggggacccgttaaatttgcatgtgacgatattttcgtgtactagttaacgataaaaataaataattatcttgtcaagagaccactaattgtacaaatgtgtttattttgatgtatatataatgctttcttgcatctgacaatgtgtataagtgacaatgttttacattaataacaaagaacatatgtcctaactataatttaaacggggatggtgattcccgttagggatttatccccatggggaacggtgatagggaagaaatgttccccgcaagcgtttggggaatcctcacggagaaattttttcgttgggagaacgggtatgaagagctattcacggacggggaattttccattgctatccctaggtcggccctacgtcgatgacgccttcg

SEQ ID NO: 3513 - DNA, 1114 bp, Zea mays
gcatgcctgcagctggaggtggagcccgcggtgcaggacgcgcgcgacgaaggcaccgcggacgcgtggatcgagcggaacccgtgcctggtgaggctgacggggaagcacccgctcaactgcgagccgccgctggcgcggctgatgcaccacggcttcatcaccccggcgccgctgcactacgtgcgcaaccacggcgccgtgccgcggggggactgggcgacgtggaccgtggaggtgacgggcctcgtgaggcggcccgcgcggctcaccatggaggagctggcgcgcgacttccccgccgtggagatccccgtgacgctggcgtgcgcgggcaaccggcgcaaggagcagaacatggtgcagcagacggtgggcttcaactggggcgccgccggcgtgtccacgtccgtgtggcgcggcgcgcgcctccgcgacgtgctccgccgctgcggcatcgtgccccgcaagggcggcgccctcaacgtgtgcttcgagggcgccgaggacctccccggcggcgggggatccaagtacggcaccagcgtcacgcgcgagtgggccctggacccgtcgcgggacatcatgctcgcctacatgcagaacggcgagccgctgctgccggaccacggcttccccgtgcgcgtcatcatccccggctgcatcggtggccgcatggtcaagtggctcaagcgcatcatcgtcacccccgccgagtccgacaattactaccatttcaaggacaaccgcgtcctgccgtcgcacgtcgacgccgagctcgccaacgcagaaggtaattagcagttcatgtttaatttattactactcaagcaaaaaaaattgatgtctgactttgctattgcaaatgattgagcagcgtggtggtacaagccggagtacatcatcaacgagctgaacataaactcggtgataacgacgccggggcacgacgagatcctgcccatcaacagcattaccacacagcgcggctacaccatgaaaggatacgcctactccggtaaaaaaaacagacatgcatcactgacttttcctacttttgacttagtaagtagttagctgcaggtcgactctgtaggtctaacagcaccgagcg

SEQ ID NO: 3514 - DNA, 1169 bp, Zea mays
acggagacccggacccgccattagaacacacggaattcacagccgctctatatgtggggagggggtgaggaagagaggcttacccgcggctgtgcatacaccccatggcggtggcttggtgtctacctcaggcgacggcagggcggtggctcgctgcagtcaagaaattaccttttgccgcttgaacaagacataatcttcttgaactatttcagagaaggttgattaaaatcagtaatctgaagtggaatttgggattaccatattgtagcccttcaatccgtcttaacaatagttccaaagaattctgtttttcatccttttctgtttagaatcatacaaataatttaattgcatggatctcactgtatcaagtataacacaatcaaatagatgtactcaaaacagaaacaaaatcacaatgcattgcaaaaaaaacttcaatgtaatattttttctagaaaattgatcagatatgtcatgttaagtgatgcaagaagcaactaacagttgaacagtagggaacattggaaactaaagaaaatttggtagttcaattcgctcaacaatttttctcaaattctctgacaaaagacaacagctgaagcagaatttaaggcatggaactaacaaaggatctcatggtgatgtggcatgggaatatacttgtaacttgttgtaatccttctataatgactatttaaactgtgggagggaggaactgagtttaaaccacaaatgttgacactcattcaggaatcaaatttataaacagctaattgcaagagtcatgccgaataagatcttaatatcctgacatggattttggtaaggttcaatgttttcatcatttattttgtaatccaactccaacttgtgctttcagttttcacatacaaacagaggtccccaaccataatagcaacaagcacaaaataaatgtccttaacctacatgcagcaaggtggcacacaaagtcctcgataattttgatatttaacatgataacctttcatgtgcccatttggcatttgcactactgcttcagtagtcagtacagccaactttctacgctatggaaatgcaatttcttttcactgatgggatcaatttagttggctgctagccagctacccacaatgacctccagtatatataacatataatga

SEQ ID NO: 3515 - DNA, 1143 bp, Zea mays
aacgctacaagcgcggaatcatgtgagggatcttgtttgagtagctgctcttgcactgcatattcctacggccaaggcggttgctctctgtggcacgacgacctaaccaatgtagcagctgatgatgacactggggagactctctaccttcgccttgccgcgaaagaggtccaaagctggcaagaccgccatagacatggaatggtcaccggtgtaagtgttgctgtgggcgtaagcactgccactgtgatcaccctagtgttggtctctctaattgtgatgatgatctggaggcgaagcagtagtcatccggcggacagcgaccagggtggcatcgggatcatcgcattcaggtacgctgatataaaacgcgcaactaacaatttctcggagaagctaggcacgggtggcttcggctccgtatttaaggggtgcctaggtgagtcggtcgccatagccgtgaagaggctagacggcgcccaccagggagagaagcagttcaggtccgaggtgagctcaataggcatcatccagcatgtcaacttggttaaactcgtcgggttctgctgccaaggtgacaggagactccttgtctacgagcacatgccgaaccgttccctcgacttccacctgttccaccagagcgcgcatggcggtggcaccaccggtttgcgctgggacatcaggtatcagatagctctcggtgttgccagaggcatagcgtacctgcaccatagctgccgagactgcatcatacactgtgacatcaagccgcagaacatacttctcgacgcgtccttcgttccgaagatcgcggacttcggaatggccaagtttctcgggagggatttcagccgcgtcctgactacgatgagaggaactgttgggtacctcgcccctgaatggatcagcggaacagcctatcacatcgaaggtcgatgtttacagctacggcatggttttgctggatatcgtatcgggaaggaggaacgccggcagagaagcttccaccgacgatgattgttgcaatgccaagtgttgtttccctgtgcaggtcgtggacaagcttctcaacggaggcgtcggaagccttgtggatgcaagcttgggcggcgatgtcaacctagacgacgttgaaagagt

SEQ ID NO: 3516 - DNA, 983 bp, Zea mays
gaagggctcgccatggtcaacggcacggccgtgggctcggggctcgcgtcgatggtgctcttcgaggcgaacgtcctcgccgtcctcgccgaggtcatgtccgccgtgttctgcgaggtgatgaacggcaagcccgagtacaccgaccacctgacccacaagctgaagcaccacccggggcagatcgagtctgcggccatcatggagcacatcctggagggcagctcctacatgaagcttgccaagaagctgggagagctggacccgctgatgaagccaaagcaggacaggtacgcgctccgcacgtcgccgcagtggttgggcccccagatcgaggtcatccgtgccgcgaccaagtcgatcgagcgcgagatcaactccgtcaacgacaacccgctcatcgacgtgtcccgtggcaaggcgctccacggcggcaacttccagggcacgcccatcggcgtgtccatggacaacaccaggctcgccgtcgcggcgatcggcaagctcatgttcgcgcagttctcggagctcgtgaacgacttctacaacaatggccttccctccaacctgtccggagggcgcaacccgagcttggactacggtttcaagggcgccgagatcgccatggcctcctactgctccgagctccagttcctggccaaccccgtgaccaaccacgtccagagcgcggagcagcacaaccaggacgtgaactccctcggcctcatctcgtccaggaagacggccgaggccgtcgacgtgctgaagctcatgtcgtcgacgttcctggtcgcgctgtgccaggccatcgacctgcgccacctcgaggagaacctgaggagcgccgtgaaaaggtgcgtgacggcggtggccaggaagaccctgagcaccggcgccacgggggccctccacgacgcgcgcttctgcgagaaggacctgctcacagcggttgaccgcgaggcggtgttcgcgtacgcggacga

SEQ ID NO: 3517 - DNA, 1126 bp, Zea mays
agtgggtcgatgtgcttgcgctggttcatggcgatcaccaccttgtccacctcctccccgggcgaccgcgtcttctcgccggtcaggtactcggcgccgagctcctcgcgcacgaacctgtacagcgggtacgaacggcactcggtaatcctgttcggggtcgtgccactctccacagccgctcgtgcggcctccacctcgtccggtagcactgcgctgagctgcttctcgaactcagccaccttggccaggatggaggtctccataggtcgctcggtgttgctgtcaccattgatgagcgcatgctccatgagcaccgcgcggagcttctgcatcagtggatagctgggtctgcacgggtcttctgcgtacgtgaacaccgccacgcggtcaatagcgacgagcaggtcgtggtcgtcgatggccagggattttttggcgacatgcgacacgcacttcttaacagcggccttgatgctctcctcgagttggcgcaggtcgacggcctggcacagtgcgatcaggaaagtggaggacatgagcttcaggatggtgacggcctcggcggtcatcctggaggagatgaggccgagagagttgacgctctggttgtgctgctccgctgtctgcacatggtttgtcacagggttggcgaggaactggagctcagagcagtaggacgccatggcgacctcagcgccattgaaaccgtagtccaagctcgggttgcgcccgccggacaggttggagggaaggccattgctgtagaagctactgacaagctcggagaactgcgcgaacatgagcttgccgatggcagcgacggccagacgagtattgtccatggacaccccgacgggagtgccctggaagttgccaccgtggagcgccttgcggcgggcgacgtcgatgattgggttgtcgttgacggagttgatctcccgctcgatcgacttggtagcgaagcggatgacctcgacctgcgggccgagccactgcggcgtcgtgcggatcgcgtacctgtcctgcttcatcttggtcagcgggtcaagctctccctgctccttggcaagcttcatgtaggagctgccttcaagtatgtgctccatgatggctgcaggcggca

SEQ ID NO: 3518 - DNA, 1129 bp, Zea mays
  unsure (1)..(1129): unsure at all n locations
ggccggagtaggcggcggggcccaggctgtgataatagcaattgattactgctgcttttgcaatcattcgtctcgttggtcagctgcgagcgagcgcgacggacatgacaacatgacatggtgtgcgtgcaggggcgccgctgtccgcgctggacggcgtgctggtgggcgtgaaggacgagatcgactgcctgccgtacccgaccacgggcgggacgcggtggctgggcgcggcgcggcgctgcgaggccgacgccgcgtgcgtcgcgcagctgcgcgcctgcggggccgtcctcgccggcaaggccaacatgcacgagctcggcgccggcaccagcggcatcaacccgcaccatgggtacgcgctgtgctgctgttccgggtcacgcgcctttttttctctctctctccctgttctgcgccgtgcctgaaacgttgcgtgatgcgggccatgcggctccgtccgtcgtccgcgtgcaatgtgcaggtcgacgaggaacccgtacaacgccagcacgatcgccgggggctcctccagcggctccgccgccatcgtgtgcgccggcctctgccccgtcgcgctcggcgtcgacggaggcggtgcgtgcgcgtgctgatctcctctggcctctgctgcaacaaacaaactgacactatcacactgaccatgcatgccgtgcgtcaattgcaggctccgtccggatgccggcggcgctgtgcggcgtcgtcgggttcaagcccaccgccgggcgcctctccaacgccggcgtcctcccgctcaactggacggtcgggatgccggggatcctggcggggacggtcgaggacgcgctcatcgcgtcagtcattctcattgatcgccacgcgcgcctcgtttctttctttctttcttcagctgttattaccgaatctcatcgtttccatctgaaattctgatccatccttctcgtcttccagctactcggcgatcgtcgaccagtcccagccgtcctacttgcgggtgaatcccagctcccttctttctctgctgaatctctcatctctactgtacctgtcgtctgcaccatccgactgacggggcaagtgcgtgccacctgcaggtcgactgttgagctcnccagggtnccga

SEQ ID NO: 3519 - DNA, 1170 bp, Zea mays
atgactgaaattctctccgctatagccgacttcacatcagctgcatcaacacctagacgcgcagccacaagactagagttgttttcttcttcgtcaaaccaaccaacttcattcctaagtattgctgcattgaatattgtagagattcacaacatattcaaatgacaccacaaaagctgactgaggaatggagaaattaagtaccggacaacatcatcctccgaaccctggttgtaagattttcccccatgatgctgaagaagtaatgctgcacaagataagcaacaacggcatatatgcctgtgccaatataaatgaacacatatagcttggttttcttctcaatttcattggggtccctgtagtagaacacatcaagcatttcacccataacaatggcaaaagttgggccaataaatccggagaggacagaaccaatggcccccaacactgcatatggccattcaggtgcgttcagtttcagaagcttgaagaagtagccacgtggcgctgggtatttgcggtcattatcagcattagaaatcatctcaatgcgaccatctgctccagtactgtactgatagctgaggttctttagacttccagacctgaggctgagagatttggtggaaagtgagcttgtcaagtgaattgaccgtgacctgcggctagatgcacctccaagatccctgttccgtgccgtttcctgaaaacgaacaagggaggcatatgctccagaggttccttttgcaatgagttcatcatgcgtcccagtctcaacaacttggccttgttggatcacagcgatcatgttaacgtttcttatcgtcgacagacggtgggcaacaactacagtcgtcctcccaaccatcaaacggtctaaagcttcttgcacaatgctttccgagtctgcatctaatgcactggtagcctcatccaggagcaggatctttgggtttttcagcatagcacgagctattgctatacgttgtttctgaccaccagagagctggattcctctctcacctgcctgtggatggaaaaaatgaagaaattagtatttaattgattagaccagacttacatgtatgtcgaaaaaaatatagacataccattgtgttgtaaccattcggaagaagagatatgaaactatgtgcattggatgcagtc

SEQ ID NO: 3520 - DNA, 1155 bp, Zea mays
atcatgaggtttgccgtcgtccatccttaagcaacgggcgcggcatcggcgcatactgtagcgaaacctgcaagaaggtgtgtacctgctgagtgctgcctagtctctccacttcatttggtttcttgtcggccgtatcagatctgttctgtctttttttttcaggtgtctgctcggttatcagacatggtaggcgtaacaaaccacaccgaagatggtttctcatgggctctgctgaagatccagaaagacgaggccgtcagttcacaggacattgctgctgttcttgaatgcaacgtgaagcttgcggtggcgcttggcgtgctgaacgagtgcttcaacccggccaaggatcgccgaactaagatcgatatgctccaccaagctgtctacagcctcgggtaagttcagtcagtcagcactgaaacatctgcgtctcttttcagttcttcgatagcaaaaaaggtttgtgcttcaacagatcagaattcaaacgggtgagctacgaaggattctacaccatggttctggacaaggatggggaaaccattgcagcagccctgctgaggtttggattcaggagtacttgtcagtgttcctggcctagtcgttgttgtatattactgtaagcaaaggtcttcttcttcttcttttttacaggatccatggcacaaaggtcgccgagatgccgttcgctgccacgctgccagcttaccggaaacaagggatgatgcgtcggctggtgaacgctgtcgagcaggtaggaggagcacgacactgtctgcctgcctgcctttctgtatgccactgtcactgttcaccaggtgtgagtgtgaagcaggtgctggcgtcagtgcaagtggacaagctggtgataccggccatagctgctctggtggacacctggacgaggtccttctccttcaggcccctgctggaccccgagtcgagggaggaaatcaggaggcggagtctggtggtcatcgccggcaccaccctgctccacaaacccgtggccgccgcgcggccgccgtcgccacacagacacgctgaagcagcggcgccgaagaatgcagggctgccgtggtggtggaagtacacgcagcaggcgccgccgctcacggacgacgagcgggccttcctggacacggcgcc

SEQ ID NO: 3521 - DNA, 1226 bp, Zea mays
aatcgaggagatagtgtatctggaatagttgtggatgttgtttcgatcagctcaccaaagacaaggaactgcctgctaaaccattcccagtgaagaaaagcaacttctggtgttccaacaacccgttcatagcttttgatatgcttacggaaccatgtgattgcttctaccactttcccggcatgaagtagcaaggttgatatcttaaagtgaaattgctcggcaactgcttttatctcaaccaggcgttgggttggaggcaaccttgtcgaagttccaatcatctaaatataagcacatttattatcactggatgatgcaaagccaatagaaactgcttaagaaacaatggtggatcagcaaatagttaactttttttggatttatgatagccatagtttgtcttttatttatgagataattgatttagtatgccacttgttgattaaggataaggaaaggaatgtgatcagacctcacgcaaaacacgaacaccttcctcatagaacttcaatgcttctggccaatcccttctgaactccgcataaatagcaacctgatgattataataatggagtaaatgaatatatcagaacaatatggaaaagagattaatgaaatttaggacctgtttggaagcataccggttttttaaaaaaacagtttctatcctcagtttctacaaactggtttatgaaaaaaaagttgggtgggatgtttggaactcggtttctaagaaaccagtttctagttttttggtacacaattactagacactcttcctctatttttaaaacacggtggcaatagatgtaaatttcatgaaactaacatgggcatgatgtaattaaacaaacaaaagctggttttagctaggggagagtagcttattggtttttaagaatctgggaatccagtttctataaactgtggcataaactagtatgtttggaaccactctagtttctataaatcggtttcttaaaaactgggtgcttccaaacagacccttaaatacgaacaaaataatctatcttccatgcttttacacttcacctagaatgattaatagcactaaattgaaggagagagaggtcctcaccttgaaacagtaccggatgctcagctcaacagaagcaaagttctttttctcaatgcgagcctttatccttcgcccttcctctttatagaatgctgcacataactccacaaagacattcttcaat

SEQ ID NO: 3522 - DNA, 724 bp, Zea mays
tagctagctagctgccacatgcggcatgcattatgcagccaggacgacaaaatctactttttatcgtttacatttacacgccggactgcatacctgcctgctgctcatatatatatatggttttgttggtgtgagtagcactcctcatgtccttggttctactcctcgtgtgagtaaatttttaggcggtgggtaaaaaaatccactcgtctgtcccacgccaaagcacaggtttaagacctggtcgcggtcattctcacatagactacggtgtcactatgtatgagtgaggcaggggtttggaaattttgtagacctacgtaataaggtcttcttcttgttaacctccacagaccaccttatttgagtatagtactgtacactgtggctagcaatctaacatgcatattgcctgtattttagttagttaaaagttgcttatttcagtaatatatagaatttacatgcaatgcattggtcgatctgctagcttaatttagctccatgcaagcatccatctatatatgtatctgatgatgacgacgacacatgtgcattaatttatgcattattattgttaattaccaggtggactggacgccggagctgcaccggcggttcgtgcatgcggtggagcatctgggcatcgacaaggccgtgccgtccaggatcctggagatcatgggcacggactgcctcacaaggcacaacattgccagccacc

SEQ ID NO: 3523 - DNA, 1068 bp, Zea mays
ggggatggcggcggcaaggagacctgggaagatggtgcatgccctcatcgtgacaagcggcattgtgccggatgtgttcgtctccaccgagctgatcagggtctacggggagtacggtgagctggcgctctcccggaggttgtttgatgcgatgccggtgaggagcaccgtttcgtggaacgccatggtgcatcagtatatcaggcatagtaatgttggcgatgcttacgagctgttccttgcaatgccaaggagggatgtagtgtcatggaacacgatgattgccgggtattcccttgttggtcgatttatggaggcactagagttgtcccgccagatgatatcgccgtcgtcatgtccagtgtatccaaatggacctacaatgagcactgtccttgctgcttgcgggggtgccggttgtttagagactgggatttgggtccatgccttcgttgacaggaaccgcatgaatgatgatggctcattggatcggtccttgatagacatgtacgtcaaatgtggaagcatcgaaaaggcacttcaggtgttcgagaaggcacctgagacgagggatctgtactcatggacgaccatgatttgtggactggcaatgcacggcagggctgctgatgctctaaaaatgtttggtatgatgcaagacaatggcatacaccctgatgatgttactcttgttggggtcctaaatgcttgtgcacactgtggacttgtggacgaaggccttcgacacttctactccttggagaagtatgcaatcacacccaaaattgaacactatggatgtgtcattgatcttcttggtcgtgttgggcggctgcaagaagcatacaacattatcaggaccatgtgcatgaagcctaatgcagtaatctggggtgcattcttgaacgcatgcaaagttcacagcaacgtggagcttggcgagatcgcagcagctgagctcaccaggttagatccaggtgacccctgggcaaaggtgatgctgtccagcttgtatgcaaaattgcaggactggaacagtctagccagggagagacgggagatgaacaa

SEQ ID NO: 3524 - DNA, 990 bp, Zea mays
atcttgcatgcctgcagtacaagacttgtatatggaggtgcagactatgaatggtatcgctgtggacgtgtacaaggccttggccagggaagccgcgttctgccgatcccgttgaacgctcttccccttgtcgtctggattgtagccgaacacacgttgagctaggagtcccacgatgggaggcgcgaaggacgccagcactgactcgaatgtcccgtccagggcatatatgctagttcttgatttctctgggacgatctccgccatgatagggctgtaagatttagcaagatcgagagttgaaagtctcacatcatcattccgttaagaacatttggatgcgacgaatggcttacaagtttgtggcgggtccgttccaggagatgaggacgccagtgacgaacaggacgacgccgtaggcaactccggcagacgggtcctcggggagccccagcagcagcacggcggccaagggaactgccgagccggcgctgatctgtgacaggacgatcctgccagcgtctgggtaccgtacggcgagggcgtcgcccatctttccgccgagcagtccgccgagggagcaggccacccagaagatggtcatgagcacggcggtgtcggcgtggctgaacccgatcagctccagccacatggacccgaaggagagagccgaccacgagaacgagccactgaccccctgcgccacgaagatctggaacgtcgggatccgcaccacgaacttggcatcctcgatcatctccgccaccacctgccgcgcggtggcaggccgcttgccgaccgccgggacgccaactttctcgctcgtcgtgaaatggggatccacggcgaggaaccagttcagggccccgaccgcaacgctgatagccgccacgaggtggaacgcgacacgccagccggcgacgccgagaaccgtggtctgcgccaggagcaggccgacgaaaccgccagagatggacccgaggctgctgg

SEQ ID NO: 3525 - DNA, 1107 bp, Zea mays
tggaaaaaggcatgctttatatttccaaacatgatgtccacacgctcatcagaccttgaagtagaatatctgaaaccattgaaatgagcctcaagatttcctgtgagcttcctcccacgaccaccaaatgcaggtcgtatccacacatcagaaagcctcatcatcttcattctgttgcttccaatctgaagtttctcctgggtaacaagagttgccctttcagctctctctgactcccttgatgccacttgcctcctcaacgttttgatctgctgaacaacttcactgctatgccgtggatcttttgagcggaatgtaatttctttcagatagatagcaccttgagaattaaacttgctatcatttgagaatggcatgccaggcacattgaagaagatacggatagtgcatgtgcggttgtcctggtgactggtcacactcttgacagtagaaacatggaaaggaaccatactaccataaataggtaagaggacagcttcattcttctgatctacttggatcaccaaatctcttacaaatggtacatcattaacattcttatatgcaacaagctcatttgaagccctcgcaggaccacgtccgtcaccagatccagtaccaaccccagcaagccttctagcagtctcttcattcttctggcgagcaagttcagcctggtgctgtctcctgagctcttccttcgacatctcctggttgtctgacctgagagttgccttggttggcataacatctatggtcttcgactttatcttaacctcagcagcaacagcatcatcatcttcgttgaacgaataagcaacatctttgaatgccttggagcagggtgctgttaagacctcatgtcctctttcattgactaaaactgtatcagctaataatagtgaaaactgctttgtcttctcactggttgtttctgcctggatgttatgcaaaccaagggatacattaaaaaccattcccttttttatcctgcgatcattcttggcattcagatttaagccagattctcggaattcaaggcctattccagttccagctgactttgttagattaggaagaagttcaggtgcatccctctcaatcaca

SEQ ID NO: 3526 - DNA, 1340 bp, Zea mays
ttgcatatcagaaaacactcagctgctagattctgtttggaagacattccttcataggagtatctcttaattacatggctgctgcctgtcttcacggcagttagaatacctggaggactgatgaatccacaaaaatgatgcattctgcacatgaggcataacaaacaatatgtcctaataagtgtttcttaggggaagaccgtgaggatgatgtattgggatatctattccgcgacatgctttgtataacataaactccatttgcaataatggaatcaacttgggttagcagtaaatctgatatacttgggatcaaatagaaattttggtacggttgaacttggttaaagtacaggtgacgtataatcagcagtataagatttgtccgttggcattctccgtttcatagtgcaacacatcatatctgtcgaattgaaccatacagagttacagacgcaaagtatactatggcggcttccaaagtaggtttcgacaagcaaatgttttccaaacaaaaacgctcctgtatggatttgtttcgtttctgaattttctggtaccacccaacccgatagaggtaaccacagtacaacactgaaggccactgggacgacagggcgcgtggtatgagagatggaccattgggaatgtacacgtcaagtctggcaaccatagccgcgaaacaacatgtagtaggtgtataatctcatttttttttattataaccgataccaggctcgaaaccgctatctctacaaagacaatacgtaatggcaatccataaatacacctcagtaaacaggaaaaaagagcctagaatcctgtgcacgcccacgaccagcagcagaacatgcaggatctaaaagaaaactcaatttcccctccaatctcctcactcgagaggacggcacatggcgcaatgaaacacaccctcccctaagccaggtgctgaatcttgcgcttcagccacatggcgcgcacatcgccgacgagggagacgaaaatttcccggttgcccggcagcaggaagacgtcgggggcaactgacttctccacctgcgacagctccaccatgccgttcaggatctggacgcatctcgatatgctgtagccgtcctcaagcttggacatctgccagtcatggctcgagctcttgtagttgccgttggcggaggagtcgtccatcgccctgtcgttgccgttcctcttgttggaacagtgccacgagcggggcagcgcctgccactgggataccgcctgcgggaacacgtgcgcgtctctgctcgaggccctgagatggggtggggtctggtggaaagaagactccttcgacatgggtg

SEQ ID NO: 3527 - DNA, 1233 bp, Zea mays
gattcttgcttgtgtgtcttcaaggcctcatcagccctttctagatcaccttcacaggaaacaactgctctttcaacttcttgctttgtacacttatattttacctccaagctcacaatctttgaaagctcatcagctatatcaatcttcaagttaacaccggactgttgatcagctgcaagttgttgcttagcttcctcactgccatcaaagttgcagagccaggtaacagactcctcaacgcaaccctcattctgtataagggccatcgttgcttgatctgctgagaaacccatcgcaacaagcttctgcgcaagtgcctccaattttctagacataagataacccttacaacgctcgtgcaattcttgggcacgcctctccttctgtctttgatgcttcttctcatttttctgtctgattttctctcgtttatcaatatcacatccaggaacagactctactcgagacacactactagttggtttttcctttggatcttctgactcgtcagagcagctaccgttgttggaggcacaatcgaaatcccctgtaccatgggagctgcgagaatgttcatctatctcatcggtattcctgaatttattgatgccttggctacccaacaaagaagctgatggttccagaacatggaactttccagagaggttgttataagaacttgcaagcgtaccatttcccagtggctttgcagaaaccttgggttgctcttttgcaacttttgcagctgatctatcttttgacttggacttggatgcagaaggcatttctgacaaagtgattacactggatatacctgtgaagaaatttgcaaaagaaaaaaaaaggttaacactctaagataagatgtgtaaagtacttatcttcttgtcaaatgagacacgttcaaatgcccaatcataacaaatacagaataccaatatccaagtaaaaagataactataaatgcaaagtacatatctaacctaacaaaaggataccaaacagctagaccaactcaaacatctggtttaaggaaacacaccatgcagcactatccatattacagctaattaacagcaaaagaacctggcatcctgataacaaatgaatgacacgttgctcactgcatgacagctaccgcaggtctcccatgccaaaaagaactaaatcagacaaactttggctccgcttcaatttgacatgcaacctgtgtccattaatgatgtttca

SEQ ID NO: 3528 - DNA, 1309 bp, Zea mays
gatcctcttctgaccctctgtagtcgacctgcaggagcactcgctgagctcttcctgggtggagtcagaatcttactgtcatccttattcgatggtttctcttctgctaatgattttcgtctgggagtctgaacatgggagaatcaacaaaaaggttatttactaaacatgctgcatggccatatacataagacattaatagggacactgatgagttgaagcaatactacagtctacatgctcctaacaagagacacatatggtcaggttattgatcatatattgatgaaaaagttcagaattgatgttgttgatcctacattgatgaaaacttcacaagtattatatgcccatgctgtatatgacatggcattgttgacacttaccgaagagcttcgattttcagacttcttttcagctttggcaggctttgaatccgaattgcctttgtcctttgcatctgctttcccttcccagcttcttctcaaggccttgggcccagattcgaagctcaacaaggtgttactaatggagttacccagggaggacttcctccctgccgtagtggccttcaacacagacgcagccttttctagcaaggacagccttgacggcggcgatttctctgctcctttggttctcactctctgtttcatgtcactcgagaatttatcgaacgacgcaggcagagaatgggcgctggtcggggaagacggcgtcgacctagcgctggttgattttgccttcgagctaaccacgtccttcttgtccgagaggaggccattgagcgcctgtttcgagaggttggagttcgacttggtgagctggggcttcttgctctctgtgccgttgctcttgggaggagcattgatcttctctaacctgccctgctctttctctagcgacagggcaccggcatccttggaactaccattggtggaggaggcttgggcggccttgccgctgccaagaagaaaagtggaggagctggtcaccacaagatcctccgggctgccgacgcaggcatggcggcccgggaccggcctgacccccctgaggatcggcaccggggtggctgcctcgagacgatcgacatggacgaactgccccagctggatgacgtcgctcaggatgaggtcgtgctgctcgtccggcagcgacacgtaggtggcgtgcgacgagtcggacaccttgaggtagaacccctggttggtgaacaggtcgctcccggcgagcgcgggcacgatgctgacgacctggagcagcgacgaccggtgctcgcccgcgaccttgacgtcgctgttcatgt

SEQ ID NO: 3529 - DNA, 1296 bp, Zea mays
agcgggcaatgacagctcggctgacggcacgaacggcaacttgcacaggtctggcaccagcagacctgcggccgcgcccaggggaaggtcgcttcaagcatcgcagagcagcgtgtacagcgtcgaccgctacggtgcccgtggcgacgggaggaacgatgacacacgggcgctggagatggcgtggaaggcggcgtgcgcctcgccacagccggccgtcgtgctcgtccctgccggcaggcgctacctgctgaagctcctcaccctccgtggcccgtgcaagtccagtgtcacgctcacggtgaagggcaccctggttgcatcgccaaaccgggcggattggagcgacagtgacaggaggcactggatcgtgttccggagcatcgacaagctcactgtcaacggcggtggcgccatcgatggcaacggcgagaaatggtggtctcactcgtgcaagatcaacaaggctctcgtaagtgtggcgctggcccgttggtctatctaaatatctataagcatctacttcacaggcaagtgtacttgaattggccttttctttttttttcttttctttagccttgcaaggaggctccgacggctctgtcattccactactgcgtcgacctgaaagtggaggatctgaaaattatgaacagccaacagatccacatgtcagtcgaggattctgcaaatgtgctgctggcgcggttgtccatcacagcgcctggcaccagccctaacactgacggcatccacatcactcgcagcaaagatgtacgcgtcacagactgcaagatcaagacaggtaaataaatagaatgttcaggatttggatcatatacaacatatgccattgttgtgtcttcaagcttcactgaacttagttcccttttttttactgagttttgcaggggacgactgcatgtcaatcgagaacgggactcacaacctccatgtctccaaagttacctgtggtccagggcatgggatcagcatcggaagcctaggagacgacaactcaagagcacaagtctccggcatcaccatagactcagtgcaactacacggcacaaccaacggagcacgcatcaagacgtaccagggaggcagcggatacgccaaggacatcacgttccaaaacatggttatgtacgacgtcaagaacccgataatcatcgaccagaactactgcgacagggctaagccatgcggagaacaagagtcagcggtgcaggtcagcggcgtcgtcttcaagaacattagagggacgaccagtaccaaggacgccatcaagat

SEQ ID NO: 3530 - DNA, 1279 bp, Zea mays
gacgaagtccagtagaagcctctgagcgcgacgatattgtggtgccgcaccttgctgagcgtcttcacttgtcgctcgaagtcatcctttgacttgaccaagctagagactgtaagcttcttgatggctaccggctgtccgtctctgagcaccgtcttgtagactgccccaaagcctccacgcccaagctcacagtctttgttcaacaacgcgtgcccaccggcgctgaactcagggctgcccttgccaaacatgacaagcttcccggagctagcgtcattctctggggactgactgaggtagtcatcggacaatgcagtagcaggtgctgagcgtggggcagccgcacgggcccggacgcggcgattgagcacggatatggtgatcactccgatagcaatggccgcgccgcccgcaatggcaacgagggtggagatactcagtatgattttcttgtgatgcatgttgctaggggcactgggtgtagcctgccatgagggatttgatgaggagtttgggttgagcacaataggctttggcataactgcgctgcacgaatcattcttccgtgagctacacagaccagaattgtccacgaggaaggactcggggatgttgttgaagaagcggctgtgtggcagatcccctgtcagcatgttgtgggagacgtcaaagatgtggaggctaggcagattggatagctccactggtagggtcccgttcagcttgttctgagatagattgaccacttggaggctggtcaggtttcccatggtgctaggaatcggccacgtcaggttattgtgtgagaaatccctgcattggaagagcacaactttgtatcagtcataacgatttctgaggtggatcatactaactaaatgtacagtacattgcgcttttaattgatctgaacagttatctagtttgagaacgagtgttccaaatcatgctgatgtagacatttgacttcagttttgagtgtatcgaggaaaagaaaaggagtacaggcaggaacaaacacagacccatagttttcggtttggggtcccaaacagaaaatacgacatcactgtcctacaacactgtctacaacgtctctgcaacctaggaaaccgaaacccagcaaagcaaagcagtcatgaaagcaaaaacaaatagacctagtcaacttcactcacaagcaatcccaatgacgtcaattttcattccagaatatgagtagaaacctttttttatgggaaataatttaccgtattacttacagtgcaacgaggga

SEQ ID NO: 3531 - DNA, 1023 bp, Zea mays
tctaatatatagagacaaaatattgtagaatattatagagggcaacatcagccggataaaagtcacaacaaacatggtgcgaaactggcagtgggcgaggcagcacgtttttttttaaaaaaaaaacaatagcggcgctgctgcgctggcagaggaatcgagcggtcatgaaacggccagggccagccatacacgaacgtgatgtgacgaacaaatccatagctgcacgcggtgctttcgaatcccgggaccagagatgcagtttagctcaaacagtccttctcaacgcaacaccatatcagtcagggcaaacgacagcgctcgatgaaacctgagcgctgctggaccgaaagcgctaaaaatacgagcggcatcatcataaacatcacacacacacaggtcccgtagccgaccagtttcgatgctgccgtgcagtcgatattcgctcgttgttctctgcaagccccgaatcaaataattttatacacagcaattggagaggcagcctcgtctgatcacaagaacggtggcatcctctgtgaagggggcacaggcggctggtatccgttctcggggcgactctgcggcatccgctccccagcaggccttctggtaaagcttccatgcgtatggttctgcatgggattgaaggtgccccattcagcaggggtccaagggaacagatcatatccctcccggccccatgtgtacgctcggtcgatgccctcggcatcagaaacgctcctgttcacggctccaggagcgggaaacccgtggccaaggggccctgcaatctcagctgaggaagtcgctgcgatgaaagacgtaatcgtcaaggctctgggcctaacccttctggtggtaggagggaacgggctgccctgcacagatgagtgctggtacatatggcccggtgcaccatggccatggcctctagtctctgccacgacggctggaactgaccctaatggtgccaccagattgcttccgctgcgaggggtcagcctgcaggcatacaagctg

SEQ ID NO: 3532 - DNA, 1028 bp, Zea mays
agaaagaaatttggttaataagtgctcatcaattgataagatatataaaaagcacattctttgttacttcttcaactagataattgaagcctaaatgtttgccaatgtaacaagtaacaagaattaatgtaaagcaaatgcattctagatttcatgtctagcggtccatgtatatttgataaagagacaagctcacagaaaaatatacaagggtaactaaatatgttgctttatccagataataccatacatgcagaaattttttacagcatgggacctcaatttaaatacagaaacatagcagtgaatctcagtcgacgtaaatggcaagttgcaaagtgactaagtgagccagtgatttgatcagacatttgctagcatctagcgccacaactaaagttgcgacaatgactcggataaggcatgaaaatataaagcctatggggtgtaatcatgctcatatccatcgaactgcacaaaaccaacggtccaacgccactgcctaactcagctatctgacacctcccagtttgtcacacgatctaatgaggaaattaagaaaatttcaatgcgagaacaaatgatttagacattagactaattccccaagagaaagaacacttctgctcacaaacaaacccacaaggacacaacgcagtccaaaagcagatgaaactcggaagagtaactaaattcaggaacatgcacagacccaatctacagctggaactaattcctacaattccaccaatgtgaacccttagaatcgcaacaatgcagaatgcacacatccctctctcaggagggtaacttgccaacactcagttagtcaagctccaaccaaagcccaaaactctgcctcaaaaatcaagcaaacgcaagcatgccaagcatcacacctccaccagtcaacaggggagataacaaacatggagagggaaaggtgtgtaaccttgccgcctccaagtcagccggctggcctgaaaccctaggcaaccaagcaccagcgccaccacctgcaggcatgc

SEQ ID NO: 3533 - DNA, 1050 bp, Zea mays
gctcggtactggtgagtcctcaccagtcgacctgcagtgaaccaatcttgaagctcttccccctatgtaaggttcggaccaatgtggtgggaggcacaccagaaaacccaacactgtgaccatatttactatcactaactggatggtcgagaatataagctgcaacctccctgaatgcaccttcccctacaattgttcccctcttcatcccctcgccgtctgtggacacaggaacgccccttgggttgtttttggccatgggttcctcatcaataggcttaaacacagcaacattcttctggcctgttgcatctcgcatgaaataaacacctcctgaaccttcagctgacatcacaggcaggtgccctttctccagtccagctatggttgaatttatcatcttcatcacttcacgtgacagctttgcttttcggttaactattggttcaacaggggcaggcctaaccccaactgagtttgcagagttcattgagccagcttcattttgcaggttgcctttcccctgtggattgacaactgtaaccaaagtatctccatcaacttgttgtgtccatacctttgctggtttgcggatgaataaatgaatcacagcatcatccctcctgctaatatcagctatcagctggtggtcctcaagctcctcaccatcatattcaagcttgtgatcctcaagattaccaatatcctcatcaccctctgcttcaagcttattcttgagaaacttaacattgcggctctggtccacctgaaactgaaacttccttccagttgcagtctcaatgttaatcacacggagatcagacagtcgaataacaagatgcagaacatttccctcggccagcccataatccttgactggggagttgtttcttgccagctcatgcccatccagcacaagcctctgcttcgtcgccacaaagcccttgaaccgctggatgcgcagcttgacagatgcaatggactcagatcccagcacgctcatgggcatgggtggcatacccggcacagcaaggaaaataagaatggaat

SEQ ID NO: 3534 - DNA, 1127 bp, Zea mays
gacgaacttagttagtgaaacaccctccgactacgcgtgcggctccggggcggactgcaactccatccatgagagcggggcgtgctacaaccccaacaccgtcccggcgcactgctcctgggccgccaacagctactaccagaacaacaaggccaagggcgccacctgcgacttcgccggcaccgccaccctcaccaccagcgacccgagtaagtggaaccaacgaacgatcatgcatgccgtgtagcattgttaagcttcaaggaatcgggttctgtacagggtaattaattttggctatcggtgtagcactgtagcctcgcctaataactaataataggaagaagaagaaaaaaaacaccaactttctgagcgaataactgtaaaataagatttgcaaagtgcaaagctgtttgcggtatatatgctttattattctcgaccctaaaagtaaaaccctatcatagtgtctactgggcagacattggcatcaaagtgcgtccaattttccccccgatttttccaaaagggaaagtaaactgtaacgcggtcttttgttttgttttatgactccaaactccaaagccagattccaatgtcttctatggtgtgtggtgtctgtgttctgctgcttccatgctcttcagtcttgtgacactgtccatttttaccacccattcagagtcctacctgtagtaccttatatgacctttgtgttccaaactttcaggctcttcgggctgctcttaccccaccaccagtgcaaggtacgtggcgagcttaaattaactgtgcaccatgatccatgtagttcatgtttcaaacctgcgcgctttgggaactggtacacccccaaggaagttgagcatcatgttgcgccaccagatctttgggccgggatgcagtttgttcggcggattttttgtacttaagaatcgcggaacattcagcatgtgtgtcgtgtatcagtattaccagccacaacactaacagcactgccttgtttacacagcgccgcgggaaccgtgaccccgaccaccggcggcacaatgggaggagcgggaggcccagggaccttgacgcccgccgggacaggcgcaggcacagccggcactaccggcatgggg

SEQ ID NO: 3535 - DNA, 1015 bp, Zea mays
tgctgcctgcagtggtcggggtcatggttccaacggcgctgtataaagaaagcaacgctgttagaattgtgcgatccttaagaaagcaacgctgttgattaagacacatgctgaatgtcatgcgatccttaatacagccatcggggccaggcctcagtgcgtgttaatttacgttcacgacgtaccttgcaccggtagggtaagagcagcctgaagaacctgaaagtttatagtagcacaaagatcatgtaagatacaggtaggacactgatggagtgatgaaacggacagagtgtcacaccagcacagaagaacatggaaggaaatgaacacagacaccatacacaagacactggaatcaaaatgttcctttttctaatgcgttttactagttttaggcgaggccacaccactagccttaatgcagtgtgcctgtacagaacccgattccctaaagcttgcttgaccagcagtacacctagatagctttaccttagtgttttttaagctggtgcccttatactaactgatagcaaaatgaaatgtgccaaaaatgatcagatccgcaatgttccatgtcaaaagccgagttcaggtgccccaagcacacacacacacaaaaaaaaaacctttagcaatggcaatggtagacggcatgaacattggttccattaatggattgtttgggaccaagtagaatggaggggattgaggaggctaaaatttctcgctatttaaaactgaatagcgagggattcaattttacttggatgtagataacgtaatgctctctatgcaaggaggggtgtggggggcgcgtttacttgggtcgctggtggtgagggcggcggtgccggtgaagtcgcaggtggcgcccttggccttgttgttctggtagtagctgttggccgcccaggagccagtgcgccgcgacggtgttggggttgtagcacgcccccgtctcgtggatggagttgcagtccgcccccgacccgcacgcgtagtcgatcgtctt

SEQ ID NO: 3536 - DNA, 1032 bp, Zea mays
tctcagagactctgtaagcctgttcatttccagctggacagagctaattccatcatcagatctcttgagcatatcaacaaacccggcctctttcgatacccaatcatccttcgaaatcttggcctccgaacccatcctctcgatcgtcttcctgaggcattcagtctcgtagttcgattcgcctatccttaactggtacatttcctctgcgttcttcatcgccgccttcagttctgacatctgaagctgggcactgtctagctctgcctgcttcgcaaggaccctttccttggcctcgcttgcctctgacgacacttcacgtagcgcggccgccaaatcctcgatggccttcttcgccttgtccctctcttctctggtgttggcaagctccatgagcagcttgttattgccttcggtgaggtggccaacccgcgcgctcgctgtcttctcggcgccgacggcttgtcgatgcgcctcgtgcagcagctgttgttcagacctgagtccatcagtggccgcacgtagctcgcaagcttcctctgctgcgacctcgaggcgcctgctagtctcgaggaaacgttccttgtattcgctagcttccttctccagggtttgcaccttgctcacgagctggaggagctgtgactgtttgtcctggagcatggacgtgcagtcctcaaagctgttggtcagtgacgccagcgactcctcgttgcgtttgttcagctgcgaggcggcttcgaggcgagtctccaacgaccccgccttgctcttccactcctgcgccgaccggctggcgtccgcttcctccctcttcagcccgtccaccgcccgttccgctttggcgagcttctcctcgaactccttggccttgcggagctcgcccctcaacgcggaagcttcagactccagcctctcgacgacttccgcggcttctttggctttgttctccagctcggtgtcgagccgggacttgaggcgggccagttcagccgtcaggacctccaccttctccgctttgccgttaggtat

SEQ ID NO: 3537 - DNA, 878 bp, Zea mays
agagcgccacaaggtcctgcttcaaagactgcccaacgcccctcttctcccatgccgattgttcctgtcaccttcttaactcgtttgtttccctcctcttgagccactgaaacgtttacagagcgcttcgttctagcagcagcggacgagggagacaagaggaggaagagatggcaggctgtgatggagccaagtcatcggcgtccatggaggaagaggtaatttgtgcatagtttctgtgaagaactggcatgattcttggccaaagaaaaggaatcaaggctagaggttgccgttcacatgttatccatcatcagttattacttgcttgctgcacatgcattgtatatgcatgccttgttcatttcccctacctgagtaacctgactacttggatcaatactgccctgctttgattaatttctggattattagcctcaaaacgaactttttttggtggggtagctttcattggaacttaacttagtacatgcatcgatagagttggagttttgcagagcccagagcaatggaatgtctcaattttgatacacatttatttatacatcgaaggaactcttactggcttcacaaagtccagttttgaaagccaggctcctttagggatgggcctgaaaacggataaccgacaggcaggcagcttaagaaaacagagagggttttagtgtttgcccatttaggacttcagtttctcttacgaaacaaacatcttagccgtcggtgctcacttcactttccagtgacgaaacttcgtcagcagttttctcatacgaaacaaacatcagccgtccggtctgtgtaagtgtaaccaccaccgaaaagaagaaggtaccttcgctcaacagcagccgctgcag

SEQ ID NO: 3538 - DNA, 1110 bp, Zea mays
taaggatcggaacctcatagaaaaatgaagaccaaagtatattaacatgttaacaatattgtaaggtcaccttatcaaggctcagtaataaatgaacagcataaaaagctttgctaatattcctatggctgcctaatagagaagaccatttcagttccctgatttttcctcacccatacaagtttccaatatacgaagattttaaaacaatggaatgtaagatcttttgcctggacgctcatacaatttcatatctaaacaatagataggctcatcacaagggatatcagaagcaacaaaatcacaacattgtatgagtacaatggattgggatacaacagtatcactaatataggctttccctgactgggtcagtggcagcaatttttcagacagaagaactcaacaccctgtatgtagattctcttctttaatgaactctactggttatcttcttgaagaaaaaataacctagtttaatttacctgcatacgtgtcacaagaacccatattggattggttagaagaacattgattgacctacaacaaaagaaaatgaccatgaacatgccgaaccatcaagattattaactcaaactaaaaccatgtggtacacaatattgaaaactatgcttttctggtgtccaacttagaaaatcatataaattcagcacagctaccataaaagtacactaaatccacccgtccgctttaatttgttccaacaattaaataaaaaaagtgcatgagtagtagtagtaggtaggtaggttacccagcaacagctgcaataccaagccaagaaagcatcccgacagtaccatccccaaggcccttcttgctacgagcaaccgctatatcttccaccttgttcttgaggatctggtagaagtagtaatagattccctggaaccacgaaatggaatgtaactcaaagttcacaagtaccatttactgggtatccacattctgccatccatacatattgcagctcctttgttatcaaaaaccagttaaagtagaagtagaatttaacctgcgacgcggcagtgccgatgagagagggcttgaggccgctgtacaacccactccatccttcggtttgaatca

SEQ ID NO: 3539 - DNA, 1251 bp, Zea mays
aaggtgtagccctcgaaattgcagaggctgttatcggtgcactgcgaggagacctggctgccacggctgtcaacgccccgatggtccctgccgaggtacttccatcaccaaagaaaaagctcaacagagtcgtcatttcagtatatatacttgtgcaatctgcaaaagagtctctagcgtaatagttaagtctttcgagtagcgattctcctcgaaggcgaatttcaggcttcaaaaaatctcatcccgtcagccgaaatcatgttctggtctcttcttaatataatatcgggatgacggttttttcctgcgtctgagtttttacttatgcaatctgtcggcgtctaagcagtaaccagtagtgcatcgcttcccacaggttctatccgagttatctccatacattgtccttgcggagaagctgggccggctggtggttcagctggtggccgttggcagcgggatcaaaggcgtcagggtggtctactcgtccgccagagaccctgacgacctggacacgagactcctccgcgccatggtcaccaagggcatcgtggagccgatctcgagcgccttcgtcaacatcgtcaacgcggactacgtcgcgaagcagcgaggcctcaggatcgtggaggagagggtcttcctcgacggcccgcccgaggtcccgctcgaatccatccaggtccatctcgccaacgtggagtccaagttcgccggagccctgtccgacgcgggccacatctgcgtggagggcaaggtcagggacggcggcgcgtcgcacctcacgctcgtcgggtccttgagcgtcgacgttagccttgagggcaacctgatactgtgcggccagctcgaccacccgggcatcattgggagagtggggtcgatcctgggaaagatgaacgtgaacgtgagctttatgagcgtcagtaggactgctcccgggaagcaggcgataatggccattggagtcgacgaggagcctgggaaggaagctctcaaattgatcggtgacacgccgtctgttgaggagtttgtctttcttaagctatagaggctgaggaagtaggttaggggacccaaaattacatttgtacgtgatatagtagcgtgagattgatgttgttgttgccatgattttagtagctagcacggggtactttatgctttgtgttcatgcaaaatgcagttttccttgggccctactgtgttcaagaggagagcataggagcgactatgcaggttgtgcca

SEQ ID NO: 3540 - DNA, 1083 bp, Zea mays
aatggatcaactaagcagagcataaacacaactaagggtgaagaagcttaactacaaatcaactaagctggccaagaacacaacaaagggctgcaatttattaagaaacaagaattttagaatatatgccacagtgcatacaaatgactcatcttaacagaaaaaataacttggcaagtatatggttagtatcacagcaccttttcaaggtttaaagcataatttgcaatctcatcctcctccagatcttcaccatcctcaaaaacaagtgtggcgccaaccattatcaaaggtaggttcattccaagcttaccttttataaccttttcaatgacttcccggagctttgttgtcttggtattaacctccagaacaagtggggtctgttgtggtcagttttacttcatgtcagtgccgaaaaacagagaaaatgtaacaaaggcctaactaaaaaagtagatacctcagagcagacataacatgatttactaggttcaaaaggctcgacaggcatcaagagcatcttccttgctggatgctcaaggcaatatgtcattctgtaaaacaagaaccatgaaattacattacttctattttatacatgcccaaaacacaatagaaagagcaacaagaatacaatataaattatatacaatggaatactgagagaggaaaaaagttccgttttaggccttatttggttattctaattccatgtggactagggtggattgagatggattttgacttgttatggatttaaaccaattcaatatcatccaatccacatagatcaatggtgaaacgaacaagcccacatgagagttgtgtgtcatttcattaagaagaaaggggggagagactcttcagaagcaagcataaacagaaactttttttcgaacgacacaggagagttgtgtgtcatttcattaagaagaaaggggggagagacatgaatgtcagttccccaataagttacaaggagggcagccgcgccaccaaagctataaccaaagacgcttaggaattaggacctaggaactaagaccctacaccataggctatgctggcgaagcagcagtt

SEQ ID NO: 3541 - DNA, 769 bp, Zea mays
aggttatgagaatgaggatgatgacacagatgtgctcgtgtacagtggtcaaggtggaaataataggaatactgaggagaggcatgatcagaagcttgagaggggtaacctagctcttgagaggagtttgcataggaagaatgagataagggttgtacgtggcttcaaggatccattttgcctaactgggaaaatttacatatatgatggtctctacaagattcatgagtcctggaaggagagaacaaagtacggtgtcaattgcttcaagtacaagctgctgcgggaacctggacagcgtgatggagctgcattatggaagatgactcagagatggatagataatcctgctaccagaggcagggtcctactagctgatctgtcatctaaggctgaaattttgcctgtttgtcttgtcaatgaggtagaccatgagaaaggacctgtacatttcacttatactaatcaggtcaaatacttgaggcctctcagttctatgaaaaagttgcagggctgtggatgccagagcgtttgcttgcctggtgacgccagttgtgcttgtggacaacataatggaggcgatttacccttcagttcatcaggattgttgtcatgccgcaaaccaatagtttacgaatgtggggaattttgcaactgttctacaaattgcaggaacagagtgaccccaaaagggtccagggctacattttgaggtcttcaggaccaccaaatcaggcttgggtctttcgcttgttgggaccctattcgt

SEQ ID NO: 3542 - DNA, 561 bp, Zea mays
ttgtgatccacacacgcagttcttcgttctacgagaacctgaaccactagattcagctccagcaacaccatagtcataagtcagttctgtcatgggtggaatatgcttcagtgcaaagaacattatatgcgggtgtccatcatctccgtgatcatattgaactggttgccaaaagacattgggtgagcaactgtggttcatgaaacgggagacatttcccatgttttttgcacttatcttgacaggcagtggttcaaattcatcaggcgatacatatgtgcttacttcacctatcagttcaggtccataattccattttaatgtcttctcgccagggcatacagtttgaaaaatgtaatcatcttcactatcattcaaattaaatttgagctcatcaataacctcaccggcatactcacatataaatgaaccagcacgaataggttcccagcagcgaagaccccagcctcgatttgtggtcctgaagacctcgaaatgtagcctggaccctttttgggtcactctgttcctgcaatttgtagaacagttgcaagattcacc

SEQ ID NO: 3543 - DNA, 977 bp, Zea mays
agctcactccacaacagacagcgaccatgttccaagattggtgggaaaaggctgaattgagagtacccaaggcagcaagggataattttaagtcactggttggctggttgctcttgtggcttggtggctctggaaaacgaaacacatgtgtattcaacagctatggtgcatggcgggagctacggggcttaggagaatctttccttagttcacagtttgttgccggtctaggtgtcaaatttttttacaatggattcttttgtatatattcggttttggcctccatgaggcgatctcatttgtactagtctattttggaccaccattttcttcttaatatagtgatgtgcagttctcttatgtatttgagagaaaaaacggtcaaggaaagtaacatcagcaacttgacaacaaatatttcacctgtctagaataatgctctgcatctcttctcattccagccatttcaactctcattttctgtaactcagcctgcatcataaaaataagggtgcaataatgtgctatgtgtaaatacaaaacaatacccttaacaaagctgatcatgaaaataaaccttgatagtcctagctacaacttgaaaaccaaaccatgcacatcaagcagcacgacaaaaatctgagaaaatggtgaatctttagttgagttatgaaattaatgtcacctccaacgatgatatctttgcttctgcctctcgttggctttggcgtgcacgctcaacttcttcctgccaagcctgcatctgtttccgcagcagtaagagatatacacaccgcaaataacatttgtcagtaggacaaccctgatcagtaagacaccttgtgcaacaagcacattccacattaaagacattaagtacaactcaaagttgagctcttgaagacaaaatgatgttttaattttcacctgaagaacttgattggcttcttctgaaggttttttctgtgtgcggcggt

SEQ ID NO: 3544 - DNA, 656 bp, Zea mays
ttgcatgcctgcagcttgatggttgcaatcaagggcacggcacaaacttttaatctaaatgaaaaaagatatgaagaatcttataaccaaaaaaaaactaccagttagcaacccaatgagcctatgcacaaaaccgaaggcgcccttcagaaatcagaagcgggataaacagtagtgcacctcaagctcatcccatggagactttagcaccaccactcaagcccaaatcgttgtgcatgcacagctcagaaagacaagcgagcaggatggacgattctactgtagcatgataaacagcatcagcacttcagcagcattcgtcaatattgcacatgcacaaagatgacaaattcgaaacagcaaaagacgcttaaccactcctgctttagtcagcatgaaagcaccgcttcaattgtaaagacaaatatgtaagttgcggtacaaaacaaataccatatacactggtatgcaatatgtaccaagaaccccgcgagggtcaaaatagaatcctagagtcaatatgatatgtttggggatctaaatgaacatgccattttatgatgtctagtctcaaagactgcactcatcagtcatcactacgagaaaattggccaacccaacggactgagaaaactcgattcgaagttcactgaata

SEQ ID NO: 3545 - DNA, 1055 bp, Zea mays
agtgggcgacgtcttccgccacctccacatcaatgttttaagtcgtccaattagtcacgattaatcgtccaagttggtttggaccaatcacgattaatcgccaagccgtccgactaatcgtggctaatcgcaattaatcatccaagtcggtcagctagaacgaccagcaagtcgttcgacttgaaaacactgctccacatcaacgacacctactccggcggtggctcgctaaatcagcgctggcgcaacacatagaagaatagcgggagaccggcgatcagagcgtcggctgcggtcagcagggcgggggccaaaggcagcgacaacacccttgacgcctccggtaggttggcgcgggcgaaagggagcatgaacctgttggcaacatacgacaacaggacaagcggtgtggagagctcggtggtggccagaggcaacctgtggcgcttggaggcgtcgcacagcagcagcaacagcggcgccgccagtgactctgctccgaaaggcgccagcgccatcatacttcccctcccaccagcggtacccaagcttcgattttggcctggctccgccgctgagaaattgcatagtaactatgatgcagctgggcacgaaacctagtcttaggactcatttaacgtgtcttcaagcatgttgtcattgcaatatcatttaattacgaaaccctaaaaacagccatgcatgtccaatcagcaaacatccggaatttctagaacaaaccccgattaagagtacaagaaaattttaatcaggtgtggtccaggaagcccgtgacctacacaggcgggcgtgtcgtgtgtgccctagcgagaggaagagcactccctggcttggaagtcctcgaggaaccccatggcgccggagatcggttgcagcagctcagatctttccggttatcgcgctctcgcaggctttcccagccaccagagaatcgaaatcaagatggagatgggaaggggagcgaccggaggaagaggaagaggctcgccggccggcgcggcaggtggtggaggtgcgaatcggagatccccttt

SEQ ID NO: 3546 - DNA, 1145 bp, Zea mays
acctgaaacacatgccgagttgcctttggttgaggtgcagattcctccagttcatttgcttttactatagttgaaatctcgtcttttgcattggagctggaaaatttgtcataaagtttgagctgcaatagactgagatcacaatatctatcctggattatcttctctggaagatcagataaaacttcatcctttgttcttctcagtagaaacggcatgacctggtacagcatgttcaaatttatttatctacaaaaggtcatttgtaatacaattataaataataaatacctgcttatgcagtgcctccattgcaagaataccagcttcagcatcctttgctgaacatttagaatctttggcagctagcaagggttttccatatgcagcttggaactgtaaaggacaacgggcttcagtacagtatatttcatacaagaacagactcaggtagattcaaagagaacatgtactcagcaggacaaagactgccccaacggtatagtttaaaagaaacatccgttttcaaaaggaccgagacaccccaaaccctgacagttgcagatcttacaccataacctagactgccggctacagccaccagatagagtcccgtcaatacccctagataagaccgcaccactcacatagaccaccgctcacacacgccgactgccaccattaccatagttttatgggttgctagtgagggatgtttttaaacagccttgaaattaatttccacggggagtctactcaagagtcataaccactaggctatgaaatctttcgcggagtaagcacaattcagtttgtttatttacacttcatttaaatagtcttatgtaaacgtagattaacataacaaacatctgttataaaaaaaaaactggattgatctctagtgcaaaaatccagattagagaacagattagcattcccagacaaaacggctaactaagaagctatactagtaaaattgttagatgactatgtgcttatctctactgtaatgagcttggcctaacatatgtactgccactatatatcaatacaacccctacccaattaggattagggtttcgttctatccaacattggtatcaagccaatctttctccctcctcccttacccctagattctc

SEQ ID NO: 3547 - DNA, 1199 bp, Zea mays
aaatgtaaattaacaaatgtaaaaggcataaatttgctcccatggtagctttgtgtatcatagaaaagaattaatggcaactttatagtagcagttttcttttcacaaaaatcaacatcaaattaacccatgacgtacaataagagaacaaaaggagagttatgcatcatgcactttcagtaatgcaccaatcgataaaagtacattgagacaaaggacagtagaataccaaacctgcaaaatgcatctgtgtgggcatgaataacctttgttgacagtgctaagttttcaccagcattccttgatgtactatagaaagtaagctctggtccaatagcctaaaacaatcatacaatacagttcaaccatagagttatgaaatgacaatcatatgtgcagcaatttcaaaagttacatgatgggagtgacttcacagttttgtaagttgtaacctgctggataaaacctgcactagttaccagtgaacccagctggtgaagttttggaaaacattgcagacataggaatgctactgttagtttgactacaccggccaattgatccaaaagtttaagtttatgagaaaagttgggcacttgggcaacagactcttaaacatcccctgccatgtctcagcttccacacacctaagatgtgttgtagagtgggctgcaatcttttctatcaatattgcaccagggcaccaggctacttgaattcactaagtgagtcaaccaaaccatgtaaaatcttaagcatatgatgaggggggggggggggggacctgctgatatttcaacaattacattcaaaatgaaaagttggagagattcctgaactatcatgaatcaccaaggttaatagctttcatgagcttattttatttgaatcaatcacattggtagcttacacagaatatggtatcataatgcagtagaagatgaaaattttgtgtttgacacagttatgaattaaatgtctcaacaacaactggaagtttaaagcaatacctgtagttccataataaattcggttgatatatcagcactcccatttttaacactgtctcctctaatttccttgctgggggttgacaaggacccatcatcttctcttactaagtagacatggtcattccttgatgctgaataacagctatcatcaccgagagagatacaggaatccaaatattcaccatt

SEQ ID NO: 3548 - DNA, 1043 bp, Zea mays
tcttgcatgcctgcagtatcttttgttgaattaacctacgctcactttattttatttgtataacacagtccatttagcatttttttgtttgatggggcagtgacaccctcttgagtctttgacattcgagatgctcttagttacttactctcccactctgtgaagcaaaaaaggtgtgggggaaaagtggcaactaaactaatgacagattaactctgtcctggttgctgtccacctgtcctcatactttagtctcttaatatctgatttattgattgtaagaaaattccattaccagttattttctcaatttcgtggacaatgcccatctcgtctttcagactgatgagttacacaagttcaccagattctctccttaaacctcttctgcttcacttgccatttcctaatgttatggtcccagttacacttccatttttttgcaggagatggtcccagttacactacatggttctgttggacacaatgaagccatccagatatgctattaaaatcctgctagttattatggatttaagttgtaccatgtctgttccatctacagctaggcagagcatgaactatcaaaggatcatgatacagacatctcacatcttagaaaattctgttcagtggttcttcaagggtaaagtttttactgtcttatgcactgaattgtcagtcgtagtgattttcagagcaacagggtgtccttttcttttttaaaggttcagctttggcgttccagtaggtacatcaggcgcataccaaaaccagtctcagccttctttcctgatccatgatgcctctcagcctataacattgatgacagtgactagtgatactagtgatcatgctggcgaatgctagacgtcattaccatacagcaggccagcagccagtaaggtgatgtatgaatcatttgtatctgccgcgttttaccttttttttattgtacatgagagagataccctaccccttttcgtgtacacccaggagctccactttggcagcctgccactctgcttcttccactcctgaaa

SEQ ID NO: 3549 - DNA, 739 bp, Zea mays
actccctggagggagccgtgccatggagcctaggcaagctccagttcatctcccagatcataaacatgagcagcaacatgctgagcggcacgatcccaagcagcctcggcaaccttcgcatgctggaaatgcttgacctgtcagagaactccctgtctggcccgatcccatcacagctgagcaacatggtctcgctctccgcggcgaacgtgtcgttcaatcggctctccggttcgctccccgtcggctgggccaacaagctcccagctgacgggtttctgggaaaccctcagctctgcgtacggcctgaagacgcagcctgctccaagaaccagtacaggagtcgcacaagaaggaacacgcggatcatcgtggcgctgctgctgtcgtctctggccgtcatggcttccgggctgtgcgcggttcgctacgcggtgaagacgtcgcggcggcgcctgctggcgaagcgcgtctcggtgcgcgggctggacgcgacgacgacggaggagctgccggaggacctgagctacgacgacatcctccgcgccaccgacaactggagcgagaagtacgtgatcgggaggggccgccacggcacggtgtaccggacggagctcgccccggggaggcggtgggcggtgaaaaacaggggacctgtcgcgggtcaagttccccatcgagatgaagatcctcaacatggtgaggcaccggaacatcgtcaagaatggagggtactgca

SEQ ID NO: 3550 - DNA, 678 bp, Zea mays
aaaagagccgcctccttcccggatcccgccgcctctcgccggagatgggaggctcccgctggctgctccacttcctgctcgtctccgtgctgctgcacgtcgtccggtccctggagtcccaggcgtgccaccccgccgacctgagggcgctcctcgacttctccggcggctgggacagcaaggccgccgggctcgtcgggtggggtcccggcgccgccgcctgctgctcctggacgggcgtcgcctgcgatctcgggcgggtggtcgcgctggatctctccaacaggagcctccacggcgtcatctcccccgcgctcgcctccctcgacggcctcgccgcgctcaacctctcccggaacgcgctccgcggcgccgcgccggaggcgctggcccgcctcccgaggctgcgggcgctcgacctcagcgccaacgcgctctccggcccgttccccgccgccggcttcccggcgatcgaggacctcaacatctccttcaacagcttcgacgggccgcaccccgcgttccccgccgcggccaacctcacggcgcttgacgtctccgccaacaacttctccggcgggatcaactcgtccgcgctctgcctttcgccgctccaggtcctgcgcttctcggggaacgccctctccggcgagatacccagcgggttgagccggtgct

SEQ ID NO: 3551 - DNA, 1058 bp, Zea mays
ttgtctggttttgtaaagctgatggcgttaaacaactggttctgaaggtttggggggggggtgaagtagactacactctaaaggtttagggggttatgtagacttttttcgtttcattgccttgttcttctgttgtgaaataataataggtctgctaaattagtaaattgaacatccagtttagtgattagaggtagcaaggcttagaacctagcaggaaatgagaaaaaaggttatggcttaatgcatgatactcataatcataattgttatggtccaggtcaatttttatggtccagaacaatttttgctaatagtttttttactatggaattctatttagttgtgtacttattgtctcatctgtttgactgttaggagtaggacatgtttgtttttggcttcttgtttaatttttagaagacacgtacctacctcttcctgaagtgcccttacattacatcattattatgtgtatatgttgctgcactcattttttattctatcctcataaatagcttcctgagataaatgaattaaatgagctagcagaattagctctacaaacgagcatatagtcatcttattattaataggtagggtgcctggtctgaccttgagatagaaatagaactggtgagtatattacagcgcatgtgttattctttagtttgattttagatctaagttacatttcagattgtatgttattattgttaataagagtttgtaaggtgtgctatcctgatggggggcctctgaggacctaatctctgtcgaaattacctaggcggtcatagatggagggccacttaagcgggccaggcgtcacaattctaagcagtgcagtttgctgacaagtttatctgatttcacctaaatcatgttactgatcaaattgacaaacggtagcatctctagttactgatggaatgcgttattcggtttgtgtgttatcttcgtaggcagttggatacttgactgctcattttcgcaaaatatgttacttgaaatatgcacataactacacatacttgagtctgcaggcatgcaaactg

SEQ ID NO: 3552 - DNA, 1092 bp, Zea mays
ggatcgaggaagcgtgggcgctggagcaggcgatgcgccagccggaggagacagggaagctggtggagctgattgacaagcttctctcagagtgggaaccctgagccgttgggggcgaagaacaatgcacggtcacggattgagctttcggttttcatagatagattcttgatggcaaagttttatgctcgtgtatttttgcaccgcaaggaatttcgatcaactcggcaaaaaaaactcgaaattgttgtgatataggatgattttgcgtatcagacactccctcccctttcgttctttttaatttatatcacagcttagttaaaaataaactagcttatttatcacggtttaaataggttttagattgccacaatgcaagtcgcaggaattatgagaagcaagcgctcaagatggattctaaagtcaaaactgatatatgatcatgcaacagtgcatcaacttatttgcgcacaagaaacaaaaaaaatgtccaaaatcaaaatacagagttgcctgatttcgaaatactctctcttgcacttgcactgctgcccacttttaagcatcagctctcgacctcactgaagacctaatttaagttaataaaaatattcagcttttctttgaggatatacaacttgtaaactcttccgtcccaaatctgctcctttagcttacacaatagggtagagacgaacacagaaaccagtctcgtgccttccaaagagatccagcttagttctttaactaaaaaccaccgaacgagcactattcccagcagacagtctgcatcgagcgcaagaactttttcttcctcgaacggacaaaactgatgcattaggaaccgcataattgaagtaaagagttgcaaaatccttgatccatccatctgatggtctaagcatgcacaccattgccattggcatagtatgttccgtttgagagaccattggtgagcttctttgggttcccattttggtgtactgcggatgtatatgagccattgctcagaacatgtttagctgaaccaacatgaccattgcagcggtcttgcagcaccctatccaactgcccagatgcagctgcaat

SEQ ID NO: 3553 - DNA, 1461 bp, Zea mays
atcttgcatgcctgcaggcgagcaagtggctcccctgtagcgacatagtcgctgctgcaacgacgtcgcgcagctcaggacgcccagcaggtgcaacggctgcacctacaccacgcacagctgcaccatcgcctcgtcctgcaccacgcgcagccgctccatcgccccgtcctgcaccacgcgcagccgttccatcgccccgtcatgtaccagtgccgtcacctgctgttgctgctccttccaaggtcggcatacaagcattggttgatagtgctagcatcgcctcaggttcagctgggattggaaggggggtcattgcctctggtgcggctggaatggtgaagaagagtggtgctagtcttcctgttggtgcaggggtgggaaggaagaccggttggctctcaaggtgggtcagctcatgctcagatgatgcgaagactgtctttgccgctgtgaccgtgccactgctctataaatcatccctagctgagccgaggtccatcccatccaggtcaatgttcccaacatttgatgttggtgatcggatccttgctgagaaggtatgctgtatttcagttccttttgttatgcgaataccaatgtgtatttattatgtatcatttgcttatattggtgaacaggcatctaatgtgtagcccctatcgtgactgtagatttcgtacattttccgggaaccggaaattctggacattgtgatctttcgggcacctccagtccttcaggtgtgatacaatgtttgtgcgttgtcttatgtagttcatcagagcttattataacaagaacaatctttgtaggcattgggctacagcgcaggtgatgtgtttatcaagaaagttgtggctaagggtggggacatcgttgaagtaagcttttatcccaatggtagtaacctctatgttttccttcattttggcattactttttatttttggggattatatgagccaaccggtgtcccttgtatttaataggtacgtgatggtaacttgattgttaatggagtagttcaggaggaagaatttgtgttggaaccagccgactacgaaatggatccgctggtataataactaatcttcttaccacatgctactaaagagccactattttgtagtcctgtaagtaagtcgcctccatcatagttatgtggcatcaattcttgacttttgaattgttacaaattggttgtgacctcaaaagtattcctgtgttctatgttcatatattaagtttactactttcatccactgaatctatttacacgtgctgattaatcgttgttgcttggccagactgtgcctgaaggctatgtctttgtactgggggataacagaaacaacagctttgattcacataactggtatgctaaaccaccaatagaggctttatgtttcagtttttaaccccagtttctacagcaatagctcatgtgttctgttgttt

SEQ ID NO: 3554 - DNA, 1232 bp, Zea mays
agaaaaaaaagcggtgaacagggaggtcggcaattccctgccgaaagagtacagtttgaacgcagggaccattcaacacggccagaccggctgcattgcccattgcagacttggatagcaggttttcgactcgccttgccggctacatgggccccaccttgttccaactatacgggccactgggccacccgctgcggtggacggcccagatgctctccacggccgcgaaccgcacgacggcacgagaggagagacagacagagagagcgagcgactgagaccgacagggttcggttcgacccgatgcttccggcgctgcggcctcgccgccggctcccggtggcatccctcctccgccgcctcctctccgactccaccccctcctcctctggcactggagagagtgatctgatggccgcggccgcagcgaaggcccgggcggaggcggcagcgcgggctcgggtggaggcgtacaagcaagtccaaaacttcgactggagcagcggcgccgactggaagaccgccgccaacatcctcttcacggtgccccctaagcgcaaggagttcgggtgagcatcaagaggcaaccatgttcctctcttagggtttacggattttgtagtctcggtaccaattacgtcggcgaggtgagatggatcattgaatgggagtaggataggggcaacgcgatgagatggagctgactaatgtcattttcatgtcgctgggaatgtctcctgttgctttctttttgcttcgtgatacgagttacagtcctgataattatttatagcattggctgaggagtttcacaagtatgtcagtttagttttgcacgtattataaggttattcagaaatttcttttgaatagattgctaggagcatttccaccactccagattagctaggaatgagtaaaaatgcatgtatagatttgttagggattttttttaactctttttatttctgatgtgccaaatagcccagaaaacctctgcaaaaaactgatttgtccccacccccaaagagtagtaactctcaatttatggaaaatccagtcaggaataatatcgtccagagacctagggcttgcgtccaagttcactctgctttgatgcaaggaaactggaatgttttcgtgaggcaaacaaacatatgtgattgacactttcaagcttgccacatagagcacaaaattcatcccactgccagttatgtgtccattctttt

SEQ ID NO: 3555 - DNA, 1131 bp, Zea mays
cgtgacacgctcgatgccgaggccaccgccgacgggatactgttcaacacgtgcgccgccctggagggcgcgttcgtggagcgcctcgcttcggagctcggcaagaagatttgggtggtcgggccgctgtgcctcctcagttccgactccgacgccggcgcgatggccgggagaggcaaccgcgcggcggtggacgccgaccgaatcgtgtcctggcttgacgcgcggccggcggcgtccgtgctctacatcagcttcggtagcatcgcccgtctgttcccggctcaggtcgccgagctcgccgccggactggaggcgtcgcgccggccgttcatctggtcggccaaggagacggcgcccgccctcgacgcggagttcgaggagcgcgtgaaggaccggggcctcgtcgtccgtgggtgggcgccgcagatgaccatcctgtcgcaccctgccgcgggcggcttcctgacgcactgcggctggaactccatcctggagagcctctgctacggcgtgccgctcatgacctggccgcagttcgtcgaccagttcctgaacgaggcgttgatcgtggacgtgctcggcaccggcgtccgctccggcgccaaggtgccggcgacgcacgtgacggtcgttaagccaggggaggtgctggaggtgcaggtctggagggacggcgtcgacagggcggtcaccgacctcatggacgagggccccgcgggcgcggcgaggcgggcgagggccaaggagctcgggcaacagatgagggccgcaatggcgaagggtgggtcgtcggacgccgatgtgagggacgtggttcgccacgtcgttgaggtcgcgcggaaaaagagggagcacgaggacacagctcttgcagtcttgctggagtcgagcacgtgagcaagagcaagggaaagacaatgaaaggcaccggtggcaaacactactgttgaaattcgtgtggtactatcgttctcgccagcttcaaagagaatctttcgagtgtcagctggtagccacgcgaaaaaaaaaatagtaaaagcacccccacacatctggcaggctaacacgaagtcacgaaccgaagaaaacaattacagtcaaagtggtaggcttcgtcttctattaatg

SEQ ID NO: 3556 - DNA, 762 bp, Zea mays
tgcatgcctgcaggcctattacttcagcaaggacgagaagcttatggtgtacgagttcgtggccatgggcagcctttcctccatgcttcacggtacgtgctctgttcttgccaagcgacctgcgaatctgcgatccctctctgtcctgttttgatggccgaattgaatggtttttttttctttcttttctgacggggtttcttaccgcaggcaatcgcggctccggccggtcgccactgagctgggagtcgaggaggcgcatcgctttggcctcggcgcgcggtctcgagtacatccacgccacgggctccatggtgacgcacgggaacatcaagtcgtccaacatcctcctgagccgcaccgtggacgcgcgcgtggccgaccacgggctcgcgcacctcgtgaaccccgcgggcgcggcgacgacgacccgcgtcgcggggtaccgcgcgcccgaggtggtggcggacccgcggcgggcgtcgcagaaggcggacgcgtacagcttcggcgtgctgctcctggagctgctgacggggaaggccccggcgcacgcggtgctgcacgacgagggcgtggacctcccgcgctgggcgcggtccgtggtgaaggaagagtggacgtcccatgtgttcgacacggagctgctcaagcacccgggcgcccgaggacgagaaggggggaaatgcctgcggctgggcccatggaactggaaccggaggccccgcttccgggacccaacgggcccgggccctttgcccc

SEQ ID NO: 3557 - DNA, 1087 bp, Zea mays
atcacaaacgaactccccaatatatatattagctgataattgtagacaaacgaactagtacttattaatgtatcagaagataacagaagacgaacaagctagcactcaagagatgaaatctaacaggcagacgacggaagacacatcagtcgaaggcccaggagttctccctgcggatctcctcctcctcctctttggtgaagtcgttcttgatgttgaatgtcctgcggatctcctccggtgacttgtccttgaacatgtcggccaccgtctggcaggtcaggtccagcaaccccttgatgtcgagatagttggcagccaggacgaggttgaagagcgtcacctggtcgaccttgacgaactccgcgtcccacttcttgaggtcgacctcgccgccgcccctagctgatgaggcgctgctgctggtctccgcggcggcggagtcggcggcggcggcgtggacgtgcttgttgcagtacttgatgaccagggcgagagttttggaatccacgttggggagcgggatggcgttgtcggcgcactcgtcctcgatcatgaaacggatgatctctgactgcatcgccaccgcctcctccacctcgaaatccttgtagtcggagctcctcagcgtaatcatcttcttctcagccattggactggactgaatgctagtaatgcgggtgcaggacgaaaccctagctacctaggtgcggcgcgcggcaggatgattgggaacgaggaaaacgaacggaaggtctcctttataaagtccaggagcagtcgtatcctactcctactccacaatgtacggaaggatttgcaacggcagctatcgctccgatccggccgggacagttagtaaatgaaatcaaatcgcggaggtggcgccattatttgaccaagcatgcggacaatcccgcacgcacgaacccaccttccgatcccgccgcccccgatcccagcaaacatcccagcagctttggataaactttagctggctaaagtgtagttcagttatgatgaattgaaacaggcctgagttgagaatgggagcagatcacagttcagacgatcaaaaacgagtctc

SEQ ID NO: 3558 - DNA, 1221 bp, Zea mays
cttgcatgcctgcagttattatgaaaacgattttgctctgtcatttcgtaggcatggggggtcaaggggacatgtgctgccatagccatatagctcctatatatgcctacttggattggcccacagtacacatggagcgaccatgtagccaataggcaaaacataaaagaaaatggctaatttctggtagtattttgttaaaagtcacattatcaactatgttttgaaaagtttgttatgcactcaccctcggttggccactttattttgcttcacttcacataaaacacaactactctgtgtctaaataattcaactgtagtctctagtcttagatcatatattttaaagtttgatcaaatttatggagagtagatttatttgggccagagggagtaagcttcttagtgtagattggcaccatatagcttcgccataggtgaattttgatcctagatccgccattgcttggaagattgttgattcattcagggtattaaaccattggcttaggcatctcaaatgtcacgaatcatgatgttatgatttatgaacattctattgcacggtaaattagtgattggggaggggggatgcatctcagtagtgaccacattatcatattatcacattatcattgatgtatggtcagtctagacataacatgataatgtgttcactgctggaataggttagtataggcattatattctactttattgctccatgtaatgttaataacattatgttattaggctgaatgagtcattgatgacatttccttttccagagacatttgaagttgatattacaaacacaaaaaagcttctggaaggtgaacgaggacaggttatagctcaaaaggatgtaattgtaagtattttctttgacatgagtctagtgaaaagcaaaaaaaaaaaaaggaaaggaaaagaaaagaaaaggaaaaaagtacgtttcctctgtgtttggctaggactacgctccatgttacatgtgcagagctattcacagatcacactttcacaaatcataccttgttgcacagattcttatacaaaaaataaaatgaattagtgaagtacaatgctaaccttgcaatgctagtattctacaattaggtttactgtaaatgcgttgatagcacggtggtatgtcctctgtttgggaggatgctaaccagggttttcaaatcctaggtcacatgaaaaataggcgtct

SEQ ID NO: 3559 - DNA, 1170 bp, Zea mays
cggtacccggttatccgctagagccgacctgcagcattgatgaggacgccgtcatggaagagaagggtgccggcgaagacgaagtggaccaggaggcggcgggtggtggtgaggacgagagcgagtggaagcgtacgcatggcggcgaggcggaggaggggatgatgatgatgacgatggatcggcaggagcgtgacgacgacgtggcgccgccgtcggtggaaggatcggacaccatcgtcggcgtggtggtgggtgagggggggcgcggcctgccgccgccgttcgccgggtgccggtactggatcccgacgccggcgcagatcctcgtcggcccggtgcagtttatctgccatgtctgtaacaagaccttcaaccgatacaacaacatgcaggtatgttaccatgtttgccttgcctgtactggattatattgaacttttgttattaccgacttacggcgcgacctttgatttgcgtttccctgtcgtcctaactcttgttgcttatctgtcgatcatacatacgcgcgtggcttcgataataacaattagtaaaaacaacacacacacgtcgcaattgatcgtgtcccggccgcatgaacttgcaagatttgagtcaataattgatgagtgtttttttggtagataagctaggaatgacaccagcacacaaatttgtacgtcatatataagtatatatgcggcaacaagaagagcttgtatataggtgcagatcatggaattttttattgcaagttggaagtcgatggatcgatctcaatttcatgctacaccatttctgcatgcgcgcgcgcacacacacacacacacagcgacctaattatccagtagttcttcaaaatcaaagcacagcacacggcagtaagtaattcgacctaattatccagcaataaacaagcagaaatgttgataaaaattccctgcccttagttactactactactactccagctaatctacatatgcacgcattatatatgcatcgcagatgcacatgtggggccacgggcgcgagtaccgcaagggcccggagtcgctcaaggggacgcagacgctggcgctgctgaagctgccgtgctactgctgcgcggcggggtgcaagaacaacgtggcgcacccgcgcgcgcggccgctcaaggacttccgc

SEQ ID NO: 3560 - DNA, 1234 bp, Zea mays
tggctccaggcaacatttacactgccgtgcatgacctactccagtatgagcagaagaaaaggagttaattcctccagttccttacttgaccagttaatactacgacagagcagtgagtaaccacccgagtttaacccacacagtagatttcactgtaaaaaatgtactagcctctgtattgtccatcaaccttcagtccaaggtcaatccggaccaagcggcatggattcatggcgacgccgctatcaatcagcatccacccacacccacacacacacacatacacatggagacaaaggtgtgggcactacgagcgagcacgcgcgcgctggtttctcgcgcgcttgtcttgttgctggagccagccaggtcgccgtcggccattaacgtggcgcatgaaccaggacgaagctaaaatctgccaggtttaaatgcccgacctaatactcctctctaccccagcgaaaagctagaaaccaaggcgagggaatgtgaggcaaaactctgagtcaatgcgaccttgatgacgcgcgggaccaagccctaataatccgcgctccggcgccttgctaacgccgggttagagacggcggtgctactcccatatgcgtcccgtcgccgaggttgtggattgttgaaaaaaagagcggcggggaaggtgagtgatttggctcctgtactgtatgtaaaaaaaaagagggcggtgctgtgaaggagacaagaccagattttgacagagaaagagagagggggggggggtagtgatgccctacacacaatcatgagatggccaagtggtgttgttgaggattggttggttctacgaaatctacgtctaatcaaagcatggtgaaaccatgatgaggaaaccctaaaaccatgtttggcttgttcgctgcggctttaatctaactgcggctgcggcttctacagtattttgtctctagggattgcagccgcaacagtattttgcagctgcaacagtgctctatctgtggcagccgaacaagctcatagccccaacaatgcggacagcaacgtgtcgacgccagatcagtgcggtggtaccctacgacatatatgtagtacaagggtaggatgggacttgttggatctgcgtagggcttgcttggagtggactgctggatgcgaacttacagtatcatataggaataggactataggagtagcgattctcttctctttttttcccccaaggtttcttcatcgtttt

SEQ ID NO: 3561 - DNA, 1149 bp, Zea mays
gtacagaaacaagaaaagatggcgatttactaatgtctgctgcctggcagagaattgaactacattgctttgtacatggccgccctttgctgattatctttctcagcttactatagagatgagtgcattggcatgttagcctcaatcagggggcctcaataacaacagatagttgacctgtgataaactgaagagataacagcgtcctggaaaatcaccggacactgcccaatctattgagctaaagagttctgtattatgcatcttttgtgtttcagaacagttagtttcacccataatccgatccattttttggttggtacatgtgaacatctgattgaacttggttttcttagaatttttgcaaatggccgaaatctagtcgtgagcacgttgtttcaacgtatccagtattcacgtctaacgtctcaagtgcttggaacgtttgcatgtggactctgtagcacgatgattgatgatgaatgatgttcgttacgtcttgactcatgagctgtcaactagaccacagccatttgccagagggtagccgtcgttttctgttagaagaagacataacctacgcgcgaggacgatgatgtgtgccatgggagtacgggagcagcgcgcatgcgccgcgtggaaagagtcgccgaaggtccaactgcaaagattttgaacgtgtcaataacgtgagaatctgggcacgaatgcacgcatacacatttgaaattcacggatagaccaatttttcttgcccgctgatccagggtactagcaacagcaggtccgttttcagctgcggaaggaattaatccactattttgcaattatcttactgtcttctgagtcctgccctcttttatttaccggagatgatgagttatattaatatattatttaagattacttcacgcatatacagctaatcaccatctttgatcgtccgtgaccgtcatcctcatcactgtctctctctccagcccagctacagctagcgtccactgccaagtgccaacgtcgccaccgtcagccgtcatatagcgggaacagatgaaagaaagaatcaccaaacaaaccgcgtccgcgtcgagtctctagtctctactctctcggctgtcctgtccggcgcggctctcgcgtctccgacct

SEQ ID NO: 3562 - DNA, 760 bp, Zea mays
atatatgttttacaagaacgtcatctttgcctctcatcatcatcacatcagaatcacgggccaacacaacaccaccggcacacaaggttgcagcagcttcgctttcgctgcatctctgtcagctcagatagctccgaacccaacaggtaacgcagtaagccaaggcagcctagctccttcctgaatggctcacagccataccacaaaaactgtacatcagcagcactcctgctggtccgtcatagccgcacgtcgccgatggtctccctctcgaactcgcgcacagcgccggcgacgcgcttcatgctgccgtcgtagtaccagggcgtcttctcggaccacgtcaggccgccgcccttcttcggtggaacggagacgaactcgcggcacacctcgccgaggacgttgatggtgttgtggtagtggtagtaccggatgaggtgctccgtcttgtgcgtggtgttgccgatcacgttctcggacatgtggacgcctgtggcgtacgcgttcttcgcctggatcgcgtacttcctgtccctcctcaccccggtgatcgagttccggaaaaccagcttctcgaatccccattggctgcacaagttaaggcgaagaagaataagtcgtctcacttagcttctttggacatgcaactaggaatgcttctacggcactagaaatgccaatcgaaatgcttctaccggactatgggagtgggcattgcaagaaagcagcaactttagaagcaaacgcaacgcacagt

SEQ ID NO: 3563 - DNA, 1042 bp, Zea mays
cccctagaccagaggccgcgacgtgtcggtgttcggcgagctgggacggcggcgggacaatcgagaagtagagaactctgcgattcgcgccgtcgatcggcagtgaggatcctgctgggctaggagggaatgaagaagatgtcgaacaagtcaacgtcatgaaaagggttgcaaacaatgcgagggtctaaccgcagctaacttcgttagactttttctttttaccttctatttgaatttcacactataaacgatctaatcagtattttgaagagatcaaactataatggcggtatgtgtcgattggtcaagggatgatgtggtttgctaaagcatctcaatagttatgtaaattaagcaccctaaattatagatttggagagttctcctttatctgttgtttgagcgagcgttagttctggctgtgttagtgtcttatgctgtatcgagtatatttctcttttattgttcatcatagtttgatcaaggatgacgaaacagatacacacacagtgacataacagaaaggaccacacgtaaggataaaaatggtggatgctcgctagacttaacaaccctcttgatctaatcaagtatgacaaagcgggtgcacacagtgacatactaaaaagaccacacggtcaaggatagaaatggtgtatcccattgaaatcttcatataacaatggccacttgtttctcttactatgtatagggacaagggtcaaaccgtacaggtagaaaaaaaaaactcatattgtaatacttctcacattgacatgagagtcaagcactccactttgtaacaaacgaaagccagtaacaaagactttagcaccaaactagacataagagttctttccaaaccagtttaaacttccttcctattttgtgtctagatcagggtcaaaatataacagtggcacactaaccccatcctatcatacaaatttactagttgtggggtcaaaaccacaaaagatggtgtgccaattagggggtttcacatgttacatttatctcttggtggctttggacattt

SEQ ID NO: 3564 - DNA, 955 bp, Zea mays
cctactggagattcgcaaggagtcatttctctgggttatacagtgaagatcagatggtctatttcttctttagctgctgctgctcctttggtctctgcctcaccgtcgtcgccccgtgatcatgatgatggccctcggtcataccggcggttccggtcacactctccacgtgggcgaccacgggaaggcatcaatgctagcaatcttgaggagctgggacagcaacgtcgttcagccaaagatagactgggtcccagatgcttggattccaaacaaacaaatcatatcccttctgatttggacaattctgtggatggcccttgctgcgatctcaacggagaacactgtgcgggcctagagactccccacggggatgactcggctccggtgcacattgaagagcaagcccaacatgctgttttttctgatcaaatggactgcattcccattgggcagcagaatttcactggagatttgtgcttggttccaaatctcattcaccgtgcgggccttgaggctcccttcggagaggcttcggctccggtgcacattgaaaaccaatgcagcgaccacactactgaacaccgtgcgggccttgagaatccccacggggatgactcggctccggtgcacactgaagagcaagctcaacatgctgttttttctgaccagtcgaactgcaatcctagtgggcagcagagtattactagagaattgtgctcggttccaagtaccaaacaccgtgcgggcctggagcctcccttaggagaggcctcggctccggtgcattttgaggaacattcccatcagcattgtttccaaagacaggccgctgcaacatcagaaagaaggctcatagaggcaccaagcctgctcgtttatcatagaaaaaagaagcataataagccgctagttgaaattgctgaagaaacaacggaaaataatatcattccag

SEQ ID NO: 3565 - DNA, 1276 bp, Zea mays
agaagagtttagttcctccgacaagcctgggcctggctggacattttgtgcacaatacaggtgggggtgtaccactcaagcctgataactcagacaccgcagcacatgggttaccggtgaagattaggaagtggcccggactaagtaagataacaggttttacaaagcgacagggtggacttcctcaaggttcttatgtcatcggtggatctcccattggctggaattttcttgtgtggcctggaagcaaagcagtctactatggtttgaccaaagcagagtggttggctcgtcaatctgcaaatagaaattcgaacatgctgtcccagtgatctaacagctacatggatcgatctttagaagataacatagtattccctaatccctagttattgtgatataagtagaaccaaatagtacatgacgcaccaggaaggtaacctctgacaccagagcatggtagcttggtaaggtactgaggtatattggttttgttgctcaataggggtaatcaacagtaaatactagataatagatatacggagaattttggtactgtaaactggatgggccggccaagtgtccatgttatgtcttctgttcagaagtggatacgaggaagaatttaaacacatgacagcgcattagcgccgatgcacacttcaaatcaactggtggagcttctgactccctgctctatgtgactttgttcccgtaatttctgtatcttgcctgcctctctttatctgtggagagaccagagagaatgcttgtgaaaatttgtgtttagttgcttgtttttgcagctattgttcaagcgcagaaatgctagtggtattagtttggctttctaccttgcctgtcctttttattagtttggctttctgccttgtttgtctttttcttttggtctgatgagatctagattttctaacttccataaccttgaaacatttgagcccctttagaatgcaggaattttagaggaatcatatataaatttcacagaaatcagttcatttttacgaaaagcacagaaaacagcaaaaaattcggcaatccaactgaaaacctcaggataaacaggaggatctgttcggaatctggacggcctgaacatcacttcacttttctagtcagaacaagggcgtaggggaccaagccaccaaggccccgcttctgtgtcttccattcttgtcggagcgtgctccgttgttgacggaagcaacgcttttggggcatggaaacgggcctgcagagtagactctagaggatc

SEQ ID NO: 3566 - DNA, 1355 bp, Zea mays
actttgtcaaactaaaagcacttgcaatatcagtagctgaggaaattgagtttcaatttgattgtacagacatttcacttgcaaaagcatcaaagtctgatttacatctgatcaatatttcaattgacgacgagggacatgaggaagatggaagagactggacgtcacagatgggtctaaacctgaaatattctgccaaactcaggaaagagaaatcagaaaatcaagaacagtctcctttgccatttgggggactgctttcctgcccttcgcctgtttcggttgttcctaatcttaagtggctttgcaaaagagcgcggacaccatacacagttattggtactatgaggggttctagtgcaacagcaactgctgcggaacttaagcctggagtgaaaacagaaatattcactaatggaaatgtttgcgaggatgacaatagacatcattcttttcgacaaactggcctcgagcaaccaggtggactacaagagtttgataagccttcatgttccgaggagaatggccatggaagacattgtcttgttaacattcctatcgctgttgctgaatatcctatgatgcatcaagtccgtgagggtccagtgagtgttagcacgtgcaatgactccatttgtttgtcaggttccctggatttacgtccacacgcctctccagttgaagtaactagatacctaggatgtatacagtcaactgagccgagcagtttaccagccttttctgttcaacatttctttaatgatgaaagtacctctgtggaaggaagcatagactgtgtaagcaatggctgcttagaatctcaggatgatattttagggagcagagatgaacgtttgcaagttcaacaatatcaagagaagatggggcttcgcaataaccccaatatgaagtcagttgattcacacctgatagaaggtttggctgtatcagaaggaaagcatggggaaactgtggcagcattccttgaaaacaaggagcgttgtgctaagacatcctactgttctaacactgaaacaaaaactactaaatctgcaatagacaatcgattggagactcatgatctgggtaccggtccagtgaaactaaattcaagctttaatgagatgcacagtgctgatagacaatgcagtttagtctttggctgccttgactcagctgatgttcctgcttcaactcagcctctgtcagtttcacctgttttgatgagtgatgagcagcaggtcgatgacgcccattctgctgtcaaggccattgagcacctgggcaataatctggctaacataaagcacaaatccctgcatatggatgtcctcatgttagaggacgcccaagtt

SEQ ID NO: 3567 - DNA, 1134 bp, Zea mays
aacccatgctcctcatccttgacaaaaagcacattgaggacatccataacaattataaaaagcagcggagacaaggggtcgccttgccgcaagtcccttctatgagaaatgaagctcccaggcaccccattgagcaggacctgggtggaagaggtcataagaaaaccacttatcacatccctccacatgggaccaaagcccaaattttccaatacttcaagaaggaaaggccaagagaccgagtcgaaggccttggaaatgtccagcttcaggagaattctaggcttatttttagcatgcagaaatcttgctgtctgttggacaagcataaaattgtcttgtatgaaacgacctttgatgaaggcgctttgagctttagagaccagcccctccatgtggcacctcaacctattagcaagaaccttagtaaccaacttggcgaaactgtggatcaaactaatgggtctgaaatccttggcaactagagcatcattatgctttggcagcagtgtaatgaaggctgtgttaagaaatctgaaattcctgaagtctctcctccaaactgttgaaacagccgccaaaatgtcgtcttttataataggccagcaacacttataaaaatgcccagtgaaaccatgggggccaggggccttatccaaggaaagctgcttgatagtgttcaagatctcctcagtaatcaagagccttaagatcatgctgctgcaaacctaaggcttccaggttgatagtttgatttctttgcacctcacttccgattagattcatatagaaatcccagaaaacctcggccttcccatcatgggaggtgatgagctgatccccatcccttattgcaccaataaaattcttcctcttacgaaaccttgagcaagtatgaaataacttggtgttggcatcgccgtccttgagccaagacaaccgagatctggtcctagccaccgtcctgagcagggaagcaagaaccaaggaatgcttcttcaatctctgtagcagccagcattcgaggtcagtaagagatctaccatcccttgccgattccagttgcaacatcacttctctagccaactcaagttgcaacttgaaattgcccacagtcttgtcacgcaatggctg

SEQ ID NO: 3568 - DNA, 1282 bp, Zea mays
tctcccctggttcccgcatcccactcgcagcacgagcgctcagcgtctctgtctcctcctccccacaaaaagcagctgaattgctccgtcggcgtcatgtgtggcatcttagccgtgctcggatgctccgactgctcccaggccaggagggctcgcatcctcgcctgctccagaaggcaagcacccgtccattgcactgggaccgagctcttctcatataggaaccataaagaatcgaacggtagagagactaggatgggccgatctgaaaaggagcatgggaatcttactcgctcgttcaagcaaccctgtgtgtgtgtgtgactgtgtgcgcgcgcgcttctgtgtcactggttacagtattgtcgggtgggcgcgattagttgttggttagtgtttcagttttgacgactggctgacctgatgatggtcggtcactcccacgtggtgtgcaggctgaagcacaggggccccgactggtcgggcctctaccagcacgagggcaacttcctggcgcagcagcggctcgccatcgtctccccgctgtccggcgaccagccgctgttcaacgaggaccgcaccgtcgtggtggtggtaagctaataagatccaaatatgcacgcgcgcagcatgcatgctcaagcgtcgtctagctagttttgagggcccctatctatgctgtagttcctcagcatgcatgcgctttgtttgcttttttacttcacaggccaatggagagatctacaaccacaagaacgtccggaagcagttcaccggcgcgcacagcttcagcaccggcagtgactgcgaggtcatcatcccgctggtgagccttacatgcactgatcgtttcagttccgaaaaccaaacttgttcttcgcttgcacactaaaagaacaaacgatgcacgagtgcacgcgactgctagtagctgatgccaacgttttcttgcactgatgctgcctttgttattggttgtcgcgttcgtcggcgtcatcatcgatctccagtacgagaagtacggcgagaacttcgtggacatgctggacggagtcttcgcgttcgtgctctacgacacgcgagacaggacctacgtggcggcacgcgacgccatcggcgtcaacccgctctacatcggctggggcagcgacggtcagactcagacacagcgtggcgtggcattttcgcagtgcggtcgcgccaagcagagcaccccagctaggtgggtcaagctgaagctgaagctgaccgatcgattttctcgcctcgccttccctccact

SEQ ID NO: 3569 - DNA, 1253 bp, Zea mays
ttcaatcaacgatatcttgacaaggtgctgaatcgaggggtaaagcttggataaatcttcggtaacaaaatcatgcaaagatgctgcaaattccactccagtaggtccaccacccacaacaacaaaatgaagattcttcttcctctcttcttcattaagaaaggggaggcttgctctctcaaagcagtccatcacactccgtctgatcttttgagcatcctctacttcctgcaattaaagtacaaaatgagtaaaacgatgtggcttggaatgaaaaaaaaatcatgtaagtaaaacattatctttaaaaaaaatgaaatccttatcttaagataagtcaagaatttagatatggttcatttccatgtagacaagttacagatatggacctaacaacatacatatacaaggaattcaagtcctgcattcataatggagggttaccttcaagaagtggcaattctctaccacaccaggagtattgaatgtatttgtcctagccccaactgctaccacgagatagtcatagtcaaccaagaactcgccattcccctcaaggcttgtcccaacattcgagcgacaatggattttcttgctttgtggatcaatcttgaaacactctgcttcccaaaatttgatttctccacctttctgttaggcataagaggcaacaaatgaatatcagtccactggcaacaaatgtaatcatctgattgagttagcatgctagtgtttaatattttggagtgattcaaacacgaatagtgtttgctgcatgtttagaaaaggggaaaacgaaacatggttgttcccaaatgaaaagaatcatccactgattgtatgtgtgggacccaacttgccgaggtgcaagatgcaaggtcagaaagatgccgaacttcaatggttcatcagaggaaacaaaacgccctaatgttttcagtaaacagtattcaatgagtttagacagagaactgaagctgctgctagacaaaacaataatcaaactaccactatacataaacattcaagtcatacaatgtccacagcactgatgcactggtaccttcactgcaaactgacaattgtcagctgctctggttcacaactaaatcctatgttaaggcagaagaacggcatctaatctaatgatctaaaaatggccaatgactcttttgaaataagaatgagagaagcacgcgggatgacgtaaatgctagaacctattagcagtgagaaggaaccctcaataaact

SEQ ID NO: 3570 - DNA, 1342 bp, Zea mays
acttccatagctgacaatgtcactatgtgctggaccaatccattttacatttactgttcgctccagtgcatccacatcactcactattgccgttcgcggacatcttgcagcatcttctacagtcagtttttctaggacaaattgacctggccaaaaatcatggtcaccaagggtactcacagggagtaatgcctggggttctagaccaagagatacagttccattctgccacagaacatcaacagtgctctttgtcttggcaacaacaaatgtttgagaacaatctgaaccataactttcaaaatacatgtgtgcatgagagtcacacttctggtcttcactaagaatacaagacttgccagaatccatccagaggcatccattgttgtcagtcataagagcacaccaatcacctagttgccaattagcgtaagggaaacatgacagcaaggtgagcttctttgggtcctgaatgtttggaggacttgatgatttatctccccaaacattggttacagatgtgatccagttcacatgcaccagccctacatcgacatgagagacaataccatcatctctactgggcctccatgatccacataaccatgttgctgacttggaaactgacggatcgactatcctcacacgttggccaggataataaaagtaaggtgcatcttcaaaaagaacaggaggaatgggcttcagtacatccgaatcccttaacaggatttcacactttgctccatcactgaataaaagtgtgacaagatcaaatgctcttatcactcgtccaatccatggccccataacaacgcagtcaccggaaacaaaagatctcactcttgatagcttcttgctgtttacatctttaattatgtcacctgagcttgtctccaagtcaacaaacattgcaacaccaacaacacgtcccagctgacctgagggatcagaaacagggcagactatatccccatgcagaaaccccctttcaaaagtcaaaaaattatcaatcttgccaatgctctcatccagactggacaagatgttttgggcatggtcactatatgtaaattcacattcttggtcttcactgtcactggtcccagtatatgactcactatccgagtcaattgtaaacaaatccatgatttcaaaccctgcaacgtcacacttggttattgatacggcataagacaaccttgttaagaaatgttactccataattacctaccttcttagtaaggtgtggctgcttgggtaacgtggtaatctcaagaacaaggaacaatatgcaaattgatgtccagaaggtcaatataccagttggccaagtattggt

SEQ ID NO: 3571 - DNA, 1215 bp, Zea mays
ttggtcgcttttctccccagtctcctcccctccaccctctcgtctcgtcgcacctcacctgcttggtcgcttttctcccccaatctcctcgtctcccgccggcaccaataccatcctctgtccgctcgctgttgctgttgctattcctattcccgtccgtcccgtgcttctactcgctagtcgtctcgtattcgtatcctctctcctcagccgccctgctcccctcccgtcctctggtgtctggtcaaaccagcggctcccaagatttgccgctgcttccttcctggagaaatcaagcctgtgcggcgagaaatcaagaggaagggggaagagagggagaaagagagaggggcgggggtggaggaaagaaagcctgccccttgcggacgtgcctgctccctcgggggcattcaattggagccaacagtgggcgggtgggcggctgctacagcacggcggcctccataaattagctccccgcgtcccggccccttccgccccctgtcgtcgcgcccgccccgtgtctcccccgatcggtccgtcgatcacgcggacgcccgccggagcatgcgcgccgcgggcctcggccgccggagaagcatcatcagccgccgcgccgccgccggcgtccggaaggagatgtagcgctagctccccgacccgcgaggaaagggaaaggggaatgaccgttacggcgcgcgggaggagcggtggagccgggatgggggagaagggcggcgctcccgggctcggcttcctgagcctcgatcggatgcgcgtcctcctgccgccgctccgcctgccggagaagctgtcggccaggacgctgcggacgcacctcttcactaactaccggatgcgcaaggtgcgggacagctccagctggctcatcccgctctgggtcagctcttgggtcctcgtcgcctccctcatctacctttgcatgagctaccaggccgtcggcaagcgccgggagtctctcgccagcatgtgcgacgagcgcgcgcgcatgctccaggaccaatttaacgtcagcatgaaccacctccaggcgctcgccatcctcgtctccaccttccaccactccaagacaccctccgccatcgaccaggtaggtaccctgctgtgctgctatcctagggagtgttccttcacctcaatctaaggctaagcaagatttcttctcccgggcgtgacgaaatccatctgaccgtt

SEQ ID NO: 3572 - DNA, 1144 bp, Zea mays
cttgcatgcctgcagtcagccagctctacccaccacactgaattggccaccagtccaccacactccactctccacaccacgccaaggcccacggccaggccagccaccacgtaccctcgttcggaatggaaacagtgggcgagcggcgaaaaccatcgtcgtgctgctccacccgtgctatcgcgtgcaccggcgcggcggcacacgtacgggtggaatggaaacagtggcgatcgtgctggtcacatgtcttggtcacgcatggcagcacgcctagtactctttttttttttttttgccgcttatcaatgacgagcagcagtcgacaagccgcgccgagggggacgacggccgagcacaacggccaaaccggaccccgggtacggtggcgcgagcaagcacggaagggccgtacggatgggcgaagctgatcccgacccgcatggcccacgccagcgtgtgggcggcccacccatcccacgcgcacccgctgcgctgggatggggtgggacgcagatagagctgccgaatcctccgtgacgagcgggtcccacgtcgacgcggtggcgcacgcgacacgtcgtacgcgacggggaccggacgcctgcctggctgcctgcctttttcctgccttgtggagccgtcctcacgtcggggaggcctgattattttatgcataggctaggcgcgcgggtgccgtcgccgtacaatcttaggggggttccgtacgggacggcgtgtaccgtccgtccagcccacggtcgggtccaccacgctccggggcccgcgggcagcgtagcgtcactggcacggccacgagggggccatgtgtgcgtgcgctgccctgccctgccctgccatgctccgggctaccgcagcgaacaccgcgcgtggcctgtggttttctgccgcctggacggtcgggctcgaatcggtgtgctggcttggcttgtcctctctctctctctctctgtttcaccaggccactggtagagtggtaggttgagctacaactgctggtgtttatcactcacagtcacaggttaccgacgacgagtacatcctcttttgccgtcaattaatctcgaaaaccagtacaagtcacgttccaacagtaatctaccgctaccggtaacaaagaaaa

SEQ ID NO: 3573 - DNA, 720 bp, Zea mays
aactctagatgtatcaccctatgcctcgagcaaggttaaatcaactgggcaaggagccaagccaccaacagggcaccaagcatcttctccagaaactcagcttggttcctcacaaccaggcgaagatgccccagcagtacaaaaaattgctgcatcaggtaatgctttagtatgtttcctgttggttaactaaaggtgcatctttgtgtctagtttagtagaaaaaaaaagatactaaaatagaacaactctgccacttctgatgttgtttctttcatttcagatgaaaaatctgccacggcctcaaaaccatttgactctgctgaaccaagggaagaagatactgatgctgccactgctgaccaaatgactgtaccaccgacaaatgttactcgtcaggtcacaagctcaacaccagatgttggtgacactttatcaagagataaggaatcatctcctgatgatgatcagatcagaaatttggggagcccacttattgctagccaagaagaagcctctcgtgctggaggtgaaggatctactcctaaggtgcatagtgccattgtagatgaagagagaacactttcatctaggcatgatgcacaaacttcaagcactgagactgattcaacacaaattgatggtgatgctcgtcttagtggtgttggtatgccagccacaagctctatggagaaacaagaggcagaacccttctacagt

SEQ ID NO: 3574 - DNA, 1176 bp, Zea mays
agataatcaatcgaccaacccaccaacagaataaaaaacgcatggtaatgatcagagcaagagcagaaaccacccaattattattggcaaacacctgattgacattgcaattctcatatggttccctgcgaacaactaccaaatgaaaacctgagaggcgaccaaaccggagggcagggggcaattgtgagcctatcctgctgacattgtagacaaaatccataacccatcatcatcatcgtaagtgtggcggcaatgcagtgccatggcaccctgcgccaccacaaggaaagacatcggtacaggaggaccttgccgcgcatgaaagaggcatatctactccttgtatttcatgctctcaagcgtgaacccaggcatgtcgaaggagtcggcaaacttctccacctggaccttgaggttctcgatgtccttgttgttcaccaggcccttgttgaagtccttgaggagcttgccgtactccttctggatgttcaggcagatggtcactgcctggtggaggaactccccaatctgctcgaaatccttctccagtagacccctcgaggtcattgctggcgcgcctgaagtcaataatagcaaagatctgtgactaaaaagcgtactgtgtaggcatagcaagtatatatgagaaattttgtttaagcattccaggaatgtcctagacttgtgctgtaacagaatttccttccagagcttaatatgagataataccagcagcgctgaatagcatcgatgcacatgtatacatgttctactctgaagattgtgttacagtattttattgtatggcaatgttttctgagttaaatgcataagtggcccttgaacttgtcaagggatgtcacttaggtccacaaagtttgaaaatgtcatttctggcatccctcgacaagttcaagggcggctcatgcatttaactcttgttttctagtagagttcttagctgtgttttttaagtgttgacatgcactttcagggttaagcatcatactggacaaccaatatgtaagccatgtattatgtgacaccaataaagcaaggtttggaattttcaatcttgacaaccaactcattaacatttgcaagaactaaactactctgcataggaaaaatgtgaagaacggtgaagtgaaatggaaccagaactattaacct

SEQ ID NO: 3575 - DNA, 523 bp, Zea mays
tggtgccacctgggggacttgttcttcagcaccgtcttggtttcgttctgggtacccggcggaacacctgacctggacaactgtccggacggtggcctggtttcctagtgaagaatggaaccgatgcgaaggagctggagctcatctgctcatggatgggaactcggtctgcgtcggagcagtccctcctcctctaatcgctgagacggggatggtgtccatgacacacctcatctttcttggcaccctgcaaaacatttttgagtgtgccaaaggatagtagtcagacaaactgtaacctctcatgtaatatatatagaccagcagtcagccgctgatataattttcggcattaaacccatagctactttctaaacaccaagttctggatttacattctataagaatatatatataaggttttctttactcatgtataatcctaagcaggtcctggaatacaactgttccaatatatggctttgaatccgcataaggccatgttcggttacttgtggtttga

SEQ ID NO: 3576 - DNA, 1070 bp, Zea mays
cagcttgcatgcctgccagagatcttcagcttctcaaaatcatccaaaatatcataaacctggagaatgtccttaactgggtcctccaattctgtcgccaggccatgccgtgctacgtaggacttgagttcttccctcatccggtccaaaggctgtataaaaacacccaacaatctaatctgatcacatctatgtaacaagcttatttgataaaaaaaattaacaaaacgaataaacaagagatgctcacctcgcattctgattcaagagcaagcttaaagaagcccagagaaaccgagtgcttggaagcagcctctgccagcctgatctgtgtcatccagtacgagatcgaagaaagcgtgctgaacttgcgccttgagatggacatggacacttctgatgtcggggtatcaaacctcccctggctttccgacctctttgaccgaaccccagacaccggagtcacagttccagaaggtgttggccttgggctagctcctggcttggtttgtattgagtgcctccgtgggggtttggcagaattatccttcacagaaaggtctaaacacatgctcttgctgacatctgaagatggttttgccctatatataaagaatcagatgaagaatgttctcttagagcaaaaaaactagtagctcatataaacgttacgatggaagttgagaggtgcccagcttaaattatagacaattgtaggtaaactgacataacaccaaacaatcaaatgcttagttttgaagagatagcctgcacatctctactgtcttgaaggctgacggatgatcttcccatagacagcttgaagttttgatagctcactagctcggcatcgtgatgggtaatgcactagtgctgctgaacaaatcaatgtgcaactacctagacctactacacctaaagctgtacacgcctctactgtatatgaaggagacccacaaagaaacatcacagagttacctgtctaaattagctcctatatatttacaatgagttcagagacttgagctcaggaataggcaaaactaagatatggcaagtgggagtgtggg

SEQ ID NO: 3577 - DNA, 1337 bp, Zea mays
aggagctaaaatggtcaggcactaaacttccgatgctaaccatgcaaaaaattcaaaagaaagtcatttttctataacatatgcttgcacccttaaaccatctttctttcaggttgagattggaaactatgattctttttatgagatgggcattgagttctcctctgagcaggtgctaactaacccgtcctattcagagctgctaaatttactattttaatgaagcatacaccaaaagttgaatattgagagaaatttactggtctaaccaatttcagatactgaagctaacaagggaaacaaggaagatgcttccagacatcaccttatcagtaacagttcctcacacacttagtttgccagatcaggtatatcatcatccccaatcactaaccttaagacaacgtatagcggtacttaccggtggcggttttacaatgcattcagcggtacagtgggatatatcatcagacgataaatatcaaaatatatttctaatcttcattaatgttaccatttttttcattccagcatgagaggttaaaagcgcatcaaatcgaagccttaaaagtcacaactcacattttgatcacctcagtctcctttactgcttttcaagtaactctatcatagttcatcagatctgatcaacttgttacagtcgcaaaacatgtaacacgtgaatgaactatatcttttgcccatataccctctcacgaacctaagaacaagaggatgagcatagaggaaaactgtgagtacctttgctcgttttaggttcctcatttcttctagcatgagacctgggtggtcaggtccctacttttgcgctcaataatgttgccgacaagcttaggttttggtgatgtaaggtcatatcgccactatttacatccttgctcaagacaacttttcggtaaccactatacgtaatacatgctctagtcctgctgattttgtttctcatttgcagatgagactagcagagctactcgaagaggaaggagctgatataatccaaactgagggtgggaaatgttctagcccgacaaaacctggagtgcttggattgattgaaaaggtatcgtgaaactaggacaaaaaaaagagggcatattgcattcgatggtttcttcattgtatcaaattacaatatagtgtttcttcatcgtgaaactttttggtttcttcattgtatcaaattacattattacaatatagtgtttgtaattgcaggcaacaccaacactcgccgcagcatactccatctctcgggctgttagtattccagtgatgtgctcgtcagggttaagctcggtgactgcaccaatggcagt

SEQ ID NO: 3578 - DNA, 1092 bp, Zea mays
cgtgatcgatctgggcatcagtttatctgttgtttcggaaactggaccagcaaacctctagcgaactgctctttttgatggtcttgcctgtttaggcggttgttgatagccttcaggtccttggaggggctctggaacgcgtaggtgctctcgccgacgcacgcgtagtagctcttggagctcggggacagcagagtgtccatctggagagttcagttataaagtttgtcacaggcatttgatgaaggattacccaaaaaaaatagctcagtcaggtgaaacctgaaaccacaacactgcaaaaaaaaattgacagctattttacttaccttcgatgaccgtagcggtgagacgtacacgttatgggtagcagaaaccttctttggagacatgtcggggaggttcgggaaccgagccagccggggagattctgggaatggacctactgatacaatcaaaaacatttcagcaaaagccttcatggatgtcatcgatgttgcttaatctctacattgagagcgtaccatcagcaggacctttttcctcttctttcttctttggactggcgctggcgccaggccctacctccaccaacaaggacttgacggcaggaatgaatacttcgttgtagaaagtgatgatgtcaacgtggtcttctcctgttttctggcaggatacaatttgatcagatagactttcgactcattccaaaattcttatataagttgaaaacaagataggaacttaccccgttacggcttcttgggggccaatgaacatagacgcttcggaaaacttgtggcttgcactgaggttgtttcctgtagccgaaaataatctccttgaatgaaagttccagttgagagatctgcggggttttgtcaacaaggtatttaatgaacatagtaggaaatatttgtatcggttaaaaattggaactccgacagatttatatgtaaggatataccttggcaactccatatatgctgcatagtatgatctggtcaatgtgcctgttgaagaaaaggccagtctgttggctaaggatttgctgcacaagggaatacacccgttccagaacttgctggggaa

SEQ ID NO: 3579 - DNA, 1281 bp, Zea mays
  unsure (1)..(1281): unsure at all n locations
tacgaccggctgaccccccattgtcagcgtagctatggtggggagaaggaagacccatcctccccccttggtgcgccgattcaatcnngcttcccgatctgacgcgcgctgctctccactctccaggatcgaagaagcaggcggcggtcccgatgcgcgcgtccgtctgcgcgatcccttcgccggtgcgcgcttcaatctccgccctcccgtcgctggtccgcggcgaaccaaacccgatgcgcgcgcgcgtgacctccgcgctccagcccccgacgcacgtcgtggccgcgtcgtcgtcgcccccagcgagggaggcgggcgagaaggagaacttccttcccgccgcggcgccaccgccgacgcccccggcagctaggtcgggtttcgaggaggagaacctcctcccggccggcgcggacgcccacgacgagctagtggcgctgaacctcgcggcgatcgccagggcagcaggcacgccggacggcggcccgctcttcgtgcgcggcaggctgtacgacgcctactcggcgcgccgcaacgagcggctcaagcgcaagcagggcttcccctactactactactctgatgagtttgcgtccacgtactcggtagaacctgaggcgatggcgaaggacccctgtgtcgccgtcgagctgtccaagcgccgcgtcgccaagaaggcctacaccgccacgagcggcggcggcgagtccgtgaggaggtctatgccagccgtcgactttgcggcccgccgcggagggggcctggggccgaggtcctctctcaggagcagcaaggagatgaagaaggcttccgctgcgtcgggcgtcaaggagaggagggtgaaccccaggtcgctactttgccggttctgagggctggacaccttctcatctgcggactgaacagaagaacagccttgtaaatctgggataaatccctgctgttatgtattattaggttgataacagtggcacaattgtcatacccctgcaataatctatgctatgctgaataggtgggatgatatagagattctttttgtatgagctgtgcccatatattctgaaactaaagtagtgtgtgtggagatccggaagccgacagcacgatttcataatttactaagtatatctgtttgtttacaacaggagcagcaagccagcaataggaaactaggcaattaggtagtactacaagaacataagtatatctgttgtgctcgaaattaatacggtacataaatcctacagtacaacacaacacagtcaataggtt

SEQ ID NO: 3580 - DNA, 1131 bp, Zea mays
accctgtggttgcatcagaagaatcaactgtgcattcaacaaataagatcaatgactacttaggaacaatacctaatagtaaatttcgaattacgtaacaaacaaggaactttgaagctttcaggataacagatagagcgcaaaaataaatttcaccttcctcaccctcctccacttcctccactttgttgtccccttccaaaaactggacaacttcctcctgctctgggccatcacatttcacatccaagaccacggctagatgataacacacaaccagcatcaaacactgtccccataaaaattgaacagtagaaccaaatcaatctaggaagtgaaatcctctgaccttttggttcctcttgctgcaccttctcctccccctttgggtcatcacatttcacatccgagagagcagctacatgataacgaaatcagcatcaaaaggctgtccacaaacaacaggatagtagaagcaagtcgatctgggaaatgaaatcctctcacctctcggttcgtcttgctgccccttctcctcttttgatgcgaccgccaccacctcggcttcctgatccaaagctctcgtcatcttcgatgtcttgtcctcggatacatcttcggcggggcggtcagcctccactgcccccgcggctttgcgagaggccgccctcctccgggtggctggggtcggcgccacctcgcccgtcctacgaacggcagtcctcctcgctgttgcgcgcgcactggacgccggaaccggagtaggaagaggcgcgggtgtggcccgaataccgcggcgagtgctgcgcagcaccacgccgggagtcttcacgttctccttcatctcgtcctctcctccaacctccatccggatggcctctggtgattttaccgatacgcggcggccgcgggggagcgggctaccgtgctgctgctcctcgacggccaccatcttcgccgccgacttcatcgccgaccttcctggcgtcgccgtcggcagacagagagtcgtgccgatctcgtcgaccccgtcgacctgaccgacaagcaaaaccccaaatcaactaccattccgaacctaataggactcacgaacatactacacgagtggaatcgagaactcaccgaggt

SEQ ID NO: 3581 - DNA, 1089 bp, Zea mays
attcagcaattgttcgaagttcaaacgatggttaggaatcgaagcatcagcatggccacagtataagcaatcgacagcaacagaacgcactactgcgctagtctctagctaccccctcacccagaaccgaccctaccgacaagcgccgaattgttttgatgaatgcagtatacaaacagctgagcttgatagaagggaggaaggaagggtgtgtgtgtgtggcagcgacagaaagctaggtgagatcaccgtgcgaaggcggcgaaaggacgcccgagacggcgaggcggaggccgctgagtcggagacgaagagcgggcgagaacacgtcgccatcgaccttccccttctcgctcaccaggcgatggcttttcgaatggaacggagactagcgaggtcgaggcctcccgttttctggggtcgacgcttttccaactccaaattgggggaacaagttcttctgcgaggagaggagccgaggagtagataatggccacggaatcgccaggtgcggactgcggagacaccacaagctcagctctggaagacgacgacgatgggatggcgacgctggattgggcggccaagctgtctggcccaccactctgacgaggctgcacttttccgggcgggctgggtggctgggcaacggccacgcgacgcgacgcgtgtgtgggccagatcactcaggtgggaattattgggctgagccgtatctgtccgaggcccacttgtctgacctcgtttcgttgtcttgtattgtattactgggccgttttgctgaagagacacacccgccggcgactaacaaaaccctcgccagcctttcccgtccgccggccgccgctaatggacgccggcgacgcctccaccgcgcttgccctcacggcggcggaaccatcaccgccgagccccaacaggaggggcaagaggccgaccaacccgcccaagcgcttcgtgcacaccccgatcccgccttcaatcctctcggacccgaccctggccgccgccgccacctccctcctcccggccaactacaactttgagctccacaagacggcgcaccgcatacggtccgcggccgcccgc

SEQ ID NO: 3582 - DNA, 638 bp, Zea mays
acaccttgccttgttggagcattggggttggtctgctgctgcgccatcttctttgggcactgcatcgcccagtggccttgttctccacagtggaaacatcctctgcctcctccttgtgctggggctgcttggttgttctgatttgttgctggggcaggaaggcgaggtgcctggttgttctgcttctgatactgattacctccctgctggctgtgctgacgatactgctgctgctgctgtgggtactgcctctgaaactgctgctgatgcggacgctgattctgattctggtatccctgtgggtgaccaggcctgccttgctgagatgaactgcctgagaaacgtggacggctgatgcctccggactggggtccactcatcttgcgcttccgatcttccatatccttacgcttcttctcagtcataactgccctatcgatcaggtgctggaaggtggggaaggtgtgattcatcagctggtaatgcaggggatccaccaaacccctcatgaacctgtactgccttttagcatcagtgttgacatcctcaggtgcataacgagacagctgcagaaacttgtctctgtattcactaacagacatgggtccctgcttcagagccagaaactcctccttctt

SEQ ID NO: 3583 - DNA, 1243 bp, Zea mays
  unsure (1)..(1243): unsure at all n locations
aaaaagaagaggaggtttgctactccctacctattattgtcctagcctttttttgttttttggttgacacattagtagcttgtaatgcaattttctatttaaacagatatacctgaaggcaagtgctgcttatgagtcattgtctttcagattaggggatcaagtctttctatttgataataggtacacttcaattaacttgtatccagcatatttctctgtactttgtgttaggtttttatgcttgctgacacttatatttttgttctgctacgccaaatttggagcactgatatttcttaatttctatttatgaagccctacagatgttgatgctcttttccttggacatgctctttttgtcctcagtgcgttgcctgtaagtttccctctatagttagttgtgtaacctgaatggggatttagttgcattgaaaaatgattgaagcacagatgcctgattgcacttgcacattctcatgaaagcgccgtttcctgttagtagtaactatcaagtagcatgcaaaattgattatagtgcaggttcacatctttataatgcttcttatgttagtagtattgggattgagtttttctatgctattaattaagagtttcctagccctaaccctaaatctgtaaaacaaatgatacaaagcatcctcaaattatttgtatatagttagtttcagggcatgtactgatcttactcctgccttaggatacatctgtgctgaggggcactttgcagaagcatgacaacttggttagctttgctgagcatcacaaggtccagttgctggaaacctcatcatcatcatcatcagggttaggatcatcacctagcccgtcatcatccacccccaggagaagaccatctgctgaccacagtaagcaaaacagtccgcattaccctgctactcaaaattcagaatttgctagttgtagcatctatacttggttggataaactgttttcaggaacatttgaatgatgtcatttttctctacctggcagaccttccagcttataaatatgatttatcctgttcagtnacaaatttaatacaaggatgcattactcaaaatgtcatgttaaatgaagagtctgtgatcagcttgtgttagttatttgttatgtatgtgctattgccaatcaccaattcaccatcatattcacttaatggactatttactcaattcaacctgcaattctgcagagtagactctagaggatctcggga

SEQ ID NO: 3584 - DNA, 1317 bp, Zea mays
ggttccttttttatcgacctgcaggacagccacccagcaaagagtccaacagtcaatgccttcattgtgcagattggtagtccacctttagtgcccgttcggttcttccggaatactttactggattggttccggattagaatagttcacaaatttgtattagcttgatgagttggaatggttctggcctccaatccggactaaacgaacagagccttaagaacgttagtgctatgaatgctgaaatccagacatcttatgtcagtgtcatttgaacaatgttgacctgtcgaccttaacattaactgagcctcagttacagaaacttcatcacaagaaggttccagatttgtggttgataaagtttatctcagatggaatcagtcgagaaattcctctggtactgataaggggtcaagctccaaatagcctcgaagcttgccacctttttcatgtgtgagacgaaagcaaggaatctggtgagagaacttggggtactcatcgttccttattgtcatcacagaaccctctgctctgtatgacataaataccatcttataaccatcgaccttccttagaagctgaacttgtatggaggaatcagtatggccaagtatctccaccagttcatactcacatttttcaaaatcctgtgcagtccatacagcctcccagtttttgtaaaccgcccatatctcaccatgacgaggaagtatttcatattcaccttttctgccagtagctctggccttaacaggatgagaaaagggatctgtaccagtgtaagtcatcatatcgaagatatagccaagcctaaaggttccaatgccaatggtccgttcttcttgggacaatcttttctccacttctcctcgaggacagacatccagccatctaacttgtactgtaccatttttaagatcgactttctgtatgaatgcatagtaattggggaatttatctatatcactatagagagcccagatttgcccagatgaaaacttttggagaaatcttattcttgaaaaatcatagaattctgattcagcgcatacatactctgtttggcaaatgttatcgtcatcgacatctgtaacttcaggcagatgagtgttatgcttgattttctcttcatttggtgtttttgtagcgatccctgcattcacagattttgtctgttgccgctgccccacattcatggttcctttgcaatcttcactggacaaaccagcatgtttggagttatgctccttacttcttacagaactgcattctgggttagcagaaggaaaagcctcttccaagttggagggaagc

SEQ ID NO: 3585 - DNA, 1400 bp, Zea mays
gctgagcatatcctacggctcatgctaacaaaaacaaaatccactaagaataagcaacataattgaatacagcacacaaagttaccaaaattgtgtatgcaacacgcacaagcgagtatcagagttcagaaacatccattatacgattgcaaaagaatttgcaatgaggtgaaacatgaagcaattaatcaagcaaataagtgtcccactatagaatgcttctatattttcatgtatctataaatgagaaagatatttttttgaaggccaatacatgcatatggacgtgtagcctctacatccagggagaataacatcacacttagtaatgaaggcaagagtgtggtaaaggaaaaattgaaatcacaagcaatatagaggtaccatttgagtaagtgaacataggatcctgaaatagcgttaattagtccataaagaatatctgtatctgtgatcagtcaaccaaaactttattttttggtggagaaccaaagcaacatgacacatagtaatgaaggcaagagtgtgctaaaggaaaaaaattaaaatacaagcagtatagaggtgtcacctgagtaattgaacataggatcctgaaatagcgctagttagtccatcaagaatatttgtatctgtaatcagcaaccaaaacttttatttttggtggagaaccaaagcaactattcccattatgtatggagtagaaaccagaacttaagttcaaatacatagacagtggatcatgatcaacatatttaatcccttctttgaatcttgtttatccttttctagaactgatatctttagctccccttaaaaatggactgtcaacattctggatttagggagaataacatcacacttagtaatgaaggcaagagtgtgctaaaggaaaaaattgaaaacacaagcagtgtagaggtactatttgagtaagtgaacatagggtcctgaaatagcactaattagcccataaagaatatctgtatctatggtcagtcaaccaaaactttattttttggtggagaaccaaagtaaatgatacctactaatgaaggcaagagtgtgctaaaggaaaaaaatgaaaacacaatcagtatagaggtgtcacctgagtaattgaacataggatcctgaaatagcgctagttagtccatcaagaatatttgtatctgtaatcagcaaccaaaacttttatttttggtggagaaccaaagcaactattcccattatgtatggagtagaaaccagaacttaagttcaaatacatagacagtggatcatgatcaacatatttaatcccttctttgaatcttgtttatccttttctagaactgatatctttagctccccttaaaaatggactgtcaacattctggcccactatggggaacttaccc

SEQ ID NO: 3586 - DNA, 288 bp, Zea mays
atcatcagggtagcgaacaaccacaacaggacatacacagtggtgtacacagtaatcactaacactcccaagccgccccttgctgcctttccgggaggccccaaaaccgcggctccccatgatcatggcggagaggccaaggcgctcagcctcgaggcagaggcgctccttcatgtcgtggtccttgacgacgtggatcttgaaggggatctgggcgtcgaccagcggctgcgcgaggtcctgcgccttggtggaggtgaaggcgtcgtagtcctcctcccgtttctt

SEQ ID NO: 3587 - DNA, 443 bp, Zea mays
caccaaagaaggcgacccttacttctccatcagcatgtacaccagcgatgatgcctctagaatcagggttcgcatctctccatccccatctaggctctgaaattccagcacggaaccgaacatgctgaccaatttttaatgtctgcactttctcaatgtctgtgttatgggttagccacttcccattcctgaaacagccagctaactccaagtaaccagagtcctgaatgctatggactactgcaatgtttattctcccaacactattccagtcataagtaggtctgctcccaatacttggttttgggcggacccaatctccaacctcaaaagctgaaagcctctcagcgtcaccaggagcaaccttccataagctttttcggccagaaaccttgatatttaaagtcccatccatgtcaatccttgatatggctccaatagta

SEQ ID NO: 3588 - DNA, 486 bp, Zea mays
tggttacatagatctgagacctcgtactcggcttcagaatggtacaatacagcgcatcaagtatggctgtttggctgccactagtgagccccaaatattagcgaaggccttgggtgatgaaaactggaagcatgcaatggatgctgaatttgaggccttggctaagaacaagacttggcacttggttccaccagaaggaatcaaaaatattattgattgtagatgggtgtacaaggtcaaaaagaaggcagatggtactctggatagatacaaggctagattagtctctaaaggcttcaagcaaaggtacgggattgactatgaggacacatttagtccagtagtgaaggcggtcactattcgggttattctctctctagctgtttcacaagggtggtcactacgacaacttgatgtttagaatgcgtttcttcatggcattcttgaggaggatgtatatatgaagcaaccaccaggttacgaaga

SEQ ID NO: 3589 - DNA, 380 bp, Zea mays
tactatgaaatttctgccaagagcaactacaactttgagaaacctttcctgtaccttgcaaggaagctggctgggtaattgactacccttcttctgtgcattgcatttagtagtcacaaccaattaccaccgctcttatgtttgttcttgacaatgtcattgtttttaacagtgatccgaaccttcactttgttgaagctgttgctcttaagcctccggaagttaccatcgacatggctatgcagcagcagtgagtgtcaccttttgtcttcatccaacttataatcattatggtcctactatccttttaatctgtctcctcaatttgaaatgttgcgagaactgattcacttttcatttgctcaggcatgaagctgagc

SEQ ID NO: 3590 - DNA, 401 bp, Zea mays
atgctgggtgggggggcttccgaatggcgtgaaaggcatgcacaaataattgcagattgacagctagcttataattataagctgccgcagaaatcggctcatttgcacaaaatatgttagaagaatagttgtatccacaaacggctaaccaaacattacctcagcatttttctccgtctcctcaataagtgtggtccaggcattgaaatctaagcaatttgcagtaacaacactccacaatctagcctcttctgctgaaagcacagctgcataacgaaagcggcatgttaagatcaaacagaacgtataccaaattaagcaagcctgaagcccaaatttaccttcctcgtaggatggctcaggaaccggctcgcctatctcggtgacggctgtgccattct

SEQ ID NO: 3591 - DNA, 829 bp, Zea mays
ggctggagatgctcgtgatcaagctccgcggcacggtggaggtgtcggagaggctcggcgctgagaccgcgtcgctgctccagtggcgggacaagctcacggaggccgcctccgaggggagccaggtgctcctcggcttccaacaacggcgagctgccgacggcgacacggctgcggctgcggctgcggctcaagggaccgagggcgaggagcaccaggacggcggaggtagaccagtcgtgctagtgaagaacatcctgttggccttggacagaggcgtccggaaagccgccgcagcgctgctctcctacagcgggtgtgcggcgtcctacacaaggcacacgctggtaggcatggcacggggcgtccggagcgccaccgcggcgttgctctcctgcagcgacatccatgatgtcgttgtggtcaaagtgtgaactcggccacgatcttggagcagtagtcgcgatcttgatcaacataagggcttgctattgctacatcacggtcagcatccttgacgcacgggccacgggggctcgacgtcgacgaggagaacgccagtaaaacctcggtggagttcgacgtctccattggtcgtgtcttgcatctccagagattcctcgtgatgccccatgacggcggagacatcaacatgacgatctcttgcgccggcttcaagctggccgagggcccagtatccaagttctaaagggcacgactgggtgtctaggtggaggtgaccaggcgccgccgctgccgccgcaatgctccgcgcgcgaccatgtatgggtggacggccagcaggctcacggtgaggctgattttgaca

SEQ ID NO: 3592 - DNA, 401 bp, Zea mays
tagatgtaacagtagataaggccacaggtttcaatatcattctttaatgtgatctgcattgcgtcatccattcacattaccttatcagacattggtgactgtgtgaagctctcatagtcaaacttctgaaagtcttcttctgtgaaaacggagttttcgccacaatgggtgcaatctggagagcttccacgaagtttaacctgcaagttgtacgtagacatggtaatgagatgtatcaagaattcaagacagtcctatagttatgcgtccaagaaatgcaagcaacttcgaaggatcagaagatgttaatagttttgcaggtacattgatggccacaatccacttgatggcagaccacctgcaaataggatgaatcctcgaacatggtttcaaatgccatt

SEQ ID NO: 3593 - DNA, 405 bp, Zea mays
attgtggatgctcaaggcgtcatcattatctgggactagattttgtctttgtaggggttcaggcgccactcccaaccactgtagcctctctgaccagtaaaattggtccatcaggaaaggacatgttacctgcacgaaaagatttagtacaatggatccatctcaaagcatcatcaagaaaatgcagaagctgggagataacgtatttgtttgagtcggcatcagaacattattttttttttttgttatagaattaccaggcttgatgcttcctacacatccaggtatcacaggttgcgaataaataaaaggacaagaaaagagcagcagaaagacagccgcctcaaaacatggggtgaagctgtagaaagtgttgttgtcacctgagggataccagcaagtagt

SEQ ID NO: 3594 - DNA, 327 bp, Zea mays
ttaccttagaacatagcacgtcagtgcgagaggtaattgaattgattcaagattaactgagtcctttagtgtctgttcttttttattagctgatctggcttcctgatagaatgcaaaatatggactactctgatacacatttcgcctgttcagtttctttgttcaataagttgaaacctaacagatcttttattgtgaagaactttcctgtctaagattcataatttaattaccagcaattagttaatttatgagaaaacaaattgcgatactaatcatatttgtttctacagtacacaagattcagttttcattttatgttctaat

SEQ ID NO: 3595 - DNA, 437 bp, Zea mays
atccccccaaagggaggccaaaacaaagaaaagcagcaaacagcaatgcaatgaaattgcagccatacaaccactcttcgcgcaaagttagtttggtctgcgaggggatccatcttccccggcccttctctcacaatgtgccgccgagatctcgcaggaccactggactacatacaacttctggtcccacgagcaacacagcacagccacacacccatgtaaactctttgtactgtaaccataatctggacggggcgtcgcccttcagcaaaccaagttcctggaggcgtaaaaagttccgcaagcgacttctcgtctgccattcctgggataccccactgaccaaccaattagcgaagagatgcatgccttgtaccatgtgtcacacttgcataggtaaaccatagttctggaacgacctgatgtttccatcccaa

SEQ ID NO: 3596 - DNA, 414 bp, Zea mays
ggttttcgcagccaccacaacgctgctgccgacattgttttttttttgatgattttagacagtagtaatacacatgcaggagcggagcacagcagcaacagtatacatgcatgggcctagactgtcaaccaactgtttcagttctttagagcatacttactagtatttagattaggggactttttccttagatttagtgtgctacacacgtcctcatccttgtacgtacaggtcagctctgcctcacaaaggtttacgattgcgtcagttagttcattcattcactcactcattcattcatcctgggaagtggtgcctctgctggcttctccaataaaataaaagtaacaggacaaggaaacgatgcctctacttatactgccgttccgttgccgttgcgtggcgtacccatgc

SEQ ID NO: 3597 - DNA, 450 bp, Zea mays
aatatatacagatttctagtacttctcagtgaacgatcatgaagtgttcaagaataaaatgaaaattctcaaaaagagagagagagagagagagagagattcaagaatactgtcagttttaactatatatattggcaatatatataggacgcaatgcaaaatgcacagttgtctcgctaatataatctaacttgatcatatatatatataatgtgcaggcaaagctagcatgggcgagaaggaatggtacttcttcagcatgcgtgacaggaaatacccgacgggaatccggacgaaccgcgccaccgactcaggctactggaagacgaccggcaaagacaaggagatcttccactgcggcaggctcgcggggatgaagaaaaccctagtcttctacaggggcagggctcccaagggccagaagaccagctgggtcatgcacgagtacag

SEQ ID NO: 3598 - DNA, 328 bp, Zea mays
acgaaagaaacgatctcagcattgtgtgaacgctttgcattcgtgcacccaaaagaggttttcacatggcggcatacctgtatcaagaaaacgaaggtggcggcatttgccagtgacattgaaaagctcatcatgccccctcgcagctcatttggcaggtacctagagtgatgccagcactgtaaacagaaactactatagactgtaatttaagcttgatacgtactcgcagcggtagcttacattgttcgcaatctggccagtgacggcaaaatgaagcccacacaggcatggaagatgcagaacactatcaccagtggtgcaatct

SEQ ID NO: 3599 - DNA, 409 bp, Zea mays
tcgcttttctcttgagacctaaggaaccggagcatgtccagtgtccagcggcgagagtcagacgctagcgctgcaaaaggcaaagcatttacactatgctatggcagttgcttagcacatgtaatgtaagcactgcaactgcacgatcaggattattcagggactcctcctgccgccgaccctgagccgaaccattggtgcgccacgccaccaattcactattcagtgctccatccatgtggcccagcaggccaccccccacgtccaaaagctgtatgcggatgactcatggagcatgcacgccccgtcagcacaagcgaaagcgagcagaacagaatcactgcgctttgacaagctagctctcccctgtcctggccattggaggaccgaaagatctcgtgaacagact

SEQ ID NO: 3600 - DNA, 393 bp, Zea mays
ggctctcggagagggagccgatgtagtagggctggcggtggtcgaacttgttgagcacggtgaggaggttgtccgggaagaagacggtgtcgtcgtcgcccatgacgaaccagcgcacgccggggaggccgaggcggaacgtctcggagacgatgcgggagatgcggatggcggagcggtggccgcggcggtgcgtgtaggggaaggcggacgtgtcggacgagatcctgatggccgggagccccgtgcgcgccgtggacatattggactcgcgcaccttgcggtccagccacacgtagccccgcatggcgccgcgcgggcgccaccacaccttgatgtactccttacgcttgtcccagaaccgcgacgacgccgcgatgccgaacactacgt

SEQ ID NO: 3601 - DNA, 458 bp, Zea mays
gaggtgtcattcccctggcgcgggtgttgtcgatcgagtgacggctgggctgaccaacgaggcagccccggccccgccccccagtcagccatgagcgcctcctcctggctaacggaccgtgtccgtgtgtccctttcggaacctcgtgttgcggcgacactgctgtgccgtgcgtgttcctctctatcgtctgtctagtatacagtgctagtgccgatgatcggatcggtgtcgccgatcacgagatcgatggggggtcccggcggtcggcggtcccccccgtgcgggccggcccgcctgacgacctctcaaggttggtagtaattttttttagtgcttgtcgttgaccgcttttgctcccttttttcgagcttcggtttccgtactgtagattagttttgctgcgcgtaggaagcttcgtaggttccccagtacgcaatattggcgtttgcttccga

SEQ ID NO: 3602 - DNA, 374 bp, Zea mays
cagcttgcatgcctgcagtgtcctcgatatctgagcatccctagtgtgcatgcaaggagggttggcccggctgccactgccctagaaaccctcctgatgcccttgtgtgtcttccaggatctgaaacccgtgggcttgtgcccttggactgtagcagccacctgagagatccatcgggccaccatccctgaactcccccatcctcttctttccggccgtctagagcaagcgggcgagttcatagcttggtaaggatgcatgataccgtcttcactcattttctccaatcctctctcctgctctcttttttcgaccaggaaggtgctccgccgcctggcaattgtaccacctaggcaacttctctgtcccaccct

SEQ ID NO: 3603 - DNA, 437 bp, Zea mays
gttttctctgttcttccttgttcagaaaaactgaatgaactgcatacaaccaaaatgattcaatcaagaagtatcctgagcgcttatcgcgacgtgcgtttgtgcatcttctccacgctggcacgatgcgtccatgtccgcatacttctgctgttctgcgtccacaagaatcggagctcgcgcgcatgcaggaaatgaacacaatgcaggaacagctaaccgaactaactgaatcgcgtgcacaaagcttaacaaatcgaacacaaaataggtttagcagacgtatggttttagagttcaagagctcaatgtagacatcaacaaaagttcgtctttaattcagcgtgatttacatgacatacaaaatttactgtgctacacgtgttttaatagatgtgtgcatgcttgcaggttatcctggcagacaccattgaagc

SEQ ID NO: 3604 - DNA, 384 bp, Zea mays
agtccatctgcccgttcccgctgcgccgccccgtcatgaccgccgtgccgtccatcaccacgcgggagctgcgccccggcgaccgcttcatcatcttcgcgtcggacgggctgtgggagcagctcagcgacgacgccgcggtggacgtcgtggcgagcagcccgaggaagggcgtggccatgcgcctggtgcgggccgcccagctggaggcggcgcgcaagaaggaggtcaagtacgacaagatccggaccatcgagaagggccagcgccggcacttccacgacgacatcaccgtcgtcgtgctcttcctcgacaagtgcaggggagctgccaggtccggccccgatgacatcgacggaacctacgcgccggtggacgtgttct

SEQ ID NO: 3605 - DNA, 825 bp, Zea mays
aggagatccggcgcgcgttccgcgggaaggagaccatcaccgagacggacctccgcagaagcaacctcaggtacctgaagctcgtgatgaaggaggcgatccggctgcacccggcggcgccgctgctggtgccgagggagagcatcggcacggccgagctgggcggctacgtggtgcctggaggctcgcggatcgtggtcaacgcgtgggccatctcgcgggacccgcgctactggaaggaccctgaggagttcaggccggagcggttcgccgacgacggcgccgtcgacttctacggcctccacttcgagttcacgcccttcggggccggccgccggatgtgccccggatacaactacgggctggcgagcatggagctggcgctgctgcagctgttgctttccatgttagcataaactgacatgagaccagaatataatgaaaagagaacgagataattggattttgccactcacaatgttgtcttcttgttataattaccactgtgtctataaattgtgggtccagctaggtctatgaaatgtgggtctgatggcaattttacaaacctgtttcttctgatggcaaatatcagaatctctctgaaaagaacgatgccatggtacaaataattccgttgattagtcttgttttcagggaagaggccaggaagcatcctggaacttcccagtagcattggtgcaatcagccagttgtgtattaagaaacacgtttctcggagatgtcctcgaattccaacgcgtagaaataatctatgctcataactgttcttcacaactgtctgttcttgcttccccatgaatt

SEQ ID NO: 3606 - DNA, 347 bp, Zea mays
taagccgctctacgagacagcagaggcggagatgtctgcacgctttgttcgttcgtctgcccactcgttgtagctggccttgtttgcgatatccttcccttacattgttctcagatcctagatggaatgagcggcgtggagtttgacaggtacgccgccgcggccgccacgccgctacctagcttcactgggtaccccacatccttgagcaccatctccacaccgctcagacatcccagaagttgcagctgacaaagaagagaagaattttttttgggagcatcaagacaagatatagtacgttgcactgattaattaaacgaattgctattattatataactcaac

SEQ ID NO: 3607 - DNA, 441 bp, Zea mays
tgtaagttcacatcttaagtaggaattcttaatattagatcctggtttagttatgccaatgacaggctgatcaccgaccaaacacatgtttaccgagtacaactgtgcagctcaggtccttaggtgtcatgtgtactcaaagaaattaccaatggtctttgtaaacaggaaatgacttctgtgctatcatcagctccacagtacaaccattgactctgtccacacgcttgcattgtacctaaatatttataaaatccagtcttggaggttggaaggctaccgtccatggatgggtttttttttgaaagcaacgtggatgaaatttcttagttgggatttatggcatccactgattagtctccgtgaaggctggatccaaaccctactcatttgccatcatttgctcttgctttgctctttccaggatagtccagtccagct

SEQ ID NO: 3608 - DNA, 307 bp, Zea mays
agtttcctccggccacccagaccgagctgcacgagctcctcggcaagctcaaggaggaggtaccccactacgcgtctatgcaacgttctaatgcgcgattcagttaccgccggtttaaaatatatatcattcgaaaatgtgcgctatggaaagtccaatcattaccatgcatgtaattatttttcttatcgcatgaaaatgaatgacatcgaactcaaaagtactgaaactgcaatgcggtacaatttggtaattcatacgatcgtggattcagagcaagtaatggtcaaaattgtgagttttggct

SEQ ID NO: 3609 - DNA, 860 bp, Zea mays
gacaatccaagaacatttgagcattcagaagcacacctgaaatcaatctgtcttctgtcgcccaacaagagaatagaaaaagaatcgcagatcgaaacagcattttccatgatacttccattccatggcgctaacctttgcacgcagctttgcaagtagcacgtcgccagctgaggaggcctggacgtaggtgatctccagccggagctcctggtgcaacgcctgcatgacccggagcaggagcccttccctgtgcgggcaccggagctccagcagcgcgtcgctcccgatgatggacacctgcacctccgtgtcggtgtcgctcgccgccgccgccggaggctcctccccgaggttgctgttgccgctcgcctccgctgctctgctgcctgtaccggctgcgcgagcgaggtaaccgccgctggtttgacgacgacctctctcctccgttgaggctgcagaattagggacttttttcttctattggctgatcttatgatgagaactttctccatttatgttttatttcccctaattctaattgggtggggtataaaggaatttgcgctcttcatatacccctatggctggatagtaattttcagtgatatacttcttatctgttttggtgagagattgaaacaatttttagcaggcatcttttggaaaaactttcgagttcaaaactttttcatttttcttaaaaagttttggacggatttgttgaaacgattttcaacaggtaccccttggaaatggggtacttgactattctacaaggattatagtggatttggaacaaactatgttggagttttatcaacaattttattctaaaaaaaaaggttggagtgggattt

SEQ ID NO: 3610 - DNA, 375 bp, Zea mays
tcacattcaacaatagcaactcagcaggtactaccagactctgggaaacgatcagcaatccaacgaacaatacccatgtggtcgtcgggcgtagggtgccagtcctcggcaaaggcctccggcggcatctggacctcaaccagagcaagcttgggctccaccctctgggtgcatgctctccctttggagttgacgagcatccactggcgatcccacctgaaccctgcttgacaagattttcgatttcactgcgagtgaggggaaaacgcatcttttcgagcgagggagcgtagagggcgcggcgagcggaacaggagcagcgagcagaggcgaggtacccgtggcggtgatgggggcttggggcacggagattcc

SEQ ID NO: 3611 - DNA, 433 bp, Zea mays
cggtgagtgagtactatctcgtaaggaacccaaggtacgcaagccaagggaagtttctgaagctgtccgacttccttgcgatggtaatgggcaacgatctgtccggcgccatgatcatcatcgaggcgagacaccttaattcgctgcaagtccctgttcatcctccattacaactgaagtgaactcaactcctcaaacacacattgtttctgcaccgccagaacgctgcgtacatagcgacgtcactaggaatcgacgtcgtcgactccgtaaccgccgccttgaacgccgccggcttcgacaagcagacgagcaagcaagtcctcatccagtcgaccgacagcgccgtcctcgtcaagctgaagcagcagggaacaagatgcaggctcgtctacaccctcccgctgggcatcggggacgcctcgaactcgtc

SEQ ID NO: 3612 - DNA, 361 bp, Zea mays
aattatagtttaaatgcctttatccaaatcaattacaatgtgcatcagacagttgaaaaaagagagataataaagaactcatgtttgctttaaaaacttagacctggcaaatcaaactaagcacgcaaaacaacagatttttggtgcattcagtagatgtctatcagtattaaaaaataaagctggatactgatatagatatcttattaaacatatagacaagcagcgtgatgatccatacattgtaaaaagaaagtggcgagacctacattattggtggcgctcgtgacaacaaaacaatcatagaataatatagttgcagtaagaacatacaggtatgctcccctagattcaatacccg

SEQ ID NO: 3613 - DNA, 329 bp, Zea mays
aaatcagtcagcttcatctcatagtagggagatttgtcctgttgctagtcctcccaatagcagcaatgcttcagttgccaaacaacggatgagatggaccccagaactccatgaatgttttgtagatgctgtaaatcagcttggcggtagcgaaagtatgtctgccctattggcatttcccctcaaatagtttaagttatgaaccctacatcacatcatctaatgcatgtgtttatttatcttttcttattcctattcagaagctactcctaagggtgtgctaaagcttatgaaagttgatggtttgactatatatcatgtcaaaagcc

SEQ ID NO: 3614 - DNA, 408 bp, Zea mays
tagagttgtgctcctcaacatccatagccccctgtgattcctccactgtgttacatacagttgcagtcaaaatttcagaggattgaactagaaaacgtgcagattagcatcggttgggcagatacgtcaccctttgcttcttgcgcagaaggcagaatcatctcctgctaactttgatcagcgaacaaaacttggttctctccccatttcaaattttaggcatagtttaacagccaatctccaacaataataggctgataactggaataacctaaagtaattttaaattatcgcaacaatggttctgaattataatactagcattttgccctccaaagcgaagagtcagaaccaactccagggaagaaaatacagcagaagtaatgtgtatgaagaattgaagataca

SEQ ID NO: 3615 - DNA, 326 bp, Zea mays
gtccaacgtctgggtcgggagcgctgggaacgccaagctaaggggggcgaggttcaccgacaaaggcttcagcgtcgagcgcgtgagggaggactacaggaacctgtccagggtgctccagcagctgatcagtatctctggtggggataccagcaaactgcctccggattacatagattttctctcgctcttgacggaggacaaccttacaaacaaggatgagttcttggttgtaaaccatgctgctctgctgcctctgaaaaaccggtaccttttttttaactcagtttcattgtcttcttcatgttgttgttgttgctgctgct

SEQ ID NO: 3616 - DNA, 381 bp, Zea mays
ttcgttcatctcttgtcccacacctgacaccttcatgttgtagcccggccccacccccttctcttcttggattcctcctctcgtttcatcttctcttcttcgacggttcgtttgcatgggcatgagcgtcatatatggggaaaaaatatattctctgcatcccacaaatatatcacgccgccgccggctgctccgtacaggcggtgggccacaccaaacacacacgataatattttgtcaacgaatgtatatatgtactacatcagaagccaaatgcatatatactacactacaaatctctctctgtcttcctcccatctatctatatatatgtgcgctgttgccattcttcccaaaagctaatacaacaagcgtactgca

SEQ ID NO: 3617 - DNA, 421 bp, Zea mays
aaactgctgtcatgatatcctcttttatgatttgccaacatgatttgtaaaatttaccagtgaacccatcagggcctggggctttgtttcatggtaatgataaaatggttttccaaacttcctcctctgtgattggactattcagctcagagagatcatgggagggaaattgaagttctagttcttctagattaatggtatgttctctgtcactggaaatccctaggagattatggtaaaaacatcaacaatctcctatttatcctgatgcttggtcaagaccagcccctcctcagacctcaaactgctaataaaattcttatgtttcctttgtctagcatgcaagtggaagaaggatgtgttggtgtctccttcagcaatcgaggtgatcctagagcgacttctagccatggaatcatgg

SEQ ID NO: 3618 - DNA, 322 bp, Zea mays
tgtgcgtatgcatggggaagaggcctgctggttgctcttgcactcacctttattctgccgcaaacgatactttctcatcaagcagcgcaaggagcgaatccgcttgtagcgcagagtgtattgcattcagtgatacaccctgtgaaaaccgtgggatggcatagctcctgcacttccggtggacaaatggcggggtcggcgttgcccgtgcagaacccatcagcaaaggtgtcgcaaagggtaacacaactgccggaacaatcacccattactagcttgggcgccatgggcagcaggaccgccagcaggatgcaggcagtca

SEQ ID NO: 3619 - DNA, 452 bp, Zea mays
cttccatccacgaactcccgttctccatttccagccatggcggtgtcgatcgagctcaccaaggagtacggctacgtcgtgctggtgctggtggcctatgtcttcctcaacctttggatgggcttccaggtcggcaaggcccgcagaaagtaagctctccgaaatctgaatcgctcgtcgccattgttgtcttcgtttgtctccgcccaacttatttcatcaacggacataataatatgatggtttccgctgtgattcttctttaggtacaaggtgttctaccccaccatgtacgccatcgagtcggagaacaaggacgccaagctcttcaactgcgtgcaggtgcgcccaagattctgacatcctctcccctcccccgtgattaattaattgctcttgtgaggggttgggactttgggaggcatctaaatttccgctggttcttgtggttg

SEQ ID NO: 3620 - DNA, 474 bp, Zea mays
atttaatttcacttccttagtcatagatgattcctgactgtcctaactgtttagttttatatcgatgttggactccaagggagtgaaaacgctgagagctggcacactgctgtttggtatgctttacagaaacgtttcaaccgtgtggcgattgagaggctgaaggagattaggtgctacaagggcatccggcacaagcttggactcccagttcgtggccagaggacaaagaacaactgccggacacttaagggaaagagggcttcagttgccaagaagaagtcacccgcctcccaggatgaataaatcgtattgccatgtattgaagttctctctctctctctctctctctctctctctctctctctctgtgtgtgtgtgtgtgtgtgtgtgtgtgtgtagcgctactactgctgggtgttttgtttcgagcttttatgctgccattgacaaatcatggggtagccatcagct

SEQ ID NO: 3621 - DNA, 359 bp, Zea mays
atctttgatttggcaatatgtaaatactaggttagtctgctttgctcgcccggtagatggatggcattgtaaagcgagggattttggtgtcatcctgcctatcagtgtatgtttttttttccaggcatagagcaacgcttgaatcggacgggaatgaaaactggaccgaaatcttgtgacaggcctgaaccacgcctgggagtgcccgccagacatgcgctcgaaatagaacgcctgcattccaaccggaccttgtgctggaacaattacagcgctatcttcagttcttcacaactcaaacctgcttcttttccttcatctacagtcatgcagcgtatacccagtacgaactttgcaca

SEQ ID NO: 3622 - DNA, 794 bp, Zea mays
agcttgctcaccgtcaacatgaggggcctcctcttcccgggcacgccggcgaacacagccgcggccgccgcggccgcgccgccaccaccaccagctgctgctgtcaccagtactaccgccaccatgaccacggcgccgccgccgccgccagccacctcggtcaacaacaacgggcagttccacttcatcccccactcgctcgacctcgcgctgcccatccctccccaccaatccctcctgctggtaagcgcgcggccggcggagagccggctgggactggcactgggaacacgtcgtcgcctgcttcaaagctagctcgctgcctcagctcgctctgatgtcatatattaattgcatgcctaatctcgtgccctcgcgcgcggatgcaggacgagatatccagcgccgcgaacccgagcctgcaggtggggttctccgggatgtacatcgtctccgtcgcctccctcaagcgcggcatgaatcacttcgtcctcgtcgtctaccgcaacctcgtcgccaccgtcgtcatggcccccttcgccctcctcttcgagaggtacgtacctcgtactacctgtatggccccctatcgctcttggttctttttctcgtaatgaagtcatcgttgctagtagatatggtgaccaggcttatcatcaatttcattgcaggcgagtgaggcccaagatgacgccgctcatcttcctcaagatcatggggctcgccgtgctcgagtatgcatgtattcatttttattttatttttgcttcttgcaacaaagctgcaggcatgca

SEQ ID NO: 3623 - DNA, 362 bp, Zea mays
tttagtgttagagtccagcgtctcacaggagtggtccaattcaaaatttgaaaatgtatcaccgctgaagcgaaaaaatatcataaattcataacgaaccaaccgaccgttgcacggacgagaactcgacgagaccgaaccgtgaaaacaaccgaaagcacaggggctcaaacgaaacaatcccgcccacacttccttcgccggctcatggtggccactggccaggctgtcatcctgttctataaagcgagccgaggggaagagccggaaccctagcccagcaccgcagaggcgcagagacaggcgtcttcgtactcgcctatctccgcgactcaaagcttcttccatttcctaccgccgcc

SEQ ID NO: 3624 - DNA, 698 bp, Zea mays
tcaggagggacagtcagtgtgtggggttgggcagaggtgcgagagagctgagactcgctggccgctccttccctgccctgtgctggcttgcggggagctgatgatggctcagcccaggaagaaggagctgggagcagaggtgcaccgtgattccaggcaggtcacagggactcacctctgaccccactccatgatgctgagctaccacaccgtgggcactacaaggggctgctttctctcccgggcaactagaggcaaactctgggcctgctggcgcagagtggcatgtggggagcagccctggggcccctgaagcccttggtgggcaaatgcagactgcagtgtgcgagtgagaactattaagtaataacctcatgattacttttggttaaaaactagctacgccaacacacagaaatgtaaatgtcaactgacatagctcatctaatattatgaatgttgtgtatgaacatgttttaatttcaaatctgcaattattaagtccgtgagtgtgtctagcaaataattagaatttagaaaactatcttgcgtggcttacttatcacaaaatttcagtaatttcattcaactgaacacaagcatccaagatgaatggaaacgagtgctaaaccatctcaacggaaatcggaaagtgaatgcaacttgtgggacaatgggagtatcaattcaacaatact

SEQ ID NO: 3625 - DNA, 321 bp, Zea mays
agcggcagtggcggctctctgtgtccaatacgaatctgagttcagaccaagcatgagcattgtagtcaaggcgttgtctcctcttcttgtgaatgcaccgtatcagccggctgctgctcctgatgtatcttcagatgcctgacagcatgagcaactgaaaacccatgtaaagaaacaccatttactgtcggtatgccattttttccacgaattattcatctttcgtaaaatcagaattgtgtgtgtgtgtttattggagaggaagggaagaggaaagagcaacgcatttgttttgaacccatgtacttcgtgcttgagagc

SEQ ID NO: 3626 - DNA, 801 bp, Zea mays
gaagccggtggtcaacctgctgaagcagacgctggtgggcaccggcgcgctgctcgtgggcgccgtgtcgctcttcgcgttcgccgcgccggtcgaggacttcctccacgccctgagccagcctccctcctccgccaccgcctcgtccaagccgagcttgaggtgcgcggccgtcacgtgtgcccacggtccacggcgaacatatgcaagcaaagctctttgcatggtgtgcgtctcttctcttgttaaccgcagcttcgtttcatgatgcgtgcaacgcaacgcccctacgcaggaaggaggagctgctgcggctacccgtggaggtgatgcaggacgacgacctcgctgcggccgcggccgaggccgccgacggccggcccgtctactgcagttgagcccacacaaccatcttctgggcctgttgtgcttaaccctatgatgccattttggcctgttccctctcccatggctggcccagcaactactatgaatatgggagtggattactggggtactgcttctgtacccatgcatggtaaagttattgcagcaccaatatcagctccttcatcaaattcacgtgatattgttctcagtgatccggctatacaggtctgtcaccatgcaggatttggttgcccttgtctttattttgttctagtacctaccttgcacttttcttacttagggtcattttttattaacataggatgagagagaactgaagagacaaaaacgtaagcaatcaaatagggagtcagctcgacgctcaagattgcgcaaacaggtctgtaatgt

SEQ ID NO: 3627 - DNA, 488 bp, Zea mays
gctacagctatatatattgatatatatacacacacatggtcctgttataggtggacgactataggacgactaggagtcgactaggctcgactaatcgagcaaatctaatcgcgattagtcaccttatccgtgctcaggcgactagattcgactagctgattttaaaaccttgcttccgagtagcacctccaggtcccgggttcgatccctctcggggggtgaattttgggcttggttaaaaaatcccctcgctgtgccccacccgctctcggggatcgatatcctgcacgccaccctccggctgggccgttgtagagtgggtagttgatcggcccgttaatgatggagccaggttcgagggttctctcggccgggagcatgtttttcggtctcttcttaatataatactgggagggcagtcttttcctccctggttgagttttttttttccttttttgacgatcatggccacactaggggaaaaaaat

SEQ ID NO: 3628 - DNA, 479 bp, Zea mays
atctgcaacaggagggattcgaggtcacctatctccccgtgcgcaaggacgggctcgtcgacctcgcgcagctcgaggacgccatccgcccggacaccgggctggtgtctgtcatggctgtcaacaacgagatcggcgtcgtccagccgctcgaggagattgggcgcatctgcaaggagaaaggcgtgccgttccacactgatgctgcacaggcgctggggaagatcccgattgatgtgaacaggatggggattgggctcatgtccttgtccggccacaagatttatggccccaagggcgtgggggccctctaccttcgtcgccgccctcgcatcagggtggaaccacagatgaatggtggtgggcaggagcgtggcatccgcagtgggactgttcctacacctcttgttgttggatttggggctgcctgtgagattgccgctcaagagatggattatgaccacaggcgtgtcagtgct

SEQ ID NO: 3629 - DNA, 812 bp, Zea mays
tagggacttttttcttctattggctgatcttatgatgagaactttctccatttatgttttatttcccctaattctaattgggtggggtataaaggaatttgcgctcttcatatacccctatggctggatagtaattttcagtgatatacttcttatctgttttggtgagagattgaaacaatttttagcaggcatcttttggaaaaactttcgagttcaaaactttttcatttttcttaaaaagttttggacggatttgttgaaacgattttcaacaggtaccccttggaaatggggtacttgactattctacaaggattatagtggatttggaacaaactatgttggagttttatcaacaattttattctaaaaaaaagggttgggagtcgaatttatactgcagcgtggtggctctgccggccggcagggcgggcggcagctgcaatatctccgaacactcgccgcagacaacgaacggcgcgccgcccagcactgggcggcattggtgcgcccgcggcctggtaccatcgcgccggcggctgctcgatgccgaagaggaggacgaagtgctcgtgttcgcgtctcggcggcgcgggcgctcggcgggcaacgcccgcgtgagctgcgactgcgactccaggcggcgcatgagccgggagctgcgccttgttattgtacgcttgccgccgctgctctcgtcgttgcaggacgcgctcagccgaggcatcgtcacgccttgccagtgcccgtcgtcgacattccgcggcggatggtccacggcggcgatgagcttccggaggttgtccagc

SEQ ID NO: 3630 - DNA, 356 bp, Zea mays
ttgatggagatggtgccaaaaatccaagacaagacaatgttgtccatgcgatcccatgccgtgtcgttggagaagtaggaatcagcaagaacatgatccgtcaaggcataccatttgagggtgagaagaagatgaccacgccagcttgcaaagttggtggaggacggctcgagggtcactgggaccaatgagcggatgttctgcacaccagcagcttggtcactagagagctcgagaaccggcgaagaaggggcggcgtcatctgcttggcggtggtgactccctgctcctccagagcagcagcagtggcccgttccttctcaagaacggccgcagcagccttgacacgggcgcgt

SEQ ID NO: 3631 - DNA, 466 bp, Zea mays
gttggctaccccaaattcaaaagaaaacaatctatctagaatctatcatgcatctccaagctacgctagccaaacgtactataggatgatgcttgcatatggtatccaagatacaccactcttcacataactcgatcttacgatatatttaatgatagaaaaaaaacccctagctagagagtctcaatttatctctctgatctcttgtgtatcatgatcctttcaacgatgaacttactcatgagtggtaaccgtacgtggctaagattagaagaaggctagctagattagacttccattattcctttcgaaacgtacacatgtgtatatataattatattgccaatcgaatttcgaatcttgaagcagccggaggatacgacgacgtacgctacaaaccaggattaatgcgtacgtgtaccaaaacagcgtacttatctttgcaagagtgagtaagtgacagtgc

SEQ ID NO: 3632 - DNA, 421 bp, Zea mays
caggtgatgttgttgcatagaggattttcttatggaaccaacactggcaggcacattgcccacctgccctgaaccaagaagccgttgccagccgtacgtacgaggacgattgcagttgcagggaagatcaggcgacaggttctcatggatccagcaaatcatttgaattacaaaaaaaaaaacagaataaatgcacactgcaagtcaagtcaacgtaaacacgggagtgcttcgtgtattatccaaaaagaagaagcaaagcgtcttccgcgcagcattgtgagcctgccaggcaaatcacattgctattgctctcaacgccgttgttaaacattgggaggtggccagatcttcccaaagagctcctcaacgcggcgtgcttggttcacgtacccctctagccctgaagcaagcagttctt

SEQ ID NO: 3633 - DNA, 440 bp, Zea mays
cgcacccggggcacctctatatcgacctgcaggttggcgacgagccccgtccgccgtcaatgtttctttccattgattgcgtcggtgacccatttctgtcatcatatacttataatgaattgcagcgctggatggaggagatggcggcgtacgtcaagtccatcgacaagaagcatctgctcaccgtcggcaccgaggggttctacgggccgacgagcccccaggagaagctggacgtcaatccgggcacgtggaaggacaacaactacggttcggacttcatccgcaacgccaagatcccagacatcgacttcgcttccatccacctctaccctgacacctggtaaacatttctttcaccacctgattattagtacccccagcgagactgatgagagtgaggaattgaacgactgatggatcgcgtccgcgcgcaggct

SEQ ID NO: 3634 - DNA, 798 bp, Zea mays
tgcgccggtgacgctagcgagcatatccgccgtgtccaggcccatgaaggcgtcggaaacggaaagactcacgccgccgtggcagggcacaaggttctggacagcagggtgcgacgagggcaggttgaggccgccatggtcagaacggatgtccaaaccgccgccgcctaggaaatcaccgaggaggccgtcgtcgtcgtcgtcgtcccggcggtttggcaggcatagatctgctgcatactgcatattccagccgccaaagtcctccatgatctgtacgccgccggcgtgactgacggagcctgcctctgccctcaggcaagaagacttggtacaggtttagtggctgctgcaaaaagattgcagcatcgtgcaaacagaatgaagaaacacaagatcatctttcagtcagtaccaatctgtgagacgatttgcaattacaaattctcctgcagattacatttgtttgttattactggtcatgatctcgaatgcagttagtttattatcttttatgtttacacgtcccagatgatcagagaatacttagaagtatagaaatcaaaatatgtcacacataacataatggtgcgtcatatattcattcacattgcagattatgactcaagtgacaatccactccaagagacggttaaacctatggtagatggtggaactgagggcttcaagggacatgctagagtcattatacctggaacaacaccttgctttgaatgcaacatatggctttttcctccacaggttaagttccctttatgtactctcgccgagacacca

SEQ ID NO: 3635 - DNA, 419 bp, Zea mays
ctgctctgatagtctgatgggaatcatgggatacgcgacgccacggggagccgagctggagagaagggtacatacccatcccgaccgaaataactgaccgtacgtcctacattttctaaaagctccttattcggctttactttaatccatattgatttctactgcttctatagtttaaattacagttgcattagtctaaactgctagcatcggcacacatgaggacggacacggacctgatcgacaggccgctgctgcgcgagctagcaggagtatcttgccgcctgctcaacagcaacagaagccttggcgcgccgttgctgtccgtcagtactcagcattgttgacagcaggaaggaaggggcggacggacggacgggtaacgtcgctgtccgtcagtcctcactcactagtccagt

SEQ ID NO: 3636 - DNA, 388 bp, Zea mays
tgcttaacatatatatatacttgcgtggtgacactctctagcctaagaaagaaataattgcatccggcctgtttgcatctatcttggctagttatcaatttggtgctatcatatctgtatcttcgggatatataatataataaatgacataagcccgtagcatatatcttatacgtgtgctcgatcgattattcatcgacaaatcgcttctcatacattgaggagagatgaatgccaagaggctgacgccggttctgctcgccgttctattgccatgcctatgccttatgttcgttgcaaactgtagtgcgttcatgtttacttcacccatatcactcgttttgtactttttttgagaggaaattcgtgatgcgatgaagtgcagcaa

SEQ ID NO: 3637 - DNA, 448 bp, Zea mays
gtgctcagacatttgtgccacatccaaagttacctggatgttttctgcaactatagattgacatgatattttcataattcacacttgtgaattagttctaatcctactgcgaatgatgagtttctagcagaccgccaatttcaccatttataaccgaatttcatgcttccaaaaaaacatataatcaagtttcatatatgtatttgcttgagcattagtctattgcctgccccgatgcttagcttccagtgtgacagcaggaatcagtgccttaaggaaatgaatcttaaatacagcataaagtggaatctaactgatatctacctttgtgcttgatggtatttgtcaagcaaggcaagtaatcttgaatcccttgttctatcatccaatacttcaacaatttgcatcacgtcatggttagcagcaaggtcttctgatccaataacaa

SEQ ID NO: 3638 - DNA, 369 bp, Zea mays
acaacttggtgtcgttcctgaacaacgccaagggagccaccgttggagatgtaagtccgccactgcactttgcagaacacagatgatcatcccgactcaacttgcctctatatgcaatcagtataatcatcgtactctgtttatttatctatgtatcaggctgtcaagaaccttggcctgttgggcctcttcactcgtggcctccctcttcgcatcctgatggtcggcaccctgactggcgctcaatgggtgatctatgattccttcaaagttatgattggactgtaagtattatatatgtgatcctgtgttggaccgtgattattaggctaatctgtcttgttaagagggctaaaacaactggtaatt

SEQ ID NO: 3639 - DNA, 897 bp, Zea mays
atcatgctgacggccagcttggcctccaggagagcgaagttctggccgatgcagacgcgcgggccccagctgaagggggcgaaggcgccggggtccctgcacgccttggacacgccgtcggcgaacctccccgggttgaactcgtcggcgtcggacccccacagggcagggtcccggtggatgaacatgacgggcgtcgtaagcatgacccccgccgggtacgtgacgcctccgagctttgtcggctggcgtgtccggcggttgatggccgccaccggagggtacaggcgcagcacctcgtagagcaccatggtgacctgttatgttacccagaatggctatcaatcatgctatcaagcgattgtgcggcgaggtcgacttaccacttttaggcgtgccacaccattgaagtccggcttgttttcaccaaagacctgcagggcagtgtttgagaggggctgggattttaaagtgggaggtttttggcgggctcaaggctcatggggaatgtgaggtggttggtgtggccgtgagccgtctgggtgctatcggagatttgcaactttccgtagaacaaaacgaaagaaagagatttgcaacgcaacttgagttttgaactgtgaagtggtgagagctttctgccacgccacaagaagtaggggcgaaagtgcctgtttcactttttttctttctcggcgcttctttctcgtgcatgcgtgctcctgggctatggctgattgatttccgtgattgatgccagtgattttgaagccctctgggcaggaaaggagtacaagtgtaacagcgtgctgctactatctctcgctgttttttcttcttctttttttctaataggggggccatgcagattaaagaacaagtgccggtcgtaccgca

SEQ ID NO: 3640 - DNA, 458 bp, Zea mays
acaccgcgttcacgttcttggcgcagccggcaatggcgcacttgttcgggtccgcgccgcccgtggctggcttggcggagacggccacggggaggttatacccgtccaccaggctcacgtcgtaggagctccccttcggggcgtcctcgtgcaggctcacctcgactagcgtggcgggcggggcgcccacggacccgttacaggcgagccggccctcgcagtcgccggtgaggcagcccgctacgcccatgccgttcgcggtgaagttgcacccggtgcgagcccagaagcgcccgttccagttggccggcgcgacgacgcgcctcgacttgccctgcgggacgtagaagccgccgccggcgagcactgggtggccggtgttaggggcggacgccggccacaccgggaacgggcacctgttcgccacgtgaaagacgatggcgtcggcgagcacaatg

SEQ ID NO: 3641 - DNA, 423 bp, Zea mays
aatccagcaacagcagaaaaagcaacgagaatcagaagcagaagcaaggcatggtgaagccatgatcgacgccgtgcggactccgattccgcttccgcgaacctgagctgcttgtgtaatttcagcggaaaggacgcgacaggtagttggatgaaatcgaaagctggaatggagcgagggacctgatgatgatgcacgagtgccctgtggaagagccgcttggcgaacatctacgtgcacggcgaccgggcgacgacgaggtgagtcgctgactgcttccgagttcaagctgaagttgcaatggaatcgaaagcggcgaaactgatggggacggtggcgtactggcgtggaagaaaaccgagtgggccgggcctgagagtaggagttgggccgttgttggtgcaaattgggctttcgttcctt

SEQ ID NO: 3642 - DNA, 402 bp, Zea mays
gtggttcattggagttagattgtgctaaccaaaaaaaatcatcacaaagcaaatctcatcttctgcaatggaatagtaacttacaggtactcaagcgagaccaggttggatatagagtacggaagattaccagagaagttgtttttcgccaggttcctgcgttcgctttggattcaaatctcaagaatcaaatagcatgaacaaaacatgtacaggttggggggcgcattacagataggtaaggtttgatggcagctggtaaggaattgaatcgtgcaagtagttgttgctcaagtccctgcaagtttagagccaggaggatatgaatgatgaaaaggacacccataactgaagagctatattgtataataaaaaagcgttagctcatacatcgttttcaga

SEQ ID NO: 3643 - DNA, 418 bp, Zea mays
aacaatattatgtggtggtgcagacatgtccttagtgacatcaggatagcattctgcacccatgatccagtaatgcattaatttatatttatttggttcatcgtgcttattttacaatttgtttctatattgtgacattggcgattcttgtgacttgctcctggttttacatttcattggttgactctttgtaaaacttcagtacttcacactctgaatgtattgtcataagttaccataagttagttttatcatccacttttggcttatgtggtagatgaataaaactggttttgagtatgtaattcggtaatacaattagagttctagaacttgggaatttctagtatatatgtgaaatgttgcttttttgtatgtgcctggccttcaaggtaaacatttgcattaaaaatgactg

SEQ ID NO: 3644 - DNA, 357 bp, Zea mays
tctgtcagcgacaacgatgtccgaaacatagttctatcttatcttatgcacaactgttttaaagagacggcagaggcattcctatctagcactgggttgaatttacctgtcgactatagtgtggatgtggataagcgtaaaggtatttatttgcaggtcaatactggatctttcctacattattatgttttagggggcgctttacttgtcatattgcatgatgaagtactatttgtatgttttgataaatttactgcaatctttcttgttgtgtgttcgaagcaggctctccgcatttgcaggggtaaggcttgcctcggtttatcccttccgcagaccccactaatgtgggagccc

SEQ ID NO: 3645 - DNA, 448 bp, Zea mays
aagtttgaagcggacatggattacacaatgcttgagaaagggcactcgacagagatagtgacagcagccggcagcaacttgggtaaggttttcgacagcgctttaagggatctggcaacagtttgaagcagacatcagagtggagcatgtgacagcatagttctgattctggaggctcccctctcttgtgacttgtatatcctaccctactggtccagattggcagcctaataactcacctcaaatcccaattgatcagacccacccacaacaacctagtcacctgggcatccccatcctaatcagatgactagtcacaatttattgactgactaagcagacgacgaggaacctaggcaaacctaatagcctatcaacttcaagataccaattaggttgactaatcacaattacaattaacttgtaaacactgtctgtatatttgggt

SEQ ID NO: 3646 - DNA, 420 bp, Zea mays
  unsure (1)..(420): unsure at all n locations
gcagttgctgttcaagtgttcaaattgggccagcgtttggcgctctacattctcccttgtacacacacgcacaccatcccaacgcgcaaaaaacacgcagtcagtactagtaaaacgcaacggactactgtacagagagagctgaccagctgcctgattattaatgttatctgtaagaaaaaaacggacctaatcaatcgttctgtgccagaatcccggagttaatatgagctgcaaagtcacatctctgcccttgttctccaagttgttccctttccccatctgtaaaacagccgtagagctaacagattctgatgtgaagttttgagttttttttttttttngtcggaagattgtcagtctcgcctgcttcgaccatcaagccgtcatttgattttattttttttgaaagaaggaaac

SEQ ID NO: 3647 - DNA, 336 bp, Zea mays
aaactgaagaagttcagggcagttaagtgcagactgcaaaacactagaaatattttctcttcactagtttttctagggagttctgttgtgtaatatgctaaagaagatctgtgttaaagggggttcatttgccacagtttcaacattggtttattcagcattggtcaattaatatgtagatcaagaaaccttgtacatgagctgtcaatgtgcttctgaaattctggaagacactgtaattcagcattggtttatttagtttggctatgcagttgagttgctgaaacagtttcagtttgcctgcttttttcacagttttaatggcaaagaaactgc

SEQ ID NO: 3648 - DNA, 427 bp, Zea mays
tggtgacctcggccgccttcaccacgtacgccttgtcgcactcctcctggcagaccttcatggccggcgccgtgatgcccttctgctcggtgcacttgcccttgcactggatcctgccgtacagcaccaggttggactgctgggagagcgcgcaggactccttgcacacgaccaggtccgtccccttcttgccctcgcacagcgtcgagcagaagtcgtcctggatcttcttcgcctccgccgcctcgccgctctccgccgctctcttcttctttgcctccgctacctgtggggcggtggccgccactagcgcgagggctagcaccaagagcgcggccgatgatgccatgctgcggctcttcattattttcgcgagctggctgttgttgagcttggtggtggtggtggtgatggaggagatagatga

SEQ ID NO: 3649 - DNA, 402 bp, Zea mays
cgctgaagcggctgacgggtttcaacgcgttctggtacacgcaccactgcttcgtggtggtgtacgcgctgctgctggtgcacgggcactacctgtacctgacgcacaagtggtacaagaagtcgacgtggatgtacctggccgtgcccatggtgctgtacgcgtgcgagcgcctcacgcgggcgctccgctccagggtccgcgccgtcaagatcctcaaggtgggactgcaccaggccggcaaggacaaggtgatgtcgctctgcttctccaagccgccgggcttccgctacaggagcggccagtacatcttcgtcaactgcgccgccgtctcgccgttcgaatggtaattagcaccgttgttcttctcgttcgttgcagaggctataatagctaacaaac

SEQ ID NO: 3650 - DNA, 454 bp, Zea mays
tataacatgattgatttttctttccagcttccgctcatagcactgcttgccttccttgactatctgaactgataagcttaactgacaatgtccagtaacttcagaacattgatcatgaggttatagtttcagtgactgttacttctaagatctcttgcatgtcccagaatatctctgttccatacttccattggttcttgttcagttggaaaatggcataaaattatcaagaacaaatgaatgctaaatgttcttgtatcgcttagtgcctggggttcacctttttatttgtacatgtttctcaaaagttcaagaaatatatacaactgaaactgattggcacgtatctctagtagtctttctgttagattgattttgtggaacaaaagcgcccgaatactagacaaagaaaccaaatgctcaagcgtagataggtcttgttctcttctttatt

SEQ ID NO: 3651 - DNA, 429 bp, Zea mays
agcagactggtcgaacgacgtctggctctgcatgaggctgagcaagctgatgcccgccggcgtgagctccggcagcggcgcgtcgccgtcgaggtactgcatgacctgcctcatggtaggcctctcggccgggaacgggtgggagcacatgagcccgagcgtgagcaccatcctggcctcgtcgaggttgtagtcgccgcgcagcctggagtccacggtctcctcgatggagcccctgcgccagtactccagcacccggtcgaccagcatcttgcggccgtggcgcacggtgtcgacgaccggccggcggccgcaggtgacctcgagcaggaaggtgccgaaggcgaagacgtcggtgagcggggacgccttgccggtcctggagagctccggcgccatgtaccccgtggtgccgaccacgtgcgtggt

SEQ ID NO: 3652 - DNA, 457 bp, Zea mays
gtgcacaagatcttcgtgtacacgagggaggaggtccagcgcatgaacccgggcgccctgaactcgaggccggaggacagcggcctcgccaattcgacggagaggggctccgcatctactgctgctgctagagaggcacccggctaccagtccgcctcgtcgcttaactccgacaactgctgatgccttggcagctagctggtaattgcgatcaacttggatagcagctggacctagtcctgatggttataataataataataataataatctgaacgagttctccgctgttcttttggcaggtcgtcccaagtagtagagaacaaggcaaatgtatccatagatctccttgtagcggagcttaatgcctttttttcccctttctaatatgcattggatgagcccgtagcgcaccgtagtagtatctaaagctggtgttctgagttggttggacctt

SEQ ID NO: 3653 - DNA, 454 bp, Zea mays
gtaaccgtcacgccccctcccccgctgccgcttaaaccctaacgccccgccaccgaatccatctaaccggcacgcgctcgcgtctgctttgctgtgtccaatcgaatggcagaggcggcgaacggcgccgccgacgggggaggcgacggcgacgacaaggaggccgtgaagcgcgcggtgccggtgttcagggagttcgcgctggccgagctgcgcgccgccaccaagggcttcagcgccgacctcatcgtctcggagagcggcgagaaggcgcccaacgccgtctaccgcggccgcctcgatggcggacggctcatcgccgtcaaacgcttctcgcgcctctcttggcctgacccgcagcagttcctcgtatggatttgtgttgcttcaatgctcgctacgtgtgatttcctcccggcacggatctcgcaatgtgatgcagtgctgctgctgc

SEQ ID NO: 3654 - DNA, 447 bp, Zea mays
aatcttctggaggtcacgaatacctcgctcaagcctggtgcctttgggtttaatacatgaacctgccctaccaacaactgggtgctgaaacaatggaaaatgttgaaatgtatttaagactctcgtgtgccacaatgaaacccttaccattgtttgtgtagaataggccgcactagccataaccaagccaggatattcacttgttcaatgcttctctttgtgatatattctatttgatggatcttgattttccccacttacctttctttgttggaaaccaagttgtgctgaagtgcctttatccctgtcagctggataagcataatcaaatgcctcactggtttttgacttatgtgcataggaaacaggtggtggtgcagccttttgcttttccaagtctcttagctccaaaggagcatctgagacatccttaataaccttagcgtg

SEQ ID NO: 3655 - DNA, 421 bp, Zea mays
tctgctcctccctcctgtctcggagaagtggacagtgctgccgatcagttgctcttctcatggatagtagaggcttggcattgcggtgtcaatgtcgaagttctggtcgaatacgtattcgacgcattcgagaggcatgaattcgtcgtcaggcaccggaaggggcgcaaccgacgagacggcggcgaacgccgatgacaccacctcctggaggtccacgtccgaggtccagtccctgtacccgggcaccgggcaaggcgagatgccctggtgcaggcagccgttggagtcggagccgacgggcgacgcgagggaccacggggacgaggcgccccgcacggggcagctctcgggcgtcatcggcgggagcccggcggcgttgtccgtggtggtggtggccaccgtgagccgcgcggcgagg

SEQ ID NO: 3656 - DNA, 1179 bp, Zea mays
tagttcttgatgttcatgtaacagtacactacaaaccgtgttggctacatttttcaataactttacatttctagtttatatattgctaggttctgctgcataatcatggctcatgacgcctctgcactgttgctaaattgtgaatgtgcgggattttgattatgctgatctataggttgatgctcacatccaacagctagatcagtttatgaggaagcttgaagaaatccggcaaggtatggaactaccctttggttgtttctgagtcgtgtattttctgttctcattttgagtaacatgcctaactgattgctcttttggaaagaaattactgattatatgtatggcatgcgttgtaattaccagaaaaagaggcagctgctgctgttactgcagcaagcttgaagaccatgtgttagagaacaatatcctttaagtaagttgggcttgaccccacacacaaagtggtgtgaagactgcccaaagatggactttcagttgcagagactgaatttcattcagctgcctgaaaactgaatttacagtgtgtggtgtcagtttgggaacacttttgtgaccattccatcatgttttagtctaggaacgatataacaaagttgaagaccatatgatggtgatcaaatcttcttaagaaagttttgtttggtgttgcacaaaaattgagtaaactgtgcccaaacattctttgtcaggcatgtgtgttcagtttcttgttcagttagctgcagcagcgtcgccaccgccgacttcgagggatttgccgacctcggctccgcgctcgtgctcgacgacctcgtctcctccgcctccacctccgccagctctgcctccgggcccagggcctccgggcccagggccgccaggagcgtcttcgcgctcgactgcgtgccgcgctgggggctccagtccgtgtgcggccgacggcccgagatggaggacgccgcccgcgtgctcccaaccttcttccacgtcccgctctggatgctcgccggcgacgcgcccgtcgacggcctcgaccgggcatccttccgcctccccgcgcacttcttcggcgtctacgacggacacggcggccttcaggttgcgcgcgcgattcgattcaccaccacctgcgtagcactcgattattgctcgagctccctgatcaatgaatcccgc

SEQ ID NO: 3657 - DNA, 777 bp, Zea mays
tagccacctagtgagtgagatcactactactggtcagagggcgaacggtgaaaaggggtgtgggcgggcggaccagcagcttcgtcagcttttcccctgccctctctcgtagtcgtagcaggcacaggaccagacatacctgcctcgaaaagacggtaaacagtttttagggactatatatacccctacatttctaaacatttctgagtggaattacaggtctaagatgacgccatttcgagctgaaactactgtacagattcggtcccggctcttcttttcctcgtctacactaccctaccggcctacccccacggaagctcctctttttccaaagtttaccgggagaaggaggaggagcagagctgcagcacgtgcgacggagaacacagacagtgtatgtgttattataagagagcgcacgcacgagcgcgaatgcatggaaagacatgtcacgcagggaaaggaaaaaatgcagcaatataatggaccaatgcaatccttagcttaccaggctcccgggcctcacgctgaggctgatctccttgcacgctagccccatggcgaggacggtgagggtccaggtgacaagggcggacgcggcggcggacatcatgctggccgggtacccctggctgacctcgtgcaggccggcgagcgaggtggagatgccgacgacgcccgtgacgagcgcgaagatgacgaagaaccccgtcgccaggttgccgatggggaagtagatcgggaacaggcgcaccggcggcgtcgcgcccttca

SEQ ID NO: 3658 - DNA, 440 bp, Zea mays
cgaacatggctgcacagcagcacaggtgatagcgactttggacctcaggcagacaaggaaataactaacttgtgagttgtgacggggtagcataaattgactcgacgtgcaaataactcacagatgtacaaataaccaactacaggaacggaggaacctgaactgcttgcacgcctcaagacgcatgcaggcacgcagctacgtcgggtgagcagaaagaagaggttctgcaccggcagcaagccgccaggcgccagcgcatgcctttgtcagttggaatggaggtgtatattaacatggatttcctatacactctggcgaatgttacagacggggtgttacatcacagtcacacctcgcggttttcttcccatttgacgacgctcccgcacgcacgcgggaccgtcacctatggctatatttacaaagggcatcttgcc

SEQ ID NO: 3659 - DNA, 385 bp, Zea mays
gcgcgggggcgactggacgacggcgcagccgggcccgagcgccggctcacgctgctggcgctgcggctcgccgtgctggagaaggcggccagcggactgggcgcgctgggcttcatctgggccaccgtcgtgctcctcggcggcttcgccatcacgctggagcgggtcgacttctggtccgtcaccgccatcctcctcgtcgagggcgcgcgcatcttcagccgcagccacgagctggagtggcagcaccaggccacgtggtcgctctcgctcgtcgacgctggacggtccagcgtccgcctcgtcgcgcgctccttccgcttcgtcttccgcgcgggcggctgcgactgcgagagcggcaaggcgtccggcggagctgcggcgt

SEQ ID NO: 3660 - DNA, 382 bp, Zea mays
agcaggcccgtgtagcagcagacggccgcgacgaggagcagcagcgccaggctcagccacccgccctccgacagcgcgtacgggatggacagcagcccgacgcctgagagagagagagaaagtgagagaccgagagaaaaaaaaaacaccaaacaaacagcgttggcatgccaacacccggcctgtgtaccgtaactcccaaacgaaacgtgtccgcactcaccggagaggccgttgaggccattgaagcaggtccgcacgaagctcgcgcctccgccggcgccggcgccgtcggggtccgggccgaagccgtgaacgtgcgcctcccggccgcacgccgctgggtccttgcgggcctcgtagtcgtaggcgtggaggaggg

SEQ ID NO: 3661 - DNA, 419 bp, Zea mays
accaccagcgtcgtgcttggtctcgaaagacatctgacatccataatgtggtgaccaaggttaggaggtgtttggttatctgattttaatttagtttgtgtcaatcaaatatttgaacattaattataagtattaaatatatgtttgattatgtctaatagattcgtctcatcttttagcctttatctgtgtaattaattttataattagattatatttaatatatgtaattatcattagtagaaactaaactttagcaggatgaaaaccaaacaccccttaggatagcaggttttattatgtccgatcaaagccttggtggagccatggataagactgtcaacatgtggtggtgtttatcagcatgttgcagatatagctgcgggtaatgcaagaaataatttgtgcctgtatattct

SEQ ID NO: 3662 - DNA, 413 bp, Zea mays
atatccaatacataccactgtctagcacatcagaatacaagccagcggccaaccaatatttcatgaagcccttcttgacccgtttcataagctcaattatgtaatcacctttactattgtacttggtacagttatcccatatgaactgtacatccttatatacatcctctgaattcatatacttgtcaccacgttccaagttttgacatattgtgccaaaatccataggagtgtcaataacatcaaaataatcctacaaagttcgatatgtgttatgagttgggaaacaggtgacatgaaagaataagcaaaagatatatattcatcaacatatacttatatagctaggtacttgggttaagacaaaggctaggagacatagatagaaaaatccaagaaacaaaaggaaaata

SEQ ID NO: 3663 - DNA, 652 bp, Zea mays
tgttggcagttagtacttcactaaattcagtgtggcaaaggcgtcaacggaatttagtgaagcaattggtggttgactagtcgtgacgctagcctgctttagttgatcgacatgcaagttgaagtctctaatctctttggtgcttattttacagcttctgtttccaaattcccacgccgtctatcttttctgcttagctttaagacagatatatcccttcgctggaggcagccatttgacagtgccaagttggattcaggtacatcaagtttgatacgtttactcctgcaggtgcctccttgtttccgtgttggaaagctagcgcgttgaaattagattgacctcgctagctgctgctttattgcacatcattcgatgcgacccccctccctgtacgttcgtcgctgaaaaggttcggtacatgcatgcatgcatctcgtctgctcgagatcgcgatcgaatggaagcatgcatgcatcgttttcgttgccagaaagaaagaaaaaattgtactgcgagttcatcaggggatgaataatgcatgcatgcgtgcggtgcgaccccgatcgacgcaattaaccttccgaaacaccgactgccttttttctcgtctccaaacgaccgagtacattcatcatgatgagctaatgaa

SEQ ID NO: 3664 - DNA, 446 bp, Zea mays
tcaggcgaagcctggtcggcgggtattatgatgccggcgacgccgtcaagttcaatttccctgctgccttctccatgaccctcctcagctggagcgtcattgagtacagtgccaagtacgacgctgttggggaacttggccatgtccgtgacattatcaagtggggggcagactacttcttgaagacctttaattccacagccgatagcattgatcgtgtcattgcgcaggtaaaaagcttcatctcagatagggggatgtatttggagttgggtcttgcctgtcgctaccaggccattgctaatctgaattgtgggggagggcgcaggtgggaggtggtgcaacatcgcctggttcgacacagcccaatgatcggtattgttggatgaggccagaggacattgactacccacgtccagtggttgagtgccacgcttgttcagatc

SEQ ID NO: 3665 - DNA, 454 bp, Zea mays
gacagggcaatatgacgcttcctttgggccaaacacaacagtcatcagcaggacagcagacagctcatcacaaaactaaagttaaagcgcaagtggtgacgaaaaaaagggcgctaaaatgacaccaacggtacatacggtagagctcagacagcgttataacaggtctggaatctggatacaagcaacctgggcgggcggcaactaaaagaatgtgaatcaagcacaacatgaggaaccggagcaacggacagaaagaagaggagggagcaggggggagaataaacaatggcagcgccaaaacagcctagaagatcttgttgaactggccgctcagggtgcccttgaggtttgagtagagcccgtagagggagtactgcctcaggttggacacctcgtaccacgagttcagaaccgactcgtgcttgtccgtgccggagaaagccagctggat

SEQ ID NO: 3666 - DNA, 841 bp, Zea mays
tgcgccgtggggttcagccccgtgaacccctcgcagtggtccatgagggagacccgtggcgggtgccggaggaacgtgccgctggagtgcggcaacgggacgacgacggacgggttcaagatggtgcgggcagtgaagctccccgacacggacaacgcgacggtggacatgggcgcgacgctggagcagtgcagggcgaggtgccttgccaactgctcgtgcgtggcctacgccgccgctgacatccgaggaggaggcggtggccatggctgcgtcatgtggacggacgcaatcgtggatgttcgttacgtaggcaaaggccaggatatctacctgaggttggcaaagtctgaattaggtgagcacagccgcagagatacatacatatcccggtttgaaatgaatcatgggcaagttttatcatctatatatatatgctctcatggtgcagcatgcatatttctgcagctttttttacggctgtggtcctgctctgtaaaaaagatgaagaaatcttgcgaggagaaggtagggggctgggggcagggcgagtgctcacagcgccggatagcaagtcgaaggagatgacgtgcttgtaggcgtcctgcgcgaagattacgggagcatactcctccgccggctcccgcacctcggcgtcctcggcgttcccgggtccctgcgactgattcttggtcttggaggagtacatcttcttgatgctccatccctgctggcgctcgaactgctcccgctcggtgtgcgtgacccgcaccccgtacgcgaccccgctcgtcagcggccgctcgaacgccgtcctctccgcatacctcgcgaacgtttt

SEQ ID NO: 3667 - DNA, 422 bp, Zea mays
atagattctttacgctacagctccagctagacaggagacgcagacgcgggtagtcacggagccacgtactcgaaacacgggatatctgccttgactttcagtatgtatataagaaagagacaggttacatccaaaggatttctacaaggagggccgactgtgggcatgtcataactcctgccgcttttatatctccaaaaaattgtggagccaaaaaaaaaagagagagactcgagcctatctatacatgatgacgatacagcccaggatgaaaatgtttaccacttcaacaacacaaatcgacgtctagacaaaaggatgcaacctgatggattcctcagtgcccaaccagcacattactgaacaacctgagggagcagtaatttgcggacgacggcatgcaatgttacgaggatccctat

SEQ ID NO: 3668 - DNA, 373 bp, Zea mays
tcacaaattcatctttaaattggccctacatatgatataactcacactgagtaactgttgatatcatattctaaatgactaaaagatttcagttattagcatattatgatatcacacacctttccaacaacctcaaacgtccattgtttcaaccggaaggccactgcgtttagatgattatttggcatggaggcccagtgtgtatcaccatttaaactctgaaaaggttagactttccctgatgaaaccttctaattaagtgggtaagcaaagcactattcagtaattgtatcacctcctgttctagcaggaatctccaaaatctcttcaccaggccaaactccgtggggaacgtgttactcactttgtgctt

SEQ ID NO: 3669 - DNA, 520 bp, Zea mays
aacagaagcgcggcgagcagcatagccccgcacggtatggcgatgtcccacgcgatgccgtagaggtcgtcgcgagggctcgcgtacacatacgtcgtcgcgttccagctcggcacgtcgctgtgcttcctgaacacgtcgtacgcgtgcggcgccgcgcggatcacggtgccgccggcgtagaaccacggcgagagggccctcaccctggagcccgagaaagcattggagacgacctggggcaggaggaacccgtccaggaccagccccgcgtaggccgcgaggtcgtccactaacgccggccccgaaggggcagaaacagagagcgcggtcgctcgtggaccgtggtggtggccgtcgctcgtgtggacgatccagaccacgaccgcaccgaggacgtacagcggcaggcatatccagatcgtgctccgctcggcgtcgatcgacgacgacgagtcctcccgcttgctccccgcttgacccgtcgatctccgcgacagggcgagctgaaggaggcgca

SEQ ID NO: 3670 - DNA, 399 bp, Zea mays
tggtagttcagtgatcccttgccgtaatcatgatcaatcaattttagtggaaaacttagacatacctgattgggcgacttccttccctggttattttgaagactgtgggccagttgttacatatagccatgttgatgacattggttcgcctagaaagggtgtgccaattggacctgagcaccaggctgacattccagaatggaggcccctaaactctatgattgtacctggtgcttcagagttttgtgctaatctggattgtagttctgcttccacttcagagtctgttcccagaggtgatgactatgtaagtgacaagtggatcaggtactgtgttgttccggtgacatgctgctcatctcctgttgactgggctggagacagcaaaatagattgcaa

SEQ ID NO: 3671 - DNA, 425 bp, Zea mays
tgaatccataaaagcattcaaaccacaatagtcaacaatgatattaaaatctatccgatgcctcctcaccatgtctattgcatctttgaaacgcttctgaaccagtgcctgaacaattgaaacaaggactagcttcctggggtaggtacactctaagttaccacgtgttgtttgcattatgacagctgcttcatcaccatggagaacaccaaccaacttcgctcccttttcccacacagtgatgtactctttgttttgcttaccgcgagcaggactactgacaaggccatcaattgtgacctcgatgtctttaagtaagacctcattgacatccacaatgaacagaagatcttgcttagtagtcacaagcaagtggctcataactggctcagtggctccataaacactggagtataatgtgaagc

SEQ ID NO: 3672 - DNA, 388 bp, Zea mays
ttcatgaaacccaggaacaatgctgacccatatacgattccaagtatgttgaatacatcttgctcaaccttgctgttgcacatgatatctgtgttagatcttgattgggggcataaaaattaatttgaaatattcatgaaaggtaattataatccacttacatgttcgagccaattttccagaatacaactccaaacatgattgaaacagcaaaagtgtttatgaaccggacaacattgtgttctgagtttttccagtatgcacaattttgcttccacaagcatgccgcacattgtgtcgtaaagttttgccagtaaccctgaggaaaatgcagatcatctgtgtttggttctggttgttccaattcatcaattagaagcctgttctc

SEQ ID NO: 3673 - DNA, 384 bp, Zea mays
agacgaccaattgttcggaagattaagtgttatgatgtctttggtggcctcgccataggccaagtacccacaaactccaaaacagacatacacggctatgatggcggcaactgcttgggaaagcaccgagcggaactttctccggtctgccatcgacgcttctagtgcaagggtcatgctgaatccttcgaaacagaagactgcaacaccgaaggtgaatggtaccgcccaaagtccattaaaagcgcttctgtttgaaaaggggtggtcaaagagctgaagatcctctttgataacgattgccatggcaaggacattgcacacgtctgcaaatatactgaacggagaaagggacgacagtgagcggatgaaggagagcgctat

SEQ ID NO: 3674 - DNA, 446 bp, Zea mays
acggctagctaacatttaaaaacatgcaacttgaggtagcacatgcgcttcattagcatgagcccggaatcagtcgtctagctacgtactggcgctaggagaggtaacactacaacaaagaccctgggctagtcgcgtggtgggtgtgcagccgaaaaagaaaggggcaaacacatgagtgctcaatttaaagccagccagggcagcgtcagatgcatcggcaacaaaagcagccaccctaccgagccccctggatccatctgtccgcgaccgcgacaggccactaactaaacaccaccaccgttcgagggtgccgctgcgggattaaagtatagttgacacgatagacggcgagccggctctccacactccactggtgctcgtgcctcgtgctatgggggaaaaagagttttatagacctgtttatgcagctatagtattcttca

SEQ ID NO: 3675 - DNA, 423 bp, Zea mays
agcagcgagaaaggcaaccgcggcgccccgccgccccgcctcgccgctgcctcacccgccgtgcgctgccgcgacccgaccaaatcgaactgaagctgcgtgaagcggctgttgggctctgttgttggatgggctttcgggcactcagattgggctgtagtttagagagtcccagcgacctgtagcctcctcctctctccgtcgacctcgctctcgcctcgccgcctccgacccgcagcagcgcctccattgctctctctcacgagtcccggcgttccagtggggggcattcatggcggggcagtccgacccgcacctctccatcttctcgccctccgaggtaaccaaccccatcccttccacaatcacaggcagggactagactatcttcgtcaaagggaatgtttggacctgtcctgtctg

SEQ ID NO: 3676 - DNA, 1145 bp, Zea mays
tgaggctactactcgtcctgttgggattgatacattttggacatcttgcaaccgctgccggatgcagtatgagtacttaaggatttatcttaatcataacctgttgtgcccaaattgccataatgcattcttggcagtggagactgggttcccttgcaatggaagcagctcatcattctcatggtcaaccaagcagcagccgcagcagaaccacaattcaaccaagcattcatatggctcaacaagcaggacttctagcatccctggtacagggaatggggggtaccagcaagataatacttatgattcttacaacaatcaaggcttccagtggaatcagtactccaagacaacaactgcagcttgaagtggcaaaagagagcagaattcttaatgttttggagacatggctgcttgggcgcttgaagaaatgctctctggctcttgcctccttaatccgctcgatggctaggactagatcaagaattgcctggctcaaagatggtgatgctaatacaaagctcttctactcttggtctcgttatcggaaaaggaaaaatttcatagccaaaattcatgacggggagcagctagtgaccagtcatagtgataaggctgaggtgtttcggtccttttattctgatttaattggtacagggcagcaaaggtccagaactgtcaaccttgacaccataggactgcagacttttgacgacaacggcggcgccggcgcagaccccagcgacatggtcgtcatctaggtctaggcttcctcattcgaccgatctagtactactactactactccatcgattgacatgaatagttctcgatccgccacttattaagtttattagctagcttgctcatccctaaattagctgccgacttttttagctagctatagatttcagtagcttatatactagcttgttggttctgattagagctgcaatatttcatgagtcgtcgtcgacgacgtaggtattacgtataggtacgtgatgctttgcgactgcaatatttttgcatggcaatgcattactgctaaggtcgacgtacgtacaagtagactagctagcatgcagtttgaacttgttggcttttaatcgcatgtgtcaaagctcagtttgtcgtactgcggc

SEQ ID NO: 3677 - DNA, 430 bp, Zea mays
atctccttgaaaccgtcctcccgggcccattccgtcttctcactgccctgggcaccttcgggattcttagctgtctcgcgtgtgccagctttgttctggtgatgatgagatgcagaagctttcctcgacggtttttccttctccggtcgagattctttgctaggctcaggagtgtaagctttccagacagcactttgctgaacgataagcctgtgcagctcgaaaaacttggtgattgcagcttgtggatctacttcagaagattcccttatctcagaaaaaattctgtaaaagcacgtacagattatatttatttgtccagttcatgagctaaagtaaacaatgtagctccctagagaaaaaaaaactagacataaaagaaaaggtaaagcatgtgcgttgcaataaggaaacaagatcctgggatgca

SEQ ID NO: 3678 - DNA, 444 bp, Zea mays
aaactgaagaagttcagggcagttaggtgcagactgaaaacagcagaaatatttcccttcattagtttttctaggaagttctagggtgtaatatgctaaagaagatctgtgttaaaggtggattcgtttgctataattacatgacactcgtgataagtccaaaagaaaaaggggggttgaaactggtttgtgctgactgtgctgtctgcttgagcagctgatggacacatgttgatctgccagggggggttgctgttgtttccctgcctttggacacctgtgatgtgcatgcagtaattccctagccgtgcacatccttacaccctctggtgacctcgtgtagggctgtgcagttaaaaaaatttcctttgccctgatgcttttataacactcggtggagggcatcttcacagtgacttttcttttgaactgagttgcctaagc

SEQ ID NO: 3679 - DNA, 339 bp, Zea mays
atagattggcaaaaagaagcatgaatcatccagctaaatgtcctatatgtgaccaagaacctgaaaccatcaaccacttggtggtgtcttgtgtgttttcacaagagacttctggtacatcatgctgagaaagtttgatctgcacagtttagcccctcagccgggtgctatctattttctggattggtgggagagaatttcagctattgtttctggtatggttaggaaaggtctggattctctcttcattccgggagcctggatgatctgtaagcatcagaatagagtggtgtttgatggagtttcaactttcactaaacctcactcttctcctcaagt

SEQ ID NO: 3680 - DNA, 420 bp, Zea mays
accaacacacataaggattttggtccaaacctcccaggagaagacacaagacacaagaatgtgttgtatattctccacatcttgatcacagaggaggcaaagatagtggtgcggcagcccatgctttgataggtgatctgctgtccaacacctgttcttgattgctaaccaaatgaagaacttgcatcgaagagggggtcatgttttccaaatccttttccaaggtgtaaacttaactaaacccaaaaagtaggtgttgtaagcagatttagaagtgtacaaccttgaatttgttggcttccatatgtgctgatctgtaacagcaggctgcaaggtaaaatcatcaactacttcctagagcttcaggtattcgacaagcacatgtagagtgagggcaccttggatatcagcagtccaaga

SEQ ID NO: 3681 - DNA, 439 bp, Zea mays
aagggcgaggaatggcaagcctttcatgtgctcgggcggacggtgttgtccgttccggcgcgctgcccgccaagctgttgctgtgcgccagctgctgcttccctacggcggctccagtcgcggacggagaggtgcaggtgcttgcctgccgccagcatctccaccgcttgccgaggcgtcaggatctccgtcgccagcgcccgcgccgtcgccatcctcagctcgtcggcctccaccagcagccgcgacagcgcggccttgtagctgtccagcgccgcgtccacctcggcgtccgcggctcctagccgggccgccctgagccgccgccgcgccgcgccgtcgcagcttccgctggcagcagctccgcctcccagccgtgccgcggcggcgagctcgcgctgccgcacgatgggcaggagcgggcggtcggcgatgtcct

SEQ ID NO: 3682 - DNA, 424 bp, Zea mays
cttctgtgaaaattatacggaacaagcaaactgggcactcagaaggctatggttttattgagttttactctcgagctgctgcagaacatactctgatgaacttcaatgggcagatgatgccgaatattgagatggcttttaagctgaattgggcttctgctagcactggggataagcgtggagataatggttctgaccacgcaatatttgttggtgatttggcccctgatgttactgactccatgttggaagatgtgttcagagctaactatccttcagttagaggagctaaagttgttgttgataggatgactggatggcccaaaggatatggtttcgtgcgttttggagatctgaatgagcaggcacgtgctatgactgagatgaatggaatgttgttatctacaaggcaaatgaggattgg

SEQ ID NO: 3683 - DNA, 326 bp, Zea mays
ttcatccgttgttttgggcttgcagcagttgaccaattgggaatttttactcatgcaacttgctatgcaattagaaatggcatataaaaaatgtacaaactagaagtggaagaatcagtattttttattcattaccttttacggttctaaaggtcctaaccagaaataaggaatgatgaacaccacttggtctttgctaatctgtgaaacagacgaccaatggatgcttgatagtgtattttgttcatgtctgaccacatgcaaaccatctatgtaatttgcaggtccaaacttgaacggtctttttgggagacagtcgggtacca

SEQ ID NO: 3684 - DNA, 419 bp, Zea mays
tagctctatagcgatagcaacaggctggggacgatatatcagtttcgttgtctcatactcccatccaatggcgttttacatctctgttccgatcgtcgatcgacaccaggcaaagatcatcagccttcggttatcgaactggctagctggagcgtcgacctgaaaacaaccgactttaatttgcagcacacatcctgacaaggcagttcagtgatcgactccgaacgctgatggatcggatcggactagggttctatctatcagttcttttctaaacagttcttctgaactctctcctgtgcgatcgaagctcatcagtaccttcgtcgttcttcatcacagctcaccatatcatcaatacaagcaggaaaacgagtctttctgtgcagagagctagctacttgcattggcttacttca

SEQ ID NO: 3685 - DNA, 810 bp, Zea mays
tctattccagcctcctcctccgtactgcgcgctaccttttgctcctccgccggcttcggctcgtcttctccgtcctccatattcggcgacgccaccgaggtcgccaacgtgccaccgctcaccacgcccaacctcttcgtcagtggtaacgtctctccgcttcgccccgtcccaccaaactcgtcgcactaatacaaaacaggtgtgtgcgtgaatttaaagctgcgggcacttggataccttaatgctatgtttgtgagcaatccatttggggaactagggataaccactaaccagtaagctttatcgatgaagcacagcatttaaacctgttacagactcctagtttgcatcccatcctgcagtgttgatgtcagaggttggcaatggtgcgaatactcttttttgggtggataaatggattaatgggaaaaaggtagctgatatagcaccaagattgttctgcaccatatcaaaaagaattgccaataaaagaacagtgcaagaggcaatggacaataggagatggattagtgatattaggggcgctctctcagcaggggccttgattgattttttgcatctctgggaagctttaacggatttccaactgcatcctgatattgaagacagacacatttttaccatagcgccagatggtaactactcagcaaaagttgcttatgaagggctcttccagggatcgtgctcctttcttcaccacaaaagaatctggaaatcctggatgccacccaagtgtcatttcttcctgtggctggtggcacatgataaatgctggactgctgatag

SEQ ID NO: 3686 - DNA, 924 bp, Zea mays
aacattactgtcaagtgcaaactgctgaagaaattgcttatacatagctcgctcgctctccgcggcaagtatggcagtagctcgatcattcgatacaaagaaaaccacaaaccagaagaagttccaccacctgtactaagactaggagtgacgacacaccagaaaggagagcaactgttctgttcaccaaattacatgacttcagtaaaatcaccgatctatctttgcttctgacttgaaattaagattggatgaacggaattgtattgctgcactcagttcaaaagaaggcaccatgctttgaacagtcagaagctcagaaatgttcacaatgcatacaactcttcaatcacctgtttacactgtcaatggacctcccgcttttatctctggggcatattatcaaaggctgtgcccaagtaccatcagtgtcgttgtcaatgcctctgagttgttgctagggtagcactcaggctactgcaggacaaatcaagataatacactgctaaaataagttgtattagaccattaaagtatgagcatttagttaagagttgccctgtgtttttttttgttttacccatgataaccgtcagtacaagtgtacaaaaaaatttatagtagtactttggaggacaaaactggtgccggtcattttagatattcatgcctctcaaataccttaagatggcttgaattcttattgttcatatacattatcgtttttaggcacacaataatgaacctctacagattgtttgtggttatcatgctcttcctcaaccacctcatggtggtgaacttgtattccacacccttgaacatgtccaacctgtgaaatactcctggcctggattacccttgttgggttttgtagaggcgatttgaacatttaaagtagatacttgacctatcatgactata

SEQ ID NO: 3687 - DNA, 436 bp, Zea mays
atatgaccatcgatcacataacagcgatagcgacatgaaaggtgaaaggggcaatttccctctgttgcttgaaacagatagaagtaagggttccgttgatctgatgcaattctccaaaagtgattgagccataaggtcaactacggcaatccaatccagtcagctattgcagtcaatagcatgaccacaaaaggctccagccatggggccacgacctcccaatcctacatagcaggtactatcacagctttacagttagcttgggattccttctctcagttctccaaatccatggggcaaaaaatggggaaaccgggaaacttataggcaaagcggttccaggtacacgtcacccagacccagtcaaccaaaccttccttgaatcccaaatcccaaattccccacaccctaaatccgcaaacctatagcagttcaa

SEQ ID NO: 3688 - DNA, 357 bp, Zea mays
ttgataatccttcgacgcttgcgctggccataaccatacgcttttgaaactctatggaagaaatgagcattgctaccatctgttttcatacctacaaggccaataaaatccagattcagaatgtgaatataacaacagattcataaggaataacaccacctcatgacataattatgtaccaggaagattttcaggatgcgaatagcagattccctcatcattgtctatagttggaataaattcatcaatgagcacatgtggtcttgaatctcccaggccaaccttttgttctaaatgttgaagcaactccaattcagaaggatcaaacttgactccagcaggcaacccaggccactg

SEQ ID NO: 3689 - DNA, 381 bp, Zea mays
ttcccggccaagaccttcttccatgacgtcggcctcggaggcgccggctaccaggttagccgctacctctacgccacctgcaacgacctcaagctccccaacttcgggggccggaagcacagctccgccgccaacggcaagctgtggagcgagctgggcacgttcatcggctacgtggccgtgtcgacagacgaggagacggcgcgcctcggccgccgggacatcgccgtgtcgtggcgcggcacgatcacccggctcgagtgggtggccgacctgacggccaaccagaagcggctcagcgagctgggcgtgccgtgcccggaccccgacgtgaaggtggagatggggttcgcggagctgtacacgggcaaggacgcggcc

SEQ ID NO: 3690 - DNA, 380 bp, Zea mays
gcctcaaggagtcaccacatattcgacaacccaatatagttcctcccgtcgataagacaggaggcaggtcatcacccaacagcaaaggtaggcgaagcccattgaggaggatgttagatccaatattaaagccaagacattctagtccagtacgtccttcatttgttcctaagtgtcaacttccagtcaataccaccaagcagtctctggactcggggaaatcagtgccacataatgttcagcgaaggtcggttgatttggtagtcaattcgaattatctgatcgaagaaaataggaatcagcctcctccccgtgtgctattgaacagtgcaagatacatacagaaaggaaatgattcagcaacaacaaggcaagcactt

SEQ ID NO: 3691 - DNA, 423 bp, Zea mays
  unsure (1)..(423): unsure at all n locations
cgagtaacaactagatgctagacgaagaacgtactccagggacgacngatttcatcttggtaagcgtacgctatgactccgacgcttttccatagcccagctctgacatctcccagctcgtccgtggggcgacctcctggtgcgaccgagtgtagtgctgagcacaaccaagaaaattattgaagcactgatcagatgtaagtcgatggggcagactccgagtctaaagaaagagtgtttcgcgagatgtgtagtaagcagatgaggtcacttcagtacctcacctccatcttcttcagtaactcatgggcagttggcgctgaaacaattatatctctgcaatctagcttgataaagccttccgttgcccctctatcaaacagcatgagcagcgggtcgtagtagccatcaacgttcagcaaa

SEQ ID NO: 3692 - DNA, 443 bp, Zea mays
aagtttgaaatccttgttacaaagaggcaatagacaattatttctaattctttttcttcaagcattatggatgggacccttgtatatatcaaatacatgagcagaatccaaaaatgtatctaatatcaatgtgatgtttaaaatcaaggatagttgagccatgtattatgcatatataggtaataggttgagttcaccttgcggaagtcctgctctgacagtgagtcaactagttttgctccactacaaaaaaaccctctgcctagtggactgtaagctacaattccaattccaagttctctgaaatagtcacagaaaggtgataattcagaaataagcttcctacttattgactgcacaactccagtgtttgagggtccacgaaagtacctgcaagtgggaattatatcttcttccacatctctagaccataatgaccattc

SEQ ID NO: 3693 - DNA, 466 bp, Zea mays
agcgctgtcgcggacatgtgcggcgccggaggcagcagggcgaaggtgcctgagttgcttgcgcccgtctgcgggaacagagacggcgctccgattgcgaggcagaggaaggtgggatcgacgccgatgagatcgcgcagagatgtgctgtgggaagtggtgcttgttgtggccgacgcgaagaggccggcgaaagtgctggtggttgtagacggcgcgatggaattggagacgctgccacctgcgccgcaggttgttgtgccgcttccatcggtgccaatggcttccgagggcgacgcgaggaagcaaggaagcatcggcgtgtgcgtgtccttgtccagcagattggagacctcaagctccgagtccttgtactgatcagcttccaggaaacaggcatcttcgtcttgatcggtttcatcctctaattcggcagtcacacttggcacagcaaccacctctggct

SEQ ID NO: 3694 - DNA, 442 bp, Zea mays
tccacccgctccctccctcggtgcctctgctgtgtcgcgcaggcgcaggagctagcagcagagctgggggccaaaggcaagccaagccactgccccgccggccgtactcgccaggagagaagaaaggcaccgagccagccaagccaacaaaggacttccttgtagtactagcggctagcgacggaggcagcagcagcagcagcaaggcaggcggcaactcgcggcaaggctggcggccgggccagtgtgggtgggtggctcggtatgagcacacgtacccggtgtagttagtacctcgtcgtcgtagcgcctgtgcgcctgtgcctgtgtagcacggccggccccaataattggtccgtccactacgccggccagaccgaggctttttgactcggcagccagccagtcgagcggagccggggcgggcgtacgtgcggggcca

SEQ ID NO: 3695 - DNA, 469 bp, Zea mays
aattttcatataagatatatatacgtagttcctatcggggaaaaagaaaatcattccatgcaaagaaaaattcaaattcctgcgaaagatggcgtgtttttttggtgctgatcagcctgttgcgtttgcgtgtggaccctgctgtgcgcgccagggacgcaggaggaggcggcgatggcgtacgacatggcggcgatcgagtaccggggcctgaacgccgtcaccaacttcgacctcagcaggtacatcaagtggctccgcccgggcgccggcgccggcgccgcgcagaacccgcacccgatgctggacggcctggcgcagcagctgctgctgtcgccggagggcaccatcgacggcgccgcgttccaccaccagcagaacgaccaccgccagcagggcgccgccgagctcccgctgccgcccagggcgtcgctgggccacacgcccaccacgtcggcgctcggcctgc

SEQ ID NO: 3696 - DNA, 416 bp, Zea mays
aagcggatgcagtcggtggagttggcccgcgacgccagccagatgccgccgccaaggatcgggatcgagatcaggaaggttatgaagttgaccacccccagcatgcccgtgcccccgcgcagcatcttgctcttgctcttcctggctgctgtgctgtctcctggaccttctcttctcctcttcctcgacctgctgctgttgctctgctccgcttccttggctctgcgcctctctctctctctctctctctctctctctctctctaactgtcctgccttctctctgctgtgccgttgcctgctctgcttctttgggcgtcgggtgaggagacagagagaggggacggctggatacttgtcggcttttaacgaggtcgtcgaggagcacgctagcgcggctgttcggggagagcaacg

SEQ ID NO: 3697 - DNA, 462 bp, Zea mays
cagcttgcatgcctgcaggcgccctgcgtctcctatggcgtgcgctcctcccctacatgctccatctctcacgcgcgcctgccgaggtccttcccatggcgctctgctccagctcctgcgctcggcctcagcctagtagagctccctggtgcttgcccctcgatgccgcactcgatcgccatggctgactcgtcggatctcgcacgtccctgcgtcctctccatctccctatgctctgcgtgcgcgcccagccgagtccctctccatccccatggcgtccagctccgcctgcatgccgctgcgctcgcccatggtggcgtgtcccactcccagccgtcgaatcccgcccgtccgcgctctgtccagtccccagctcggttttcctcggccgcggacaccgtcgagctcgggtcctgttcgccgtccgtcaaacgcgtcatgtgtggagcaacgtaggaaaat

SEQ ID NO: 3698 - DNA, 420 bp, Zea mays
gggccgggggcctctgcttgatgaacgagctcggccgggacagggcatgcgttgtctgcaagcgagagttgctccatgatacgccatggcccgctcgtgtttttggaagcatcaagcacacacaaagcaggcccctctggtttcatttgtaactgcggtgcctcgtttggatgatgccttgcgatgtttttacacctgtgagtacgtagcttccgcttggaatttgtaatgcacaagagaatttacgaacgtggcttagttgtcttgtagtaaaatatcatccggcctgctacattggaatgaatagaaacatgcctgtatatatatatatgcagcaggtagccaacaacagactcgttgttttaagacgggagcagagccaagaggcaacgtaacgcaccggccggttggttgttggct

SEQ ID NO: 3699 - DNA, 358 bp, Zea mays
cccagttccaaaaggaaggcgaaatgcaggaggaaatcaactaggcgattggatgccggttgctgtccttacatggctcgtcgaggcaggggaggtcggtgatgcaagagtcgatctggcgcttgatggcccgaatctccctcatgatctttttgtcgctcttctccttgatagacctgacgaacatcagacgaagacgcaatcaagccattactgactgacacaatgagcaccggctaccatggattggttagggtggcgcaccccttctcgacgacctcggggtaggtgtcgatgttgaagttccagcgctcgatcacctcgctggtggccttgctcattatgaccatcacgatcc

SEQ ID NO: 3700 - DNA, 491 bp, Zea mays
gtgaacgagctggccccgccgccgtaggccggcaagggaacctgcccgctctcgatctgctggacgtcgacctcgaggtgcttgaagtggctgacgacctcgcgcaccgtccggccggggatggcccgcgccacctcctcccagtccgggcggcagaggtcgagcccggcgagcgcccgctcgaactgcttgttctccgccgccgtccacagacgcgccgccgccgggaaccagttgctccgtgcggctatgtggtccaccggcggcagcacgtccatgtacgtctcccgcatcatctctgctctgccccggggcgttgttccacctctttcttcccccctgtaggaatcacgggactgaaagaaaggttagatttctttttgcctttctgggcatctcagtccgaacacgataaagattccgagagcactgtaacgattattattaaacgatttctctgtctcttgctctgaacaggaactcctatcgtc

SEQ ID NO: 3701 - DNA, 363 bp, Zea mays
aagtcatatagatcattgctaatagtagcttcgttgtggcgagtgtcacgcgaatccgagctgtaactaaacccagttccagtgggctggtcgacatagataagatttgatgcctgcggaggccagccaacacacaaacagaagcaatgttttaccgaacttccaaagggaaaacatacaaaaaaaacacatctgaagtctttccagatcctgattttttcccctggaaatttcgtcgacgaatcggggagcgcaggaggagcaatacgacgtgtaccttgtcccaaccaaaatcattccagacgagcgacaagttgtccgctatgttgaaggggccgttctcgtagaagagcgcgagctcgc

SEQ ID NO: 3702 - DNA, 440 bp, Zea mays
aggtgaaagaggctgccgtttcttataacagtgaaaaaacataacatttgagacacttaggaaacagcaacattaccaagagtgagaaaccagggcaaagcatgctccttctatataaagtagataaagatatgccatgcctccatgtactgcacaactatgaacataaacattagataacagtagacccatatggtcaaaagttagaaaatatcagagtagagacatcttaaacctgtatagcaagacccagttccttccctgggcaagagccgggagagaggcataaagaatcctttgcatcagttctgacaaaagaacagatggttccgacatagttggcaaactaccgaaggaagcaacttcctttggttcctggtgctccagtacaggtgcatctggttcagtatgagttactgcctccctgtcaattttaggct

SEQ ID NO: 3703 - DNA, 419 bp, Zea mays
aagcggaagctacaaccagtgccatggcttcttccaaggtggtcgtcatggctgcaactgatgccctactactgatcatgttctccttccttattttgccgtcaccctcaggtatacacacacatatgtatatgtatatgtatatacataagtacgtatactgtatagctcaccctctcagctcatcgggtaacaatacaatttaatttaatttaatctgggatggatggatggatgggttcacattaattaccaagcagacggcaagggcatgtgcccgctgttccgcagcatcgtcccggagtgccgcgacgcgccactgctctgcatcgcccgctgccaggacaagggctacgtcggcggcttctgcaccacccagcagatctgcatgtgcgcccagtgcaagtcgtcgctgcttc

SEQ ID NO: 3704 - DNA, 333 bp, Zea mays
aatacaagataagaacttaggcaccaccaatacaaccagctcaaaaacctaatatggatcctgataatcagtactgaatgtgatgtacaacacatgcctttgccaatggcccaatacaacaacttaagcaccaagcaaaaacgatgacaaacattacagaatccatgttccaataagtagaataatcaatctctaatatcagtgaagttgctactcgaactgtcataaaagcatgtactaatgtgatactttgaagtagagatttacctgaaaacagaatttagcatggtctattccagaatcatcaaactttttaggatccagctggaaata

SEQ ID NO: 3705 - DNA, 359 bp, Zea mays
agcggaatgtagtgccctctttgaaaaaaaccttgaatgacatttctttggagaaagatgctgctgtagttgctaaggtattgaacacctgttttttgttgcatttgtgctatcatgtgtctgatggagtgatggtctaattatgcatgccatctcattatgtcttttgcctggtatgctgagtaggaggatgctctagctcaactcaggagcatgaagaaacggctcaaggaagcagaggaagaacagtatagggtatttattgaaagatgatcattatcagcattatgatcacttggctaatctggaaatgtacaggcagaagaagactcggcctccttgagagcacagctaaatac

SEQ ID NO: 3706 - DNA, 447 bp, Zea mays
tcctctacgagctgctgggagcatcgcgcaagagagacgcaaaggcagcccaaggggccagccaaccagcaagtcgtcgacaacgttggttggcgcagcatcgaagcacaagcccccgccccggcagacaacacggagaatccatcagacatgcaggacacaagcgactggcggcgagcacgacgacactgggagacgcgcgcacgtcgccagcgggcttgtgcgccgccacctgtggtgctaagctgtcacggcatatgacagggacaacggggcaagcaagtggcggagatccacctttcgcgcaaccgtaaccgcccctccccgacacctacgacgttgccaaggaggccgtgcacgcccacgacggcgccgtgacccaactccgtgggggcctcgacagacccaattcccctgagctcagcggccgacgccaagctccacacc

SEQ ID NO: 3707 - DNA, 378 bp, Zea mays
ggcagcggcgtgtacagcttcttcgggaagggcaagtacgagggcgactgggtggacggcaagtacgacggccacggcgtcgagagctgggcgcgcggcagccggtaccgcggccagtaccggcagggccttcgccacggccacggcgtctaccgattctacagcggcgacgactacgccggcgagtgggccggcggccagagtcacggtatcggcgcccagacctgctccgacggcagcacgtacgccggcgagttcaagtgcggcgtcaagcacggcgtcggctgctaccatttcaggtgaacaccgtgaagcacggcctcgcctgcgctaccatttcaggtgaacaccgtaacatcggttgcagaacaaaatcct

SEQ ID NO: 3708 - DNA, 378 bp, Zea mays
agctatagctagctagctctgtacgccaccggccggcccggtagcagcattgtcggaggggctgggctggtggtggcgcaggcaggcaggcaggtagaagaaggagatccaaccaagggatcggataggataggataggagctgggatcgtcgtcgtcggaacgaagatgagcagcaaggacgctgtgttgaacgcgttcctgagctgcttcatgcacgtgggcctggcgctggtgctcctcgtctacctccccgccgcctccgtcctccgcctcctcgtccgccccttgttggccaacaagcaggccgaggacctccgcggcaaggtcgtcctcgtcaccggcgcgtcatccggcatcggcgaggtcagtctgctgc

SEQ ID NO: 3709 - DNA, 419 bp, Zea mays
tttctccagacagatctagtttcacatactccaaaccctgtatatcccagacctagctcctggtttggctgatttttctttttctaaatggagtaaggtgactcgtgtggcgccacaggaaaagcgtagagggctgagcactctgatcatccttgcagcttgggaaatatgaaaacatagaaatagttatgtttgctcctggtttggctgatttttctttttctaaatggtggagtaaggtgactcgtgtggcagcacaggaaaagcgtagagggctgagcactctgatcatccttgcagcttgggaaatatggaaacatagaaatagttgtgttttttagaatggcagaccatgcattccttatcttcttaggagaattgtagaagaatacaatttatggtgcatagctggagcttct

SEQ ID NO: 3710 - DNA, 756 bp, Zea mays
gctagttgtgttgccagttggaatattcagaacgcgagacctctaaatatactggcttgtttctttgaaaaaacattgtatttgccattgtttgcttgttcctctgttgatagtggatagatggttttgtcatgttttccctgtgatagattcatgtgacgtttggatattgcagtagcaatgatcgtctgcactagaagctagattcaatgtctttgctcaagcaagtcatgccatggcttaacactcactatctaattttgtactgtcaaaactatatatacatgtgtacattttgcctaaaatacgtataaagttagaccctatcgtgagtccgtgagtacaaaggaacgaatcgtaagacgacttcaactccgaacatgaatcagaagggcaagcctccctgcagtagttgcaagcttgcagcaggacattgtatgcaggtggcagcagtgtgatgatctggcatggcactatgaagtcctgaacaactttatgtggtcatgcatgcatcttatcttttgatggttagagtggaattgtgtttctagtgccatctgtgaatcatgtaacaattttgattttgctcagatgagatactggtcacatgtggaaaggacaaaggataattcactgcactggagttacctaacatttacaacattgacaaggtataagtgagtattgtattgtatcaaagcggaaacttcatcagccaggccaacatatgtgcaattcttaataacctctaaaaga

SEQ ID NO: 3711 - DNA, 825 bp, Zea mays
ttgtttaattatattaccatgttcgcgtgtatcgtaagattaatttgggctttgattctagttttgctccacatatgcttcttgcttctttcttctctcggcagtttcattctctttgtagcttgtttttggatctttttttctttccgatttattagataggtcagtatatatatggctagaatttgtagtaggctaaggatcggaggtggaatgggctgatttaattaatcagtgcaactatgtgttcatgatctgatacgtatacgtatatatcctaataagcaaaacaagggcgatttgaggccatggtgatggtttcctagcttgctacaataaggctacccgcagtcacggacttcagaggtcactctatccgtttacagtccacgatcgagtgtgtaatcagctgcagcggctgatggcaggacagattcagacgcgcagagaatacgtacaagtcgccgaagtcggtgtccattccaaccaggttctccaccaccagattcagaaaccgcctggcctgttcatcctctccaaaacaaactaaaatcgagaaacgcgatcgtaaggtagcggcggcggcggcggcgtggcgacagcaggagtatgattggcccagttcaatcgcgcgggcgcggccaatctggtaggcggtcatcatcagaatccagaatccacataccggcccatttacagcaaggaaccgcgaagcccaagctcgtcttctttcttggaagaggggccgcttcactcgactgaaagcgcaatcaactctagtctctagccacaactcgaagtacgagtaactccggagtccggatg

SEQ ID NO: 3712 - DNA, 360 bp, Zea mays
tcgggcctcccgctcgacgaccggcccgagggcgcgcgctctccgtcccccgagcccgtctacgacaacttcggcatccgtataaacacccgcgaataccgcgccagggagcgcctcaaccgcgagaggcaggatattatctcgcagctcatccgccgcaaccccgccttcaagcccccctccgactaccgcccacccaagctccagaagaaactctacatccccatgaaggagtaccccggctacaactttatcggcctcatcattggccctcgtggcaacacgcagaagcgtatggagaaggagactggtgccaagattgtcattagggggaagggtagtgtcaaggaagggaagttt

SEQ ID NO: 3713 - DNA, 392 bp, Zea mays
aaaataaccaaaaggctaaacgtacatttgcaagtaatatgtgagactgtgacgaggagaagaaaaacactcacggctacaaaaacacagcctagacaatataatgacaagcaaggtaaggctccatggtcccaactccaactctgaaatgtaacacctagcaagtggtttttttggctgtcctggtcacactggtgtatttggtaggaagctgagagaggccctgattcctcaatcataaaattattgtggacctccttgtggtctggtatctggaaagatgaggacaaagctggacaacgacattatcctcaggacctcagcctcaccagacaccagcctctacttactactgcaatgatgtgaactcctattgttgctcgttcttagca

SEQ ID NO: 3714 - DNA, 807 bp, Zea mays
gtgtgcggcgcgtccagcgacgccagctgcgtgatctgctcaaggtagaagttggcgcggtcgaaggcgcccgccgccacctccgccgcgcactggtacagcaggctgatgaggcgcaggccctgctggtcgtggctcagctcctgcacccacgacgacccgtgcgggtgcggcgacggcgtgcacagcgacgacgccggagacgacgtggccgacgacagcgtgtcctcctggaacatgtccatgtcggttgcttcggacgggcgggggcttgtggtcaattaatggaccgtcgctgctgctgcgctggatatgaaggcaccgcacgccattgctgggcttggacactggaccttggcgtggcgacaaacgtgttggcaagcctgcagtaggtgaatgttaaaaagcactgatctatgcgaccatactgatgtgatttggtgtatagtggtgccactggcgcctgctctttaggccactgaagttcacatgagccaagtatcaactaggattcctataacgtataaaaaaaagtatcaagtaggacaataattatcgctaccttcatgattggtgacatctgcccctaaagtccgaatgttaaatcctgcactgccacaattctttagcatagttagaattgtggttacggtagataatctttttagcagttaactttaattgttaggtaacttatcttagtgtttatattatcgggtttgttcagggtaatagtgtaataccatttttagaatttagaaatggcattttcatcatcctcatggactacactttattcatgcagtt

SEQ ID NO: 3715 - DNA, 353 bp, Zea mays
attgcctccccctcaactcccttacagcctctcaaagacaagctacgaagagtggcattcctctctaaactagtaaagattttgacaacatcatttggcttcaaacttgcatcattgcatattgccagctgaattaggctctggtttgtctccaacatctgcaagatagcaggtacaccaaacttgcttatattcgcttgctctcctccaaaactcaaaaccttcaatgtggtattggcttgtctctgaagtggagaaaaggtgctaagagggcatagcaaatgctccacccctactccaccaaatctatttccatccaaagtcaagttctctaaatagctgttcttaaagag

SEQ ID NO: 3716 - DNA, 783 bp, Zea mays
agggccttggccaaggatggaaccttcgtggagtgccatctgttcaacccgccgtcggtgtcacttggcacgggcctcaggaaaatccaggaaaaggccagcagtgtcctcaagcggtatatcagtagaagccgcggcggcggcggcagcggcagcagctcctcgtcgaatgtttccccaggaccaggagaggagctacaagccgccgctcgagatggagttggagaagaagagatgagcagggaggtcaaaagatgggtgccaaacctgtacgtgaacagctgcgactacatctgctgcttctacgctgaccgtagcggcgtcgctaccgtcaccgaggagaagcgttccggagtgcattccaagctgtacgtgatcgccaaaggaccgagcaagttcctggaggctcacgggctgcagggagggtatggctacgccgagagaattagcttccgagacatatcgatgcgcaacgtcactaacccgataattatagaccagaactactgcgactccgccaggacgacgacaccgtcttcttgtcacgaccaggtatatatatatatatatatatctataccgtcgtcctacatctacagtacgttggtccaagttttctctgctgctgcttcgtgtcgtcgtcagatcttccagagtaactctcgtgcgcatgcatgcatgcacgcacactttgcacacacagggatcggcggtggccgtgcgtaatataagctacagaaacatacatggaaccagcgcttccagagtcgccatcagtctcgt

SEQ ID NO: 3717 - DNA, 469 bp, Zea mays
aacatgagccgccggggggccggcggttaatgaacgaaagcatgcgcgcgtacgttcgtccgccatggacgacgaagaaaggaaagcacgagcgacggagacggagcgaggtaccttacttaccttcatcatggagaagacccagatgcggcgcgcggcggcgctgatgccgacggtggagctgagcgggctgcggcggacggcgcggtacagccagaggtggtacacggcggggaagaggacggcgagcgggatgagcaccatgtccaagtagccgtccttccacgccgccatggccgccgccgaccgcgcgccaccacacgcagacactagcctctctctctctaagtaatatatcccccctctggctctcgaccggaacgctcgatcgcaagcgtcgtcgacggtgtcggtcggatgcgtgtcgcagcaccgccaggtgcggagacaatatataggcagcagtgca

SEQ ID NO: 3718 - DNA, 435 bp, Zea mays
acttgcctacttgataccactgaatcaaaatctcttgaaatctatgtttcatctatgataatcaaatactaacgcacgtggtaaacttgcagaaatacaatatgttcgtcgcgcagattgcttgcgcggcctttggcgtattagccctctcgttgtttgggcctggctggttagcgagaggcgccgctctttcagcctgcatagcattcatgaccatcacgggtacctcgcatcctccaggtaaaactcccaagacgaatgtttcgtctggctgtgttgccctagctgttctgcacatcatctcctccttactgaactcttgttttgttcactgcttatgatttctggattcttgcagctgcgagcttgcccctcttgtttatcgatggccccaagtttcacagtttgcagctttggtacgcgcttttccctgga

SEQ ID NO: 3719 - DNA, 406 bp, Zea mays
aggtggaggacatgagagactgctacgatggcttgattgcagctgcggccgccacaacaaatagtgtatatggtactgacggatgttaacctacttggagttactcagatgtgtcctatgtctgttacctgatctgatcgcttgttggccgatatatgtagagttttccgaggctcttgaggaactgggaggctgcttcctcgcaaaaactgcactaaatggcgatgacgatgatgatagcggtaagcacacatgcaaattatttatggtgtaaaacgtatgctatatatgctacgaaagaggcatctttttcgaagcgtaatgtgctaataagctttctcgggaacatgaaatgtagtgcttttttaaaaaatatatatatatgtggtgtaataatttgtcttgt

SEQ ID NO: 3720 - DNA, 379 bp, Zea mays
gggcattcctgtcatgatcagtccgagagattcaaatcatggagcagcaccggatcttattcgagatcgccaccgagatgatcgggaggctcccttgtgtttttttgtgtgagttatttctcttcgttgcgacagctctaactcagggagcgattgagagagagctgtgaggagccaacgcccgcagagcgaatggtttttatgtgcttgagcctcgctcgcagtcagcgtaggagggctgtaagaggtctagacgcgccacgtcatctatggaccgtgtcactgcatggcgaccacggatgtgggagatgcggcgcacaggcttcgcggtgtaccgagaattagtggacgtagaccatgcgcatatggcgctaggtaa

SEQ ID NO: 3721 - DNA, 456 bp, Zea mays
tcaagcccgtgacggccgcggcggtgttgaagcggtcgtcgaactgcatgccgtacgtgttgatgccctgggcgggatggccgcctggcagcaggccagcagcccatgccggcgcccggcgcaggagccgttcactcgcgtccgggcacgtggccatgcagccggtcatgtactcggtgccggcgttgaaggactgcacatacgccagcgagttgcagcgcacgacgacgaagaggttggcctcgtcggagatccggaactacgagtcggagaggtcgatcccccacaggctgttgtactttgcccatggaccgtgagctaggtggggttgtagcaccaggtctggatgtcgttgcagaatgcagacgcgcgcctggccgcggcgcacggagatggccatgacctcaacggactcgccgctgaaggcctggtaggctggtagccgccgcgcgcggt

SEQ ID NO: 3722 - DNA, 492 bp, Zea mays
actgacaaggcatccatgcttgacgagatcatcgaatacgtcaaatttctccagctgcaagtgaaggttcgctcaccacggccaccaccattcctctgctctgctccatgcggtctggcttactatcctgtaaagtttctgctgatctatgttgtatgcctgtgattgaaggttctcagcatgagcaggctgggcgcgacggaagccgtcgtcccgctccttacacagtctcaggccgaggtaaatcacgtcacgcgagcccggccccagcccccagagatacactgcactgtgcttcttatgactgggctgctgtccatgcagagctccggtggtggtcttctgctgtcccctaggtcaggctcaggctcaggcaggcagcagcaggcacgcggaggcagcctgccgccgtcgtcgtccgaggtccgggacggcgcggcgttcgagcaggaggtggcccagctgatggagagcgacatgacgacggcgatg

SEQ ID NO: 3723 - DNA, 447 bp, Zea mays
ttaattaaaatatcctagctaaacactctcctactgcttgctacggcaccaccgcaccagtggctgaatccaagttctaatccatagcaactaaagatagctgttgaacccaagttctactcacgaaataggaaagaaaaaaaaacaaacaaacaaacaagagagactggtgcagatttcagagatagtcttccacattttacgatgcatttgcatccttctagctagtcctatagctagctatagctgctagctagtatcatgagtgagtgagaagagacccttcttggagcgtatgcgtatcgttggagaagatgggtgatgaggtatacatatactcatgtcaaatcgaaggattggaggggggcatagaaatcggaggtgattgtgcgcgtacgtgcagccggcataaacaaagcatttcgcgccgaacggaacggccgcact

SEQ ID NO: 3724 - DNA, 365 bp, Zea mays
cgtggagcgcgcgttccggcgcgccttctcggccgagaaaggcgagcggctggtcaaggccctccagtgctacctctacaccaccggcgggcccatcgccgggatgctcttcgtctccacccgcaggatcgccttccgcagcgaccgctcgctcgccgtcacctccccggcgggcgacgtcctcgcgcgggtgccgtacaaggcggcggtccccctgaggcggatcaagcgggtgcgccccagcgagagcgccgagacgccggagcacaagtacgtgcaggtggccaccgtcgacggcttcgagttctggttcatgggcttcgtcagctaccagcggtgctgcaagtacatgcagcaggtcgtct

SEQ ID NO: 3725 - DNA, 385 bp, Zea mays
gcagatcttccccaaccagaggatagattgattataatcccatgtctcttctctatcataagtggtacaaaatggcgaagcacatttgctgttcccttgatatttgtatcgaccaccatatcaaaatcttccgctggaacattccatgtcttgttattcttgtttattgtaccagcgttgtttactgccagaatacctcaacagttagaatccaggaaatcttcttttctcatatactcagaatgagcatacaaataagtgattccataataaacttcatggctcaactgcatgcagacacaaagcataaccaacctataatatctggaacttgcttcttttctacaacagtctttgccagctcggccacactgctgtcagacct

SEQ ID NO: 3726 - DNA, 377 bp, Zea mays
ttccaagatatacattctgcttttgttgtttggccaaaatctgaaatagcaaagtgtgtgtcagaaaacatttgagtttagcaacagtaataagatgcaccagtttctgcatactgtggcatctactgttcatgaccttcaactttaagaacatggcaacacttaagagagaaatcaatttatacaatgccttcaacttcctggcttttcacaggaaagaagttatgacatcccaataggtcattatcattcagaaacatatttgcatctattacctttctcagatgtgccatttcaaagatgtcataaggtaatctgagagtgagagcatacctatacttaaatttccatataattggaagcaccatgtcatccat

SEQ ID NO: 3727 - DNA, 453 bp, Zea mays
accgggcgcggcgagttgagtgctgaggcgtgcggctccaggcatggagcaacgatgtcgacaccatggcttcgccggaagaacgagagacagtgcagtagactggtagcgtttggacttcgatcctcatcctcctgtctgcgtgtctcggaatctctagaaacaaatttccgcgtagcctttcacctaaatataaaacttgaattccatatagtacatctgaaccgagtttgaatttcatatagtacatccgaaccgatcaacaaacttgaatttcacttttagtatattcgaaggtcaagacatcgtcgggggtgtaccggctctacacgcggtccgacaaaatggagactgaaactggcaatcgctatcatgaccacatgacactgcccttgccaatcatcctcttattgaaccgtgatagattaaccagtgaaaccagttcatcaatac

SEQ ID NO: 3728 - DNA, 413 bp, Zea mays
tgataccttctcttctccgtcgtctatttactttttcctaaccatctaatcttatgctcctgccataccatgccatgccatcatcgtctgtcggtgttggcgtttgcttcctctgcaccctatgctttattctctttaatcacctgctcctgtttctttgcttctcgtgccgtgctgttattgcctctctttttttacaccaagcctgacggcaacgaggttcaccgacatggcagtacgacttcgagggccgcaaggacctggccgcgttcgtcaagaccgtcgccgacgccggcctgtacgtgcacctccgcatcggaccctacgtctgcgccgagtggaactacgggtcagcagcctcacctcatcactcctcactcaattcagtagtggcctgccctcacctcatcacc

SEQ ID NO: 3729 - DNA, 510 bp, Zea mays
gaaggaggagggggaggtcaccatcggcgtacgtcaagctcttaactgaaccctccccgcggtggaatgagatagcaagcagctctgatggaaataatcaaactgatgcaactgccatgcatgcaagcaagcgaaggttaccacagctgaagcggtgcatccgccctcgcctgtcctggagcttgaaggagaaggacgacagcgagaaccccgcctcgctgccgccgcccgcggagtcgtggtggtggtggtggtggtggacatcggacatcatcatctgcgacctcgacgcctcgctgcccaatcaaactattagtaggtctccatcgatccggccggtcctgcaaataatgttataaacaacaataataaacctcatctgcgactgggtgtccgtctcgtcgtccagggggcccaaggccatggcggagtcccagaacctctggaacatggacgatgccgcctcgtcgctccccgcgctgccgtcgccgccgccgccactgctctcca

SEQ ID NO: 3730 - DNA, 387 bp, Zea mays
attcatcaagtgttgataccagtgctagtgaaccagaagtcactccgatcgatgttaaggaagtgggtaatgagggtacattggagaaaggagagaaaggtactgatggccttaagactgatgggtctgggattgttaataccatggttgaagttcaactgatgcagaaaaactctgacaatgccactctggatggtgttacacataccaattcagagattgctgttgaaagctatttttcagttctggatgcaaaaagtgagtcgagcagcagtaaccagacttccgagattggttcagtgattaatttggaggagagagactctactgtggctgttatccaggacacaaatgcgtctgaattgccaaatacagaggttactggca

SEQ ID NO: 3731 - DNA, 388 bp, Zea mays
agggtatacagccattttcgtgatataggacattttgacatcatggcatggctctatgtctcagaaaaatttggtgtcaaacgcctcacaaaagagatggtacagtcacagaaatgccgtaggcataaaaggaaaagaggtggaaccagcagggtttcatgggatggctccatatcagctgacttgaacagcatcagtaacttagatctagttcagagaatacttgagaaaaagctaaatgggagcaaggttttggtagtactcgatgatgtttggaacgaaatgagcagcaaatgtgaaactggttgttgctgatcatttggtagaggcagtgggaaaatggtagtactcgatgatgcacattagtaggctgaaagaatatggtttt

SEQ ID NO: 3732 - DNA, 447 bp, Zea mays
ttgaaatataaaattaggcatggcttagttcaacaacacgactggaaacattaaaaaaaactctagcacaatcacaacacgcccatcggacaatcattccacaggaacaagaatgcacgaccttgaataatcagtcaacgcccctcttccacaaattatttatggatccatgctgatacgaatccagaagcttatcccattgtttgcggggagaccaactcattacccagttaattccttccacgcaggctacaaacaggctacaaacgaataccggccaattctaccactattagttgtatatacaaaacccggcagaagcaacacaagatttttagcgggagcccttacatcatggcctctaagacaaaataacaaattcttcacagaatcacagtgcatagcttagaatcagcaaactttatctataaagaattttgaaaaatt

SEQ ID NO: 3733 - DNA, 787 bp, Zea mays
acgctgctccccagcgcgcgccgccgtggcggcagccaggtatgaatatacgatacaacgcatgcgcattcaaaccaagatgtgcatgatctagctagctagctaggtagttttacttctctgatctcacagtattgagtagtgacactgacaccatcacaccgacacgacacacatgcataaattaaagagtgctatacactgcggtgccagtgccaccgtaccgcttattgcaagtatgcataaagagtgctattggcagctggtagctcactcgctccaagccaagagatcgtcgtggatcgtctgatgatgtaaacaaaacaacggtggtgtgcgtacgatgtgatgcaggcgtcgacgacgaagctgctcaaggagacctgcagattgcctaaaacctcatctgcggcggccagagacactgccactactgaactacaacagcacatctgtcggcgaagggcgactagttggagagcagcgcgtcccagtcgatctcgtaggacgggtacttgcggagcacgaagctctcgtcctcgtcccacggaacctcgctgaaatccagctgtcccatgtccgccaccggcggcgccaccaccggcgtcggggaggacgaggacatctcgtcgtccgacccgaacccggagccggaaccttcgtcggaggagctgttgctcggagacgccgctgccgcttccagaacggacgcgttgattggcatcgccttgctcttggccttggaattcttggatgacgacgacgcggcggcgatggtggcgcagat

SEQ ID NO: 3734 - DNA, 453 bp, Zea mays
gtaaccgtaaccgtaaccggccaggaaatagatacaggagaatggatcaatggatggccgtcggcttctgcgtcaacacatgtcacgcagtgacagtgccgaaagttacgtctcggcttggatttggatccgccggccgccccgccttcctctgttggcctgatacgcatagcgcttaggagggagaaggctgcttgcctgctcggctaacagcctaacagcaagccacatatctggcttgcggccacacccatcgttgtcgggcattgatgaatggtgccggttcgccttaaccgccggagctagctctgcataaatataatacgaacagctcgatctcaagtgaagtggcagcagcaagcaccacggagagggacacgactcctctccctccctccctcaccatgccttccccttcctcggcccactggctgagcctcgtcgggagcatct

SEQ ID NO: 3735 - DNA, 350 bp, Zea mays
agccaggtactctctacagaacacgaagaagaacgagcaaggacagatggaaaagcaccgcgactgtgactgttgtcgaccgggcgtccatggcaggtgaggacgccgacgtcgtcgaccccgtgatcgggttggtgcgctggtagtaccacgggaaccacgggaggacggggttcggcggcggcggggctggcccagaggggaatccactgtacggtggggagaagcccgcgggcatcgctcccggcggggtcagctggaagctccctggcggaggtggcggaaagctgccgccgaggccgccgccgcctccagtggacggttgcggtggcgggtagccgttgatggct

SEQ ID NO: 3736 - DNA, 377 bp, Zea mays
aacatattaaatctttgcttaattttgaattgttcgctgtaaattagaacttatatgtgcatatacatgtagtcatgtatcaaatccgccgttcagtcattcagtgctctgttcaagtgtaagtgttcagtaccaatttttaatcatgttcagtattactacatcgtggttcatgatgttcacttggaaaatgttgaccttttttttttgttctttgataggtggatcctctttcccaccaagtcaaggtttgtgaattcgggagtgctagaatcttggtatgtacatgctctataataacatcaagaaatataatattttaatttcaatacatatttatagaattgaaactgataacatagtaaataaatggggat

SEQ ID NO: 3737 - DNA, 410 bp, Zea mays
tcatacgcatggactggtatatactacgctttatctgaagatttgtgttcatggagttgggtaggaggccatcgtggagataccacaggcgccgacgcccatctgtagctgcatgaaaccgttctcaccccatcctgtgccccaggagttcttgaggatccagtactggcttccctggtcatcggcgccgtagccgatcgcggtcactgcatggttcatgtccgtgccacagccatccccgtcgtatatgccaccctggtaaaactggaaaggactcgatccgccgtcgacgccaacagacaccggctggttggcgactgcgttggcgagcgcgttctcgtcgccgctgggcaggtcctggaagccgctgatggtggcggctggctggaagttttggcacgtcccttgga

SEQ ID NO: 3738 - DNA, 903 bp, Zea mays
tggaggaccacgtgaaaaaggctaacaatttttcagttggctactgtaaaaactaaggacaggacgccaacaaaaccagccacccaggtaagggcttcgccaaagaaatcttaaaatgctgactgtatggtatggtatgtataacaacaatccggtacaaagtggcaggtaatggaataagaaccgacagcatcattcatcaacagccgattgatgggtgcactttgtttctgtgcaaagccatcatcagtggctattttggaacccccagaattactcttctgacataataaggatccaagacgcagcacggcaatggcaggatgttaagaaattagaaatccaagacgaagacgaacaagccataaccgaagcgaagcttcgcatttcagaaacctgactaacgccgccaggaatcatacacgaggctgcagattttgctcgctccggcgcggtgggtcgcttggagtggatttggatgggcggtgatgactcaaaatgtgagagctgctgggtgggttgatgagagctgggggagcgagcgggaggctatttataggagacgggacggcgcggaatggtgggtggaaaacgtttgaccgggtgggctgggctgggctgggtcaattcaattccccaacccggtcccggatctgttcctgtgtggcctggacagtggagaccgtttctggcaggtgacgaccaggcaagcaatccgtagtccgtacgcccccgtccgcggttccgcgttcaccgattgccatcgtaagcgagtgcgtccgcttggctcctcctccgatccgttccccttttcattccacttctgagtgagatgcaactagacgcctgcgctcgtcggagcggatcgagcttgcacaccagccgacgtgaccgtacgtcctc

SEQ ID NO: 3739 - DNA, 375 bp, Zea mays
tcaggggtagcccgacgccaggcacgcctcccagaacttgcggtcctcctcctgccgcctcgccgccgccgccgcggggtcctcgtcgtcgctctcgctgtcgtcggcgcgtaattggcggccgccttcttcatctgctcttctcctcccgctcgcccagagggaacagcggccgccgctctcctcgctccaccaggcggcggcgacaccgccgctcccctcctcctcctcatcctcctcctcggcctgtccgccgccggcaccgtcgacgcagctgccgcagccgtcgtcctcctcgccgctgtcgtcgtcgaccagcaccagctccacctggtccggccgcgacaggcagcacgactcggccaccctctcctt

SEQ ID NO: 3740 - DNA, 439 bp, Zea mays
gcagcatctactcttgcagtttcgcatgcagatcccaccgttgcgcgccgcaccgcggccgctgcatgtgccagcgcgtcacgggcgcttgacgcacaacgcatggcggcatctgcatgcagcgaaaaggcacgccgccctttcttttcttcttcttcgtcatcagtgaccagaccagaagcagtgggcggcagtgagtgcagtcgatttgtttccgaccacccatcagtgcagttgcaggatcgagaaccaccgaaacagacggccgagcctgtgtatatatgtagggggtcagtatgcaatgcacacaccctgtagaggaagaaaagaagaaaaagatcaaggagcgagatcaagatcgcgtacgttgggtaggctaggctgctatggtagctagccgcgcactttggctccatgcatgccttgccacggaaggaag

SEQ ID NO: 3741 - DNA, 756 bp, Zea mays
tgcaagtacgcggggatgcacatagcgtgaaactcaatcgacgagcatgggaggagtgaagttaggaggaagcacctctcgggtcctgtcgaactgggtgaggatcacatccgcggagcgcagcgtgcggtcgatgttctcgtgcgcggtccgaacggcgtgcgtcctcacctgcgcccagacgaagcaacggcagaagcagcagcagcatcagagcaccaatccagaggcaatgacgcggggagccctagcaataagatcaagagagacgaaggcggcgccgagcgaacgagtgggcgaggaggcgcacctggatggggcgcatggcggagtcgagcgcggtgaggcggctgtcgaaggagccgagtatggagacgacggcgtcggtgacctgctggctcttctgcagcccctgcatgatgtcgaggtcgatgatgtgcacgcgctcctcccgctcgaacgcctcctggatggcctggttggcggtgaagtgcgagaacttgacgaaggggctgatgccgttgaacacctggaacgcggcggccacgcggccgtggaggcgcgccgcggcgggggagcccggcggcagcggcgcgtacaggcctaggcaggagctgacgacgcgcgccgacatggcctccgcgaagtaggcggccacgcgctgcgtcgaggtgccgaacggcgtggccagctccgcgatctccagcagcgtctggtgcgcgtcgtcgaggttgtccgcgttcacggcctccgcgc

SEQ ID NO: 3742 - DNA, 780 bp, Zea mays
tgtgcacgcacgcgtcgtagcgacgtttggccagatcactagctgcgctaggcagctcagcgcgcgccccgctagccctccggcggctccttgccggcaaggaaggcgggcggcggcccggcatgcaagctctggcgcgcgcgtagcgcagctagccagccgtagctacgcagagggccggccgggccgtggccaaagccaaataaattaaagcgcggccggccgagatgagcagccgccgagacccccgtctcctcagtcctcatcgattctatgtccactccgggtccacgtctgacgtcgtctccaccgatcccagcgggcgtgaagcgcgccccgaccactcgcgcggataccggtaggcggtagccacagcccaacaaagtccatatccatcccccgatcccggccggacatcacctgcagagcataccacaagcacacttgaatgccaaaattatagacagacaaatcagttaaccagacaatgtcttgggttcccgacaacagtcaacagaaaacacacatacaacagtcaacagaacaacacggatgacagattgacagttacccgcactcgtcaattaaagtagcacatgcacaagaaatgcatcatcaataaaggtagcacatgctacggatgacagttaccctcactagtcagagtcagcatccaaatcaaagtccgaatcatcactcaactccaccacttcatcctcaggatcgctttcactaatatagacatgtttcttcgtagccctggctgtccttctaggtttt

SEQ ID NO: 3743 - DNA, 366 bp, Zea mays
aatccatgacttgctacgcggtgcgtacgtggacgcggcaccaacacggagaacacatcgcctcatcactgtcgagtgtcgacggcgtcgctgctcggtaactgtaacaacgctcacacagaagtcgcaaaattcattcatttttttaagaagaagaagaagcagcagcagcagcacggcaatggagagcaactcgaggtccaactgccatggcgacatgcgccgcacatgcagccgcagcagtggcggcgtcggcggcagcgggcacgcgatcttcccgccgcagtgctcccaccaggaccagtcccattcccgcagcgtttccgggtcaaggatcgtcgcgaacggcctccccatctgcgagct

SEQ ID NO: 3744 - DNA, 384 bp, Zea mays
gctggaggaggagtgcctcaacgtgtaccgcgccaagctggagaaggtccgccagcaccgggcgcagctcaagcgggagatcgccgactccgtcgccgaggtcgccgccatctgcgccaccatcggcgagccgccctccaccgtgcacacggcctgctcctcgctccaggtaaacgcaaaccaatgcacgcgcgcacgtatacagtcgtccgcggcggttatgatgtcgaccgtgacggcggatcgggaccagggcacagggagcctgaaggaggagctgggcctgatcgcgccggagctggcggagatgaggcggcggagggacgagaggcggcgccagttcgcggacgtcgcccagcgggtcaacaagatccagcaggagat

SEQ ID NO: 3745 - DNA, 445 bp, Zea mays
ctgtccatcgccattgatcctgtaaatggcaattatgactctgctcctgtgatcgttagcttcttctcaaagcacaaggactccaaagcgcctagtgtatatgaagataaagagctgcttgagaattttggttgcaagaagggtaggaaaaagcccgtcagaagcttgggcctagctccaaagccagaagccagtgatgataaggatcagttcatgactgtggatggccagaggggccgtaggaagtctgctgggagcttgtactcagctagaaaggccgaagattcatattggtgtgatattatcatcagcgatttcgacgacggagatagtgactatgaaggttgcaagaggaagcggccctctcagaacactaacaggagcgctaataagaagatgaagcaagaggagccacctcaaggagccccatcagatatggaaaatg

SEQ ID NO: 3746 - DNA, 422 bp, Zea mays
aggtccttctggaacgccgggtcgctgagtggcgtcctcgtaaggtcggacggctggattcctgacaacaccgtcgccacctcgagttcttgtgagctcagcggcgacgaccggctcgtgtaagacgtagccggcgcgggcgcgtcggagtcggattcggtgcccgatcccgcgtcactgccgccgctcgatcgcctggtccgccgcgacgacggccggagctgggtcacgcgaccgtgcagcggcgatgcgcttcccgcggcctccgtctggcgatcccggttcaggccggagctgagagcgccgccgccgcttcttggacctgtccggaccggaccgagctctctgtacgacgaggacgacgcggctcccgtgccctgcctgctcggcacggagcttcttccggtcgctgctgacctgct

SEQ ID NO: 3747 - DNA, 803 bp, Zea mays
  unsure (1)..(803): unsure at all n locations
cattggatgcacctggaggtccattcccaaccctattctgtccggttgagtcttttgaagccacagccacctcaaattcaaggaccatcccataatctccagatcatgaataccaagtccaccaaactgaacaggtctacaaactctctggcagccaaccaagcaatgccctccctagacgccctttctccctttccacaagaatcccctccatattttttttttctcgaaaacgcgcaggagagctgcgcccctttatatattaagaagataggaaaaaggtctaaaatagaccaaacaacagcaggcctcctcacgggggccagaaaatagcatacaaaaagaactcatctaacaacacaccactctagggagcagctgcaggacggcggttggaggctcgacctccgcccggcaatctccgcggcgctgttccctgccgtcgcacgtggagcggctgcgaccgattttcctgatccgacggaactcgcgcgtatcacgcacccggtcctcgtccgcccgtggacagacgaccccgggcatccgatccagacggcagagcggcttcatgagctccttcccgctgccgtgctctccgtcatgcgcacgcctgacgacctccgcggtcttggagcgagcctgctgacattcttctcgtaagtgctcccagataccccggggggtatggtacgatcgctctcgaaggaggaaccatgtgctttcaangtgacntacgaccagtgcggtaaagagtcctgggacggctgcggtggtcacatcgaagaggcgttgttcgacgttcc

SEQ ID NO: 3748 - DNA, 1277 bp, Zea mays
atgcttcccgtcccggcctgcccagctaccaggggcgtctgcgtcgtccgattttaaatatgtttattactgcgcgtggtgcagttacggcttccgttcttgtaccacgaggaatcagatatttctagttttaaataaaatgttaaacatattattatttgtatctttaaatatgttactaacaaaaatatataatgtgatttatctaatgatgtttgtttaagcgaataaacatcaatacgtttttttttttgtagattcgactaaatttagaatttattggtttctcgtcgtgcagccgacggagcggttgttctggactctggagccgcttgtgctcgcgcattgcgcagttgtctcttgtgctgcagcggcgcaccagccgcgccatctcgacgctggcagtgggcgtcgaggtgcggtcgatgtcgctggactcgctccgagaggtcaccggctgcctcctcgacatgaaccaggaggtggtgcgcaccatcctcgactgcaagaaggacatctggaagagccccgagctgttcgacctcgtcaaggattacttcgagagcagcctccagaccctcgatttctgtaccgcactcgaaaagtgcctcaagcgtgcccgcgactcccagcttctcctccgcatcgcgctccagcgcttcgacgacgagaaagacagcgacgccgccgccgccgctccctccgcccggtacgtgcgcacgctacacgagctgcgccagttcaagacggccgggaaccccttcacggacgagttcttcgccgccttcgacgccgtttaccagcagcagcgggacatgctggagaagctgcagaacggtctcaaggtcatgcgaggcgcctttggtgaaggggacttcgctgatctgaaggataggtttgctgcacacttgtctcgcctcgaggatgcagtttcccagtttgctagtttatccgacgaaatttgatatagtgcactgtatgtcgcgctgttacctttaactgcaaaagagcattcattctagtacagttcacgatcatagcacagctgatctctcacgtggcaagcaagctccagagtcatcgggttgacagatcgttcaacatggccagcacaacttcaaggtttgcaggtcatctccgcgccggcgcttgcgtggcgacggcccttgtggcttgttggcttgtggggcgaaaatgcaagaaaatggatgtgaattatcttttgtataataaccacacgacatcatgtactgctttaatttaacaattggtagtac

SEQ ID NO: 3749 - DNA, 395 bp, Zea mays
acgcgctgctcgggaagaggtgccccgacctggtgtccggctggccgcgccgcctctccgtcgcccgagacgtcgccaccgcgctccactaccttcattccgttgtgcagccgcccgtcatccacggggacgtcaagcccagcaatgtgttgctggatgcggatctccgcgcccgcctctcagatttcggactcgcacggatcaggtctgaagaggaggatgagttggggagcggtgccattggggccgacgcagacgggaacgccaatcccagcggtggatgtgacgaggatatgtcggtggccggcgagagcaccactgctgtcgtggttaatggggaagacaatgctgccaagtccccggaggatgatgaggcactcaccacggcgtctcct

SEQ ID NO: 3750 - DNA, 473 bp, Zea mays
tggtaaccacgagagggattggcctggcaccggttcattctacggcaacctcgactccggcggagaatgcggcgtccctgcccaaaccgtgttctacactccggctgagaaccgcgcaaagttctggtaaatgtagtggctcagttacgtaaggccatagcagtttctttctccagactgccatgtcttaactttgctactgactgagcacagcagtgaacactgatccttccttccttcttcttcttcaggtacgcaacggactacggcatgttcaggttctgcgtcgctcacacggaggaggactggaggcccgggaccgagcagtacaggttcatcgagcggtgcctgtcatccgtcgacaggcagaagcagccgtggctcgtcttcctcgcgcaccgcgtccttgggtactcgtcctgcgcctactacgagtcggagggcacgttcgaggagcccatggggcgggaagc

SEQ ID NO: 3751 - DNA, 445 bp, Zea mays
gttgccgatagaggccgcgatggcgaccatcacggcgccccccatggccgccggaaatctacgcctgcacagacacacaccacgcacgcgacagcagcgtgcgtcgtcagttcatcatacatcaccatatcataccagatcctgcaaacctccagcagaggagacgagacgaagaacagactgcgctcggaaagagccaggctacaaagagcaaatcgggctcgaagagaaccaagcagcctacgaagaacgcaccccaagcaggagggctctcgcttacccccactccggcagcggcggccaaggttcgtgatccccgatcgggcgcggggccttcttaaacagcggcggcgggtggtgaggtggccaaactggagtaagcgctgcggtgaattttagcaacgccgcgcgttggggttggagagcgaggggtgcggagcagggc

SEQ ID NO: 3752 - DNA, 393 bp, Zea mays
atacatggagatggagatgccatctcaggcttattaactagtgccactgtcttctaaaactcatctgtatttctgttatgcaaataatagaaacgaggattgcctctgtcgcctgtcggggaacaaaactagtgccactgtctgctcaacctgccgcgagctgctccatacggagctccttggtatttagtagatctgttcaggagtgaacaagcaattcaagatcttacttaactgtagttcaccattaagggatccattgccagactcagtgtgtggaccttcgaaagcggacctcgaacgtaacatagacttcatatattgcgtgaattcattatccatcttctttctataattgggatctttgtttgatgtcaaccctgtgattgctct

SEQ ID NO: 3753 - DNA, 353 bp, Zea mays
ctagcaacgcagcgttacatgtctcaagcaaaactgaatcgccagaaaacatagaggcggcttcttcccatcctttattatgacccatgcacctgagtagttattctaaacaagtgtcatgctatgtcccgcaatgagatacgaatatcagatcttaagggaaaatgatacgaagttaaagcatccaacaacagtagcaacaataaagccttttagttccaagcaagctgggtaggctagaagtcaaagcatccattgaaaacaaatggtaatcaacaaaagtttgtggaagactcacatcacagttaagatctcatcactcgaatattcacaaatcgccttttgcaaatgct

SEQ ID NO: 3754 - DNA, 357 bp, Zea mays
acccaccagagtcgccgccgccagctgccatgcgttgtcgcccttgtcaagccactccggcgctgcctccgtcgccatctcggcggccgggtgatcgaggcaacgcggtcaggcgagtgcagtgctcgcgcgagtcgcgtccgcgggggtacagggagaaggagaaatcaaacagacgccagtcgccaagcggaaagggccgagagcccgagagctactgtataggaatggaggggcggaaaggtctgcgagggaggagcggaagacgtgcaaattcttcagatactttgaacgatgagattctgctgtgtggctggctggatgctgaaactgtctgcgtttttgggtggttttcac

SEQ ID NO: 3755 - DNA, 447 bp, Zea mays
accaagtaactcgacacatagagcacttcctcaggttgccagaggtgaaacaatggtcacagctcgatccaactaaaatcttgttaggtgtagaagcgtaaggttcctgaatgagaatgacatcccctgcaacaacacaccgcaagtgaaggccaagcaaatgaaccaacacagcgaaacggtaaatcatcacactaattcaaggacgtgtctatgcctatgcgtgtcatggcaccagcgttcacagcaggtgccgttcgcgcatttaatcgagcatttcgtgggcaacaagcgccacgcttcgcgtgtggtgacaaatctacgccatcggttcggggagaaagaggaagcaggcggtttcacctgggaagaaggtgcaagtagcgatgagaccccttcccttgccggggatggaggcgactgtgaggccgcgggcggcgagctcgc

SEQ ID NO: 3756 - DNA, 363 bp, Zea mays
tgaatgctgctccaaaccgtggctgatgcaaatcccagcttcttttggttagagaaagggcatacgtctgtcagtgggtgaaacatcggagagacggctgtctgtcctctctcgtcctttattacgtactgtagaatccctttgcggcgcgaatccacaaattggcgtgcttagagcttagtcaacaccgaccacaccgaaccctcccctcccgtggtccccaccccccagacagagagagagagagagagagagagagagagagagagagagagagagagagagagagagagggagagggagaggaaagaaagcaaatgcagttcctcacatgatttgctctctcttgtcatcactagtgct

SEQ ID NO: 3757 - DNA, 441 bp, Zea mays
tggcagtgtcctttgtgctttccgaaaccagctgacaaccaaccaaccaaccctgctcgcaaaaaaaaaaaaaaatgcaggctgtgtggatggagcacagccgcacggcacagtagaaacgttcctcgcgcgcacaaaccaccattacaccgctaccgaatccacacatacagcacaaaacgctagtaataaaaactgcatagtcaatcccatctccgttttattattgcaaagacctgcgcacgaactactacattactactactacctccagtacgcacggcactacactactccctaccgtagtacgcacgcgtcgtcaggaggccaacaggtacctgaacctgaactcgtacgggaggacccggacgcggccgccggcgccggcgcggcggccgacctccacggcccgcaccgcctcctgccgcagctccggcggca

SEQ ID NO: 3758 - DNA, 403 bp, Zea mays
atagaagagtacatgagaactcaaaccactaattttgtgcagctttggtagtacaatgttcttttagtaaacaatgctggcaaggatgcttatccatgaaaccaaataaaatagctcccggactgaaaaataaaaacatcctgtggcaacagtggtattggcaacagggaaaaaaaggaaaccaaaattatagttggtaaccttggcaaagttgcctgaaaaattacaatggtaatcagaaaccaaattagaatactataaattaactcacattcacactacatgctcaaagagactaaatacacacatggattcaaaatacaaggcaaaacttacaaccatgtcactaatgaaaaaaaaaacaaatagattacacaatgtcacgcaaaatgaaacagattat

SEQ ID NO: 3759 - DNA, 774 bp, Zea mays
tgccgcgcaatcgcggtcggaaatttgtagctttactgttgtgacggcagtacgttgggccaatttgttttcgcgccgccggattggtccaaaagaaatatgtagcgtgcgagagagggaataaaattctatgcagctgtgatgtacgcagcgtgcggtaccagttcgatgaatgacatgtgtctgtcttcacatctcaaagccgctcatccagacgtcctggctctttgcctcaaagaacgaccggctcgattagtcgtgtgcccgtgtcatcaatggctcgattagccagcatcattagctattgattttggatgcgtgtcattcatcgatatagtgacgcacggatgatggtgtgcatcactgctgcagaatgcatgcgtagccttcagaacaggcttcttgcatctatcacccaatctttatttggcgcgcgcgggcaatcaggattttgggaacagtgatttgaggttagggacggcgagggaggcgcggtggagtggggacgacagcagccgacggtgtgatttgagcagagaagagaatggaatataatatagcgatcgagcatccatcatgagcagcactggcgcttccacacatggtctctctatgattcaccttcgcggccggggcgtatatagatagagcacagtgtgagctttatcagtcctagattggtggcatgagggtttgcacattcaggcgttgtgtgtgccctaagcgctagaattcagctcgctagctgcccctgtcttctggccatttcatcct

SEQ ID NO: 3760 - DNA, 479 bp, Zea mays
acgcgcgggcacttgatcaccacgcgccggtgcgccgactccggcacgcccaggtccgcggagaggaaggcgaacacggggcggaggtcggcgcggacgctggcggtcagcacggacgggcacatgccgaagacgcggcccaggtccttgaactggagcccgcgggactggaggaacgacaccaccgcgtggatggactccggcgccgcgtcgcggagcgccgggttctgctccagcgcgcgcccatagtccacgcccatcagctccaggctcaggatcttgtccttcacctgcgacggcagctccggcaggtgcagagacagcgctaggctcgttgttgtggccacggccggcgtcaccgtcgccgcactgcgcatcggcacagttgtcgccacggaggccgccgccgtggtggggggcttggacgaggcgacggactgctggggcttgacgacgggaacggaggtggaggcgtagaa

SEQ ID NO: 3761 - DNA, 374 bp, Zea mays
gagcagggccgggggaggcgccggtgccggtgtcgtgccgtgcgtacccgaacccgaggaccgcaccgcgtctcgccttctgttctgcgatggacgtgcacggccaccggtcaagtcaagtgacgacaacagcgcacgctcatgggtgcctgacgcgagcagacagcacgttggagtggagcacagtgcgagtgaacgaagagtagtagtggtgcaccgtggccgtgcgtacacttgttgtcactatgggtatgggacgggaacaatcatgcatgggaactctgtcccgacgactattatccttgcgttgcgtagtatttgtatgcactgtactccggggatgtgatttgacccatcgcgcgtgaaaaaagtga

SEQ ID NO: 3762 - DNA, 397 bp, Zea mays
agtgccgaggtcgcggcacgtgttttttccctaaggccgaaatggaaatggtgaggcagtaggatcagggtcaggcaggcacaagctttacaacgaggaggaggaggagcggggcaactttttttttccacaagcgcgacgaggctctcgctcttgtttaaaaactactcagtatagtacgtgatcgtgctgacaatctttacaggcacggaactccacgcctgttcttcatccgccgcggatgacgatgatgcaacgctggctgggccacgtgtcgcggtccagggccggttcaatcattggctgcgcttgcaactcgccaccggcaaacccacaccggccccagagcgtaccgtgcctcgggagtcgggagcatgaaacgctgcgcaggcacgac

SEQ ID NO: 3763 - DNA, 459 bp, Zea mays
gggaacaccaccccaaccattactcctgtcctgtcactacttacaagctagttcactacagatcacagccgcccgtcaggtgtctacaaaacctccggcgccagcaacgctaccgaggagccaccatcccggaggggatgccactgtccgcctgaccactgccagaaatatgcgacgacacgtagagggccccggtggtggtggtcgatgatgatgacatggacttcgccagcaagcccgaccccgaggtcgaggacaggacgtcctctccctcgggcagcatgctcctgatggtctccagttctctgacaatgtcggccatgtagggcctctcttcggtgtcgtcccggcagcaccttattgcgagggagaggaacctctttacgcattccggagggtatgaggacatccggctgtctatgatcccggaaacgtcgcctgactggtaagcgatgttta

SEQ ID NO: 3764 - DNA, 326 bp, Zea mays
ggtgcttaccgcttggagcctacagtgggagtttttatggtaacaatatatgtagatgttatattagcagcacaatatggaggagaactttttacctggcaactcccttcaggccagaagcaaagtaaggaattgattgaacagcattggctgcgataatggcaacagagtccgacggtgtcacaaagaatctatagcaaggcaaaggagaagtgtcatgaattccttgagcttttctagaatccaaaacaaattttgtagaagataagatacttgtacagatcataccttttacccagaatcatgttgcggtcagcatctccatc

SEQ ID NO: 3765 - DNA, 377 bp, Zea mays
tttgttgtttccaagcagtttgaatcctgacattcttgaaggcctacttggatctggtcagtccgttaggaaattgaatagtatttgttatgtttccatacctgagtactctgttgacttctgtgcctttgtgcagtgggtggtgtcatggctttcctcactttgcatgaaatgctgcctcttgcatttgactattgtggccagaagcaagctgtcaaagctgtctttgtgggcatggcctgcatgtctgcaaggtttgtcgattcttcaaattaagcaaagggattccttgagtaaacattttgtcttaatgaccagtatggatttgctttccctttccgcaagagactcgtatgtggctttttataacttttgca

SEQ ID NO: 3766 - DNA, 389 bp, Zea mays
atggcgtggtcgcacatcttgcgcagggcgaagagcacgattcttagcggagattcggttagagcatctcgtctgctggggctcagggcaacagtagagtaactgccgaccatcttcagcagcgcctggcacaagaagaaatcaggatagtataagagttagccttgaaaaagttatcaattggcattgaagttatccatccgatcttcatagaacacaagacaagaatttttcaacggttctattgacccacggtggggggttagaaaccgctcaatgcaggcagcagcagagtatgaaaaaaaaaaaactagaccaacctgaattgcgccttgggagacaatgtcttcgcaaagcatgtctgagttcctcactagattactgagcgc

SEQ ID NO: 3767 - DNA, 436 bp, Zea mays
accgccaccctcacctgcgtgaactcctccaggttgaggtcccgcgccgcagtgatcttcttccacacgtgcgcgaggaggcactggaacgtgctgcaccggacgccgacgcgcgccttgaggccagcgatgaactcgtcggtgaagtgcacggtgaggctcttgatctcgtccatgggcacgacggcgtacgacttgatcctggaggtgcggccgccgtccccgcctcccatgaactcgatggaccggtggtcgaaaatcggtgtcggcgtggcgcggggcacggcggtggccgcgcgtttgaggaagggcggcgctggaacgctgaagtccttgcccgcgcgcaccgcgctggcccacgtggtgaagaaggcgctcatggagtggccgtcggcgacgtggtggtggcagatgatgccgacgacgaggcctccgc

SEQ ID NO: 3768 - DNA, 382 bp, Zea mays
gagtaaggtaaaagatctaaggaacaagatgcacaatgcgttgtgtcacacacacacacaaaatgcaagatcgatacacgctacccctttccatgatcaagcaaacacgcagaagatcaaaagaaacatgacagaaggcccaaaacaacgaaaaagaatctatacatgtgcagctgtttggatgccaactcgcgagactggaagtgaagaagagaagacaagtcaacccccgacagttgaacgcacttgataaatcctaagaaccagttccctcacaactgggcctatcattaccaaacgtggaaaccgaaaggccgcgaaggttagatgcaattaacagcttcctgccgccaatcgaacccgaatttgacacgcgaactaa

SEQ ID NO: 3769 - DNA, 478 bp, Zea mays
ttgccataccagacaacagtttgcctgatggaactggttcacgtatcatccttcgtaagacatcattcgactgccgactgcctgctgtccgccttgcagatattccagttaatctgccacaagaagaaaacatctctgtggcgaaagtagctattaagcagagacctcaaaagaatttccatggcatgaacagctcaagtgctcactcttctagagacaacctccaaaaaagcgtcgaagaaagaaaagaggaatacaacaaagcacgagcgcggatatttaacaacagcaatagcagtactgctactgatgggagatcagctgaggaagtgactttacccagtactcttcacaggtccacttccttggagttgaactcaagcaatagaataggtcaaggggccgaaattactcttgagaggagcttgactaccacttcagctagcagcatgtcaaatagaagcaagagtgataagga

SEQ ID NO: 3770 - DNA, 461 bp, Zea mays
aaggtacagttgtgtgaggaggaaaaaaaaaaggctgaatacacaatgcttctaaaattaaaacgtctgacattatacatcggctatcactggctatacattcgaaaagatcaatgagtcatcacttgttctttgattgccatgaaaaaaaaaagatttttgacatgtttatatctctgatgtcctctacatttagaccctttttcaaacctctaaaactaatagttagcagctaaaattagctgagatgtttggaacgagtcagctaatacaccatctaattgttagttatacctctcagattgctgctattagttgttagctgctgcaacctagctaaagccagctaataacatattagctgactaataattagctctagaggtttggaatagggccttaggattataaagaacattcaatgtggttaacgtcttccatgaacagtgaagctggaaatt

SEQ ID NO: 3771 - DNA, 404 bp, Zea mays
gtcgtcaaggagtccctgcgcctgcacccgccgacgccgctgatgctcccccacagggccagcgccagcgtcaagatcgccggctacgacatccccaagggcgccaacgtcgtcgtcaacgtgtgggcggtggcgcgcgaccccgaggtgtgggacagcccgctcgagttccggccggagcggttcctcggggagaacatcgacatcaagggcgccgacttccgcgtgctgccgttcggcgccggccgccgggtgtgccccggcgcgcagctcgggatcaacctcgtggcgtccatgatcggccacatgctgcaccacttcacgtggacgctgccgagcgggacctgtcccgaggacgtgagcatgatggagtcgcccgggctcgtcaccttcatggccacgcc

SEQ ID NO: 3772 - DNA, 876 bp, Zea mays
tccatagagagcagccaagcgccgctggattggccagcgcgcctccacatcgccgccaaggtcgccgacggcatggcgttcatgcacaccaccctgcgcggcgacggcgggaccaccaattcctcgtcaggcggcccaatcgcccacggcaacctcaaggcctccaacgtcctcttcacggccggcatggacccgtgcatcagcgagtacggcgtcaccgcgccgggcagggacggcgccgcggcgttccgcgccgacgtgcgcgcgctcggcgtgctgctgctcgagctgctgacggggaaggcgacgtccgcgcagggcgacggcgcggagctggcgcggtgggtgacctcggtgatccgggaggagtggaccgccgaggtgttcgaccgcgcgctgctcgccggcaccggcgtcgggtcatccgagcaccgcatggtgcggctgctgcagctcctcctccactggccagtcaccggcctccgctgcaaccgctgctgagaccttgcttctacgcggacagctgggaatggcttcctttgtctcaagaggaggacgggtatgcacgggagcggccggaggaggataagtgatagcggcggcgacgacagtgaggaagacgccatcggaaacatgccttctgcactgccccctctgctctgctgtctcgcggcttagcggggataagatgaggagtctttagaaaatcatgcacactaccaggtgaaaacagaagttgtaaaggtactcgtgaaatatcctatagattgagggtccgcatagcaaaagagaagttaggccttcttgtccagcgcttgtgttggcggcggcgatggcgacgtcggcgagcacgtccggcgagtggctaaagggcgc

SEQ ID NO: 3773 - DNA, 391 bp, Zea mays
tcaagctagctagctagctagctttgcccccgcaatgtgtacatcctgaccagcagaagtgatccactacagtacagaagaacaaagctagagtgagaagaacatggaggaactaagctaactcccggcctaattatgggatgggttggacctgctcttgggcgtcgtcttcaagctctcgaacaacaccgtggccggtgccttgaaggcttggctgaacccgcccacaggcgtcgagcaggagtcacggcattgcgtcgacagaagccttctgctcctcactctcacaacagacggttgcagctgcaacggctgggacgacggcgatgaagaagaataagaagaagggccacagagcaggacaaagaagagaaggatcagcagagctgag

SEQ ID NO: 3774 - DNA, 867 bp, Zea mays
tgcgggtgcagaatgtttccgggatgggatagatatggtggcgaactggcgatgacggtgaatggaagtggatgagatctagtggcacgggggaggagaagtggtaccggtgccgagctgtgttttgggagtgtagtccatcggagccgcggggaagggcagccgggccgcgggcgcgtcgctgcattggattgcccgtgactcgcgaagggaggggggcggggggtaggtttggacacaaggaaagcaacaaaggacttcacgttctccggtcccggccaggtcctcgggtttgccatggccatggccgcccatggccatgccccggttctctgccgctgggcggtggggtcgccggaggaatctagctcgccggaacacgacaccgcacggcgattgagacgacgacgacgcgcgcgcacacaagctggctactggagtactattctgcagtcgtcattggtatcctcttcctctgcaacagatgtgtcggcatggaaagtgatattaccaacattttgagacgttcccttgcttttctcaaaactttccagtaagttttcagaaatacaattaataacatcaacatataagcagaaatctaactcttgaatgaaacaccctgaattggataagtcatcatgattggtagctaagttcactatatttccaagagcccaaccagaacaaggaataatactagctgaaacctctgactgttccagttttattatttcttcaaatattttatccttggagatctgccgccacctgccatggcttgatcagtttcacatttacatatgccattgttaaagtaatacaacgagtaaactgtgatggttaagtaaaataaaaaccgctgac

SEQ ID NO: 3775 - DNA, 401 bp, Zea mays
aagagcgacgacgcctggggcttcccactcacggacaacaccatcaaagctgtcgtcttggtatctatatatgacgagttatttacaatcattcatatttcatagcactcccaacaactctacgcggccttcgaatctttcagaaatagaacccagacaaatatatagatgactattacatatatatctactgcatcttcctcctttctttattctttattattacttctgcatcactgcatgcaacacaccgtacgcacgttctgactccacagcagccaccaagtatctaaaatatatatacacacacacaggacatgttcgccggcggcacgggcacgtcgggctcgtcgacggagtgggccatgtcggagatcgtgcgcaacccgcgcgtgatgaag

SEQ ID NO: 3776 - DNA, 474 bp, Zea mays
caggatacgagtacaggaggcaagaacagagcagtacacgatgtcgtcgttgtttgacaatcctgcccagcagctcttggcgggcaaggatgcctatcccatgtctgccataccaacattgtcggagttctcccgccgccgaagtggatgttgctggccgagcgcgtggaggtcgtggtagtggtgagcgcatggacgcggaggcgagcgcatgatcgccagctacaacgcccgctataccagcatcgtcgaagttgtcccgtcgacgaagggggatgctgttggccaagcgcacggacgtagtggcgaacgcgaggtcgccagcagcagcgcgccgtgctaggagacaaactcgagcgtgcgaacagatagcggagaaacaacaacactctatatttagtgttcgcttgagcctatattttagccacccttttacctgctgctgctggacacagtagcggacgattgaggctg

SEQ ID NO: 3777 - DNA, 388 bp, Zea mays
ttcgcgggtgccaagtcccatcaaggacgtacaaatttgacgcatccagatctttggctttctttctagttctgattcctgtgccgcttcctttttctggtgcgattgcgctcgatcgatcggcgccgcgcgttagcccgggaactgctccacccactgcaccattgagcagtgtgacaacgggcatggccggactgatcgatcgagccggatcgtggatggtactgtcgcggcgcactgttgcatgccatcctccgtcccattggctcggtgcatatcttgctagatcttgtctgacggttgaatagggtgcaactgttgttcttctctagcgcgctcgtgccactggtcaggctgccggctggccggccggcttcgctaccctcca

SEQ ID NO: 3778 - DNA, 388 bp, Zea mays
gcctgtccgtggatgctgacaagttcgcgtcggtggaagccaactgcgtatactacgtcgtggaggaaccttggttcgacgtgtgcgtgtacagtctcagggacaagactgaagtgagggctggtggagccatagattctctgaaccccatcaccctcagcgttgaccctccattctcggaagttcagctcctctgcttctacactttcgttgtccaggacgtgtttgcaatgttattggtcgatgagcttattgaacggaataggtcgatgatcttatggaacttagaatgacgaattagacattgtagtttttttcctctacgattagtgtaccttggttaagaattcattctatctgctgtatcttgacactatagttattggca

SEQ ID NO: 3779 - DNA, 899 bp, Zea mays
tcatcagatgtttaaaatgttagatcatggtattggaccatgatggaaatcgagacgacagttccatgctagaaacactttacctacttacaagcacatcatcagtagtagggacatccaaaacagggttcgcataaaaggaacctttaaatgtgtctgcatgcagtaatcagagtttatcttaggaaagaagttcatgcacaacagtcatgagagccgagcagagctcaacagatagcctcatggtaggaatgagatcctgtcccaaaacttgctttcttggcagcaccgcagcaggtttcaaggatgaatagtactcctaccccacacatacaacaggatactacatgataactcacggaatggaccagtgtcataccaagtttcccggactcgagtttctccttcccatgactccacccaaagttatatctgcagagaatgggcataggcgcaaagaaggttccaaagaaagtgagtataaaaaaggcctaaggccggttctctggctctctccaaatttccctctgcggactgaggaactgctgccgttgcttgatattcttgcaaacaaggtgaaggcaattcgtcgtttgagggatctacttacgacaaaactccctccagatacatttcctgtcaaggtatgatctgatacatgtttcaagatgcaataccttctgtacagagcttgtccctccattatgtgtgctgtgttaattctccttaattgtttcatatctagtttaacggctcaattatgtgtcagtttctgtagttagaaaatcatcactacatagattatttaccctgcatgcttgaagacatgagcttatttcagaactactatctggcagtagtcaacatatttatacatttgtagttatctaaatagctgt

SEQ ID NO: 3780 - DNA, 410 bp, Zea mays
cgaacaggcccgactgccaggctgaggtagtttatcataaattgttgtctatattcgaaacattatatgattgataaatctagatcatagttattaaggccggtaaggcgatataaggcgaccgaccccctttttaccttttaggcggtaaagcgtaagacgaggcgacaccttaattatacagtaatataaatataaaagattagaccaaatatcatgtatataacactaattcaaaataggtagcacaagcctagtaggcccatttgagcctagtagaagagagaaagggaaaaaaaaaaagaaaaagaaaaatggcctacaaccagtcagccaagaggccaaccaacctagcccaatactagttttaggttaaaacctaagcctacaaccactcccgtgcagcagca

SEQ ID NO: 3781 - DNA, 640 bp, Zea mays
acaaagaagatttgtaaaaaaaaaaacataaacagtataacacaatacatacttggttgctgaatgaagagcttcaaagctagatacacgccgcaaatttgctgaaatgtagcatttaaagggattaacatgtgctggtaaaataaactgtcaatcaaggaaataaacagttgtgggaaatggcaggagttaagggtctctcctttcttgccgcaaccatccagggcacctagctgcctgctttatcgctgaagggctgcaattgtttatcatggattgtttgtttttgttttttcttttcttttgtttttttatccccttaggggaggtcttttgtactggggtctattttggactctcttttccttctacttaatataatgatgtgcagctctcctgcgctttcgagaaaaaaaaacacaaaatatcacaatttgccacaattcctcacaaatacatcactattttcggtggcctacgtcagctgccgaaactttattttcagcggttgtaccctggccgccgaaaatcgtctgcagtgctattgtgccactggaaagagaaataccaacctctaagtgatactgcaaaccctgtgagatgtcttttacacaatcatggttgcagctgcaggcatgca

SEQ ID NO: 3782 - DNA, 394 bp, Zea mays
tgtgcaccgggccggccatggcggagagccgggtgtggttggcgacgtgttcctgtatcgctctctctctctgtgtgtgggttcagatttgatgtgctagcggctggtccatgaatgcggttctcggagcagactacgaacaacagaacaaggcaacagctaatcaagccggtttgatctaaacgcggtctctcatcggtacgtgttcagtagatagaggagaagaagaggtagcagagagagatggataccaacctgattaccgcaagatgctgccgctcgtcctcgtctcaaggactctgaagagcaaaaaaaagggaaaaaagaggtcaatgaacttactttgagagcgtaaatggcagtgaaacgaagctcaatccggtgctagacgacg

SEQ ID NO: 3783 - DNA, 409 bp, Zea mays
atactgcacaaggcaggcgaccagtatagcaagctgatgatggtgaagagcccctactacctgcccatggcgatggacccttccagcttctgcttccaggaggacccaaccgggcatcccctcccgaaccctagcggctgcacccccttccaccacggccacccccaccatagcatgcagccgccgcctccattgccgccgagcaaccatgctggcaaggccgtcttcaccggagcagcagcagcctgctgcatgcaacaagagccggcagacggcagcaacagcgccgtgctgcccatgccgccgttccctcccttcacccccatcgtcgccggcaagccggcggtcccggcgccgccgccccaggttgtcaacgccggtccacaggagccaccgccacctacctggc

SEQ ID NO: 3784 - DNA, 454 bp, Zea mays
agatcctcgcgttcgtcgccacgggcccgcactgcgcctcctcgggcgacggcgcgctcctgctccgcgtcagcgcgccgggccccgtcggcagcgcgtacgcgctccgcctcgccgcgcgcgtcaccgagagctccgtcgtcaccgtgtccgtcggcggggtcccgcgcctcgcgttcgggaccaggcaggcgtcgctcctctcggaggttccgctcggcgtcgccgcctcgctctccgacgagggccatggcgggggccgcgccgtcgacggcggcgtgatcatcgatgagcgcctgctcgagtcgctgctggccatgaaccacgcggacggcgcgcacacggacaacccggtgccgcggacggtgtccaacctcctcgtgcacgtcctcggcacgcacgtagaccacgtccacgacattgtcacgcgcctcgagatggacctggacgccgt

SEQ ID NO: 3785 - DNA, 422 bp, Zea mays
tcccagccgacgagtacatcgtcagtgccgacgaggacgacgacggcgacgcggacgccgccggcgcggagctggagctgacgctggccgtcggcgggcgctgcgcagccggcggcggccggcgcaagagcaacaggcgccggaggcaatcagcagagcggcagcagcgcgacaacaacgacgccgccgccgccggcggcggctcctcgccgttcgggtccgactgctccggcgcgagcgccctgtcgtcgccgccgccttcgtcggccgagtactactccgacgacgggccggcggcggcggcgtgccagagggccgttgcgttcgaccttggaggagaagccgacggcgtgatgaggcagcagcacgcgccgtggctggcgcagtgccagcagtacctcagcctgaggatgacatgagtg

SEQ ID NO: 3786 - DNA, 423 bp, Zea mays
tcgtcgtcgatgacggccgggaccatgcgtgtgctaggcggggaggtcagcccgttcacggcgcgggcgcgtctggcgctggatctgcgcggcgtggcgtacgagctcctcgacgagccgctggggcccaagaaaagcgacaggctcctcgctgccaaccccgtctacgggaagatccccgtactgctcctccccgacggccgcgccatatgcgagtccgcagtcatcgtccagtacatcgaggacgtggcgcgtgaaagcggcggcgcagaggctggcagcctgctgctgccggacgacccctacgagcgcgccatgcaccgcttctggaccgccttcatcgacgacaaggtgagcaccgagcagagcacggcagcaagtgtcttttcttcaaggtaacgtgcaacaaactgccgtgccttt

SEQ ID NO: 3787 - DNA, 432 bp, Zea mays
tcttaaccattcctccaccgtgacaaaatatttacgtgaagattgcttacggttctttgaattcctattttttgtaacatgccagtccatgtgagcacgatgctcctcttggcatttaaatcgaaggccacaagttttacactgccttgaaagatcctgatacaaagcattgatgacaggctcattccgtaccttgaggtctacattgaagtcaactccaacagaatcctacaataaaatgttcacaattttcccctcaattaacagcataaatataaacagaataatactatataacaatgcatgaagcatgagaaatacctgggattggctaggtggttccagtgaaattacaccatgccgcataaggttactcaaaagtccagagacaaatggttgagggccaccaacttgtgatgatgatgaacccat

SEQ ID NO: 3788 - DNA, 361 bp, Zea mays
aaacagaatcatcattctgtgagccaaaccagtaactattttacatgaataaacacaaatccaaaaaaattacttggcaagctgcgaagtttgattcgaagtgaataggaattaggatgtttatagtcacagttaaccaacgaactactagtaggtgctactacagagatgccaagtatcactaatcaaggagttacacaatctcttccgataaccaaggatgcatccggaaggtgcaaatattgagcacgatattgctaccagcgagccatgtttgaggttcgaggagggtcatgctgtccactgcccaccagcaccatatgcagcagcaccaccaccaggctgtggcgagacccctttt

SEQ ID NO: 3789 - DNA, 485 bp, Zea mays
atcaaagacacatttgtttctatgcttccacaaggtccaggctcccagaatgataagggaatcaagtcctttttttgtgagtgcattagcaatattccccaccgattcccaccagcctagatatgagccagcatctggttgaggagccaaagaatgcagacaaaaatttccttaacaacagataccagaattccctggagaaagaataggtaacaaaaagatgatcgatagtttcatcctcttgatcacaaagggggcacttctcaggatgaatcagccctcttttagcaagcctatctgttgtccagactctattttgtgcaaccagccagatgaagaaccgacattttggcaaggaccaagttttccaaattttcttgtgatgagggaaaaccacagaccccaaaaagaaaccttcgtaagcagtctttgctgaatagatgccagtaggagcaatactgaaaacatgtttatcgtcaacctca

SEQ ID NO: 3790 - DNA, 483 bp, Zea mays
ggagaagcacggtgagacattggcgatgctcccgccatcatttcccccggtggacactcctggcggcggtgctgttcccccgttctctctctcgtctcgtctcccggtgctgatcaaattaccttagtcttggtggccaaggaagggggtgcggcgtcctaaatactcgaagcatcggccaactagtgcctagctagcgtaaccgactccgatggttacggaaaggcagttgcgaccgcgcgcgagaacgagcacaagcaggctttgctgggcgcacaacacacatgttgggctggcgacctagcgtgctatggtattgggagacgctgataatgtgacccgtctacccgcatgtgggataaatttaatcgatggtgtcatgctgatcccgggctgatgcaagtggctaaaggaataaaaaaacaaaaacgtgtggctggctgcgttagcttaattgaaagggagttggatcggctggcccaa

SEQ ID NO: 3791 - DNA, 928 bp, Zea mays
agcttcttccatccgttctctttatctctttgatgacttccaaaacaaaacaaaacaaaaaactaatgttgtgcatgcatgctgccattatattgctagagctccgtgtaagatgagggtcactagctaggtttactgcctgatcaggtgaagtgatcatctatcctgctcccagcaatcatgcatggcctaccgttcgagagcgagaagccaacggcaggagaggcgaactgggatgcagcagcgcagagcagaccatccggggcagaggcagagagacggggtggtgtctgcgtgcgtggcgcggcgcagcgcagcgcaggtcctgtcttgttgggcattcaagctaggttgcgaggaggaagcttttggagccgggagggagcggagcgcaggcagaggcagccgtgtctgcgcctggctggccgttcaggtggattgcgaggagctgcagcatcagcacctgagatctgcaaagtttcagtacccatggtggcctcagacaccacaccatcactaaccaacctaaaggcagtctcaatatcctccagagattttgcatctagaacagtaatctcaggatcagctgtagttgtcgctaactcattaatagtggcctctggctcacttgatccagctgctaaggtcgctggtgatggtgtatcatcagcaggcacttctgactcaccatgtggtagtttcatctccacattcattatcattgcttcataggggcttgcttcaaggatccgtctccgaggattgtagacagtctgctcagggtcatcatgagatgctccaaacgagtagccaaattcggagccatttaggtcatcagccaatggagactgctccctggattcttcagcaccaacttccgacatggtcaaggagacattgtcagatgtctgaggactaataacagaat

SEQ ID NO: 3792 - DNA, 874 bp, Zea mays
tgtcacgttaattcccagcgttttaccggtgcgccgccgtgcgcacctcatccccgcttgacgcggctcagttaatcccgccctgcgcataaactctgccgctggcttatgcctttttagactttgaaatccctaaacgatatataaaaccgttacagctttcgccaaagttataaatacactgacagcatctaatggcataggctcgaactccatttctcagggtgcagcatgacacgttcggtttcgaaaaaatggcttggcggtatagcgctgtcgctgagtttagcgggcgcggcacaggcaacagagctgcttaacagctcttacgatgtgtcacgtgaactgtttgttgccctgaatgcgccgtttgaacagcagtgggacgcggcgcaccctgacgacaagctgaccattaaacagtcacatgcgggttcctcaaaacaggcgctggccattctgcagcatgacatggcacaaagtatgtgagcataactaagtgtattatgccacctaactacaaaccggaaaaatacagatcatgtgaagggcagagcagacctagtgccagtctgccagaggctcccacatgagtaaggtctgaggaagggataaactgaggcaagctttttccctgcaaatgcggagaggctgcttcgaacctgcgacctaatgactcagtgatacaattctcaccactgcaccaggcctacccttgtgtacagatcatattaaggatcaaaaagatttccaacaatacactcaaaaaaaagatttccaacaagactgtaatgtgaccaataaatccaacaaatcgacaaagcactgtttaatcagaactgatgccaagcacctagcaagaaggcttgtgcat

SEQ ID NO: 3793 - DNA, 355 bp, Zea mays
aggttttgcagtatttccaagttatgaacaagtctacacggtgatcacattggaacatttttattctaaatatcaccttttgtgtggcagggacaagaaatgtgggaactttaaccttctttccctggattaagaaaaaaagtttcaagtaagtcaagtggccatgggataggaggtctgaaaggtaacaagtccgtgcaccgtgacaggattcaagattcttaccgaggctaagaacacctttgcggcagcaaggaaatcctcggtcttgccaccagtgcaagaaccaatatagactcggtcgatcttgacatctttgcattctcttgctggagcacggttgtcaggcgaatgt

SEQ ID NO: 3794 - DNA, 861 bp, Zea mays
tggccagtggggcgctcgtattcccgagtacgtcggctagtggggtcatagacgctggggcccgcgcgtcagcggctccggcgtggaaatgaagctaggtcgcggggagaggaggcccaccgcccgcgtgggtgtcgctgcttccaccactccttttccacccgtgaaacctttcccacgcgctgacacattccacccacccatcaccccttccttcctttccattctctgtcgccttcgcccctccaaggttctctgattccagacgcaaccctgcggctgcggggtcaaggagccagagggggtgcacagcgatcgttctgccggagatcgaaaccctcagctagggtctgaggcgccgggctgcggccgccgagatgtcgacgccggcgaggaagcggctgatgcgggacttcaggcgcctgcaggtgccttcttggtgcctgactcagacttgactgagaagggctccaatgtctgtgccttcttgaagcggtcaaggcccccacggtacatctccccacacctctctaatccaccagctctttggttcccgtctttacctccaaatccagctgatttgcacttgtgtacttaaattttgcagacaagcaaaggatatcggtcctacggttgatcatattaattaaatcagaaacagcgatggaaagaatttgcaaccaaacttatgtgccgtttggtttggacaacggggtatgatcatatgaggggtgggatatggaaatgcggagggatggaaagctcatccgctgctagggtcatggggagggagggattcggacctcttatcccaccgattctatcccgtcaggcggggtgggttgtgtcgagataagagct

SEQ ID NO: 3795 - DNA, 402 bp, Zea mays
acatgcatggctttgttcactagcatcttatggcaaaataacaaagtaacatgaacgggggaccttatcaatgtttgttagcgttccttcatatatactagtacatgtacttgagcatggaacaaactaaagggacgtagcagaaacatgttgtgttcaaaatcgcgacaaattcatgaaaacatggacaaattatcaagtcaagacattttctgttatctaactagtaaccagtaccagtgacggcttttaccaaaaaaaaaaaaaatcttgtatgctggggcatgcccctagcctgtctagagcagatgcggctcctcttttctgcgatagctgtcggcaaaacagatggtcaccctgctgccttcggagctgacatcttgtcactgaaacccattacct

SEQ ID NO: 3796 - DNA, 359 bp, Zea mays
agttcacctttgtctagccttctgcattcaacaaagaacacgggcacatggttttttttctcgtacgcgcaggagagctgcacatctttataaattagagaagagaaataaaaagctttacaagaaagtcccagcttggtctggccaaaacaccgattacatagcgtaaaaaaaaactcgacctagcgaccctaaaagacccagttaaaccaggctgcccagctgcttggctccagccaaagcccagcaagctaactcgtccagaaaactttttttttttctcgaaagcactcgtccagaaaaccttgcagcactttttgaatggagggagacttcccatcaaaggcaacccgatttct

SEQ ID NO: 3797 - DNA, 386 bp, Zea mays
aacatcaagtttgtacctgacacgccggtccaccaactcctggattttcctcacgatgtctccgatggcagcaccaatttcatggatagccttaacctttcttgacagcttggtcatcttcttcatggcaagtcgaaacctgtttgggtcacttggcgcgcggtctctgatgcgcatgagaaaggtgtcgatggcatcctcaatgtcataggatgcctctctgacatcgcgtctccacaccttggtctggaggtcgatctgatcctgcggcacatcagccaccttacggagggcagcgtgcatactttgcagctcccggcagatcatctccactctgcccctcacttccttctggagcctatactcatcttggatttggagtagct

SEQ ID NO: 3798 - DNA, 372 bp, Zea mays
ttgaattattgttgcttgatctctttgctcccacttcctcttcccgttctcgatgtacactacttttgaagttcttgatttcttgttgctttattttctttgttccccacttcttcctgtttaatgttgttcatgcttgattgctttatgcagtaggtggcatctccaaatatgttttttataaatccaaatatgagtattgctagtgcctagtcctagcgtaggatatgtggccaaaccacaacagacatcaaggctccactttgggatcacgtcaccattctggagaagcctagagctagtagaactttattgtgatgcaagtattgtccaatgcaaaaactgagtagatacactagagttgaacctcgt

SEQ ID NO: 3799 - DNA, 802 bp, Zea mays
agatctggaacggtgcagcaaagacatcactgatcacaattcattgttcgcgctctgccaagtttcaagaatgaattcgttgtcagcgcgttaccatcaacagtggcctccttccagccttgtccatcagaagcacccctagtccgaccatcggaacctgcactaccgccatggccactgttcccgtgtttcccgacgagaaacctgaccgattgattcatcatagcatgagcactagtgtagtgtagtgcctgtgtgtcaaacgtttctttcttttttccttctctgattgatcattaccggccgagacgaacacttcactggcgtagaagagaacgccattgacgcccccaagctgctggagggccatgagcccaactccagcctgagcatggagccagccaagctttagaaaacagcagagtgtatgtagaagaactgcagggtgaccaaagagcaagtaacaaagaggaatgttgcttaccagtgaatctttcagatagttatcacacagccaatttgcaagatgcataagaacctctcttccaacaggctcatcaccatgaacatttccaatgaactgcatgtgtacaacaacaacaacaaagtcttttagtcccaagcaagttggtgtaggctagagttgaaacccaacagaaaccacaaatcaaggttcaggcacgtggatagttgttttccattcgctcctattcaacactaaatctttgggtatattacatccttttcaaaaatatgtgtttagtaactgccaatatggcattacatgattgcatgtttgcca

SEQ ID NO: 3800 - DNA, 822 bp, Zea mays
cttcacgatacaataatgccgactttattcccggatgtattacagctcttccttccggagttccagtgcttcggccggatgagccctggcacacgacacgaccaaacactcgtgttcctccaaaggcatcatcagctagctttttccatctccgaagcctggcctcccgttcagatctgattcctgcgatgcgctgcccggttgcactccttgctagctccggcttcagacttcagagtgcccgtggtttgcttcagccatttgatagagtttacttactgggaaagtaaagcattttttccatgttctttctttcgggaagctcacggctcacggctcacgcacggagcagagcagagaatattaggaggaggacgtgggagaaaacttctatcaagaaagtagtagctttatcactatcccgagaactaaaaaaaacctgcagcgacgacacgcagtactcggacgggacggggcaccgcgacacgggcgaggggttcgcggcggcgcccgacatcgaccacctcaacccgcgcgtgcagcgggagctctccgcctggctcaactggctcaggtccgacgccgtggggttcgacggctggcgcctcgacttcgccaagggctactcgccggccgtcgccagaatgtacgtggagagcacggggccgccgagcttcgtcgtcgcggagatatggaactcgctgagctacagcggggacggcaagccggcgcccaaccaggaccagtgccggcaggagctgctggactggacgcgggccgtcggcgggccggccatggcgttcgacttccccaccaagggcc

SEQ ID NO: 3801 - DNA, 350 bp, Zea mays
aaattgtatttataacttatgcactgatgttgaacagcatttgcaatgatctcgccaattaagctatgcacaatgaactcagatatgcacctcatattccaaaggtgtaaccagtaaaactcacgaccatatttccccaacaccaatttctttggcaataattacagtgtgtttagaaataagaaattgtgtcaattaaaatcaacaagagtattataaagaaacacaatcatgaaatatagaagtatagaagcatctcaccttcatctatctccctgaaccagtaaaagcatcaaaaaggccacagcaattccaccatgttgcccgctgccctgaagcaaccactgcca

SEQ ID NO: 3802 - DNA, 416 bp, Zea mays
aaaaaatccgtagtcaactcaactgtggtatggaaacaaagaaaactatcaaaagcaatagcaagtataaatataaagacatgaagcttccctagtaccttgacaagttaagtggaaacatagcatttcctgaaacacatgtattattgcaacgccttatattgcacagcactagccactaggacacaacacatcaaaaattgcaggaaagttattttaattgaaccacgtcctgtttgtgtgtatgcccatatgctaggtccatagaaattgcacatgtaacaactaacaagcatgttttgcagacaaggctcttacttgaaaattcatcatagtttttcaagaatgctttacatgtacaatcagtgcgatcaatagggtagtgtaactacaaacattcaataattacttctaat

SEQ ID NO: 3803 - DNA, 425 bp, Zea mays
gctcaagttcctgaacaagaagggatggcacacggggtccctccgcaacatcgagcgggtatggaaggcggagcaggcggaggaggcggagcgccgcaagacggaggagctcaagaagcaggtcgcggccgagagggagaaggccgagttccgggccatgcaggagcgcgccggcctcaggccgtaagtgttctttcccatccttcccccttggatttttccttctctcggttggatctgacaggttggtcggtccgttggtccgggtccggctagggtttcctttcgagtcagtggggttcgggccatatctggcttcgtctgatgtgctaatcgcgcgatggctggtacagggcgcaggagaggctcgacttcctctacgagtcggggttggccgtcggcaagagctccgaagggttccaggc

SEQ ID NO: 3804 - DNA, 404 bp, Zea mays
aatgagttgctgggtagtcataggtcccttgagctacaaacagtggataattgggaagcattgataatacttactgttgtacagacaaaattttatgagtcctgctcatttgttgatactgctaaactgaatatgcagcatcactgtgaagaaattgagaaggaaatttcttctgccaagaaacagttagaagaacaatcttgcattattgcccagtctcaagctgaacagaaacaacaatctggggttataacaaaattgcatgcaagaattgaggagctagagcatatggaacaagaacataagaagatgcaaagacaacttgatgcatacaaagagatgcgggacaacatgttaagagatgctcactgcctaaaagatgaaacttcaaagaaggaaagcac

SEQ ID NO: 3805 - DNA, 760 bp, Zea mays
tgctaaagaagctggtgtcgcaacggagtacagactagaaaagagggtggaagctgtaggccgtgttcgaggcctgacaaagcttgacatgaagctcaacgacgccctcccgaaaatagaggtcgacccggagacctacacagtgaccgctgatggagaggttttgacatgccaaccagcacccacactgccactgtctcggaattacttcctgttctagaaagccactgcatcagcaaaccaccaccactactcacgccctatgcatgcacatcgtcatatacgagtataaaagatgcaagttcaattctgtacgctaccctctttttaataatatggccaatgagcaaattctttggcagtagaacacttttgccctctgctatctgcaggtagggcaggtgcgggacgtcctgctccccgaccaggcgcgacgcgcccaccacgccgtccagctccgcgcgcagcttgtccatgcaggccgggtggttgatgaggtacgccagcatccactccacactggtggcggtggtgtcggagccagctgtgaagatgtcgaggacgaaggccttgatgttctccctggtcagcctgacctccgcgttctcgtccgccgccgcgtccatgaggatgtccagcaggtcgtggtggtctccctgtccctgctgccgtctccgacgcttctcctccttggccgtgatcatcatctccagcagcgcgtcgaacttgtctcgcacctggcgcgtcctccgcgtgagcc

SEQ ID NO: 3806 - DNA, 397 bp, Zea mays
tatccttcccggccgatctgcatttcagtcgttcctcgttccacaccgtcgttggccggcccatagctctccccctcctggttagtgtagtgagcgcagcgacgagtgcaacggtgagagataccgagatggctgagggaagaggcagtgcaagggccatcggcgccatggcgttcgccgttgcctgctgctactgctgcgtcgccatcgccgacgcagccaccacctactacgtcggggacagcaacggctggtccttcagcagccccagctggcccaacggcaagcacttccgcgccggagacactctcggtacgtacgtctcagcattactcagcatgctggccgtctgctggtcactgaagatggccatgctctttctgtcatgcgtggtgtg

SEQ ID NO: 3807 - DNA, 383 bp, Zea mays
gcaaaaagggcataattaagtcttgtttttgacttctccaatagaagaatttctagggcttgtagaaatacatattggaagattccaaatttgataatcaggtagaaccgcgtccccagtctccagggcttcaatacataatttacaggaaaatgatggtgtatgattcccttctcggacgtgtgatgcagtagagactgcccagaaccagagccaccttccctctttaaaaaggctattgttttatcttccccacctacatttgttcagacataataaacacatacaaacgaagaaaacaaaatatgaaaactgcaagtgcaccaaacaatatatatcatgaactgtatcagaaagacaaaatgtaagggtttgattggttt

SEQ ID NO: 3808 - DNA, 459 bp, Zea mays
aactctaataccaataccattctgtttctggaagaaattatgactgacatttctacttcagccagaacaataatacaatcaagtgagccccacatgtcaatgtcaatgactcaatgcgacattattgatagcacagctgttcaagtttaattttgtttggctttggccttgggaggcactgtttgtgcccttttcatctaatcagattgaccattcatggaagatgacatcatggaaaggatgtttcaatgccacaaaacttctcaaaaatgtttgttcgataaacctgtagtcttagctttacgcaatggtggtttctgtggtgtacaacaatctgttgtgtaatatttatttattgtaatggtgacacatagcagtaaatatagtttgcatgcaaagagaatattgttaaactggatttaggattgacaattcctggttatgggtcccacagcagtt

SEQ ID NO: 3809 - DNA, 431 bp, Zea mays
agcaacgcgaacaagaaagagcagactgcactgcgagctgtcatcaagtgtgtcgaggaccgtaatcttgaagccgagtttccactggaggatctccggaagcaactcgaagagctggagaaagccaagaccgagaagaagaaggcggcatcaagcgctaccagtggcggcagcagcagcggccctgcaaccaagcgcatccgcgcgagcaacggaggcccaatgcctcccgccaaggcaggtcgtctcgctaccaatgcctgcgcgtcttctttcccaggtcccgccacattcacccagtctccctcccacgcaccacacgccaatacctcctccccttcccatgcatcacacgccgccacagcctccccttcccacacatcctatgccacgccgcctccttacccggttggacttggacatggcctgta

SEQ ID NO: 3810 - DNA, 449 bp, Zea mays
agagatggctcatgtgagtatcagggtatataaggatcacacatggagcaaaagctgatgtgctggaaagtaatacggtgaccatgcgaaaccaatgaatgaagattttttgagttaggattctatttatcagttactactccattctcccaacaatgatgccatgagatgatgttaggtattggaggtactacacaagtcaccttcaaaactaaacaaaaacagggtttttaccaaatataatttcgagaagggtgcctggatgttggacgctgaagattctatcaacattataaactttgtatttgatataaagtacaggacaatgcctttgtgcaaggtttgggtataacagacttattttggaatgtaagaaagaataacaccccccccccccccaaccaccaccaccaccgccatgcttaatagcactggcatggtactgaatt

SEQ ID NO: 3811 - DNA, 498 bp, Zea mays
tgcgccggcgatccggcgaggccagcaataatgcagcggcgagcattattgccgggagatcgaccagtgattgtttgtggactcgtagtgggggagcgactcggctccatcgccccgcctttctttcttttttataaagcctgacaaccaaacatggcaggccgtgcccgtgcatgatctatctatctatccagctcccccagcatccatccctcttctctattttttccccccttcgagaattgatgcacgcaacatgccgtcggttcgtggtcggcaggcaggtacggcccagaaggggtactacgactacgagcgcggccatgttcgcgtttgcttgctcggcaatctctcctgtgtctcgcagtgtacaaccagcgttacgtcattcggttcgcgtctggtctgtcgtcttcgcccgactcggtcgcttgttcaggaacaagtcgtctgtggctctggatgatgcctgcgaggttgggacgacgccgtcattga

SEQ ID NO: 3812 - DNA, 379 bp, Zea mays
ggccgaggcttccgcctcgtcgtcctcaatatccacggcagcgcagagtcatgactcatgagtaaagggggaaaaaaacgtcttgcattgccgttggtgcggttgtggttcgtgcagtcaaaaattttatttgctaggaaccaggatgcatgcttagcataccaccatcgatcaatcgtgcgccattatagtactatagtagtactagaaattatacggctccttgagacaaatgttgtcatcagtcttgctctaaacatggttcgagcgcccgtcatggatggattcccctacgagcgcgggaatgtggaaagattcctcctcgagcgcgggaatagggaaagccaagtggtaggctccaaattctgttggtatgggt

SEQ ID NO: 3813 - DNA, 442 bp, Zea mays
cgccgagctcagcctcagccgccgcgacggggacagggaaagatggccgacggcagtgcctccgcctcgccgccttccgtttctccgcaccagtaccaccgcgacgccatcaagtcctcaggtgcaccctcgcgcttctctcctgtctcctcccgctggcgtcgcttcgtcatcgcgtcgaacactaagcgcgcgcggccgtggcagaagccctaacctgtgtactccctcctgagctggcgtggcggttctgttgctctcggaaccaggagcggtgagcgcgctaagtgctctactgcctactgctatagccttatttgggaataacttcgcctacaccggggttcgataactgtttgctcgagcagtcgagctgattagaatcgggactcatcttattagcaggtttaggtggtaagggacttggtttgagggggttatt

SEQ ID NO: 3814 - DNA, 888 bp, Zea mays
ccgacgcctcggctaacctctccagcctataaagcatcatcctatgagcctgtactttccttccccattgctactcgcgccttccccactctcgtgctgcctcgctctctgctcatttctgttctgctagcgccattctttgtcgcaccgtcgccggggtatccctgtgctgtgccgtgcatcgctcagcatgtccatcgtcgtttctccctcaccggtgccgagccctcgccgaagctccaccaccgtgctgccataattccctgctcacgcccttctctattgctattaccctgcattggctactcgcccatgtctgcaccacaccatgctgttacgctcgctaaacatcctgccggtacgtgccgtattgcccacgcggcatgccattgccgatgcagctcgctgtcgttgtgcttaagccatcaatgccttatttcgcttgttgcccagcccagctcaccctgcagcaaacccatttgaccacaatgatccatttgccatgtcaaacagctttgcaccaccatcaaatgtgcagttagctatgatggcagagcagcagcaatattaccatgcacagcagcagcagtattatcagatacagcagcagcaccagatggtgatgttgccgcctcaaacataccagcagcagtcgcagtattctgccccttctcaatctggattatccaatccttttggtgatccattcagtagcctcgtcacgatggctaatccaccaaagcaaagcaattcaaatttagtctgaattgcatttttttttgtgtctattgctcccactaattcagaccatacacaacattgacaattttgaggagcaacttgtacagttcagaaactttgaatactgtatcttaacgatgcgctgta

SEQ ID NO: 3815 - DNA, 404 bp, Zea mays
gggaagaagacaagagccgcatgcagaaaccatgcatcactgctctgctgctgcattattcaattcatagcagccaggtacatccgtacataccattgaagttccagctgacggggcgtccggtggcgacgtcctcgtagtagcgggcgaagacgaagttggaccagacgtggcagtcgaagccgtcgacgcggtcgcgccccaggtaagcggcgccgcgggccttccagtcgggcggcaggaggcccacggcgaactggaaggtgcggcaggacgcggagtcgaacaggaaggcggtgccgttgctccactccacgttccagctccagcgccgctcgccggacagctggtcgcggacgatgttcaggtcgcgccctcgcggccagtcgtagtacaggtcgatc

SEQ ID NO: 3816 - DNA, 384 bp, Zea mays
atagattcacagatgcacgatctcggtgacacaggaatatatatgacctgaatgagagagcaaataaagcggacaaatgggggcggtagacgccgaggtgcaggaaagcttgtttgtttgcatctgcgtatgtctctggcaagggagaaaagtggtcacgacgcatgtccttggagttggagagagagagagagagagagggagaggactggccatggcctggtacgtgctaggagtaggagagatggccaggccagccaccaggccgagcagggacctttcctccctcctcggttcggcagaagggggaatctgtgcaggatgggggccaggccagaccaggggcagcgcttgcatggtcagcaccacagtctactacgctgt

SEQ ID NO: 3817 - DNA, 431 bp, Zea mays
aaagatttaagataaaactgagtacaatggaatcaaaggagtctcatagcacagaagaccttctggagatcctttttccacaacgctacaatctcagggactttgctaggaagataagatctggccatcaatgctgcttccggaatacgattgctgtacaaagggtagtagacgagtcaaaaacaagaaacaaaaaaaaaggttaagcatgacaatcttggccagatgcctctacctttctattagcaattgaagacactcttccagctttcctagcatgaagaaacaaaggaaagaaacattgttctttccttgttctttggctacagatgccaatttgttaatgccttcggcatccccaagggaagaatacaaaagcaacaaaccactgaggtccattgcatgtagaagacactcctctgccatttcaa

SEQ ID NO: 3818 - DNA, 465 bp, Zea mays
gctcgagcgacaccgccagcgacacggtgctgggtcgagccgagcacgtgcctggtcgatgggcagcagctcgttgacacaaagaaacgtcaaagtcaaacccagcgtccggtacctccgttgcatcgccgccggcagacagcctgctccttggcagcgccccggaggagggcgctgatgagtgcgcgatcgggcgcgcgccgtcgtcccaccaggctggcgcagagggagcatttagaccgccggcatctgacgcgagcggggacgatgactcggaggccggagcccgccggaacactcgcgccgtggaaccgggacggaggggacgggcagcggcctatcggtgtcgacgcgggagaactggcggagcgagaaggggtcgacggccacgtccctcacccagtcaccctcgtatcttccggaaggcctcttcccacgtccctctgcatggctgagcgcgtacgc

SEQ ID NO: 3819 - DNA, 377 bp, Zea mays
agataataaacttcattgcaatgtgtccaaataataaacaacagtattggagagtataaaaaaagaaagggaaaaaaatggtccggccacacacaaaatgacgatatcaacgaaagatacgatcgatcccgcgcgctcgcagggcctagctagagcgctagcgcagccgcgaacacggcgcaagcgacggccacgaccgcgccgccgaccgtgtagccagtgacgggcgccgccgacggggccggggccggggcgacggcgacggcgacgtcgacggcgagcttcatgccgttgaggcagtggttgggcttgttgcagatgaaccacgccttgccgggcttgtccagctgcacgacgtcgttgccgccggtccagtt

SEQ ID NO: 3820 - DNA, 448 bp, Zea mays
ataactatcatgtgtgccagtacccagaatgtggccgaagatttacacaagaatcaaaactaagagctcatatcagggcacaacatgagaaagtaagatctgttaccatttaagggcttgttcagttagctctcaatccatgtggattgagtggtattgagtcggtttaaatctataataagtcaaaattcatctcaatccatgccaatacacttcgatccacatggaattggaataagcgaacaagccctaaggcttgttcgatttgctctcaatccatgtggattgggtgggattgagtgggttttaatcccaaataagtcaaaatctttgataattttttccaatctcatccaattcacatgggataggaataaccgaacaaagtcttactgggtatgaatttctgctcgtgagataattttgtaatgagacaaatataggctgt

SEQ ID NO: 3821 - DNA, 463 bp, Zea mays
agctgctactgccgcaacaggtgaccttgcgggctccacgacggctggttggggttggggctgctgctcctcctctgcttccagctcgaggggggacgacgtgcacgtgctatagcgctcgtccatttccatttccgtggggtcgggatggacggagaacatggagaaggagcggagccggtcgaggaccatggacgacgcgctgcggcagagcctccgcgtggacgccgccgcgcggccacggccagcttggtgcccgcgggacgtgaccacgatggcgccgatgagcacgttgacgaagaggaagaacgccgcgccggggctgatccaggacgacagcggccacccggacaagtactccgtcgccatattaattggtcggtgagcagcggctccgatcctggatgtgtagtctgctagcttagcttgtcgatcgctgagtttgtttcgcttagctagcgct

SEQ ID NO: 3822 - DNA, 401 bp, Zea mays
agtgcagatggagatcatcgtggaaactgagcaaatatgtgcacagcaaatttaacaactacacaagggctcattcttgcttctataccacaagtttcgtatggcatgcatacacacatgctgattcctccttttgcccaaatgctaatggcaaacaatgtgcaggatccactgagatgcagttagtcgtgcaatgaaataatgacatatataaatgaaaaacaatcatactgttcgcatatatgaatgaaaaacattctattcacatatataaatgaaaaacaaacctccattgcacgcatcgatacaccaattagagataatggataggctatgattttataacctatttcttccagttcaacagggctcagtataggagttttaccaccgccttctaa

SEQ ID NO: 3823 - DNA, 420 bp, Zea mays
tgtagtaacaaattcagccttccaatgcttaagctttgcagcccaatcagcccttaacaaacaaagaggtaaagtttcataagttaagaaagagaccgatcaatcattgttcttatatgtacgcatttaggtatgaaggaactgagacctgctcattgaagccacagctcgcagagcaggaccaatacccaaaagccttgcccagaatttctgcatggccgattggctagccttgagagattcttggacctgtttagctttggctttagcttttgcagtgcttaggccttccacagcctgatcacattcctctggggatgtctcttttttctttctattttgcttctgatccccactctgttcgtcatcaatatccaacttaggttgccctgcggttgcagttgatgatgcacgaactga

SEQ ID NO: 3824 - DNA, 420 bp, Zea mays
tcaagctcaactccaattgcagtgaaaaggctagatgggtttcaacatggggacaagcagttccgtgccgaggtgtccactgtcggaatgatcaatcatgtgatgaacttggtacgccttcttggcttctgtgctgaaaagaccagcaggctccttgactacgaaagtgataccggttccttgtttccatgttgggcagcaatccaacaagtttattcctggattctattggagggaacagaacaaccaagttcacagtttaacttcataccataaacaacaaaggattttggaaaaccctcgacaactaatatgagctttgtgagaagaaagcagctaaccattaaggaacaagatgcagctataatttagatatttaaaactaaacaactgtgaagatcaattgccctacagaacact

SEQ ID NO: 3825 - DNA, 436 bp, Zea mays
tgcgcgcccagcgggcgggcgccgtacctgagcgcgctcgccgtggtgggcgactgggcgccaagaaggtgggcaagacgacgctggtgaagcacgcgtgcgacgacgagcgcgtgcgcggccacttcgtgcgcatcgagtggttcgagacgtccgacgtggtgcgggcggggggcctgccggggcagtacctgtgggagagcggcgggccggagtacctcgccggcgtgcgccacatcctcggcgagccgcggttcgcgaacgcggcggggtcgtcgctgctcgtgttcgaggacgcctggcccatggacgagtcggcgtgggccgcgctggcgtcgtccccgaccccgctcggcgacgggagcaagctcctgctcacgtgccgcgacgccgacctcgcccggctcggcacggcggaccccgtggtgctgcacaa

SEQ ID NO: 3826 - DNA, 449 bp, Zea mays
tcttcctttgggtttgtggactactatgatcgaagatctgctgctctagcaatcatgacccttcatggccgtcacgtgtaagttcagctgttataatactttgaacaacatgaatttaagagattaaattctggtgttctttattatcaaaattcttaaacagatatggacaagcaatcaaggtgaactgggcatatgcaagtacgcagagggaggatacgtcaggtgagatatttttttaaaaaatatattcttgttgtctctttcttttcatattataatccttgtttggttaaccgtgccaattgaattatttccagggcatttccatatttttgttggtgatttaagttctgaagtgaatgatgcaactctttatgcctgtttctcagcatatccttcttgttcgtaagtactttttgtatcatgatggcatctatgacgagctt

SEQ ID NO: 3827 - DNA, 459 bp, Zea mays
cgtcggtgttttcagccccagctagcgtgctcgtcctcaccggcgaggtgccactagacactagtcggactcagatcttgtacgtcatgcccacctcgatgagggaggtgttggggatgccgagctccacggcgggccgccgcgagttgcgccggaggaacccgtacaccacgttgatggcgaacttcttcacggcgggcgacgactcgtgggcctgcacgcacgtgtgcccgatcatgtacgacacgccggactccagctcctccagcagcgtcttcacctcctcctcgctgccggcggcggccccgctcggctcctcgaaccggaccctcctgccggcgtcgatctcgctgcacgacggcggcgccgagcccgcgtccacgtgcgccgggatcaccgacagctccccggacccggacacgcatcctcccgccttggcggcggcggcggcgtcctgca

SEQ ID NO: 3828 - DNA, 419 bp, Zea mays
gctggtgcgcggccacaacgtccgcaagcaagccaacatgacgctgcgctgcatgcaggcgctggtgcgcgtgcaggcccgtgtccgcgaccagcgcatgcgcctctcccaggaatccgtgctctccatgtccggcggcggcggcggcgccggcgccgcgccgtgcggcagcagtaagtcgtcgtacagcgtcgacacgtccgccttttgggaccccaagtacgcccacgactacgccgaccgtcgctccgttgtaagctgctagcgacagtaacagaacttcgtgcctgctgtttcgcgtgcaaaaaatgtcagcaatgtgggtcggttttggttgcaggagcggtcgcgcgacggcagcagcttcgccgccgacgactgggacgaccggccgcggacgatagaggagatccaggcta

SEQ ID NO: 3829 - DNA, 369 bp, Zea mays
gcggacacgcccggcccgacaagccagccactcttctcgtgtaaagctgccaggacgagaagagagagagggagtgagacacacacacacacagaaagcggaggagactaacgaggcgtgcatgaggaagggggcagtggccgtgatggggagggaggccgcggccgcggtggcggcggagctggaggactcgttggggaacgctgctgctgccgcggcggcggcgcccgtgctgagcccgctgagcgagacgctgtggcgcgacagggcggcggcgggcggggtcctcctcggggacgtgtcggcgcggctggcgtggcgggacctcaccgtgaccgtggtgctcggcaccggcgacacgcaggccgt

SEQ ID NO: 3830 - DNA, 420 bp, Zea mays
agaacactcctccgctccgtagcagtagcttgtaggagctacacatgcaatccaaattcaaacacggattcaggattctgacccaaaactgggaaaacacctcgtcacctgccgctaccaggccctcgaggaatcccccgcacgccgccttctccacgcgctcgccacactcgcctccacggtctgcgcgcgcgcaccccggacctcggcctaggccgccgcggcctgtgggatcgctgcctccgacctcctggtggccactgcgctcatcgggaggcatgccgaggccggggacatgggcgacgcgtgcagggtgttcgacggaatgccgcaccgggacgccgtggcgtgggacgccgttattggtgggtatgcgcgggcggggcgcctggccgaggctgtggagctgtttggcatgat

SEQ ID NO: 3831 - DNA, 472 bp, Zea mays
cacggcgacgatgggctcgatggcgctgtagagttgagggcgagctcgatgggaaaaaggactcagctggggctagcatggaggcgagaactccatgaagtccagggcacgtacaagctctagcgaacgaagcagaggggcacggatcggtgtgacggtggcaatggacgagcgcagggagatgggcgcgcgccggcacggaagttccacagcgaggtcgcgactaccgggcgagcttgaggggcgcgccatgggagatggagcagagacaggtggtccgagctgggaggcagcgacgctgggaacggcgggcgaccagggcgagatccgagctgggtgccatggggatgagcttgatgggctggtagttgtgcaccggccaggagatccgcaccaggagccgagcgccagaggagcagaggtgggggcggccgaggacgcaacgacaagaaaactccggcggccattgagg

SEQ ID NO: 3832 - DNA, 379 bp, Zea mays
atccttcctgtgccttctgacatacacgtctgcatacatggatatgatcaccgtcatcttcgtagcaatgctcttctctggggacttcgtatcagtctgctgtgcagttgggttcttcacccctttggactttgtgctgcctgcaatggcacttatcaagacaagaacgatgactgataacctagggttgcagtgtgctgtgaagatgctccgctctgctgtcgcaatcttcttcttggtcataggtgcccttgcatgcatcggcgtcaaaacctgcaagttcttccatgatatgtgatgtgatgaactgatgatggttttgcagcaccaagttaccttgtgcgacatagcaacaaagtgtaccgatgcaacctcttgc

SEQ ID NO: 3833 - DNA, 408 bp, Zea mays
tctgtaataaaatggtagccatccatggctccagcgacgaagcctcactctcagagtcggcgtccgagcgctggacgctgtccttggccgccgctgtcgttgtcgtcgtcgtcgtccctttattcgtcgaaaagctgttcgtgtccgaatcggagctcgagacgcaggacgctccgacgtcggtggtactagtgtcgaagggcgcttcttctgactctgggctgctgctaggtgtcgctgacgatggcactcggctcggactcggactcgtgctcggctcaggtggcggtggcgatggcgccggaggaggaggtggtctggacgactcttccctctcatgcgaatgcgatcccaccaggttcagccgaagaactttgggttgggagcgcttcatagccacgatgttgc

SEQ ID NO: 3834 - DNA, 455 bp, Zea mays
aaccacgccggcgacgagggcgacgacgacgacggccgcgaggaccgggaccgccggcgacgagcgccgccgccgcggctgcctcgggcctcccctcctcccgacctccgccgcagcgccagggtcggtggcgccgttggagttcgggatcctcgggtcgtcgtccgccccggcggcccccgcgcactggaccttgagcgggaagccgcacaggcgcgggttgccgtcgaacgcggtggggccctggttgacgagcgagccgacctgcgggatctccccctccaggtcgttcccgcggaggtcgaggctgacggcgacggggatggcgccgagctcgggcgggacggcgcccgtgaagtggttgtagctgaggttgagcacgccggccaggcgcgggagcgcggccagcgcggcggggatcgtgccgttgagctggttggaggagaggtcgaggc

SEQ ID NO: 3835 - DNA, 421 bp, Zea mays
tataccatagccgcaaatcgccgatcatacagaccgacgggatccggagagaactagattctgaaaattcggaacacagcaagctcagaaacttggtgtcgcgtcttaaaacctcccatgttcatggcaacagattattgccacgactttcgtgaacaaacaacagattatggcaaggccatcacagcattgtttcagccgtgcgacgagtattacacttctccttttctgcactcggcattttgtattgagcgtagacatggatccattacggcgacagcagaaggctaaaacctactacaacagtcaacgtgcgatgacccaggcttccgtcgtgccgtcatgagctacgcgcttccttccacctgcaagcagcagctgctgctgcccgagctgctgacgaggcaggggaggtcgcgca

SEQ ID NO: 3836 - DNA, 367 bp, Zea mays
agtagatctggattgaagtcattgacccactgctgcggtgctgtgttgtgctgtgctgtgctgctgctgctggctgccaaaatgggctgttgttttgcttcttcctctcactgtcctggactcctgctgctccagcagaccagcaccgagtgaaaaccgttggtcggatcgacacaacagccagccagttgggccacaacatccctttcatccgtaataatttttaagcccatctcaaaatgtgggctaatggtaacctggaccccattgcaatagtgttggacgcccgttggagccgacaggcccgtccaaacccaactacggctccgtagcgcgtccccgatcatgtcatggatgttcgagtgga

SEQ ID NO: 3837 - DNA, 482 bp, Zea mays
tgatctggtctgatgtgcaaacgactacgagtaaagtcgccgtgcagtggtaaatgcggtagctagggacgatggcatggcagcagcccgtgtgcaaccggcactggattaacacgcctctgtccttcatcaatgttatggctctgtgctcttaatcgaggtaggcaacaatacagtatgtacgctatgcaatatgtttttttctttccgaaacctgcaatgcgatcacaactgtcgcagcacaaacgctatatatcccgccacgcgccatgaaagcagttcttggttctccgaacctgccatggatgagcccatgcatgcatcgtcgatccgctcggcgcccccgcccatgaccatgagagagggcagcgcagcagccccgacggctccgatctcaacaggaaattaaaggatgggctgagaaaccggtggcagaacatcagcagtccttattcagttgctcgatcctccgagtgatggct

SEQ ID NO: 3838 - DNA, 451 bp, Zea mays
tgctgagcgaattgaggtgcggagtaacattttgcctgacagataacacaaccccattcagagggcggttgctggtccttggcaatttctggtggaaaatctcctgttttcttggcttcttcaagtaggtcctggacattcagttggtgtatcttcgctccaaattggtgctccaagtctaatttgcaatcagaatcagcttgaagtatgctacaatttgatcctggagtctgctctgtatgttgtggcgcaatgttcggaagcactgtggcttctcgcgactcagaattccttgacaggttactgatttcgtccagtagagcttgaggcttagctaaaaggtgccctcgtaactccaattcatgagtagagttcgctaggcaatgggtagaactcatcggaggtggcttctctgaatgttgtggtgcattgttcttagggcactctggtt

SEQ ID NO: 3839 - DNA, 561 bp, Zea mays
gaccaggtgccgttcaaagtgcgcgccaagcgcgggtgcgccacgcaccccaggagcatcgccgagagggtgcgtgcgttcgttcgttcgtatatgcatgcccaaacacgaactcattatcgtcatgttttcgcagccgcaagcaggagcgagttatgttgttcaccggtcgtttagttacatatatatatggtggtgcaggagaggaggacgaggatcagcgagaagctcaggaagctccaggacctcgtgcccaacatggacaaggtataactactacacgtgagtagttcatctatgagactatggcgtcgcaatttgcaaaggttttcttgcgcgtaatgcatagattaattctaagagatcgaggcggcgtcgtcagaccactcagatgatacatatatagaatgatgatcactgtgcaaagcagcagttctagtttgtgcatctagctaatacctgcaggacgaactacggcgacaaggagaccaagtgccaagcggcgctgacgaggcagagctggtgtggaagctgcggaagtacttgatgctgctagcaatc

SEQ ID NO: 3840 - DNA, 390 bp, Zea mays
gagggcttctcgtcgtggttcccgacggccaaccccaaccccaacgtccacgtcggcgccatcgtcggcgggcccgacgggaacgaccagttcggcgacaacagggaggactccacgcactccgagccggcaacgtacatcaacgcggcatttgtgggcgcctgcgctgctgcactggggcgcagccagcaggtgcctgtggacgaaacagcctcagcccacagtgatgttatgtaactagctacaacggaggagtatgcaagggcgggcaaccaaaccatgatatcgctttgtgtaacatcccaaggcccctaccccccactaccactcttgatcatcctgataagaagagataaataaataaataaataaataaatacaatggcaaat

SEQ ID NO: 3841 - DNA, 828 bp, Zea mays
gttccctgcagtataaattcgactcccaacccttttttttagaataaaattgttgataaaactccaacatagtttgttccaaatccactataatccttgtagaatagtcaagtaccccatttccaaggggtacctgttgaaaatcgtttcaacaaatccgtccaaaactttttaagaaaaatgaaaaagttttgaactcgaaagtttttccaaaagatgcctgctaaaaattgtttcaatctctcaccaaaacagataagaagtatatcactgaaaattactatccagccataggggtatatgaagagcgcaaattcctttataccccacccaattagaattaggggaaataaaacataaatggagaaagttctcatcataagatcagccaatagaagaaaaaagtccctaattctgcagtggtgagagagagagaaaacagcaaccaagtgtagcgttacagttacacctgctgtgttgttgctctttgcaaaactactgtctagactccgcctggtaattagtgtactgatagcgaggtaaaaaaagttagattatttgttagcgacacacatcctttcaccttctcttctctccctcgattcctatcccttttctcttcatccttgagagaacaggtggatgtaaattgttcagaacatgttttcccttatagtccatcatatcccgcttttttcgtgttgatatgaagggtggcagcatcaccgctcgagataatgtttgcggggcgcatgatttgaccagttccgatcaaagctattggtgatgtattgtagcagcacgttgctctcaacgaggtaagcactg

SEQ ID NO: 3842 - DNA, 319 bp, Zea mays
ctgctgatacgcaagtcaccactactactactgacgacgacgacgaccggggattcaattcgttcgtacgacgtacgaggatgtttctggcttgacccgaaacgcgttcgtttttaatattccaggcggagacgtaatcgccacagccgtcccctagcacaccggcctgctggagagccggagtcctagcgacacgacacgacacgaccgcgcggcgatgcaatgcaatgcaaccggcaggatcggagtacgtccgtccaaaccgaccatcggcaaagatgacaacgaatgctataatacctgaaccttccatatgcat

SEQ ID NO: 3843 - DNA, 446 bp, Zea mays
cccagggcgtcctccggcccggcgacgaccggctccgccaccaccgccatcccaggcccagctgccatgccggggtatctcctcagggcggccgccgggctcacgtggacgaccctccgcccgctgtactggtcgtcggtcccgtagggcgccgaggcgccgccggcggcggagggcgccgcggcgtacgagaacacggcgggcgaggcggccgtcacggtggctggcgtggcggcgcgcgacgggaacacgcagttgtgggagacgtggaactgctggcccccggccgcggcggcgcgcggggagaagtagacccagctcgtgggcgccgcgtctccgccgccgccgaagaggtgcggcggaggcacgaaggcggacaccatcgggttggcgcgcgggtagagcgccgccccgcccgcggcgacccggccggcggccgcggccgc

SEQ ID NO: 3844 - DNA, 396 bp, Zea mays
atgcaaaggcaacaatgcaatgcatgcgctcccatacacagttacactgctgcacagtgcgagctgagacctccctcccaggcatttgcctgccacagacaagcaatcccaacctcaggcgaccaaatttgaacgcctgggatccctccaaaccaaacagttcctgcatgcatgggccggaaccgaacgagcgagaagctgaagctctgcaatgcatccatgcatgcatgccgtctgggtcgctcgaggctattagctgtacatatacatatagtgcgtcttgtctcatctcaagatcagtcagactcatgtacaggaagggtcgaagggagctcatgctcacgtacagaagttcatgctctctgtctgtctctctgtctatgtttccttgcccgt

SEQ ID NO: 3845 - DNA, 389 bp, Zea mays
agcgcgccctgctcgaaccctggaactaagctgtgcttgagttctgtcttggccaattattaagcagacggttcatttgtaatttgctgagcggagctacatgaccagtcctagctacgtaccgaggagcgaagcatggtccagcaggtgcatgaaggcgccgtagtagtccgcgtacacgacggtgacgtcggtgttggccttcctcagcccgtcgatggccgcctggagctgctcgttgtggtgctgggcgaaggcgttgtagctcctgaggcagccccggtcgtcgaggtcgccggaggcggcgaagagggagaggtagctcggggagcacccgatcgggaagtttcccgggatcacgatctgggtcgcgcctagctcgatcactt

SEQ ID NO: 3846 - DNA, 417 bp, Zea mays
tcttgcatgcctgcaggagggggccgccagcgcggcatcgtacgcgcggcgagctccgtggcagggggcggcgcggcccgcggccacggtgaggtcggtggagacgctggtggtgatcgtggccgcgatcgtgctcgccgccgtgctggcgggcgtcctcgcgcgggtctgtggcgggcggcacgtcgtgccgagcgcccagtaccacgacgaggaaggctgggtggagaggcgctgccggagctgcctcgacagcgggctgccgccgccggagcagggggcgtccaagacgagcgaggccaaatagcgtcattgtgcattgtggtagtactaccctagtagcctgctctgcgtactagtactgtgctgtgctgctgtactattatagtaatactactagcgtttgtctaggcaatt

SEQ ID NO: 3847 - DNA, 401 bp, Zea mays
aggatccggccaggcactggctacaccgctttgattggggtcctggggctcgaaggaataccaccaaacctgttgaccaggaccttgaaacaagggaacgaaacggcgtacagcacgaccagtacaattggtgcagcaataagccaacccagcatctgttgtcgacaatagcagtagtcttatgtcaatgtcccagcaaagcaagagtagaacagagctcctatcatatgaatgagcaggactgatttgtggaaaggatgttcactcaccgcatggacgatgctcattagcacatcctttgaggcatgaccggtgagaacattcttcaatgcgtcggctgtcaaggggaagtgcccgctgccagtgacggcttcacccaaacgcaagaaagggacgatcaa

SEQ ID NO: 3848 - DNA, 424 bp, Zea mays
gacaaaccatcagcaagcagcaaagacccgaaaggagacaaaccaaaccgtggtgcagctgaaggtggagatgatccgaagaaaaggccgcgtgatcaagccggtaaaaatacgtcagatgcctcaaactcgacatataagaaggtacccccacttgtttgatccacagcagtttttctttctgtaggcgtcaccaaattttcaactttgacacgtgtttctttctttctttctatgtgtcatgtatgtaggttgaaatgttcgtgaaagagcagatcaggccactttgcaagagtgccgtgatcacggtcgatcaatataagtgggctgtcgcgaaaacaactgacaaggtaatgagcttccaccgcgacgccaaaaatgcaaactttttgatcaaggagggtgacaaggtgaggaagctcgc

SEQ ID NO: 3849 - DNA, 415 bp, Zea mays
aaggcaattaggacactatacatatatgccactatggctatacgtttgatcccaataatactcatgactctcatgagctctttcttagttaatgaaggctgatgaacgtcgattggttgttgttgattgcactgcattgcaggtcgagggaaccagcaggtacgactgcttcgagcctgggacggtcggccggatggagctcctcgtcctgatggcgctcaactggcggctccgctcggttactcccttcaccttcgtcgacttcttcgcgtgcaaggtcgacccaggagggaggcacaccaggtgtctcattgcccgggccacgcaagtcattctggctgcgatgcatggtaatatataataatgcactgcttgtgcttggggctgggggccgccggggtaaacttggtgctgc

SEQ ID NO: 3850 - DNA, 365 bp, Zea mays
atcctccataccgcacacgacagccttcatctggctcggcagcgacgggcagccggtggtgaacttggtgttcttcgaggagaagaagttcaccgtcaggttcagactgacgacacaacatcacacacaatccacatcagtataacaagactatcatgaacgaatagccaagaaatgcagagaaaggaacggagatcgaaggaggggagaggcaaagggggcggcttttgcttacctttcccatgaggggaggttgagcatggtgtacgcaagcttgaccttgttgccgatgccgccgagcgacttgaactcggcggcggccttgcgcacggcgagggactccgtcgggtgctgccacgcccact

SEQ ID NO: 3851 - DNA, 411 bp, Zea mays
tcggccgcacgcctaacatccctggtgcgcctcctgcgcgtataggagagaccccacatgacatctctccccccctcgactcgcagctcgtcctcgagctgaaacgacgggtgcctggcgatgaagtcgtcccagtcttcccaagtagcagcagaagccggctgtcccttccagcgtaccaacacctccttgatacctcgagctatgcgggaacgcaccactcgttcgggttcgggcaccaccgccccatgcagcaactcgggcagctccggggtagaggttggtggtgcgcccacccatttcttcaagagccccacatggaacacatcatgaatcttggcctttggtggaagagctaggcgaaccgcgacgtcattgatgatttccgtgatgcaatagggcccaaagaag

SEQ ID NO: 3852 - DNA, 357 bp, Zea mays
gctgtcacagctgatgaattcggatgccttttgttcataaaaggcccgtccgcccgttactggcccaactagtgcgaagtaaccctaacaaaacaggcaccgatccggctctcctccgtgactccgtcccactgcccagccgctgtgcgttcgcgctctctcccacactgtctgcgacgactgcgtgggtgggtgggtgggctaccgccgccgcccgtcgccaggtgccgatctcttcacacccttgaccctcctctcgcgtctgccgtgcgagaacgtaccgccacgacgaacgatggggaggccgagcagggggcggcagcgcatcgagatccgtcgcatcgaagaaggcggccg

SEQ ID NO: 3853 - DNA, 398 bp, Zea mays
atccccagctagcagcagatcagctcaatctttcccgtttgcacgacagaaccgagcaggaaaagatggcctcccttggctcgtagcacgagaagctcaaagaccagccagcgaggcaagctaggagtgtgagcgaaccgccccccaaaggtccaatctttgcaaggtctggatggagctcagccgctaattcgggagggaaagccagcaaggtcggtatagccacagagccaagaaagcagcgtgcaagaagaagcaacctgtattgtagactaccccgggggtacctcaaaagtcaatcgaaatctcgacgcccaaacccggtcagcttctctctcgagctgaccaaccgcgcccccctagcaagaatccaagctgctgcccttttttttcccttc

SEQ ID NO: 3854 - DNA, 888 bp, Zea mays
taattcgggtacaaaactcatgtgagataacaggaaaggtgtcaccattccgtctagtccttcgaactttcgaagtgaaaacgttcgagtcacccgcctcccaaaatcgcctccatctcccctcagaaccgagccattagcaattttgctattagcatttatagacttcgccaggattgctattaggaccataaatcatagacacagatatcaatataacaacagacagtggcaaaatcataaatttctcctcggcaattttgctattagtatttgtgagcttcgtcattaggaccacaaatcatagacacaaatatctcaccagtcacatacacaggatgagacaaccaaaattgacagccgcaaaatcacaaatttctcctcagagtcccctgctcctccctcccaaatcctccgggaacaaaccattcgtgcggctccgattcacccctgcaactgcaggtcgacgtctgatccatttcttgtcgcttcagcttctggtgctggtcttcttccagttgcatcctggttacctggtgagggtcttcctcgaccgactcgattcgaaggatcgttcttggttcttgacgcctcactctctctggatttgctcttgcagtgtcaaggggcggttggtgtctggtgtagttggagggcagagcttcgcgggcggcgaagaagaagagcagcagagagactctgccgacactgaccgagcgaggtatgttacctgcgtgtgtttactcaacgtcacttgctaaccggacagaagaaagaaaaaaccatactggaatctcttagcacttgctgattggcgattgctctatgcttctaacgtacctcatgttccttaccccgaaatcagatatggcgaggaagctgagagag

SEQ ID NO: 3855 - DNA, 780 bp, Zea mays
cctctgtataaattcgactcccaacccttttttttagaataaaattgttgataaaactccaacatagtttgttccaaatccactataatccttgtagaatagtcaagtaccccatttccaaggggtacctgttgaaaatcgtttcaacaaatccgtccaaaactttttaagaaaaatgaaaaagttttgaactcgaaagtttttccaaaagatgcctgctaaaaattgtttcaatctctcaccaaaacagataagaagtatatcactgaaaattactatccagccataggggtatatgaagagcgcaaattcctttataccccacccaattagaattaggggaaataaaacataaatggagaaagttctcatcataagatcagccaatagaagaaaaaagtccctaattctgcaggaggacctcaagaacgcgagggaccacctggcctccctcgagaatgacagggctcagatcctcgaggagctggccgtcgccaagtgcctcgccgctgacgtcaacggcaagctggaggactcgctggtcgcgcagcggcgggccgaagaggcgctggagctggagaggttcaagtccacggagcgcgagcaggctgccatcgacctggcgcagaggacggaagacgagtggcagaggaagtacgacagcgtcaggacgcgccacgccgaggacgtcgcctccctcgtcgccacgaccagggagctcgaggccgtcagagacgagctggccgccaccacgcaggccaaagaatcggctctaaacca

SEQ ID NO: 3856 - DNA, 466 bp, Zea mays
  unsure (1)..(466): unsure at all n locations
ctgcattaagcttgtgcactgcgggtctgcggctactgttatttgcacctttcntttttgcaacggcaattcaatccatacgatttcttacgttgttcataaatcgctctcagattacaaaacagggatatcaagtacaattcaaaggaaaaagaattccagcgcagggacagggaagctggaagacggagcacgacactattgctggccctgtcggcgacgtacaggtgcggagaattgcatttccatccagcggctctcaactctactaggagaaaataacaaattttggtactgcaagcgctacaaaaattaagtacctttattttatcaaaatgattcctggccagcttcattgcatcggccgttccatttgacctcattattttgtacgagcgatcggttgaatccgaagaaaaaaaaagcgaattgcatgtgtgtatgctggcgtgtacttcccgcagat

SEQ ID NO: 3857 - DNA, 444 bp, Zea mays
atattgtgttatcaagcccacttatgtacaactcatgagtaggattcacataccgaagcaaaccaatattgctggtagattcgccatcatcagcatggacctcaaagtacggcaaggtaaaatacctgtatcgggggagcgtagactgatctagatgaggacagcaggtaacatttaacatcttcatgctatccatgttgaacatacattttggaagcgtcactaggtttcggcagcacaagagatccagggtgtgcagcttcctgaggctgccaatactttcaggcacactgacaagacccaaattgaaagacaaatccaagtgcaccagatttgtaagcctacaaatacggtcaacaaaacttaatacctcatctggcctcagattttcaaagcaccctgatagatttaaataccgaagttcggtgagaccaccaacggctt

SEQ ID NO: 3858 - DNA, 447 bp, Zea mays
cgcccaagaacgcgaggaggaggaggaggaggctgtgcacgcgatgcagcagccagtggatgggaccgaggaggaggaggagttacagcagggcgggggcgtgggcgtgggcggggctagtctgtacctggaggcggcggacgatctgtggtggggaaagaggaaagcggctgacgacaatggcgaacagcaggccggcgcgaggacgatgcagcagcagctcagcaacggcgcgcgagagaagcgtgcgctggaacaacagcgcacggtcgcgctggcgctggaccaagccagggctgccaacgaggcgaggagcctcgagataaggaggagagaagtggagctcaggaccaaggaggtggatctgaaggtgatgctggaagaggagaggatcatggccaaggacaccagcgccatgtccgggatacagcagcagtactacaggat

SEQ ID NO: 3859 - DNA, 387 bp, Zea mays
atgaaaatactctgctcagtttcacatggactatttttaggatggcgtggctgtggtgtgactgtctttggagttttcggaccaatcaccgaagcaggtgcaccaggttcttcataagcagtttctgtttcagaaatttccatactcttatttggcaactgacagaatattttagatactacaagttccccgtccttttcgtcttcctcttctccaagatgatactgatgcattacccaattagctctatcaggctttctgcctctttgcgaaattttgtacagcaccattattttcttccaaccttttataacaccattttcatatatggctttggatctccctgtcttgtgccatctcacatgctcatcagaaacagtgtgatca

SEQ ID NO: 3860 - DNA, 342 bp, Zea mays
ccgtcactcatgcgcgcgccggcggcacagcggtccgcgccgccacggccctccttctccgccccgtggtcgctgcggctgccggcgcctgcgcggcgccgggtggccactgccgcgcggatcaccatgcgggtcgcgtccaagcaggcctacatctgccgtgactgcgggtgggtgagccacagccacccaagcggccgggggggggcagctctttatttcgcccgcgcgcgccgggcggctgcgctagctttagcttgccgtgctgtggcctgccctgctcggatgcatgctgccgtgcccgtgctcgtgcctgatttgttgcctctgtctgtgtttctt

SEQ ID NO: 3861 - DNA, 419 bp, Zea mays
actacagcaaaactgagtgatgcagcgacctcatccatcaaaaagcaatccattcgtcacaaagtttcattcatggatataataagagactactaaactaaccatcaaaccacataaagtatacatactaaacttttcaatagcaatcttacaaatcagcaatgtggcacagtggcagtttcctcaccaggtgaagacgtcaccggaagtggtcagcgcggcggagtggatgccgccaagcgcaaggaggcggagatcgcggagattggggttagagcggggcacgaaggcggaagactcgtcaccgaggccgaggcggcctccgtcgcccttgccccacacccaggcgcctccttcgacgaggagcgaggagtggaagagcccacaagagatcccaacctccactccagacgtctcct

SEQ ID NO: 3862 - DNA, 424 bp, Zea mays
tgcaggcgcgccacgtccttggaccagctcgccgcgcgcccgcaaggcagcttgaccgcgacgacgtcgtacgcctcctcctcctcctccttcgccaccttaggctccggcaggtccgggcacgccggcgcgccgtagtgctcctcctcgtcgatccactccgggtacaggtggtcccaggtgacgtcgctcccgacgtggtccaggcgcaccgtggaggcgtccgtgtgcggcatccgcgccttccactcctggacctcgccgtcgtcgaagttgagcagcgccacacgcgtggcgccgccgcccgccggcggagcgacctgcttcgccgctgtctggacctgcgaccagtcgatcctcaggctcgacgcgtacccggagttcgccgcgtcggggtgcgacgtccagctcgcattccacgcct

SEQ ID NO: 3863 - DNA, 390 bp, Zea mays
ctagtctatctaccaaatcccagataagcaaatagtctgaaatgacctgaaccgttagcactcctttgatatcatccacccatctcctgttattgagagcctgactcacttaatgccgctttactatctttgtggggatcgccctgaagagagcaggagcccattcagctatagtcctgccatggagccagcggtcagcccaaaatttcgtggaggtctcatcccccacaattgtgacaactggagcatcgaacagagcacaagcctttcgcatagcgcccagtccaaccgttctagatcatgaacaccaaggcttccatactgaagtggtctctgaacttttgcccaggatactaggcagcttccaccttgcgcctgctctttcccttt

SEQ ID NO: 3864 - DNA, 437 bp, Zea mays
tagcatgttttccgaaggaccatggggagtaaagaggaatccagctttcagcttctgatagtcacgcagagaatatttgcattcagacagtgcggcccgttgcttgttgtactccggtagcgagatctgacactgcatatttacttcaataattgaatccagggaagcatcaactgtgcctaggttactatactgaagcctatgctgctgatcatgctgcttgcaacacaatggatctgggcgaaaccattgagtgctaaacctaaggagattgtcccagtgttttctgtgccatagatcaacatatggcacccacgaaaagtcctgtgtagtcagctgagtaagttctttcttgatagtatcaactgtgggctgaaaatggtgggggaacaactgcaagcacttaactgcggtcccaactatgtctgtactttctg

SEQ ID NO: 3865 - DNA, 471 bp, Zea mays
ccaaggcagcaggttggataaaggcgtgctatagtcctctcctacacgcacgcgtgcgcgcatgtgcagcagaggcgagacggatcagcggcacaggcaggagcccggggaatgaggcgcaggccgaccaactagctggcgccgacgtgcgcgctcggtgctcgcgcgtcggggcgctcgagcgcggcgactgtgggcagtgagcacagtgggcagcagggcgcgcatgcatgtgacccgcgccgcgccacggccggccagatcgtgcgcacgcgcactggttcaccacgtgatcgagccggccggcgacgctccggcctccgattcccgcagcgggccgggggtggcatgccgtgccaccatgtgcccccatgcgtggagctgcgccgtggcgtgggcgtgggcgtggctcgccgtcaccgttgccgatgtccgcggcgtgggcgcgcacatggcgccacgcgcgtgcga

SEQ ID NO: 3866 - DNA, 421 bp, Zea mays
tcggaaccgagaagtacgtcaagagtggcgctctgaaggagaacgttccagaccttgagatttcgatcatcgaggggcaccatttcgtccagcaggaagaggccgggacagtgaattcggaaatactctccttccttggcaagtttcccagcgagggaggatcagcgtgattgttatttattgtttgcagccagtcccggactcctgagaggaagatggcctccgaatgatccgagggtttatgattgaataaagtgagagctcagatcgatagccgtctgttggcttgcattaaaaaaaataaagagcttgcatgtaaaactatttatgaacgaataaacttctgtcatatactcgcaagtctcaacattgtttacatgccagccaacgaacaactaagcagaagtgcagaacacatcat

SEQ ID NO: 3867 - DNA, 396 bp, Zea mays
agcggctccctttgatgtctaacaaccaacgtaacaggggaaagaaatatgaacgtcaatccagcaaattcaacatatcatgtacagataacttaacattattcccaccactaattatcaacagatataccagtgaaacaatgtcactactactgagtgaaaacagatgattcacatgcaaacactaattacttcaaatctacaagccttcccaagccacatactgactaaaggcaccagttcaaccgacgaatcgagactaattaaggttcagagatgttaacctgaccaaaatcggcgactttgagcaccccgtcttcggagatgagcaggttctcaggcttcaggtcacggtgcacgacgccggcgcggtggcacgcggcgaccccctcaagc

SEQ ID NO: 3868 - DNA, 799 bp, Zea mays
gagaaccagcatacctataaattaagtaactggtatgaattaaatagttccttatgaagaacacagtttaatagtaacaatatattagacaatatgacaaccaatttccatgaattagaagttgaagaaaaaatacatacatagtgactaataagcaagctccaatctgcataactattactccttcaccttctggttttgtgctgttaatgcagcgggcgcaaaaccagttttcatggattgaggtgaccaaatctacaaatcataactttctgtcacaaattgcttgtcacaacaatgacagtcaatttgataagtcatataaacaaaagtaaattcagcatgtggatcactcacgttggttcagcccaacagagaacaattcagtctgcagacacaccgccgcggcaagcgtttggtttcgcgcgcatggcccgccgccggcgcatgcgccatcttacacgtcctccattccttggctggtgacatcctagctaccagactttggaggcatgcatggcgacttggcaaggcaataacgactcccaaattaaacaaggattattttggaaaaatttctcgatgcaaagcatggggcagcgtcttgatgcaacgtacaggccacaaccagaatgcacgaaccagctaccggtcacatcaacgacgctgaacactcaacactcaacactactgcactgtctcgtcaatatcaataatgcatgtatggacattgtacccgtctttgtagaaagaaacatcgtactggtaccataccatgcaagcaccgcatgaaacctaa

SEQ ID NO: 3869 - DNA, 448 bp, Zea mays
aggtctgcatgcctctgataaatgctatcgtgactgagatcaagaatgggacttaccctcaaggatcattcttgaatgtagatgtacctacagatgctgcacaccccaaggtaaatctcctacagtgatctgaattatactttgggactacaaatttaaaacttgtatagtggaagcaaatctaagcacattcaggaactatggaacatggtccagtacctgtcgaagtccaagattttgatatttctgctgagttgcactcattttgttcaatgttaatgcattctgcctctagaaaatctttaaaatacatatgcctgtttttttttgtttatgaacagattggccatctaaatatttttttaatttgtcgtcaatagggctacaaaattacaaaacaaggaacatatatggccagaattagttgggagcagacggtttacaagaa

SEQ ID NO: 3870 - DNA, 368 bp, Zea mays
agcaccgctcgcagtctatccatatccatggagcagcacacacacacccaggctgtcgctgggtggataccggatacgcatgcaggcgtagttcatccaccaccaccatcatggaggcaatcattgtattgctctgggtaaaggcgtcgtaaagcggtggtctgactcttttctcgctcgacggccggccgggcctcgggccggactctgtttcggcatgtatcctgtggtttcagactgcgcggacggacttttcatggcatcaggcatgtttggtttggcggaggagtacgtatattttactgccaggaccaccgaaagtgccagcccaggcccatggacccgtttcgggcctacatttcatcagc

SEQ ID NO: 3871 - DNA, 356 bp, Zea mays
gcggcggcgagccccgcgcgcacgcgtgcccgcttcgcggctccgctcttcttcttgattgactcgctcctggagaggatgtgcctcgccgtcgccggcgggggcggtgcccgtgggaaactgccggctcgccgcagcaccctagcgccatcgtcgccgccgaacatggacgatcgtcagttgtgggtcgtgactcgtgagcgctgggccgagtgagtgacaacccgtgggatgctatgcgtctgcgacagcgccgctgctcgtctgcccaaataatagctgaagtggaagtgaaagtgaaagtgaaagtgagcgaggcaaggtcgtgctgtgaagcatctgcctgctactggtct

SEQ ID NO: 3872 - DNA, 438 bp, Zea mays
agcgcccgtcgaacaggcatcccatgtcgctgtcgaagtctgcgtcagtgaaccactcgctcaggttgatcgagctgccaaagttagatctcgacatggtgtctagctcataatccatgcaagggctccataagctctcctcgatgctgttgtcgaccgtgacgaggggctccgcgatgtcatcaggcgctgcattgtcatccgccggtgtcttggcttggcttgacacaggctcttgggctgtggtttcaggttctctctgatcaggctgaggttcttggtcgagcgctggcaccacctgtggctgctcctgctggagctgcgccaggaacagtgggtggtccaggtagcagctgatgtcgaagttggttacagcattggcacctcggtattcaatggccgcaagatcataggccttggctgcctcttcttgagtgt

SEQ ID NO: 3873 - DNA, 489 bp, Zea mays
gctcagagatcacatcattcacagcagctggagagtaagcctcgtgtctcagcgaatccgtggcattcgtctccactgacgaaagacttcaggccgggtggccacgtgaaaacgccaccaagtgcggagggggcctcggcgttctcccagccggtctctgatttcaagaagatgaagaggcagttctattctggtccaatggcaagcggaccagggttaagcatgccatcttcgctgaacgatcgcagatcatccgcggcacaagcacagcatcttgtgatgccaggaaatttgcaaggcctcttctggcagccgtcatctgcgtccccaaaagttccccccaagatgttggggcggcatccaacgaaatcaccaaggatcagcgagctgcacgagctgcctaggcctcctccagccagcgtggagtccctcaggccttctggtttggtcggctactctggtcctctggtatccaagcgtcagactcag

SEQ ID NO: 3874 - DNA, 913 bp, Zea mays
agggtcgtagtgttgacaaggctggatcacgcccataaagtgatacgcctgagcgatgaatgttatgatctaccaaagattctcgttcaaggtacagaggatccctcttcacttgaagaatatagtcatctaacactgaaggtagttgattcacttgtgcagaaccaattgaaggacgtgacatatcgctccaaccatcaccattgcgatcttggctcactgtagtattctggaaaaaaaggtaaaaatgatgaatcaaaaatgatatgaaggatgctctagtgatgtttagcctgagttgaaatgcatccttacagtcttttcaaataatggaagtacactatggtcaaccaaaaacttccgaagatggtttgaaactgcttgcagtgcttttagaactttctctgtatcgccttgtatctcaactatcctttcatcgtcagttacatagaatggtcgttcatgttcatctgcagcacatcgcggcgtctaaggggtacgaggactgcgtgctggtgctgctcaagcacgcgtgcaacgccaacatcagggacgcgcagggcaacacggcgatgtggaacgccatcgcggcggggcaccacaagatcttcaacatcctgtaccactccgcgcgcgcgtcgaaccctcacgccggcggagacgtcatgtgcctcgccacgcggcgcggcgacctcgacgcgctccgggagctcctcaagctcggccttgacgtggactcggaggaccacgatggcgccactgcgctgcgcgtcgcgatggccgagggccacgcggacgcggcaaggttcctgatcacgaacggggccagcgtggacaaggcgagcctcgacgacgacggctccggctccggcgccgcgcggcttacaatgtcgccgacagagctgcacgagct

SEQ ID NO: 3875 - DNA, 761 bp, Zea mays
gcttttcacttaacctcagagtttggttttagaaactggataagatcctctctctgttgtactccacccatgtgctcgaattgggatacatccctgaaaatctggggtctctccatattgtaaatatccagggtttggactattgtggggggctgtgaacagtagagtccttatccattttgttcactgtctctagtatgggacaggaaggatatttgtgtgttgggcttgttgtgacctgcattttgtgttgggcatccacgtgtattcaccatgcaatgttggcaccttgagagttatctccaccatgtgttgaacaaattcagtgaaccactgctctgtcttcttgtctattgctttagggcacaatctagtgaagagatccctgctctcgagctcttgctggtcccttggtacctctgcagattcgagtgtatcacaggacagtggtgtcaagagaaaatggccttgatgtatgtaacccagccaaggacggctggacaggcagagcattgcttgcctgtggctaactatacaagggaacagctttggaggtctcaggcctaggaatcgagaacgtgtgtcagatagctgacccgtaaccatgtcgacgttggtacggaaaagaacaccattctgcaaaccagcattgaggaaaaggttggctggataatctgcaccatcctcaccaccaactgatgcctggacctccaagaataggagtgactctggtgccgatgatacactctggacgcttagag

SEQ ID NO: 3876 - DNA, 318 bp, Zea mays
ccaccgatgatatccttcgcgttggcgaatcccttctcgcggagaagctggacggctctctgagagtcattgcctctcctacacaggacaaccaaggctgacccctcccctgcttccttcagcgaggcttcgagcgcgggcagcttctcttccagcatggagagcgggatgttgtgggacggagagatcgaagctatctggaagtgatgcgcaggtcgtacgtccagcagtagatgaggttcaccatcgtcggccagtttcttgtactctctgcaagtgatacgcgcgctctctgggagtacgttcacgcttgctgct

SEQ ID NO: 3877 - DNA, 464 bp, Zea mays
atatagaattatagattttagtttttttattgggccagtacaggcccatgaaaaacatcagtacaatttagatcttatcatctgaatggaacattcattgctaacaatttgaggctgttttgttgaacttaataggaagtgatgatggaatgacattatgtagtgtactaagtttgctaagtgatttatgtatgcacagaactgctgctacaaccttttttaggagaacatgttactgaagctttctgaatgaaagaaacttgaaatatgtacgtacatgtgttttgtacagtgattgtaggtgaaattgctaattttgctgcttatgcattcgctcctgctattcttgtcactcctcttggtgcactcagtataatcatcaggtatatgtttatttcaaacttgatagcattgtgctccttgctagttattaaactgaaatgataactaaaaaaggtttgttt

SEQ ID NO: 3878 - DNA, 387 bp, Zea mays
tcatgtgctatgttgtcttgaatcttacatgagctaaattctgaagtgttttcttactgacgaaaacatacacacctttgcaacgccatcctaaactctttacatgtgttatcaggtgtgggaacatgaagtcgatggcaacacaacctatcaagtctgtgatggcagcggtgaagacccaaactgttgcaggtggggggcgggcgcctgtttcgattcggcactggtagcttcagcctgtcgctgcctagctcaacacttgttcttatatatgattagggctctctgtttttactttcctcctccaggagtgtgtttgcgctgttctggagcgcttctgaccatttgacctacatgggagttgagatagcggccgacgactggagc

SEQ ID NO: 3879 - DNA, 427 bp, Zea mays
tataatcaagtttagggttaaaagaacctcgaccgcgatcgtatatagatccagattatcattagttattagaccactgtgagtgtgatatcgatggacgacggcggcgagccaaccaagtaccgcggcgtgcggcgccggccgtcggggaagttcgccgccgagatccgcgactccagccggcagagcgtgcgcatgtggctgggcaccttcgacacggccgaggaggccgcaagggcgtacgatcgcgcggcctacgccatgcgcggccaaatcgccgtgctcaacttccccgccgaggcgcgcaactacgtgcgcggcgggtcgtcgtcgtcccgccagcagcagcagggaggaggaggaggaggaggaagtggcggcggcgccggtcagcaggtgatcgagctggagtgcctggacgatcagg

SEQ ID NO: 3880 - DNA, 364 bp, Zea mays
ttggtccggacggtgccggctgtgcctgtgagcacctgtatggcacccatcttgatgatggcggcgacgaagtcggtctggaaggtggcggggctgttggtgtaggcgagcacctgcgcggcggtggccgggtcggcgagcagcgcctggtcggaggcgagcaggccgcgcctggcgaccaggttggcgtagtagttggtgtcgaaggcggtgggcgtgacggggtccatgggcaggggcgggtcggcggcgccggtcccctgcggcgggcactgctgcgccagcgccgccaggtacgcggggtccatggacgggtcctgccccgcgccgctgggcccgtacgagtagaggcggggcgcgaagg

SEQ ID NO: 3881 - DNA, 349 bp, Zea mays
aacttcctttgcttcttaatcaactgttagtatcactgttatgagcaacctagcaagggactatgctttccccaaatcttaagaactagacgagagagagatttaatcggctgaatttgggattaagagttggctgagttgcaccgcaggaacttcctttgcttcttaatcaactgttagtatcactgttttgagcaacctagcaagggactatgctttccccaaatcttaagaaccagacgagagagagatttagattaaattggcttgctttattacttcaacttcccggcatatatagctagcgtattacatcttatcagactaggaatactggacagcagatcgt

SEQ ID NO: 3882 - DNA, 408 bp, Zea mays
atgaggttcagcttcagcttcagcttcagcgtggcctgctgctgcactgcatatcacccggtgacgtgccgctcataatgttaatcagagacaaagcaacatttggcccttgagaccagacaaaataaaggcaggaggaagagacacccaagcagccgtcgtggaggccgatctgttagttaattaaaaagccatcgattaaatctcaataaaactttaaacacatgctaattcggccgaactttgcttccaaagttgtcgacagactctattgaatgagcaacatagggaattaactggcatgctggatttcagaggcatgctgtggataagcacaagattggtgcgtaccttcacgacgacgggaatctaggttcgtaaaatccaagaggccgttgtccagtcgct

SEQ ID NO: 3883 - DNA, 435 bp, Zea mays
ggcggcggcggcgggggggtaagagggggcatggcggggcacaagaggagcggctccatggacggggacacctcgccgttcgagggcgagtcggcgccgccgtccgtgctgccggactacgccaagaaggccgtgcccgacgacaagctcgccgagctcgcgctcctcgatcccaagcgcgccaagaggtgagcaaacgccttcagcgtccgcgagctgtcttcaccttggaattgcttcccccgctgcttgagatgcttcatggagctgggacgtgataccttgtcctgtcctgtctggtcaagtcctggtttcaagataggtataatttcctctcccgcggcggtgcaggatcctggcgaaccggcagtccgcggcgaggtccaaggagaggaagatcaagtacaccagtgagctggagaggaaggtgcagac

SEQ ID NO: 3884 - DNA, 388 bp, Zea mays
cccaacaactttcgcccagctctggaggtccaaatgtgaaccaaaacaaaagcttttcttttggctccttctccacgacagacttaacaccaaggatgtgctcagaaggagacattttgagatggactcatacacctgtgggaactgcatcctcaagaaaactgaaacgaacctggtatcatctgttcctcgggtgtggttttgcaaaaagatgatggcatttggtgcaatgggctccaccacgaatctctaacccccatcagacactcagaaactaagaactgaactgggaaagagttgatctatggaaatcgtcatcaccatgatgtggtgtatatggaaatgcagaaacaaatggatctttgaaggcatacctcccacgacgact

SEQ ID NO: 3885 - DNA, 386 bp, Zea mays
tgcagaccaaagatttcttccccacaaaacaacgaatcaaagaatgcggtcgcgacggtcgatcacgacggacgtggccgcggcgagtcaggggactgcgaggagagcgacgacgcgttgcgcaggcggctgggcgcgggccggaagctccacctcctgaggaggacggctcctccggcgcggccacggccacggccgcgcgcggcgggcggcgtgagcgcccgtctcaccagctcgcggttccccttgcccgtgggcacgcgcgcgcccgcggccctgccgctcctcggccgcctcggcgtcgcctgctgccgcgcggcagcgccccaccagctgcactccggccccgcgcgccccgtcggcgacgaagacgaagagccgcccgc

SEQ ID NO: 3886 - DNA, 424 bp, Zea mays
cgccaattgagctttttgatggtgacatgtccccattgctgttggcggccacatgaacaaagcccatttagaaagtgccaaacctgcatctcgtcaagctcctgtgcacaggtaaagtcgaccatggtgcactgggcttctcatagtcgaacttgcaactggtccctggtactatgatatgttccgtcatgactgagatgagatggatgataacactcacttgcccattagctttggctttggctatagttgctactttggaagtaatagtgtgaaggtctgaagggcgataacaccaacttgcttcatttttggacttgcaatatgatatttatctcatgttcatccacttataggtaaacccctccttgaccactactcatccaaagcaggtcatgttcctgcactcagaatgcatcaggac

SEQ ID NO: 3887 - DNA, 446 bp, Zea mays
agcctgatgtcgaaggcagggatgatgacgttggtcagcgtctcgcttaccctcgtctcgccgaggatgctcctaatcaggctgcgcatgcacttgccgttgtactttggcttcctcagcgcggacatggcggccgcaagcctgctcctgctcacatcacatgcatgcatgccacaaacatgcgcaaatgatcatccgcagatgtatagaggacgtacgtatgctggatgcatggatgcaagaacaatggcggcagcatcggactcacttctgagggaagatgcgcgggcagttctccatgtaaaagtggttgatgtccttggcagcgtagagaggccgcttgtccttgccgggcgcggtgagcatggcggtgatgagaccgccggtgctggttccggcgatgtagtcgaagtagtccgccagcctcgcctccggtccgtccagct

SEQ ID NO: 3888 - DNA, 480 bp, Zea mays
taggcccgcccttcaccttggcgaaatgcggatgcgctgaaagacgaaaccttgcgttgcctctcctcccaggaagctatcgccgttggccgatctttcgcctccgtaagagggtacagactcgacggcaacaaggagatgctggccatggggttctccaacgttgctggttctctgtcctcgtgctatgtggcaacaggtgatccatatggttttctgactcattggccgtcgttgcaatctttcgggaagaagcaaggatgtctgacagatgtgtgttttttttttcgttcgtcaggttcgttctcccgaacggcagtgaacttcagcgcgggggccaggtcgaccgtttcaaacatcgtcatgtccatcaccgtgttcgtcaccctggagctgttcatgaagctcctctactacacgcccatggcggtgctcgcctccatcatcctgtcggctcttccgggactgatcgacatcaag

SEQ ID NO: 3889 - DNA, 389 bp, Zea mays
tcactcagtcagtaccctttattaacaggatctccatctccatccgctagctaggcaagacagtcgagagtcgacaccatggccatggcgacgcaggggcaggccgaccaccagcagcagcagcacgggcggtctgagcccaccaccagcgtcgccgccaaccgctgggggccctactccggcgccggcgacttcgccagcaacatggccgtcatcctggccgccctgctggccgcgctcgcgctcggcctggcgctcaacgccgccgtgcgctacctgctccgccgccgccgccgccgccgccgcgccggctctggtggtggccagggcaacggcagcggcgtgctgccgtcggacgagccggctgagaagccctccgtggaggtgga

SEQ ID NO: 3890 - DNA, 382 bp, Zea mays
gcgtacagctcatcgcgtgagccacagccacgcaacggcctcccgccgcccttatacgtacctaccttgctgcttctgtcgttccctcctgctactgtgtctcgtgtgcttgtctgtctgtctgtctgtctgtctgtctgtccatgatctctcgtagctttgtgatgctttggaaacacttgggagtgctgtaagatttctggtctgtataattacattcagcgtcttcccagcctcttcgctgaattttgaacttggagtgatcaacgtacagcccgtggcatatttttagagtattgatacaacattgctcgatggtgaagctagaggtgtttagctaaaactttgtatctaaatccgatattagtaaaactttggatct

SEQ ID NO: 3891 - DNA, 421 bp, Zea mays
aacaaccagggcggcagcgccaccgagttcagctgggacaacaagtatcccggagctcagctgcttgcaacacaggtcacccggccggccatcgatcttgcatgcacatgaaccatatacatatatatatcactcagaaactacgtgtactaacttgacgcatatgcatgcatgaaccatcatcatcatctatccttggtcgtcaggagtacttggctggaaggacagagctggaaggctacaagaggggcctggactcgttcgtctgcgccgtgatgcccaacagcggcaacacgcagatccgcaccacccctggtccgtcgtcgtccggccgtaaataacgatctgctgctgcaacctgatgatctgattgacacgacacgacaccgcatgcaggagggcttctcttcacccgcgactc

SEQ ID NO: 3892 - DNA, 440 bp, Zea mays
gcactgcctcctggcatccgacgacgactccggcaagcaccaccagggcagcggggaccacaagaggcagcggagcccggagtccggggtgtccccgtccacgtcgcgcgcggacgcgttcctgggcgcgctgtggggcctgtcgcccaaggtggtggtggtgacggagcaggaggcgtcgcacaacgcggcgccgctgacggagcggttcgtggaggcgctcaactactacgcggcgctgttcgactgcctggagtcggcggcgccccgcgggtcggtggagcgcgcgcgcgtcgagcgctggctcctcggggaggaggtgaagaacatcgtggcctgcgacggcgcggaccggcgggagcggcacgagcgcctggaccgctgggcggcgcggatggagggcgccggcttcgcccgcgtcccgctcagctactacgcgc

SEQ ID NO: 3893 - DNA, 438 bp, Zea mays
ccgctacttttgttgtccgagccgcccgacccagaccagagcccagaggagtgagcgcgagaacgagtgactgtcacccgtctgccactccgacccgagctctcaagttacgtcagtgagacctcactattccctcccgcggcttgccagctgaagccactacgccgtttcattcacctcgtcattcgtcaaagtcttttccgttatctggtagcccgtagccgtcatcagagatccagagcaaaccacaggctcgcgctctgtaaaatgcgatgcaaaaacgaatgttctgttcattaaaaaaaagaccgatgctccttaagaccctctttagaacgatgcaaagacatagaaaatataaaaaaaaatccgcaagcaaacagttgtaaatagaggaccgaaaacatactgtttttgaaggaacaattattttgatag

SEQ ID NO: 3894 - DNA, 396 bp, Zea mays
agacggcccaccgggcggggctgaagctgccggcgtacaccacggtgcgatcgggcccgggccactcgccggtgttctcctccaccgtcgagctcgccggcttgagcttcgcgggcgaccccgccaggaccaagaagcaggcggagaagaacgccgccatggccgcctggtcctcgctcaaacagagtacgtcatcggcccaatcccgaaaacacaaaccttgcgcatatctttacgcgtcacggggcatcattaatggcccccgccatggtctttgcagtgccggaggctcgcaaggagcccggcgccggcgacgagcaggagcacgtggctgtcgccagagcgctcgcggcgctgaagccgcgagacggcggcgacggaaaggcggcgccgcct

SEQ ID NO: 3895 - DNA, 481 bp, Zea mays
aaagcagccttcgcttcgctttcctcgcagcgtgaccgactgaccgcgaagccgccgtgaaccctcctcatccccgtcccccctgctccggcttcgccgggctcctctctcccacttgcgccaacattcaagccccgaccccaattcacacccgaggcgctcgcccctttccatctccatcgcccacgcccacgcccgcgcgtctcgtgtccacgcctcgccgcgacttctcccccctaaaccccgagagaggccgaggtacatgagagagtgatcggcctcgccttcgcgcccacgctcgcgccgagagtgtgatgggcaacacgtgcggcgtcacgcttagatccaagtacttcgccagcttccgcggcagcgcgtcgcagcgccgtgacgcgccggggtactcacctgtcgccacctccgcggccgccgatgaaccctcgccgcatgggaacgggaagcgagccacgcgtccgtccca

SEQ ID NO: 3896 - DNA, 492 bp, Zea mays
tgttgctgcgccttcacctcctcttccgctccgaaacccaaattcctttactccggcgacgacccagctgcgacgcgccccattgccggaccaggaggtatatatccgttcgcgcctccgctgcacagctcgccgccgcggacgtctcgacggcgcagcagcctgcacttgaacttggttggttcttttggcttccctttctcttctaatgccttttcttcacgtcggcgaatttgctgttattgcggagtgcgttttcgtcgcagggttggaggcggcggcagtgggcttcgtcaccggtaagaggaaggccaccgaggtagcccaagcgtaggtactaattcccgttgttggtttaagtgtgtgcactgtatagtgtaaaactataaacatctcttccagctctgaattgctgaaattaacagtatgggcttcttctgaagcttgttaagtagccaactagtacaattttagccctgtgtttactgagct

SEQ ID NO: 3897 - DNA, 379 bp, Zea mays
ttccggtctcgagcctggtggggaagacggtggggctctacttctcggctaaccattgcgcgccgtgtatcaagttcacgacgaagctggcggccatctacagcagcctcaggggcaaggcggaggacttcgaggtcgtgtacgtccccatggacagggaggaggacgggtacctgcgctcctgcggcgacatgccgtggctggcgctcccctacgacggcgcgccgtcgcgcgcgctggcgaggtacttcgacgtgcgggagatcccgacgctggtggtggtcgggcccgacggcaggacggtgacgcgggacggccggaacctggtgaacctctacttcgacatggccttcccgttcacggacgcgcagatcaggct

SEQ ID NO: 3898 - DNA, 986 bp, Zea mays
aatttgccacttcgatcccacggagaaacaactcaaattttagctgggcatagctagctagtgttctgaccaaccatataaatgcaaagatccagcctaaaaaaagctatatacatttttagagctaaaaggtagcttaactgatatttggttgaattgtttgtttttattctagacacacacacacacacccaaaaaaaaagaacagttcgtccgaccaaagacaactggaatcgagcagaacatccaaaatgtcgttagttcaaatgagacttttgcgttgcagttcacggtaccaagtaaaacaatatggagagagaaaaaaaaacagctgtgcaaaatatggttttgaacgatctgctgacgacggccataataatatactccctactacccctgcaagtttgcaggatcccgggatcgcctgcagtagctgcggaatcttctactggtacatggacaactgtttggactgatggacttaccagtcttgatcgttacaaaggacgatgctatcacatcgagcccgttcctggggacccagatcaatatatctgttatgtagcttatccattagacctatttgaagagggttctgttactaacatgtttacttccattgtgggtaacgtatttggtttcaaagccttacgcgctctacgtttggaggatctacgaattccccctgcttattcaaaaactttccaaggtccgcctcacggtatccaagttgaaagggataagttgaacaagtacggtcgtcctttattgggatgtactattaaaccaaaattgggattatccgcaaaaaattacggtagagcgtgttatgagtgtctacgcggtggacttgattttaccaaagatgatgaaaacgtaaactccccaccatttatgcgctggagaggccgttttgttcttttgtgccgaagccatttattaagcaccaaccccaagcgcctagcaagaaggcgtgtgctgtgcag

SEQ ID NO: 3899 - DNA, 354 bp, Zea mays
tggctggctggcccagtcgctgctcgatttatcgtcgtcgtcgcggtgtatccgcgttagaaccttttgttggtgaacaatattatcgtggcacgcgttttaagtaatacggtattctggttcggtttcgtattgctgtttcttttctgctttatttctattcttgtcttgtttcgcgtgcttagccgtcttattaaccgaaggctgaagcaaaatacggagtagaataaacaatgggtggggcaagaaattagtccgttaatgatttcgtaacgttcgttagagatgaagttggccagacgctcgacagcctggtttgggtgggacctactggggagaggtcggccgctctat

SEQ ID NO: 3900 - DNA, 396 bp, Zea mays
gaacgcattggccgagcaggtcaaggcagtgatcaaggactaccccaagctaaagctcactcaaggcaggaaggtaattagctagacttgaccggaaacacatgtacggcatagctgattggctgtccttgtccttgcttaataatacaagtactagctagctggctagtgagtactactagtgaagatcagaaactgagcaagactgctggaacttttggcgcgtgcatcaggttctggagatccgtccgagcatcatgtgggacaagggcaaggccttggagtttctgctcgaatcgctcggtacgtgcgttacgacaaaacaaagcccaccccccgccccgccccgcccttgtctatttcggccgtgtcgtccacagttgctgctctcgtttc

SEQ ID NO: 3901 - DNA, 353 bp, Zea mays
agaagccgagagcacgttcccttgcagctggcggcatatgcatcatgctatatgtccccttctctacacatatagcactatagtattgtttcaaaactgtaaaaacactgcactttcagacagggcctatgcttcgaacgtacgtgaaggaacttattattagctatataatacaagtaattacaaggcatgcatatgaagctatatatatgtccccttctccaggtcagaaatgcatggtgatgactcgtcgcagcaggaacgaacgattgaacgaataatatattcagtgaactgtgacaggctagcccggccaggtggtacgtgttcgtttctaccatgcatgatcgagc

SEQ ID NO: 3902 - DNA, 450 bp, Zea mays
aagctgtcggcggtgattcgaggaggaaggcgccgcacgcgcgcagtggtccaccctcctgcttcactttccctccctccctccctccttagcgcgcacggcacgaggcggtccgcggtcgaggcaggcggagggaacggcggcgtgggagcgacggcacggggacgagatggagacagggacgggcggcgtggctcccgtgtgctcgataaatagcagcgcgcgccccgccgctagctctccgctcgtcgaccgggaagagagagagaaagagagagagagagagagagaggtgtgggggccggaaaggcgacgcgatgtgcccgcgctgacggatttgcccctcggcgctccctcgccgtagagaagctctggtctccgctgcgtggagtggagagaactcacatgtcaagctgttggctggagaaatgattgggcctgtggaaatta

SEQ ID NO: 3903 - DNA, 331 bp, Zea mays
agctctattagtaatcttgagaggttcagtgctagagatgctttgcaagtgtcttccctgagcagcattgacccaatcccattaacagctgggtcttcgggatccaattcacgccgtgctatgccactaaatatgctcctcactggcggattagatgttcaaatgttccaaagaaatgtaggaagtggacaacaggatcattttctcttcggcgactcaagtaactgggaagtgccatttgtgcagggttttttgatgaccccaaaccatgcaggtttgcaccctgcacttgtgaacaataatgtccttgaagacatgtctattgctggta

SEQ ID NO: 3904 - DNA, 782 bp, Zea mays
  unsure (1)..(782): unsure at all n locations
ggtagccacccaccaagagagaagaaccgcagtcccgctccttccctgccgggtgccggctgccgctgccccgtctctgtctccaactccgaatatgtcgtcctcgcccctccccaccacctccggcggggctcacatcttcccgtctccgcctcgaccgcgccaccgccggtgctgccaagtaatcgtcgccgccgccgctccgccccgttcctacggcgtcggtcgccgcgccgtctccctagccggcgtcgccgcctggcttgccactaccgtcggccgtaagtgctactttgctgtactcttctacgtatccacacatcgactcgtttgctactccgccgttcgtcatgtccgcttgtgtctgtggctgatttactgcgccccaaactcccaattgctgcagtataaattcgactcccaacccttttttttagaataaaattgttgataaaactccaacatagtttgttccaaatccactataatccttgtagaatagtcaagtaccccatttccaaggggtacctgttgaaaatcgtttcaacaaatccgtccaaaactttttaagaaaaatgaaaaagttttgaactcgaaagtttttccaaaagatgcctgctaaaaattgtttcaatctctcaccaaaacagataagaagtatatcactgaaaattactatccagccataggggtatatgaagagcgcanattcctttataccccacccaattagaattaggggaaataaaacataaatggagaaagttctcatcataagatca

SEQ ID NO: 3905 - DNA, 831 bp, Zea mays
tgtatatatattcctctgctccgggactggtgcacagcaaagcgtcttccatttctcagaagagtgtgtgacaacagcggcaacccgacagacatgtcttcgccgacatcgccttggtttgcgggtgtgcgccaagtcatcatctttctttttctttatctgcgcggtggtgtgtgtagtaccagctctcttctctaaaatgtaccgtacgtgtgttgcagatctcttcacagatgacagggtgaggaccctatcgcaccaggtctccacacttggggacagggtgtgggaactggagcacaaaattacccagatgatgggcgagaaggccaagctggagaaacaactggaggaggcaaaggcgatctcaagccacaaggaagaggtggggagaagcttgaaggctgaaaatgataagcttcagtcgaaggttttggttgcggaggaaaagtgtagcaagtctgcaggcagcaacaaatcttacagcagactgtttaacccaattgattggataccggagcagggggagaatctttaccaatagaccaacaattactcttttcctcaaataaccacttctgcacatcatggtcaagcaatcaagtgcatttacaaggacagcctccatgtcatcacttagtgcctgttcaagatatggcagaagatattcctcaacacttcttgctccaataaaatagcaaacatagacaatctggccaaagaaaactgcacggagctgctcatcatgatcatttagaaatgctggaagtataggaagaagaaaatcgttactttgtttgtgcccaaagaagtaacacaaataacctatat

SEQ ID NO: 3906 - DNA, 350 bp, Zea mays
ccgctgcctgtccttcgacgatcttgcgaagaagggagcattttgttttttataagagaactgtgtgcgcgcggtttaggttaggttaggtaacgagagaggatcggagttttacctctttgatcctcttcttgagatacgatagaccttcattcgtcatgctcctcatggtgccgccaaaggccacattctctgggatgacattgtacgcttctcctcccttcagaaaagtgacggacacaacctgatacatttaatttaaatcagcgaagaagatgaggcagagtcagacagcccagaacaacagcacagcacagctaagacgacgcagaaacacatgcataccgcgc

SEQ ID NO: 3907 - DNA, 442 bp, Zea mays
aggtaccttggtgtccgtacttgacagcagcgtgcaaggcgttggagccattggccccgctgtattccgacctctcgttgctcagcagcgccatgtagacgctcctgaaacctttgagaaccgcgatgaacatgggcgactcgccgcgcccgttgcgggactccgagagcgcaggctgccggccgatcagtcgcagcgcgaggccctcgtcgtagccgttgcggatggcgtggtgcaggacgttgcatccgtgcctgtctcgcttcagaaggtgctcgtccagcagctcgtgcctcgagtgctgctcgagcaggtcaagagccagggagacgcggccgctcttcacggcgacgagcagcggcgtctccccgtcgacgttggcggtggagagcagagacgacgggagactcggctcctgcgtcaggcggagggcgaggacctt

SEQ ID NO: 3908 - DNA, 845 bp, Zea mays
gcaagtgcaggtcagtgagaccgcgaccacgtccttcctcctcgccgtgcaagtcgatcactggcattaaccgtgggcaacagacacgaatactgcctactggccacgacctgcacagcacggttcaggttaaccgacccaaaccaaacgtttgccgcgcatgcagatgatgtggatgggcagcgccggcatcgcggcgccgccggcggtgatgttccccggcgtacaccagtacctgcctcggatgggcgtcgggatgggcgcggcagcggcggcggcgctgccgtccatgccgcggctgccgttcatggccccgcaaccggtggtgcccagcgcgccggtgagcgtgggcccggtgccggcctaccggggccacatgcccgcggtgggcatcacggagccgtacgggcactacatcggcgtcaaccacctgcagccttgtggtcctgtgaagattctgaacagtttcagcttttctcatgtatgcaggcaccgtggttccgatgcttgaggcagctatctccgtcgttcccgtggagaagctcgctgtccacttccacgacacctacggccagtccctctcgaacattctcatctctcttcaggtaacaaaccgagaataccatttacacagtcgaaagtgaaaagtgatcaaaccggtgtcctcttgtcaaccagatgggagtaagcgtggtggactcctccgtcgccggcctcggtggctgcccgtacgcgaagggtgcgtcggggaatgtggcgacggaggacgtagtgtacatgctcaacgggctgggcgtcaagacgggcgtcgacctgggcaaggtgatggccgccggcgagttcat

SEQ ID NO: 3909 - DNA, 470 bp, Zea mays
ccgagaggtttgtggccttaactcagggggagttcagacctggtcatttctatatattaaagcagggaacaaggctggccattcatagtgtccacgtcagtcttttgtttttcagccgtttgattggaaatccacgaacacgcaaccgcccactctaccggatcgttatcaagcctcacgaagcttctatatgacgcccgacccagggggggagaaaaatacgcgtgatcttcaagcctcccgggttgtccacgtaaaaaaagccgaccggcgttgtcgctagccccagcctgccaggccacgctccttgcccttctgcttggctcttcgaacaggtactggccctttcttctccacagcacgttcttggatctcctctgttctgtgatttccaaatcttagactccccctcaaacgccgctgcggtccagccacgacattgtccatgtgctgccatttgctcctccgtt

SEQ ID NO: 3910 - DNA, 398 bp, Zea mays
gctacagcagcaagctcagctgatcaggatgaatgtctacataactatgcaatcctacagcacatagttaaattgtaattgctttataaatctcctaaaccaaaatcaagctccagtccaatggtgaatgaattaccttcaacaaccaagtcaaagaccctctcctcaaaggtcattatcatatcaaacaccccgtcgccggcattgtcctgccaccgctgaggcgccagcttcaccgaggtgttcctcttcagcataggcagcaacccattcctcttgtacctggatggttggccacagaaatccactgagagcagagcgtttcaagttatcgtgcagggtgcccgacaaggcaaggtgagcacacaaagaaacgggaaagcaacgccacaagcatc

SEQ ID NO: 3911 - DNA, 396 bp, Zea mays
agtatacatgtctgatacatcgaacatcctctcctcccgcataaccttaaaggcttcaattggatcttcaggaaaccagtcttcatcatcatcaatctacaagagtcagccagaaaaaatgcctcaaaatctataacgggtactaaaaaaaccagctctaccaataaatgcaacaaacatagcataaactaacatttaaaacaaaaaggccaatgcagtccacatttaggagttttttatcacagcctgcatgttccgagagtatatcttcataagacattttgaattaaaacctactgaggatatatacatgcatccttttctgttgagttttgtgatcctaattttgcatatggaggtcgtgttggcgagcggagcggagaactgttgcctgac

SEQ ID NO: 3912 - DNA, 426 bp, Zea mays
acatagaagccggcggcggtggtgcgcgcgtcgacgtggcggcggacgacacggtggtggcgaggccggagcacgcggcggcggcggacgcggagcggtcagccgaggtggagcaggagcgtgcccgggtggaggcggtcgaggacatggcggcggctagggcggccgcggagcggggcgcgcaccaggaggcggcggagatactcgggaaccggcggcgagccatggcacgggcggcgggacgaggcggcggcggcggcggcggcccctccaacgcggttctgcgggccgaggtgcggcgtatgagcaggcgcgtggcgaaccgggagagctacgagcggtcggggcgcgcgtacgtgctcgccagcctgagctcgcacgcgcagcagcgcgcgaccacgaggcagctgtccccccagcgtggcg

SEQ ID NO: 3913 - DNA, 440 bp, Zea mays
tcctcctgcttcggcggcggcgccgcccctcctccggccatcctcctcttcgccttccctttcccttatcctccctcgcaagaaagaaagaaaccaagcctttcacctcaccgccgacccacaccacaccacaccgtccactccacagcggctccactcaaaagcagagcaagaaaccgcaaagcaggaacaggcggccaataagaacccttccacgagcagtcgagcagcagcagcgcggtgggtgagtgcggagagcaatacgaccggcggttctttgcgtgcgaaggaggccaagaacaaggcacctgaacaggaaagcaacaaccgctacaattcggtgaaaaaaagggcaagggaatgaatgccggggagggatggttcctagtttagttcgtgctctcttttcctcgctgggagcaggaggagcgcgaaggaat

SEQ ID NO: 3914 - DNA, 466 bp, Zea mays
gaagtactgtgctgaagtgggaggtctcgcgcgtcgccggagcccgactgaccgagcggccgagcgagcgagtagcgcgcccatcctgcccctagccgcggaacgggggacaaagccacaaaggcaaaggctgcgcatgtcgcgagggggtgccgggtgggacttcgggagggtgggtggacgcgcgaaataccacggcccccgagccagcagcggtcgcgagcactggaacgcacagaccagcagtgcaagtagactgatgatgatgcagatgagctctgctctgcaccggttcgcagtgcgcgcggggggccgcgaacagaacgacacggagatgccgagcgagacgaaagaaagctggtccacgctcgttatcacaaaacgtgaagtcacctaccacgtcgtcggtgatggtgaggccatgctcgttatcacaagcgtgaacgcacctgcctgcacgcgcgca

SEQ ID NO: 3915 - DNA, 369 bp, Zea mays
gacgcaaccacatgagaaattgtgaagtcgaccataaatcaaagttcactggaaaacaccagcacaatgacatgtacaaacataaccacaggtgaaaaatatggtggttcacaggtgcaatactcacctcttcatcaggacgattaccagttacagtaaaaacccttctttcaacaacctcccgatactcttgcctgattgcttctctcaaggtctgcaccagataatataataggataacttacatgataaaaacaatatatttaattttctccacagatttgttggcaatcggcaggtattccattatttacataacttgaagcccttctacaatcatactatcagctaactactactgagtttcga

SEQ ID NO: 3916 - DNA, 495 bp, Zea mays
tgcctagtagacgccgacagcgagtccaaatggcgttgcaggttgaccctgagccgacggagcaccttggcgaattctggtagctcagcctccccgagcttgccggagtccgcctcccaccagaacctccttccggcctttgccgcggtctgcctcaccgtcttcccgacggcgtccatccgcgccttctccgccaccgaacgcgccttggtctcctccgtacgccgcacgatgttctccacctccgcgcggtcggcgatggcgctgctgctcatcacgacgtttccgtcctggagcaccggaaggagcccgtcctcctctccttcgccggggatcggaggagcgtggcggcggaggacgtggtcgaccgagggggtgcccagcgcgaacaccttcctgccgggggagaagatgacgacggcgaccggcgagccgcagagcatggagagctcggcggccttcttttgcaggccggacttgcgcttcgagaaggtc

SEQ ID NO: 3917 - DNA, 396 bp, Zea mays
tgcatcgaagctaccgctgaccgcaacgactctctgtgcgtgtgtttctcggcctctgctggccccgacaccggcagcttatccaaatagtgaaacgtggcccgctgtacaagatctagcaaacattccatccaaccacgccatcgtacacgctgtggttggttgatgttggcgggacaggtctggggcgacgacaccgtacgtgctgggcggtcgccgcctcgccggccgacgcaaactccaccggcatcggggaaagctcggcgaaccttccaaatccgagtacttttgcgggatctaagtccaggtggtagatgccctctgtctccaaactcgatggacaggcgccattacagtattaaccatgggagatcctcgaggattctgcgagtggat

SEQ ID NO: 3918 - DNA, 499 bp, Zea mays
tgagactgagtagggcgtggtagtgcaagcggtgttcatggtggcttcagatggagccggcctactgctagcttggctcaccgctgccgctggacctgctggcactgcaatggcggcttcctggaacgacacgcctcccatcttctgaacagcacagtgtttacacgtacagtattaacgtcgattcgctgaccatattcctagataattaaattggttttgtttgtttaattggttcatagttcatactggtgcgtgatgatcatgaaggccttcactgttcgttccgaacccgtacagcactgggctcatggaggcaatcctcatggaaaggaactgaaaagaaagacaaaaaaaataaaacaggtgggagtgtgatttgcagattaattgccgtctggaactgtctgatgaataagtggcagatttttagcacgaacatatatatataacgacgctgctgcttcatggtttgtgtttttattacctcgacctggtt

SEQ ID NO: 3919 - DNA, 440 bp, Zea mays
tgccgggccgggccatagcacgcgggccttcgtagccgtccaaacccggcccgcttaacgggccgtgccgacccgaacccgttattaaccgtgccagaccgtgcttggaccgggccaaaatcgtaccgggtcacgggccaaacggacggcccgtactgtttggacatctataccatatatagacgcagaccaagccgatggagacgactgcacagtacacgagacctgctcgaccacacacacacacacggcacgcatagccgctgcactgtgtctgcacacatttttacgaaaaggaaaacaaaaggacggagtgatggacgcgcacacacagcacaaacggaggtcgaagaggccatgcctgtagtccagcagagcaaaggcgtacgtatggtctcagctggtttcgtcgagtcgccctcacgttttcaggtcagtgc

SEQ ID NO: 3920 - DNA, 430 bp, Zea mays
gccgggtgtccgtacgggaagtcgacgacgcccaggtccctagccgtctggatgagagaagggaaggcgatctcgaagccgatgggcatcgactccgcctcctcctccgctagcctccacatgttctcgtgcaggaacgagagccccgcctcgcacctcgcgggctccagcgaccacttggtcagcgcgacgacgcaggcgagggtgttgatcatgcggtcgtaggcggagaacagggccgagtcgccccaggagccgtcgggcagctggtggtccacgatccagcgcacgctggccgggaactggggctgggcgcccccgccgccgtccggcttcggcaccatcgccacccacgccgtgtcgtacgccgaggcgctggtatccccgtcgttcatcgaccgtagcatcgccctcacctggtcgataagtg

SEQ ID NO: 3921 - DNA, 351 bp, Zea mays
gacagcccaataaatcaatatatatatatatatgttagcagttcctgccgtgtactaggctaggataacaatctgtgctattatggatagaaaccaggatagttatggtaggagagatcctgattggtgtaggggatcaatctggatcagcccacactaggaaggcctgatactgattgatagaggagatcaatctggcactatttctataagccactcatgatctcctctccctataaatactgtaaccggctggctcttcattcatcaatacacaatagcctacaccacatatctctctcacatggtatcacgagttcgggacactcccgttcctcccaccttccgctg

SEQ ID NO: 3922 - DNA, 380 bp, Zea mays
  unsure (1)..(380): unsure at all n locations
gccttggctgccagatggttgctcgtgtcatagatagctcggaaaacaatctccacgcgctcagagcagaagccaactcggttatgggcgtcccacctgcatgccacggatgaggaaagagnagttaaaacacagggcaagcaatgaggcagctagcactagcaggtggagttgatgaatgcagcagtacatttcaaccagcttgacgaggttctccatctcttccctggacccctcgacatcgaacaggtcatccaccacggtcaacaggatgttgtgcttgctcattgccatgcgagcctcatgttgttcgcaggggaacagggtggcagcaggagggaagaagcagatcagcggcattattctagcgaactccagct

SEQ ID NO: 3923 - DNA, 781 bp, Zea mays
acggcggagctctcgcccgctccccgtcactcacccactctgacattagacacaacacagcccacacggctctccagtccccagattcccgcgccttcctgagcaagaagacacccgcggcgacgatggagcggctgccgccgcaccaggagaaggcggcgaggcggacccttcctcggcgcgggcagatcaaggcgggcatcttcgcgagcctgttccggtgcatcgtcgcccccgaggcacccgcgcgcaaggaaggcggcacgaacaaagatggcagcagcagccaccaccgcggctgcaagaacaaagatggcggcagccaccgccgcgtctcccccggtggctgatgcggttcgaaggagtcaaggtataaataacagggagagttgacgatgtgggggttgcgatgatccccgttgtgaaacgctgcagaccataacatcttcacggagatgagataggataagtttcgagcacagatgatagtaaaactgatggttgattatttataataacaggttctcattcctgctaagatacagcacgcctggaaaacgaacatattatatacatacaataccacaatgccagcagctttctagagtgcaaagccttttccgtgaacatccacaaggcagtctcctcaggggtcaaaacaaattatcctggaaagcaacaccattgcatccgaattgcgacatacgaacattagatatatggcaatagattatgccttttcatgttgtatccattttgaaacccaggctcatcagcagct

SEQ ID NO: 3924 - DNA, 354 bp, Zea mays
attcgaagcaaactttgcagacatgtgagttcccatctttatcgctcaggggatcagtgtccttttccttcatctcctgaattttagcctgcacacataagaagttattaggttcacaaatcacaagttgcacgtaggtaaaagttctcactatcagcaatccagaggcaactgtcacttaagagttgggttaccaccaccaattgaaacataaaataagtctaacatctagctacacttggattacacacaggttttacgatgcagcaacaagacagctacagagatacacgtactcccttatgtataccgagtttttgttaacattattagttacaaaggcaccactatagt

SEQ ID NO: 3925 - DNA, 386 bp, Zea mays
acaactgatgccgctggtgcaacggatgcgatgaactctagcatccgccgccgccgcctcctccacagccccctccaccaccgcctccgccaccacagccccctccaccaccaccgcccccgccaccacagccccctccgccaccagctgctatagccgcactaacggcaggattgtatcttggtggtctcgggttgtctgagctgtcgccacagaggaggatggcgagcgtgatggtccagacggagagcatggccacaccgagcacggcaagccacggcgagacgaacccagctgcggcagctgctccaccgtaggcaagagctcttgccatattgtgaagtgtaaacacaatacgcaagggtaggcagcagggctctagtgct

SEQ ID NO: 3926 - DNA, 482 bp, Zea mays
acaccaacgagatctccggcctcatcccgcccgagcttggtcgcctctctggcttgcaggtgctcttcgcctggcagaaccagctggagggcgccatcccagcgacgctcgcgtccctggcgaacctccaggcgctcgacctctcgcacaaccacctcaccggcatcataccgccgggcctcttcctgctccgcaacctcacgaagctgctgctcctgtccaatgatctctccgggccgctgccgctggagatcggcaaggctgccagcctcgtgcgcttgcgcctcggtggcaaccgcattgcggggtcgatccccgcgtccgtgtctggcatgaagagcatcaacttcctcgacctcggaagcaatcggctagccggtccggtgccggccgagctgggcaactgctcgcagctccagatgcttgacctgagtaacaactcgctcacggggccgctgccggtgtcgctcgccgcggtgcac

SEQ ID NO: 3927 - DNA, 325 bp, Zea mays
ggaacccggtcaccaaccacgtccagagcgcggagcagcacaaccaggacgtgaactcgctcggactcatctcctccaggaagactgctgaggccatcgagatcctcaagctcatgtcctccacgttcctgatcgccctgtgccaggcggtggacctgcgccacatcgaggagaacgtcaagagcgccgtcaagagctgcgtgatgacggtggccaagaagactctgagcaccaactccaccggtggcctccacgtcgcccgcttctgcgagaaggacctgctccaggagatcgagcgcgaggcggtgttcgcgtatgctgacga

SEQ ID NO: 3928 - DNA, 464 bp, Zea mays
ggacggcaaaccttaccccatgccaccagacaatggccacctctaacacttttgcaacccctccaaaggaaaccttttcttattttgtcaatagcatctaaaacccatttaggaaggttaattgccattgctggatagataatcatgcttgtaatgtaagaacatgttgcacttgaactttccttcctgcccttgtcattaattcagccttccaacttgggagttgatctgcaatcctatcaattaggggctggtattgctgtctagtcaacttgtgtagagataaagggacccctaggtaacggcatggaaagtctgaaatctcacatggcagagtgttctgaactgccagcaaagagtcctctgaaccctggataggatagacattagatttgttcacattattatggaggccggaagcatctccaaagagttgtaggatatccagggtgacataaatatca

SEQ ID NO: 3929 - DNA, 346 bp, Zea mays
aagaaccgaagaagcgagctagagccgcaagaatgataggcgccaaggccaacgccgccggcccgtgcccggagtatgcggaggtcgaccccaccggccggtacggacgggtatggaatcgccgctagcactgtagctactcctaccaccgttgtttgacccgtctgctcaccaatccgctgatccgtttccctgcatctttcctccttgtttaacgcagttcagcgacgttcttggcaagggcgcgtccaagattgtgtaagatccggcgctgttctcgccaaagctgcgtgctttcaatcttgcttgcccactgagtccctgatccgaggtgcgtgtgcgggga

SEQ ID NO: 3930 - DNA, 417 bp, Zea mays
agcgcggcaaaagcacacaatgccatctctccgccggccattactgcggcgatcgaaagctccctgcacggcatgcccgtgcgtccccgtgagctgctgctgcacggatcggatcgcactcgcactctacccagacgacgacccagtaccagtacccaaccagcagcaggcacgacgacgggcgccgtaaatactccccctatacgcatggctatctatctatccgtctagtagtactatctatctcgtcgtccatctgccccgcgcgcgcgccattaatggcgccaggccatatcccccatccgcgccacgcatcgcatgcactggcgcactagcagtcccagtccgcggcgcgcgccttcacgtgctccccggccccgctgccggcgccggactcgccggaacgtaaccagccag

SEQ ID NO: 3931 - DNA, 423 bp, Zea mays
tttgcaccggtatggtgccgaccagcatgcatgatgcttagttgtcatttgatattccactttcagctactggtttggaggcatccgccgccacctcagcaggagtgccttccttgcacgttgcctgtttctgtgaccctggtttgccattagtcgcatccttgtctttctcttgagaaacatcgcccccctggccaatgctaagaaacaaggcgtcagagaccatcattcaagccatacagaaccacagaacactgtaataagaacagatacttgcctggccttgaagcagttgctgattcgccctcttttcctgcatcaacttttggcgattctcgtaaaaaccaaaatcatccaaaattgacgttttagtaacatgttctttgaaaatcttcaacatttcaagaccttgttccagcttaa

SEQ ID NO: 3932 - DNA, 412 bp, Zea mays
aatgatcgtctcaacctgctttacaaggagcctctgctgtagtatctacgagatagttaatacatagtgttgctcagttgcccctgcgcctccaaaatggtgtttttttttctacatcaaacataattattggaggcaaatcaagtagcataggctgggaaatcatgtagctcatcctgatcggggatgatggaaatctgagcttcttttggaagcgagtcatcctccgcgctggattccgctctagcaggcaactcattgcagtggatggagagggttcgtttttcttcctggaataacctgcaagcagaacaaagatagttagtttgggtcctacaaatgtatcgcctaggagaatgctagcacttacgggtttttgcaaagcatgggactttgaatcgttacaacatat

SEQ ID NO: 3933 - DNA, 366 bp, Zea mays
agtagcttcactattagcccaatttttagttaagcttccactgccgtacatccatacagcatttacatttccccatgagcgaaaccaaggtgaatcccactagctaaccacaattatgatttcaaaactgcaacttgaaattactctattccaaaatttactgaaaccataacaacgaataagcatgtgaacgaatacagtacagtatagctcccgtatcatgtcaaattgtcaatagagagcaatttattgagccgaacagaagccccctttcaacgaacatagagagatgagaagagatgtgaaaaaactaaaatttagagcactcacagcgcagcacatccctgatctccgtcagttccagct

SEQ ID NO: 3934 - DNA, 400 bp, Zea mays
accctgccgagtcaggcaagggtcttggcttggccacttcgctcggccaagaaaatatctacaagaagcagcagtgcatcagctgcgcaaccagtaccctttcacctttcatatgccgaggaagcactcaaaaccttgtgtctaccagaaggtgcttcctgtcaccttggcttacagcatacatggctttgtgctgaattgatctgtttctccctgttttgtgtttcagcatacgcagacattgtgctggagctaccccatgctttgaagaggattttatcctctcgggacagtgactaaatcgtgacctcaagatgtccagttttgttgtgcataagattcacatctcaatcgtggggcatgtttttgaagatattgttcagaatcttgtggtagtata

SEQ ID NO: 3935 - DNA, 426 bp, Zea mays
aatgccccagatggtgaagaggtcgcgcgtctggaatgccggcgcgatgcgctcgatgtacgcgcggccccggatgacgacgaggcggaagttggcggtggcgcgcgcgcggtcgaccatggcgcgggtgatgcccccagcggcgcgccatgggtggaggtcctcgtggatgaagcggaagtaggcagggcaggtggaggaggcgttggagttggcagggagcggcggggggtcgggaaaggcggcgcaagtggaggcggaggaggcgttgggggagagcacgaggtcgagggtctgggagatgttgctggggatggtcgggtcacggtgaagcggcggcgccgggcaggagagggagtaggtcggccgaggcggcggcggtgccgcggggatggccgggatggaggaggtggtgtgcgtcgcggt

SEQ ID NO: 3936 - DNA, 475 bp, Zea mays
gctcacggggatcaacgtcgtcatgttctacgcccccgtgctgttcaagaccatcgggttcggcggcaccgcctcgctcatgtcggccgtcatcacgggcctcgtcaacatgttctccaccttcgtctccatcgccaccgtcgaccgcctcggccgccgcaagctactccttgagggcggcatccaaatgatccttgcacaggtacagtacagtccttcagctagggccagcattcttttcttgttgacgacgttggcaaacatgttgtacaatgcaatgcaatgcaatccatgcagttcgtgcttgggacgctgatcgcggtcaagttcgggacgacgggcgtggcggccatctcgcggccgtacgcgatcggggtggtgttctgcatctgcgtcttcgtgtcggcgttcgcctggtcctggggcccgctggggtggctggtgcccagcgagatcttcccgctggagatccgct

SEQ ID NO: 3937 - DNA, 409 bp, Zea mays
aatcaggtgacactacttcataaccttttagtgttttatgcttatttacgtgatgaaacatctatgttttgtgtttgtaaattgtaatacaacgtgatttggttgctgaaggctcagcttttaatgttttcctagcagaaactgagttgctcctcatgtggagagcctccagagtcgcacatgtactcttacacgcaccgcaatggaaatttgaccgttctagtgaaacgtctggtgccccaacaccatttgcctggtgaatctgaaggaaaagtatggatgtggactaggtgctcaagatgtgatcatgaacatggggtatccaaaccaactccaagagtactaatatcagctgaagcgcgtaacctctcgtttgggaaattcctggaactcagtttttcgagccact

SEQ ID NO: 3938 - DNA, 459 bp, Zea mays
agcttcagagtttagccagacaacaggttaggagaacgacagctctatgacctctatcaagcaacgattccacgcgttcgcttacatgagctgtaaaggagtgggctttgggttcgccgccgagcagcctgccggtggaagcgttgccgaacaactgctgctgctgccgtcgtccccgctggaatggcagttcgagcgaaggaggcgcctccgtggcgccgtcgcgctgctgcggccggacgtagtacgtcctcaccggcgccgcgctgtcacggagcggcagcgggtcgactggacctggacgacggtagtgcagctgctcgtcctccgtcgtcggcctcttggcaaacgctgtcatctccgtcccgccgagagggcagtcgtcgaagcgcggcatgcccatcatcagctcctcggcggcgaagaacgcggcggcgtcggagccgacgcacctgctgc

SEQ ID NO: 3939 - DNA, 367 bp, Zea mays
tgcttcttcgtcctctcctccgtattccgtcggcaagcacccagggtggctgctggttctaggtcgcaaaggcagagaactcggccagtcgtcagggtaccattattaccagcatcagagcaagcagcccgaggtcagttcgtactcactctcatacatatcaccaagaacatgttcaactttcattccgttgtcggcacatcagcgcctgaaccatgagcctgaaggctcaatccagcagtttggtgcctgcctatcttcagtcgatcttcacataggaataggatgcatttttctttgggctcagttaacgtgttcagcaacgtgcagacagagaacctgacacagctatccgtccatggcgtgc

SEQ ID NO: 3940 - DNA, 740 bp, Zea mays
gagtatccgacctgaatatttttcattgatactggcaagccggtggatggaggaggcctgggcacctacatttgttcgtactttggtccccaatgagttacattacaaaagaggataggaagagattaggccattattacgatttacgaacatgccacagccagcaccgtgactgcaataaacaaattccttgaggtcatcgtcgttcgatatagcgggaggatttcacctctgttatccgtgttgacatcaatttattctttttacgaacacaattttaatcccatcggctcgtcctaggcggggtgacgaagtatttcttgcacggaaccctgcatctcattgtgtgctgacgatggctcttctcccttagttctacgcctgcagcttgctgctacatctgcccttggtcactcacatttagaagtatgtgaaatcatgtttggagatctggcattatttgttgaggaggtgtcatcagaaactgaaggaaaacctaaatggaaggtacagaggcttaactttcttaagttaatgcatttgtgaaatttgtattgaattagttaggtattaatgcttatttcacagctttctttcaagggagatcataagtttcacagacctgcccatgttgctgcaaaaactaaacgttgcacttcacctttttttgagacatagtatagactatagacatactacctcttacgccccacccccaaatgatctactggagattggga

SEQ ID NO: 3941 - DNA, 455 bp, Zea mays
accagcggcaaccaccaccgaacaccgggcgcgggcggttcctgaaacgtcgttgacctgcacgagtcagtcggccctttgaaagaatgcgttgacttgacaccaacaagcacacagcaaccaactgccccgctctgaactgaagccatttcactgcatgattgacaacactttatttcgtctccgttacctccgcgacccggcaggcggcagttgagcttccaggttccaacgcggatactgctgctcgcggcgccgcgccgtgccgtgcctgccgttttctttctagcaaatgcgtcggccgcaactttgctgtgcggcgccgacgcggctgacggcgacgcgtaccctctcgcggccggtccgtgccgtgccttcgggcgcgcgcatgagcatgacggctggcctgccccttgggcgccgcccgtttacgcccccccggcgcgcggcacgtc

SEQ ID NO: 3942 - DNA, 387 bp, Zea mays
tatcctctgctgcttctctcgattagttggtgcatggaacggcgggcatctgtcgtaacgtaatcgcaccaggcggaattcagcaggagagagaatcacaaggaaggttgattgatcaaacattacatatttacatacccggacaagaggatatacagaatcaccccaacagaccacatgtcgctggcagccgagacatcctgcctcgagagggcctccggcgagacgtagtcgatcgagccgaacagggtgacgacggggtcgctgaagtcctcgacggagctgaggccgaaatccatgatcttgagcgtggaggcctcgcccctgtcggcgaagaggcagttctcgggcttgaggtcccggtgcacgacgcccgcgccgtggagc

SEQ ID NO: 3943 - DNA, 867 bp, Zea mays
aacaaaatcccacgcattggttagatcaaaacacccgagacgggtgcgaatcgccaaaaatccacgatgctccatcatgagtctaaagaaagaatagattgaatgtgcggacgatatagctagtactaatactaccattgaagaaattccagcggacggggcgaccggtggcgacttcctcgtagtaccagacgaagtcgaccttggtccacaggtggcagtcgaagccgtcgacgtgctcgcggccgagatagacggcgccggcggcgagccagtcaggcggcaggatccccacggggaaacgcatggtgcggcaggacccggagtcgaagaagtaggaggtgccgttggtccactcgacgtcgtagagcgggtcgctggagagctggtcccggatgaggttgaggttgcggcccctgggccagtcgtagtacaggtcgatcagctgcagttactcaactgaaatgaggatagtatcgcagctttcgtgaataaaacctgaatcacccacaacaatgttctaagtactcagccagtggtatttactggttgacctactgtagtttgcgtcggaatagatatgtttttttactctgttcgtggggcagttttgtactggtggattcataaggactctgattatggtgcgttgggaacttctaataatatgcacatgaaattttgcttcaggtgcagtgatgctgtctcattaagttattagttattaggttgctgtcttattaagttatcaggtcgcagctgggttgacgcggagcacctgtcttgatttatctcttctcttttctagagagcttctgtcattcgtgtgcccttttatatcattttgctctatcaatgattatccta

SEQ ID NO: 3944 - DNA, 377 bp, Zea mays
tttgacaccctcttgaaatgaaccagatatacagtgtgttgaaggtgctccgttatggcgtgaaactgcatcaattatcaaccatgaatttttaaagggttatagacaacgaggaggacaaataaacgaatttattgcaggttatatatcttgatgttacaattcttttatatgtgaattttgaaggacttcatatgtcaatgataatttgcaaaaaaaataaaaaatgacagcccacgaaccaatggacccttggatactatcaatgtaatcagtaaccttattgactataatactatatatcagtttttgatataaaatgacacaaaaaagatcattcatacacaaatggtattggcatactttatgatcgcctt

SEQ ID NO: 3945 - DNA, 422 bp, Zea mays
atcctgcccacgcagaagatcggcctcgtccagccgctggaggagctgctcatccactcgttcccgctgccctccttcctcatctggccgggctactacgtgctctaccgcttcatcgagaagcacggcgccgaggccgtggcctacgccgaggcgcagcacggcatcggcaagaaggacgccatcaacaacatgctgttcgtgctcggcttcaacgccttcggcggcttctccgtgttcctgcccttcctcgtggccaaggtcggcggcgccccggcgctgcgcgagcggctgcgggacgaggtgcggcgcgccatggtgggcaaaggcaaagacggcgagttcgggttcgccaccgtccgcgagggcatgccgctggtgcggtcgacggtgtacgagatgctgcggatgcagccgcccgt

SEQ ID NO: 3946 - DNA, 523 bp, Zea mays
acataaaaaatcagagcatttttttaataggatgacctcccctgacccctgggcctggcagcgcactgccatcagcgcaagcacgatggcagcaggtgaggcggagggatgagcagccttgccatactggagaagaagtcgacgctgttccccgatggcggtggtatgggtggtgttcccttccaactctgagctccaggtgcaaccacgggattccaggttcattcaccatttgctctgtaacactattggtgtattgtgtggagcaggtttcagtgaacccagggccgcagggtttggtttggtgtcaaagatcggcctggaggcgaccaacacaagtggttccctgattctgcattgtggaatccttcgcccggacaagaggtgataggcactgcttctcttgccacttttgatgacaaaatatattatgattcacacacgctcttacgccttttgctgtactttcttttagattgaatttgacatacttgagctacttggctgcaggcatgcaagcttg

SEQ ID NO: 3947 - DNA, 885 bp, Zea mays
gctgcacccggacgtggccttggagtacgcgctgctcttcgcgcgcaaccagctcggcgccgccgacgtgcgccacctggaccacgagttcctcctcagcatgggcgtcgccgtcgccaagcaccgcctcgagatcctcaagctcgccaggaaggagtcgtcgtcgtcccaccgcaaggccgccgccatcgccgtcgtcctgccgtggcgcgccaccaggctgctcgccgcggcggtgcaccggtccgcgcgctcggcgctcggtcgcctccgcgcctgccgggaccggaaccgggagcggggcagggacagggacagggcggcggccgtcctcgccacgcagcgcgtgcctttgctgcggcaccgcggcgggagggtcgcgctcgcgcatcgccacagcagctgctggagcaaggccgcgccgcccgtggctaccatccgtactggcgggaagctgctggtcaagacgctgcccgcgcccgctgcctccatagccgcatgccgcctcgtgagcacggacgtctgcaggagggttcagccggctgccggcagcagcctatatataacagtagaggcgcacacgtcccaggcggcaggaagctcacgccaagagaccccgctcccgatcccgtctcctcctcgcagtcgctgcttcgcgaggagccgaagatgctgctcctgcgggcgtcgacgccgttcgcgtacgccaaggtggacaaggtggacgcggaggaggcgcggcacctcagggcgcagttcctcatccacaaggtgctcgagaagaagagtccccggccgtcagcgctggcgcgggccaggcccaggatcggcgtccgcctcaagaagctcaggctcgccgtccgggccctcagggcgcgcgcgtgc

SEQ ID NO: 3948 - DNA, 466 bp, Zea mays
tgcccttcggcgccgaccagttcgacccccacacggagtccggcaagcgcggcatcaacagcttcttcaactggtactacttcacgttcacggcggccatgatgatctccgccaccgtcatcatctacgtgcagagcaacgtgagctggcccatcgggctgggcatccccacggcgctcatgttcctggcatgcgtgctcttcttcatgggcacgcgcctctacgtgcgggtgaagcccgaggggagccccttcaccagcgtcgtgcaggtgctatcggccgcgctcaagaagcggtcgctgaagcagcccaaggacccgaagcaggacctcttcgacccgccgcacaccagcgccatcgtcaccaagttggcgcacacggaccagttccgctgcctagacaaggcggccatcgtggcatccccggacgaggtgcgccccggcggcggcgcgcccgcggacccctg

SEQ ID NO: 3949 - DNA, 450 bp, Zea mays
atccagcagcaggcgcccccacaacagacgcagcagcaaggccagcgacaacagccgcagaagtcggcgtaaagaccgtggctgagaggaggacgcggaagcgaattgagcattggccaaggccaactgaaggatgccgggtgggaaaagaaagaaccccaatcttttgccgtatatatatattatcagacaggttgtaggatagcagcaacagcagtagggcgggcgagggaccccgttggccccgcgcgatttgagttgttttcgccggataccgtaaccttagctggagtctgtcgtcgtcttggtgtcgtgcctgcctgcctgcctagtgttgatgaggcgtcttggtagcgtcccttggaacgccctctcggagccggaggtgcttcttatgtatttttttttgtctatatagataattatatgtgcatgggaacctgcgtagta

SEQ ID NO: 3950 - DNA, 502 bp, Zea mays
gggagcgcccgcgtctcgtacagcatgaccccgagcgggggcactccgatcgccgccaggaactccgggatgtcccgcgccgtgtagttcctggcgcgcgtgacgaccagcggcggcgtgccgggaccgaacaccgccggcgacggcagcgccacgagcgcgtcgggggcctccagcgcgtcgcggggcacggacacgaggttccgcagggggagcaggaacccgccggcgcccgtggacgccatgacgtagtgcttgacgtacctccggcgccagggcagcgggctccggttcaggaactccagcgcgaagtagccgccctggctgtgcgacacgatgacgacgggcctgccgccgttctccctgctggcgcgctccacgagcgccctgagccgccgggtgaaccgcgcgaaggcacggcacggctgcccccgcgccgcgggagcctggcggaagtcgtacggcgcgccgaacagcgtctctccgtcgcggtacccggcct

SEQ ID NO: 3951 - DNA, 384 bp, Zea mays
cacttcttgcaagaagtctgcaacaccttttctctcaggacatttgaagcccatgacctcaaaaaattcaaggacattctcccgaggaccctggtacacaatttggccctccgagaggagaacaatgtcatcgaagagctcgtatgtttcaggcgcaggctgaagcaatgcgataagtgcagttccaccaaggatgtggaccgactgccttagagagttgacgatctgatatgttgtggagctgtccaggccggtggagatttcatccatgaatagcgccttagctggaccaacaagcatctcgcctgtgaaaattcaacaagacatgaagtcagatttttttcgatcagggtcaaagggtttgatgcacaaatcttaatttaa

SEQ ID NO: 3952 - DNA, 379 bp, Zea mays
tgcgcagcctacagatccaaagctacgtactgtactctaaattccttgctgtagtacgtgaaacgtgatgcgtatccggccggctcccgcgagacaggaagagacagcgactcgcagacttgcagctgcccagcaggcagtagcttgccctttttaatcgcagcacttggggttgacagtcacacacacactggtcgcggcgcggcagatgaggcgccacaaatctgaaccagcatacagttagggcccatgatttcccccctttctctatggtttttatatataaaaaaactgatttatatgaaacttttgtatgattcctcctaaattcctgcatttcaaataagacatcgagctagtgtaagcgtaggcctgcaaa

SEQ ID NO: 3953 - DNA, 357 bp, Zea mays
ccccagccccggtcgctcctcctgctagcgcatgcccagctgagctcctacctcgtctccatggccatgcgctcgctcagctcgtagcccggctctgctcgccctgctgctccgattctccctgtgttgcgcgccatgctctgctcgccggatctcctctgcgcgcccagccgtttctccctgcaagttccagcctcctgcgtgctcctgctgctctgctctcgttgccgagctccctttcgcgctgagctctctaccatggcgttcctctccctggtgtgtccgtcaccagtagttgctcgcgcgggaccatgtctcacacgccggtgctcgccgtgtacactcccgtgtcctcat

SEQ ID NO: 3954 - DNA, 433 bp, Zea mays
acttcccatgtaaccatcaacaaaagttttcaaatcttcctacagccatggaccatggtaaatgcagtataccttatcagctgaactcagacactgttctttttttttctgtgtgtgtgtgtgctggcaaaatgtaagaaaccatccaaaaataatcgctcgaaaacctgccttaggatcctgcttttggagatcttttaacctttcaggatcgatggtggttccagcgacgcctgcgttgttcacctgaacaacccaaacgtgagaccgactgaacccctgaaacaacgcgacagaataacttgagcatacaacaacgcaccaagatgtcgagcttgccgaatctgcgcttgacgaactcggcgagctgcgcgatgctcggccggtcggcgacgtccagcctatggaaaaccacgtcggagaggccggcgct

SEQ ID NO: 3955 - DNA, 355 bp, Zea mays
acttacacaaggaatgtatcctgatctatttgccattttcttgatttgataacattaccgacacagcaaataggtaacactggcttatatgcatacatgttaaattacaagggagtacccgatagaaaatcatcaagcaagggaaccacttacgcaacatctttgacattctgaggtgcatcaaatccatcatacaaagtgcatggaacatcaccagagaagctaaagcatcgttcgtctaagcaagtgtttgtggccggagacgagaatgacatggacctcctgagctgcttcggattggctggttcctccttattccgcttttgaccacggcttctggatcttgacaaccttg

SEQ ID NO: 3956 - DNA, 378 bp, Zea mays
gtataagtgtgtaacatgactcagtcgggtaaaatgacacattcaatcccaaagcatcaaagggaaaggttcatttgtgatctgaacaaattttacttcacatgcagtgcagaaacatcatgccagttggattagttgggtatttctagaacaacttgggtccaactgtccaagatgtcaagcacacacttttaaagttgggacatcaattctaagctgatacatcccctgttcgcgagacattccttgccgacttccggttgacaaaaaaaaaaaatccaaactactgaatgctcacctcaaacaagtgatccaagaaaaagtgggagagcgagccggcagagatcagcaagaaacactgcctctttcttaatggta

SEQ ID NO: 3957 - DNA, 347 bp, Zea mays
aataaaaattcggtgttgggcccaaaccaaggactaacctgctgccatcatctcttgctgttatgtcattcattatatgtgtgtttccattaacatggctgcaactaaccattgctgggttcaggccatccatacagattgtgctttggcccatgttctccatcgtggaggctggcgctgggcatcccactaacacaaaggggtcattcaccagaggcggatgagggatgtccatgaagccgttatccatcacagttgagacaatataacaatggtggaaaacaaaatgagataaaacaccagagatctcaaagaacagggggcctgatgatatttctgcccagaca

SEQ ID NO: 3958 - DNA, 884 bp, Zea mays
cataggatgaaaaggtgaatccagattttttctcattggtacacttcaattcgagcttctgaaatggactgcacgtgaagagaaaaaaaagaagtgtttacaccagcccaccttttccatcaatgaatacgatcgcataccattattatttgcaacaaataaatgacagaaaaatatattctttacctgctatttggatcataataaaatccactgatggagccatcgctacaagaaaagcagacgtagtagaaaccagcgatggttaacccacagtcaactccaacattgacaaaatactgttctttccatctctgcatgtagcatcggagaaatggtaaacaaaacgcttacacataaacaaatgaacaggtcaggtaatcccataccataaatatgtaaggatagttgctaaagtccagagacttgccaccgtctgtctcaatctgactctgcagcgatgaactctaccgccacttttaatgcattaatggacgccaggttcatcaggcttgtggacgaccatgtcggctcccctccagccaagtcagacactcctcggaacacgatcacaggtatgccaggcgacgttgctgtctgatcatcagagttgagcgctaaatttatcttactagtaagtagtaagtaacatacatggtcgggatgtacgtagtgcaagtatgactgtatgagtaagggagctgagctgaccatcaccaccgctgcgctctcctcgtccattgtagacaccccaaactcttggaaaaggaacttcctgtattccgcgttgtcgaggaacatgtcagccgacgaccccttcagcccgtagacaatccgtggagctgtgggtaagcagaaagtgtcgttgcatctttcaagttcca

SEQ ID NO: 3959 - DNA, 395 bp, Zea mays
agcaggtaagcgacgacgagatctcgcagcctcggggccactcctagggttccttgctcccccgcgattaatccgtgatgcggaccggtgcaggagcgggcgtacatgttgcttcggatgaacgggggcggtggcgagggcagcgactacgggagctctgatgaagggagctacgaatatgacgaagagggagaggaggactacgaagaggaactggagcaccgcctccgcgtccaccaccacgagcacccctcgggcgatggtgagggagagggcgggggcgagggcgagggcgccgaggggagcgactacgacgaagagttcgaggaggacgaagaaggggagccggaggtagatcccgcggagtttgaggacgatgaggcttatgcgcgtgc

SEQ ID NO: 3960 - DNA, 317 bp, Zea mays
ccagcggcggagcgcctcctcggaggagttcttggcctgcacaccgccgaaccgctcctccaggtagctctccatcccgctcctttgcttaccctgtccccctgggcgacggcaaggaagcagcttctccggtccttccttcctccttccgccccgggtgggtcggccggccggccaagcaccaatcaggtgcacgcgtgcggggcacggctgacttgtagcggcttggctggtcggtgggggatcggcgtggcgatggggtgttggttcccgcgagccgcggccaacaggcagggagggaaggagggaggggtgca

SEQ ID NO: 3961 - DNA, 379 bp, Zea mays
tacataatcggctgcatgtcgacatgcgacgacccactgaagaacggctcatgctccggcaccgctggctgctgccaggcggagctcccgccgggcgtccagttttaccaaggcttcttcaactcgctgcacaacaccaccaagatatggaagcaaacaccctgcaactacatcaccgtgatggagagcgcggccttcagcttcagctccacctacctcaactcgacggtgttgtacgactccgacgacgggaggacgccggtcgtgatggagtggggaatcacacggcagacgtgcgaagaagccaaagccaacaagactgcgtacgcgtgtgtcagcaaccatagcgactgcgtctacagcgatgccgccggctacc

SEQ ID NO: 3962 - DNA, 430 bp, Zea mays
actagtgtgaggtgtgatctggttcatgctattgctgatgtatgcatacttttctgtgtatccctgtgggccgttgaacaaataaaatctttaatttacttttctgccgcactaagccactaataccataaccactagtgtatgaatattttctgttgtggccgcttgtattatatgaacttcaatatgtaagccagtcgccaccatgagaaatttagcatagtatctatgcatgacataggtgtttggtcatgatctctaagctcctagtgtcagatgctttttacaaccttgttcgtcaggagtaaggtccataaccgaactacaaacatggtgcttatttgaacttatgttctgtttctgtcctttggcattgtaataaatctttattcacattttccctttaggttcatatatgttttcttgtttt

SEQ ID NO: 3963 - DNA, 392 bp, Zea mays
gctcggagaaggacgcgacgttgctgaagtcacgagccgcctcccgaaagctcgccgcaccgccgccgccgccgctgtctctgccttcgccgccgccgcccatgcaggcaggtgtggagcgagcgagggaggtagcttggcttggctaggtacagaactatacgtcttctcgtgtatctctgcggagtagttttcagtaccgccaccagtacgtaccaagaaggaagtagccggggtgtctcatagctggtgtgtggctagtagggaacgagggtgcatgggaaagcctcctcagcacccttccttcgcgatcgatggatggtaaggactgaggagagcgaggagctgaaggaagcaatggagaggagagaccagggaatataagcaagggc

SEQ ID NO: 3964 - DNA, 377 bp, Zea mays
catcaacagggacaatagcattatccatacccatcaaatcacctaaaaggtctggcattaccactggaccaggtggggatgctgccgccggctgtttcacgggtacattagaagaagtaccagcactagaggaaggcgacgccccatcaactccctgggatggggactccgaataccctgtttcagctgtatcagcaaactcatcatcatcagccctaggagctgccttgacacggctgacaaatgattctgggggcttatgataaactgatgaaagggtagaaatgtttgctagcagctcatcaagaagtgatgagtcaagctggttggagtcatcactgatcacaggtttctctgccaaaactacatctttcgca

SEQ ID NO: 3965 - DNA, 826 bp, Zea mays
aaagttttgtgccgcctgcgaatagggccttttttcttctatgggctgatcttatgatgagaactttctccatttatgttttatttcccctaattctaattgggtggggtataaaggaatttgcgctcttcatatacccctatggctggatagtaattttcagtgatatacttcttatctgttttggtgagagattgaaacaatttttagcaggcatcttttggaaaaactttcgagttcaaaactttttcatttttcttaaaaagttttggacggatttgttgaaacgattttcaacaggtaccccttggaaatggggtacttgactattctacaaggattatagtggatttggaacaaactatgttggagttttatcaacaattttattctaaaaaaaagggttgggagtcgaatttatactgcagatcagcagatgcgagcctgcaagcagtgtaaaaaaacgtgcagacacccgtcagatggagtggccgatgaggccgcagacgaccacgagcccgacgagaagcaggcgctccgcgtctgccgcagggcccaccgtcaggctcaggacgtcttcgcccagcgccacgccggaccccgtctgcttcctcctcgtctccgccacgacctcgccgccggggccgcggatcctgtactccgacttgcgcggcacgccgtcgatcctgtagacctccccgccgacgcagaccgtcgccacggctccgccgccgcgctgccttcccttctgcttcaggacccgacgggccttccggacactgaaccacggcctggggctctcctcctgctccacgccaactgctgc

SEQ ID NO: 3966 - DNA, 454 bp, Zea mays
cttgcatgcctgcagcagcaggcagccgcctcgccacgcgcccgagcaacgccgccgagagagccgcccgcccgcccgcccgccggtgagcagcgagggcaattcgtcttcggctggtccccgtcccgctcccgcccgccaaccccaattgctcccctctcggaggtcagctcaattcctgctgtttctcggattcgattcggttgcaccgggcgcgtcgtctcccttgccggagatccagcaggtacgagctcgcctggggccgaggatcatgcccccattgctctagggtttgggtgggtaatccaattggctcgccaggcccgcggcctctatgcttgattcgggcctgccgcgccgctccctgggatctcgcggcggttggtgcggcgccagcggtgatgagatcccctccatggccggcgagctgggaattggggtacgggctcgctct

SEQ ID NO: 3967 - DNA, 353 bp, Zea mays
tgagcctcatcatattgcagctggtgctatctatttggctgctaaatttctcaaagtgaatctcccatctgatggtgataagatttggtggcaggattttgatgtcacgccacgacaacttgaaggttggtccttatttgcgaagttagtgagaaatgtttccactcgctctactttgtctatttgttctgcatatgttgtgattgttattgattgaattggcaccatgtgtttggtgtgtcaaattgaattttgttcctgtgaaagtccaggttttgaaggagtgaataaacataatagatacttaacttgataactttgtgttttctttctttactgctagcagttcttga

SEQ ID NO: 3968 - DNA, 389 bp, Zea mays
tcctcttccccactcggccaccgccatcaatggtgtcggtcagccctcatctctccacttgaatccggtcgtttcttctcccctcacaggtgtgcgcgtacggtgcttaagtgccatcaacggcaattcaattcttccgtcagattcaatacgcatcaattcgtggtccgtgtttgcctctttccgtagctataaaatgcctcactagctcttctctcctctcgcacttgttgctgctgctgctgtgtcatcgagtctgctcgcaacacgccttcgctggtcaacatgccctgcggctacaccaccatccgcgctgttgtcctcgccacattggtgcctcacgtggtgctcgcgcttaccggtagttcgacgccaccgcgtcgtcgtct

SEQ ID NO: 3969 - DNA, 344 bp, Zea mays
aaacagctagaaagccaaactgtactgttatcgctggcagttggatactgttgcgagcctctagttaacatttgattgtttacctgtcaactgtcattttctcttacttgcaaattcagttccttgacagtgtagtagtgtataaaccatatagtcatgtgccagttctgaggtgttctccattcacatagcattgctacgtttttttttgttggattccacgttgtcgcttctgcttacgatgtttcttcttttcactcatgtatatatcagctaagaaagtggaatgagcgctgggtcatccttgatccagcaactggaaagatagaatacaagtatggtaa

SEQ ID NO: 3970 - DNA, 347 bp, Zea mays
cagcgttctccagcctgccctggaattccagagccatactgccccaccaccaccagccctgcctctgcctgcttctatagctgcgacagtttggcacatgtcgcgtgcgtaccaagatctactttcacacctatccaaaacggcctcgttttggaaggacaacgatatcgagagcgacaagaaagctaaggctggaagctctttgtatggctttaagagagcagaattacagtgccaacggcttcctgtgccctaaaacaggaaactccatggcagaaagacagaggcgcagaggtttgcctaactgcctagggcaacaggatgcccgacaacggatcccaccggat

SEQ ID NO: 3971 - DNA, 396 bp, Zea mays
tcctcgcagtcttggtaccccgacgacgacctccacccgctctcctccgccccgagcgacgaggactccgccgctgcctcgaaggcgtacccctgccggccgtcgtcgtcgtccgcgccggcctgctcgaacgcgtggtacagcgactgctgcatgtagtccgacgaccccagcagcgcggtcagggactcgtgcgcgccattgccgtacgcgcccggctgcgcggcgggcgcgcccacggcgcctgctgctgctgctgcggcgcctccattgccgctgcaccaggggtagccgtaacctagctgctccgcggcggcgctgcccacgtagcccttggcgtcctcgtgcacgccctgctgcccctgcgccgcctgcgccttgagcgacgccagctgc

SEQ ID NO: 3972 - DNA, 801 bp, Zea mays
gagccaccggtgcgccccgaacgcggcgccgctgaggatgaggtcgcggtagagcaggtggatgggaaccctgtcctcgatctccatgtgctccacccatgtcacctgatcaatgaaaatgtcacgcgagccacgactccgtaccatgcatacacccacgcatacgtgcacatgcacgtgcagcggcaacgcacacaaaatgccaatggcaattggcaagacaaaaaaaatgcacttttaacgacagcaccttggaggagccgtcggccatatcggcgatgaggcatcccgacgggaggcggcacgagcgcgacggcggcgcgccgaacctcgcgtcgtgctgctgcagcatctagcaggtcgccccgtctggctccacgctacccgccccgctcccgccatgtctgacgatagcgacaggcagcggcaatgccgccggggcgtcaccgtcgacgtcgagctcgacgccgccatggcgctcgccgacatggccggggtcgggccgcccggcggagatcagcacccgccggtgcagctcgcccctcctactactactactactactcaggtgaattgtatgaatggttaaaaccactgtcgccgtcgccgctctaatttgctcgatctagtaacataaccgttattaattgacataattgttcatgatcgtggatgcaccgactaggaggacgaggaggagctggcgagcacgcggctgagcctggagctgggaaaggtgggcatccaggcctccccgtgctccagcagctcaagcgccggcggcggaccgcatgcgcacca

SEQ ID NO: 3973 - DNA, 494 bp, Zea mays
agagcagcgcacaggcacacgccgcgagtggcgagacccaaaccagcagccatgcagatgcagctcagcgttccgccgcacgttgtcgtgtgtctcgcgttagcctttctgctcccgtgccacgccacggcgacggccccggccggcacgatacggcgcgagaccaagcagcagatcctggcgagcatcccgccgcactgggacgagaaccccgtgctgttcctgacgtcgccgtcggggaagtacgcggcgtacttcatgcgcagccagaccgagccgggcgccggaggcctgggcgccgacttctgctacgtcgaggtgctcgacacgacggcgccgggcgccgagggccggagcgtgtgggagtcggagtgcatggccgtgagcaccgtgaacacgtgcgcgctcgtgttctcgtggaacggcctggaggtgttcgacgggagcacctcggtgtggcacacccacgacgcgcagtccgacgaccagaactt

SEQ ID NO: 3974 - DNA, 376 bp, Zea mays
tgcattgcaaaagaaaataaaacattacttttgccacaaaaggtaaataacatgagaaacaagatagaatcagatatcacagcatcagaagatcaaacaagtcattacaacaacaacaacaacaacaacaacaacaacgccttttaatcccaaacaagttcttacatttttttttgaacaaacacaggagagctgcgtgtcatttcattaaggagaaaaaataggtaggagacaagacttgtcaacccctattacaaggccaataaggccaaacatccataactagatagtccgcgccacacacactataagagcgaccagactcccattggaacgaccacactaagccccaccgggagccgacgtaagaggaggt

SEQ ID NO: 3975 - DNA, 435 bp, Zea mays
agcaagggttgctggactgaacgggcggaggaatcggcgggaatcatgggcgcgccagcgggggcatacgccaaaagcgagggggctttgcttaggagaaggacttgagcgaagggattggattccgtcgcggataagcacggggggagaagagggaatacacctccgagtccgaggcgtggcgcacgagtgggacagcgagcggcccgcgcggggcagcggcagcgataatatctcttggacgttgccctgctccgaaggggggacgcgaaaggaaccggaaggaacaacagcgatgcacagtgcgcgactgactaccccggagagaggacgccggccggcgccgcgccggccggtcggcgaggggcgcgcggacggatgagcgaattggagcggcgaaaattggggaattcgcggggctagattagacccgca

SEQ ID NO: 3976 - DNA, 469 bp, Zea mays
cacagtggacggcctgtgatcaagcacgctaccagctgcacgaatagtccaacaccgagcagaccagacagtcagagcaatgcacgcaagacagatcactaggtgtcagacaagagagagagattaataaaaaaagattcgattttgatgtgtatgaaccttcagccgtggcaaagatgaaaccgatggccttgtgggcgacgtggccgccggcgccggcgccggcgccgccatgcgggtggacccgggaggagaagcatgggaggaagtccaagggcgtgacggcgcccatgcgccacccgagcgtggacagcaccagcagctccatccgccggatggacgccgagtcgaaatcgtagccgccggcgtggaagtccgacagcgccggcgcctggcactcctccatcttggcggccacggacacgcacgcaacggacagcagctgcgccgcccacggcatcgcctccct

SEQ ID NO: 3977 - DNA, 320 bp, Zea mays
cgccaggcgctggtggacccgcgcgggttcctggccggctggaacggcacgggcctcgacgcctgctccggcggctggacggggatcaagtgcgcgcggggcaaggtcgtggccatccagctccctttcaagggccttgccggcgcgctctccgacaaggtcggccagctcgccgcgctccggaggctcagcttccacgacaacatcatcgggggccaggtgcccgccgcgctcggcttcctccgggagctccgcggcgtctacctccacaacaaccgcttcgccggtgccgtgcctccggcgctcggcgcctgcgcgct

SEQ ID NO: 3978 - DNA, 408 bp, Zea mays
gcttgcgccaataatggcagcaccaaagcgaaaaattctactattcttcctcggcacccctggcacctctttagcagcaaggcgtaggtaaagtgtttccccatttccatcaggttgttgcttcttcacattggtcaatctgccatgccagacagagcagcctccttccccataggaatatccagtgcacgagcagttacccaagcaaacccgtgagcagtcatcctcatcacttgttgcagcctgcattttcattgcgtcctggggcaacatgacattttgcacagcgtagaacttatctgtgttgcggctccttccacagtgcaatggagtattcctcgtgcacccgtctctccggtctcccagctcccagtccctgggtgagcttacggagaaacccttcatgca

SEQ ID NO: 3979 - DNA, 432 bp, Zea mays
cataagttactggaagaagcattgggtaaatcagcatcagcaccttcagccaactcttcaagcatcaactgcatagttacatcagggtcactgattccaagccttgccaaatgtttgctgtatcacctggatgatgtggtctcatctgagaacggtatgctaattcctccagtttttccttgaagcacttacttcctgttgtatatggtgcttcgcaagccacgaatcagattagtgatgttggctttctctgtttgacgaaatgttgtccatggcattatggcaaataacattactaatctatctgctagttgcattatttgcatcacaccatacataaagtccatgtggttagttgtaaactagcacacgaagctggcaaataacagtttgcttgtgttttgcagtctacagctcatgggaagtgggtaa

SEQ ID NO: 3980 - DNA, 341 bp, Zea mays
gaaagaaaggtaaggaaagggtatcaagctcttcaattcctcagaaggattttgtcattgccgatggtatctcgtgatgcatgcagacggtgtagtctagaaaagaaactagcggacgctgatgtgtccgaagaggaggtcaacaacatcctgaagcagttcgagaagaaagagacggagtacatgcggttgcaaaggcacaaaatgagcgtcgaggatttcgagctgctaacaatgatagggaagggagcttttggcgaggtgatgataaaccgaatgatcgactctgttgctacaaaatcgtctctgcttgacgcaatggtttccttctaggtcagagt

SEQ ID NO: 3981 - DNA, 448 bp, Zea mays
attaatctccaacagcttcatggattggtggtattgggccagcagccaagtcagttgtgtagctaactagctaagcaggggctgaattccctaattattcttggagcatggacactatggaagcacagaaatagctgtgtttttgataggcaggctccaaacctggatgtggctatcagaaaagctaatcaagagaaagacgtatgggggctggcaggggctagggagctctcccttctaaccgcccctattcctgatatttagctgagtttagatggtcgctctcgctctgtttttgtctaggatcatggatctttttgtgtattggtatttttggccatggttgtgtccgttgtaatgtttgttatggtccaacttggactcttcttttcttcttaatataatgatgcacagttctctgcgtgttcgagaaagaaaagcatgtggt

SEQ ID NO: 3982 - DNA, 390 bp, Zea mays
atacatcttggagaggaatgcgtcttttaccttcatcgtcattattccaagtggtactccaagttcccctgccttcgaaaataatgaccttccaacctcattggtcatctgtttatttgaaacatttttttgccttcaggccacattgatcatcaatcgcaattaataagtagaggaacaatattgctcatttgcctatttgcaaaccttttgaccagatggccataagtttgggttgaacctcacagcacggtatttttcctggggataaacgaagggactgcatgttagaaactagcagaatgggtcattccttttgtgtcagaagaaaattccaagaggttacttgtacaatcagatgttcaagctgtttaatcccagtcccatcgt

SEQ ID NO: 3983 - DNA, 355 bp, Zea mays
tgtgagacctaatgtggttactctgatttgtgtcatcaaggcctgtgttggtgctggtgaatttgatcttgccatgggtgttgtgggattggcagtcaaatgcaacttgtttgaaaagagtatcgaggtacacaattctttgatcactctgtatctaagaatgggagatgcagctgcggcacgcagggtgtttgatgacatggaggtgagagatgttgtttcatggactgcattacttgatgtgtatgctgacttgggtgaccttgatggagcacgacgggttcttgatgcaatgcctgcgaggaacgaggtctcctggggtacattgattgcaaggcatgagcagaaaggtgat

SEQ ID NO: 3984 - DNA, 402 bp, Zea mays
aaccaatgtaggaaagatatttttttcgaactgataggattccacaattgcattacgaaattaacgtcagagaccagctagctatccttgccaccacaagacacctgaatcctaagaatcacaagagatagtagcaacacaacagaaggtctaaaccatcataagtctttccaaaaacagtacaactgctagaacttgcgagacaaccaccagatcgcaaaacgactgagggcttttaaatgtgcatgtatccacttagatccttgtgggttggattggtgtggtttggattttaacctaaccactccaacccatgtggattgaggtgaatacttgtgcatccaaacaaggcctaaaagaacaatagtatcagcccagaactgtcagttcttctgattatat

SEQ ID NO: 3985 - DNA, 358 bp, Zea mays
ccttgtacacctgggtggcgtcgttgcagccgaacatgggcagcttccacatggtccagtagcggccgtcgtagtagcacggggaggtggagttctcgcggtacacgaagccgaccttgctgaactcgaggcagggtatccagccgttgcgcagcaggtagtccacctgcttcagcaggtcgtccgtcgacagcggcggcaggtacgacagcgtctcgaacttcttgttgccgtaggccggccacacctgcacgtagtacgtgtgttttggtttggttggggttgggaaatgggatgggatgggcaacacacagtccatgcatgcatggatcatcagttccttcctactaactcgcta

SEQ ID NO: 3986 - DNA, 386 bp, Zea mays
agtcggatggcgatgcatcggcgtgtccagcagcaccaccacctcgtaggcgtctgccgtacggacctcctgcgctagcgagcacgggtagcagcagagccacagtaggcagtcggtgaggtccggcttgccgcagcaggcgcggttctcggggaggccgaaccgcctgcgcatctggatcctccagaatccgccgtagagcaggccgaacacgcagaggaagatgccggccagccccagcgcgtccctgaccgcctcgtcgtccacgttgatggccgccaggtccaagatgaagaagggcgccaggcacaggagcacgaaggtggcgacgtggacgtacatgttgcccaagccgagcctgctcgcgttccacccgaacacgcagc

SEQ ID NO: 3987 - DNA, 421 bp, Zea mays
atgtgtcattcgcagacaactccttctctggtgatgttcctgaaggattcagcagtctttggagtctgcgcgacctcaatctctccggcaattcattcactgggtcaataccggcgacatatgggtacttgccatcacttcaagcgctctcggcctcacacaaccacatttctggggagctgccaccggagcttgccaattgttccaaccttactgtgcttgagctcagtggcaaccagctgaccggctccatcccgagtgacctatcgcgccttggtgaattggaagagctggacctcagttacaatcagttttcaggcaagataccaccagagatatccaattgctcatcactcacccttctcaagcttgatgacaatcgtattggcggagacataccagcctctattgccaacctctc

SEQ ID NO: 3988 - DNA, 877 bp, Zea mays
aattagggacttttttcttctattggctgatcttatgatgagaactttctccatttatgttttatttcccctaattctaattgggtggggtataaaggaatttgcgctcttcatatacccctatggctggatagtaattttcagtgatatacttcttatctgttttggtgagagattgaaacaatttttagcaggcatcttttggaaaaactttcgagttcaaaactttttcatttttcttaaaaagttttggacggatttgttgaaacgattttcaacaggtaccccttggaaatggggtacttgactattctacaaggattatagtggatttggaacaaactatgttggagttttatcaacaattttattctaaaaaaaagggttgggagtcgaatttatactgcagaaaatgcaggagaaacctactgctggcctcgcgcccagttaccttgaacaatggaaagtcctcagagcagtagttctgctgcatcgcaaaagacaccacaaatatgtatggaagggatgtatgaaaatttggtcttctcccgcaagcttgaatgctgccggcaatgactcaggtgtcgccaactggccaaggcctgatggacgagcagtggcttcccctactgggaagctgaaggttatgccgggcaatgggtgatgcgatggcatagcgaagcagcttcatgccaacatatattgccatattggcttcattgtcacactactgacagtggtagatcatcaccattattggggttgcgcttttgtgcagccttcacggcagcaaccctggctgcattggctgctttattagctgctgcaacggccctgttcaccctatcatctactcttgggatgtcataggccttct

SEQ ID NO: 3989 - DNA, 385 bp, Zea mays
agatgtttctgtaaaaaaccaatgaggaccctcaagagcctactaagcatgatagttcatagtccagattccttttttgtcgttaaattctttactaacatgagcatgttgtattatctccctccaggacaaggcaacaggctgttggaatatggaccaacaaggcatgcatgaccatgtaaggagttatataaccttgcatatatgatatatatgtacagtgggtaccaaaatttctgtggctaacttatggttgctaaccatgacccaggaaggggtccacgttgttggatttgaagtcccgccttcaccggattccagctacgacaaccctgttcctgggaatgaagacgaaggccgggagcccccactgatgccacctcat

SEQ ID NO: 3990 - DNA, 422 bp, Zea mays
acttgggcttccatttgtactcaagcaacaaggttctatggacatttcaggggagtttccggctcatgcccatgacaaaagtcaccagggctctagggaccacaggtgttttcctatcagcaacctcaagccaagtgggtcaaaacccacatgtgttctggtcctaccttgtgctgcaagaggctgcacagcttgttgccggcaaggataacactggtggcagcatcattggtgatccaacgcaggttgccgagtgcttcttgtacttactggatctatgtctcatgggtcatcacttcatagtggactatgacctggaaactcatggctgcaactactggatatgtgacggcatcatatatgtacaacatgggcagagagaagttgaccgcgacattggattgtggaaagctgttgaagct

SEQ ID NO: 3991 - DNA, 415 bp, Zea mays
ctgatccacattttgcatcaccagattctgcccataaacatagacataagtttcgggcgctacaaactaaaatgaatgttttatcaagcattgaaagaacatacctgaagcctggacaatttcatcacagctttcatgctttcacgcgaagtgcaaccctcaggccaattcaggcgtccttttctgatgtatttgtcagagtgccgactacaaacaaggattaataagcacaagacatcgaccagatctcacagcactgatgttcagagaaccctgccctcttaagcatatgatatgagacaatggcatgaaacgtactctgccctcttgaacatatggtacggcaaaggtccaagaaccctctccatcatagccagatgttccaagttttcgtgagtctggaatatcgcctcac

SEQ ID NO: 3992 - DNA, 389 bp, Zea mays
ggcgcctgcatcatatatgtgcagtacagcagcaggtatgcatatgcatcagtcaaagaaatacgaccggcatgaacctactgccactgatctactcctataagtcagcattgttaccgatgaagaagccgtagttgatggcgtggttgatggcccagccgcccaccgccgccacgatgatgtacatgcagaagttgagcaccaggaggaggccggccaccggcctcatgcccgcgttcgccatggattgttgtcctaacggactactgatcgtcgatggccgacgagctcgactgaaaacgaattgagctcgatcgctagctcctagctagctacagcttgctagctctacgcctctctacgtacgatttctgctggcttgaggcgtc

SEQ ID NO: 3993 - DNA, 339 bp, Zea mays
accctccttcgccgaggttcgctccgagatctaactcgagaagctctccctggggcctccctccagcgccacaccgtccaccgccccttttctgtctgcccccacagccctcatcgcccagcctggctccgtgccccctgcgccgaccctaggctccaacgggggcgggagtcaccaccatcgcaagaagggcacgagcggaggcggtaccgggagcagcagcactaccagcaccggtagacgtacctggtctagcttctgcaatccatggacataatctagatgtggccgacgacgaacagggggtcgccctccgtccgctgtgccctccttggcgga

SEQ ID NO: 3994 - DNA, 391 bp, Zea mays
caagcagccgccgcacagcaagcagtccatcagcaggcagaagcaggccgccgtgggcgacgacgagccgcagctggacaccagcagcatcgttttgagcagcggcagcggcaaggctaataaggcaccagtattagacttagtaacgacggcggaggccttggcgacgttctgtggcgcgacggccatgtctgtggagtcgcacaacccctaccgcgacttcagggactcgatgcaggctatggtgatgagccagcaaggcaccactaaggactggcgctggcttgaggacatgctgggctggtacctgagagccaacggcaagacgacccacgccctcatcgtcgccgcctttgtcgacctgattgtggcgctcgccatctcgcctccg

SEQ ID NO: 3995 - DNA, 418 bp, Zea mays
tgcctggtttgcatagtaccttacgtcgacgtcagggtcctcgctgagctcaacgaggcacggtttcacggtcttctccaccacctgcggagtaagcactgatgatattccccaataccatgaaaaatacagatgtaccgccttcttcgaaaatgttggtaacatgtgggcggaatagcttgaggaactcacagattggtcgaggatcggtacaagtgactgtagtactttcgcaacattgaacttgatgttgggaaccctgaaaaattttagaccatgttgttcagaaactgacaagattagatttttctttaacattcttctagtcacacacctgtccttcgaagaattaatgacgactggaagcagcttttgacaggtgatctctgcacccatgacaggagctagcaaggagatt

SEQ ID NO: 3996 - DNA, 421 bp, Zea mays
tgttgcggggctcggccgctggaacgtgacctgcgcgcgcgcatccgatccggtcaggtcgtggcttcacgcaatcacgctcatcagtctacagtgacagtgacaccccaggcccccagcgtctacgggcgatccggttacggcagatctgaatcgctgttggttgccgatccagcgtaagcatagtagtggcgatcatgagacgctctacagcaacagcatttggaatatccagggttttttttttttgtcttggttcttaaatttgcagagcagttagctaaacagtttgtgcaagaagtatgcaattttacgcagcatacgtacgtacgtaccttgatggcgggcgcggggtagcgcggggcgtcgcggacggccagcgcgagcgcgtcctggtcggtgccgacgcagtgcgcgcggc

SEQ ID NO: 3997 - DNA, 431 bp, Zea mays
agttaactaattagattgttcagatgagatggatcccagagttagggctgctttctgcaaatgagagaaaaaaattgatccatagtaaattaattcaacagaccaacctttcgatgctccagaagtattagttgagctcatctttctctcatctttcaaattatcctgttgtaccctctctctgtattctgcgcatttcaaacaaataaacacaatgttattctcccatggcaatgacaacaatgacattattataagaggaccaagcattctcacatccatgtcgtgactacaagtatttgtgtcgagccatgaaaagctttgctaaactcaagcatatatgtactgatagaagtatacctttgcctttcgatctgccgatggttgttccatttgcagcgttttttctggagctctcacaaatagacatc

SEQ ID NO: 3998 - DNA, 345 bp, Zea mays
gtctcgtcgtcgccgccctcgctgagcgtggccatgagcttgccccactgcgtgcgcatgccgacggtggtgaccagcatcttgcacgcgccgtcctgcaccttggtccccgacagcaggaacgggttctcggcgctcaccgcgacgggctcgctctccccggtgaggctggactcgttgatgagcagggagaagcccgacacgaagagcccgtcggcgggcacctggtcgccgatggagaggtgcacgatgtcgcccgcgaggaggtcgtagatggagagcctctggcggtacccgcgccgcgtgacctgcactgtgatcttcttcttctccttgtccaggtcc

SEQ ID NO: 3999 - DNA, 394 bp, Zea mays
aggctgagaaaaagcgtaaagaagaggaggaagctgtagcaagggcatcccaagaagcagctgagaaggaagctgctcttgcaaggaggaggcaagagaaggccatggctcttggagctgaacctgagaaaggaccaggtgttactcgggtatgtgatgtctaaccctctatgcttgtgtctttaaactacctttttccaattcttactgcaagatagcatgcttcatgttgtgccgatttttaaggatttgtctatttgagtgcgtcaaatatcactgttatgcctgcaaatatctgtttcatgtacgatatatttacagtgattgcaatgaatccttcgttactatctgagttaattgttagttttggctacgtagtgcctgaatttgatat

SEQ ID NO: 4000 - DNA, 392 bp, Zea mays
tctgttcagattattgtagactgatatatcttaaatgatttggactcacagtcaatagaagacttgacgagtgggttaagcttgatcagcttgatcttgacactgtcgagaccgttgtcgatgagaaagtagaagataaggtaaatggagatgcatgccgttatgctgctatataccaatgatagttctaccattttcttcacatctagccagtggcagcatcattagactgccaacgttttggtgaagcaatgtccacaacttttattgaaaacaccagttttgcaagatgagtgcttgatatgattatcttttgatatttatccaggcaacaagcttaaagatgacacggcaccagaaacgtaaaattgatgaaacacatgtggaggtat

SEQ ID NO: 4001 - DNA, 414 bp, Zea mays
tgcagtgactttgctgtcccgcctctagaacctttccgattgtacaccctcaagcggtcaaagccacggcaggatattgctccagctcgaacatggccacatggggcgggggtgttccctgacgaactgaaatggttttcccacacacctcgtagcatcagaaacgcatgaaacgtaaaaaggaaaaaaaaagatgtgaagggagtacaaaggcttggttttttttttatttatgtatccaacaccacactccatctgtacaaaagacggtcagtgtatgtacatccagctaggaaaaccagcacatcggaaaacgggtgctctctgctccgctaggtaaagagcgtccccaaaaacccggggggcaaaggaaaaccacaagcctataaagcttcttttgccgatcgatctgct

SEQ ID NO: 4002 - DNA, 365 bp, Zea mays
ttggttctgaggatccacaccgagaggtccttcctctccgtggccagccccacagcagccatctgaaggaagctgagcaagaacatgagcgcatttccagagtagagagccggatacttcttccccagtctcgactgaaggatgaaccaaaaggaccaacacgctgcgcctgcgagcagggccacagacccaatcgcccactgatggtgagcaagaacatggcgggctgctgctgcttgggctggtgagggtttggtcagtgatggaccttggtagagcgcaagcacgatggctcctgtgaaccctactgctgtgccaatcaccttcgctatgccggctccagtcttgaggtccagtttctccat

SEQ ID NO: 4003 - DNA, 442 bp, Zea mays
gcttctttttttcaactcaggaaacgagctgagatattgtacaaccaagtagacacaaaccatcctggtttggaagtcaaatgaaggggatcagcagacaaggagacgctaccacaggaattcgtgttttcagctgacttcgcctccctaaaaattttcgtcaccatctcaatttgtccatgacgcggaccgcttcaaaacaggcttcaacatcgccttgtcctcttccagggcgatcatgccaagatgtgaaggatcttccaacagcatcttggcgaccaaataccccgtgatggaccaagtctggaatttcctcgcctgcttgccaacataccgaccaagcttcccatcatagtactccggccagccatccttcaacagcctcctctctgctaggtcgattgctcttcttgcaatctgcggccgtccagttttgatgcag

SEQ ID NO: 4004 - DNA, 431 bp, Zea mays
aagcataactagtaaacacaggttacctggttgtagatacaacacatctacctccaccctccacctctgcccctacacatacttcaccttcatcaccacactttccagtacatgagcttttattgcctgctgaattagttctgtctgccaaaaagttccatacaaaccgagacgtgtcatctgcgtatgaaggaaactgcgtgccagatgggtcatccagaaaaacaccaacataatgacttgggcagggattgcttggagaaatgaatcttttcacaaggccgcacgaaagaccaggattgcaagtaagcaggcatccaataagttcttcgaccaatgaaacgttcacttttatagtgtttagtgttataaggtcaacaactgagtcatcactagcaagaatatacatcgacctcgcaaccaaagcggcg

SEQ ID NO: 4005 - DNA, 421 bp, Zea mays
tattgggttgccttacctgtcccaaaaaaccagtagtaccactttcaaccaaaggaacatcagcagcaaggcaaaggcgattaacatggcgtctagcatccaagttatcaagaccattcagaacaacattaaattgcttgaagaaatcaacattgaaatgagaatccttcacgtttgcatggtatgggtttatattgatatttggcctaaatttcaacacagcatcccgagcaacctggcaacaccaatggtgtaaaacagagtaagaaaaaagaaacaacaattgggtgattacaagaaaaactggtacatggataattattctagtcatatgtgaaactcactttagcttttgactgaccaacatgactctgccgaaacaaaaactgtctattcagattgctaacttcaattgtatcca

SEQ ID NO: 4006 - DNA, 458 bp, Zea mays
aatggtgtttgtgctttgcaaaacgaggtgcagcaatggtgtcggcaaggtcgagcttgcagattcaccattggcagtctgtctgcatattttttttagataatggaaacaaagttcggccttggcctcaaacgaggttatggccaaagtttacaataagaggcagcatactgccttgacagttgacacatcacacgacttcactagagaataccagtgacataaccaaaggtactacatagttaaacgcaaagcagaaccccatccgaaattgcgaaaaaactgtagtagcaccatctccatactacgacatgaagaatttattaacccttgctcctccatcttaagctgttgaccagaagcgacaccagaaggttacctgcaaacaagatttagtagatgatttattgaaaaccacatcattactactcaaccaaatggcccaacaatttgcagat

SEQ ID NO: 4007 - DNA, 436 bp, Zea mays
aaaccaacacatctgacatgctggatttggctgtcgactacatcaaggatctccagaagcagcttaaggtaagcaatccaatagtaaggtccttaataagagaaagacaaaccggccctgagtagtaaggtataaaaccaagctatattgatttgttgcgctttaaactgaaatgagaaagttatgcattgcgttctgttttagacttatctgaaatacacactcggaacacagaatttgagagttcgtttctgctatctgttcactgaaggtactaaaggagagccaagataactgcacctgctcagcaagcaagaaccagcagcactcctgctgaaaccgtaatgctcactgtacatgaatgacctcgaaagcatgtccactcgggaaagaaaaggatgtaagacagctctcatgcatgttgtttcatgaggtt

SEQ ID NO: 4008 - DNA, 400 bp, Zea mays
atactgggtactggcactaatgcagcgtacatagaacatatggactcaattcctaaatggtgtggcccacctcctgagtctggaaacatggtgagcatctgttacttctctctatgattgcaaagtaaaaaacatacaaaagatgggacttacattgactgtactcttgcatgtaggtttttgccttattgatagcattgacatgtttatgagggtgttcatcattagcttacctttttatcaggtgataaacatggaatgggggaactttaggtccacccaccttccactgactgaatttgatgtagccttggatgcagaaagtttgaaccctgatgaacaggtattgcccttcatatgctacagattatgatcttttacccttcggtttttattgact

SEQ ID NO: 4009 - DNA, 365 bp, Zea mays
tagcagcatcaacaaacaaggaaatggagtctcagatccccagttatcctaatctgccgccacagcttatatgccaactgcataatgtgacgatgcaagtaagtttggagtctcggaacactttctccttaagccgggtaaccttagttttctgtttcattatcttatttgtgttctttctcttctttcaggctgatgcagagacagaagaggtatatgcacagatgacattacaaccactcaacccggtaaattacatttgtttctgcctatttgtgtcatataacatgcaaacttctcttgggatctatgaaaagtaatctttggctattggcttgctttttgtgcagcaagaactgaaggat

SEQ ID NO: 4010 - DNA, 768 bp, Zea mays
tgcaggtggtcgcgtactcgattcagccataatcagttcgggcacatttatctccttgcgatcatgccttattaagaatctcatgtccggatccatcgatgcctgcacgcatggggcatggcgtgtctgcaagcatgcacactctactgccgtactgcgcatatctgctgccaaccaaactctcccgcgttcttcttcttcacaagcaacgcatgcagctctcctcagcgcgcctatataaacggccgtgggcatgcagcttactcaccatcaccaggtcagcatccaatccaagcatccagcaaccagcaccaacctgagcagcttgcaacaagagctgcagcagtgcagcctgaaactgtggctgagaataaaagcactacacaaatataggacttgttttcagttccagaaatcctcgtaccagaagactcacgagccacgacgcaaaaatgaactgcgtcggctgttctgtgttcagacttcagcttgttgatgattgacaccttttccttttgaaacaagacaaacttcatcagacggttgtgtattagctcggattatgaacgcgatctcgctgctttcgatttttaggtgcaaaggctgcgacgggctgtactctggtagctgcccaatgcttgtggtagcggaagacggcaaagctacgacggtctcggcttcgctgctgttgaggaactgcggtagcggcagcacgctcgggataggggtagagggcgtcgagaacgaaggccctggcgtacacatcca

SEQ ID NO: 4011 - DNA, 429 bp, Zea mays
tgtagggatgcagtctaaatttctaggaacgctttccagttttgtgctttcgatgcagcactataatggttaatggcgattctacaatttcggtgtgcgggacgggagtgctgtatgaattactctgaatagtttagctcacttctcataatttttcttgcaataatagtcgtttgaaaaagaaaactaaaattctggagcaaacctctctctctctctctctttttatcctgacacttggaactctgcttgtctttttttgcagtcttaacatttctgcatttctccagtatacaattacgcgatttccttgtgcacagatgcagtccggaattctccaattgctttaagttcttagctggggaaatgcctgtcttgctgcattctcctttttctgaaacgcgaaaaatcttattccagtctcagtgt

SEQ ID NO: 4012 - DNA, 447 bp, Zea mays
aatgttgagaacgcaactgttcttttcgaggactggtggggatctggtgttgtgcacgcaaaggtctggatatcagataagaaggatgtgtatataggttccgcaaacaacgactggaaatcccttacttaggtatatccgacaaaaaaaaacaggctctgctaaatttgcagtatggtgttgagaaaaaaaaaacaatttgataaacctgtgtggcactacttttacatgcattgcaggtcaaggagcttgggatttattttgctggttgcccacagatagcaaaaactgtggaggtctattttcaaaacctgtggacgctttcaaccctcaactcaactttttacaccaaacaagcctgggatacgcagtggcaagtttctagaaaggttccatgctggtctcatttcctacagcccaaagaaagatgcaggtttgcatctccct

SEQ ID NO: 4013 - DNA, 534 bp, Zea mays
ttgagaagccccttctgtcgcacctcaggttcttcccctgggtcgtcgatgaggtgcacttcaaggtctggagacaagggaggactggctaccctcttgtcgacgctggcatgagggagctctgggccaccggctgggttcacgaccggatacgtgtcgttgtctctagcttcttcgtcaaggtgctccagctgccatggcgctggggcatgaagtacttctgggacaccttgctggatgctgaccttgagagtgacgcactaggctggcagtacatttctgggtctctccctgatggccgtgagcttgaccgcattgacaaccctcaggtacctttgctctattcaatctttccctgaccaataaagcagcacaaaggtgattatatgaagctgaattctgcaacgtgtccagtttgaagggtacaagtttgatccgcacggggagtacgtacggcgatggctaccggagctggcgaggctgccgacggaatggatacaccacccctgggatgcacctgagtctgtgcttcag

SEQ ID NO: 4014 - DNA, 411 bp, Zea mays
gtcaggcgccggcggtgtacacggtgtggaagaggtccagcatgggcttccagggcaccgacggcttctccgtctacgacgccaccggcagcctggcgttccgcgtcgacaactactcgcgccgccggaagctcttcgccggcgagctcctcctcatggacggccgcggcgcgccgctcctggctctccgcccgcaggtaccgtaccgtacgcacgcacgctctgcttgattcgattgatcgcgtatatgcatgcatggttgcgttgctacgacgtcgcgacggacgacgagacacgacgattgagcgcatccgcatctctggcccccatagcatgcatcgtggatccatacattgatctcccttccgtgaatccgcttcatttctttgcaacgcgaacgatcgaaaacct

SEQ ID NO: 4015 - DNA, 1266 bp, Zea mays
  unsure (1)..(1266): unsure at all n locations
agcttgtgggagtgtcggtgtgggacctgaactctggttacaagaactgtcatcgacataaagcgcatcagcagccatttcccaatcatcgaagacttcactctcatcctcagggccgcctgtatcctcctcagcatcactcacactccttgaactggaccatacactgcttccactgctgaggctgggaccaccgccattgccagagaaccccttcctctgagggcagtcaccactttggcgcttgtctgagcctggggagtcaaggccactgccatctgcctcaaggccagcagcaatagcctcatccctatcctccggatcactgccccttgatctggaatcagcacggcgacgaggaagtggagggtgcggggaagcgagtatgggcgacccagaaactgctcctgttggcgaagctgcagcaatggtcacagcagaacttgacccgcgcggcgcgcagctagcaatgccttgcttacatggacacggacggtcgctgacgctcaccagacgggcagcaggtagcagaagtcggcgtcgtacggctcgacctccagcatcttggccgccggcgccggcgtgggcgccctgctgccgctgcccatgttggcgcccaggacctccctgatggcccggcggagcggccccgacgccctgggcagctggctgtgcacccactccagcagcgacgcggcgcctttgctcacctctgccatccacccttgctcccacttcggcccccaccaatggcacccctaccccccctagcctctccaaccctttaatcctcgcccccccttcactgctttcatccctaaccatcttgcccccaggctttactaccccctctcaggttatccacgtaccacaccctcgctctctatactcagttattatttctctctctcatctacgctcttgtctctcacacataccgcctctcttgaatacagtctctcatactctgctttatctttctcatcaatctgatcctctacatctcatccaacgctcactactcccctcttcgcaatgcttttcnacgccattcctcccactccacactccactctctgtcattagctaccacctcatctctccttcctctctactctcgctcatcggtttgcccgactacatccactcttctagatatactcttccaccatactccttatatcatccctcccccttgctcctgcctatgttctcttcacaatctcggagccctcccgccactctcttatcactctcctccacaca

SEQ ID NO: 4016 - DNA, 358 bp, Zea mays
aattgcagcatcttcatcttgcactaccgtggaagaacatgactttgagcttgagtcagtaaccactgacttgcaaggcacagaaaattcttctgtgactttccgcctgtaattagttacatgaagttagtccgcttagtcctcattttctgccctgcatgttctcagatgaaacagttctatttcatgatgcttcagctaaagatctcgcaatatgacactgcaactaaactgtgtttgcccaggggactcaaagagaacaatccgattttaccaggagcagtttagacaaaaaaaaaacagtacgaaaatagagagaaatactctgttggtttcattgtgaatcaaattgttcaga

SEQ ID NO: 4017 - DNA, 392 bp, Zea mays
aaaagacgtggctgtccggacagacggagccgccggcgagcagaggcgtccaaaaaagaagaggccaaaatcaaggcggccagggaagggagcacgatgcacgagcgcagaaagaaataataaaccaaatagaaggccgccgccgctcgctgccgtggtccatgcatgcaaatcaaccaaccaaccaaaaaaaaaaacaatatcgcgtagtacggcgcacaggccaaagaaaacatggagcggatacgcgtgttggacggatgcgcgtcgccgtccaatggcgacccgcgagtcaaggcaccccgaagccatccatggcgcctttcccgctccgccttctgcggacggcgaccctgccgcgacgccgagaggccagcggccaggcgagcaga

SEQ ID NO: 4018 - DNA, 383 bp, Zea mays
cgcggcggacccgcagcagcagcagtaccagttcctgggccggagcacctcttcagtgctgcgcggcggtggcgggggctgggaagggcctgaggtgagcgccgacgaggtcaggtcggccgctggcttccacacgttccagggcccacctcccaacggcgacaacgcctatgcttacccgccgtccattcatagcgccatgctctccccgtccccatctcatgccccaccgtctccccatccaaatggtaatttgccgccggcggtgctctgcttctcccccaccggcctccacataatcgtccttttttccttccgatttttcaccaactgaaggagttgttgtcttgttgaaactgctggtgctgggttgtgggttgcat

SEQ ID NO: 4019 - DNA, 719 bp, Zea mays
atgcagagtcgtgaactgaaaggaaaggacagagtttacatggcgctgaagggagcggtgtttttacgtgaagtgctccggttaagtctctctctctctctttttttttgtaacccccacatgtgcaatgagatgtgtgtggccctactgtaagacaccccattttgcccacgaggttgtcacgtgttattgtagatggtcgcctttgtgttatgaacgatcaaactcggcagtagcctgcttgctgcttcctctatgatactttcctccgtatttggaagctcgtacttcatatggtagaagtaagaaaaaaaaagcccatgttgcaccatgtgccaatacaggatgcaacatgatgtacttctgggttaaaagaataggcacacataacaagtatttaaatattgttcaagaccaagtattgacccttagtttcttctctcggtccaggcaactttttagctcttccacatattcctcaagtttctctttggccacctttagagcttgtgtatctcttgcagcctaggaaacgcacaaaccataacgagcttaggataaattttacagaatgaatactataatagttggtcaagtaccagtttgagcttcctcagctccttcctagcaacccttcttcgccaagcacactgatatgttagtgcagctctcttcaaattcatataatttgagtaatctcggtggcatcgccactggga

SEQ ID NO: 4020 - DNA, 432 bp, Zea mays
aacagggcacttatgtctccacgaactccccaaaaatgtcgaggcacccatcccagaagcccctctctcttgtttcccagtatccacctttgtagcaatacgtcccgtcctcggtgtcttgctcgaaccaccgggatttccagccattgtcttgaagtttagtagactgcaatgagacagagaacatgaagaaacaacatgtatggattgtgatctatgaagcgagagcggataccattctttgtcgtcgttccaacctcagcttctctgcattcgctttctcgtattcaccattctctaggtggcgctggtctggtctcagccgtgaatcagtaggtggaagtttctcctgaatccaggaatggccaagcaattaaggacaaaaacttagttaccaaacacttttatgtggcaatccacatgtagatccat

SEQ ID NO: 4021 - DNA, 352 bp, Zea mays
gaaccaatagcgcttaagtccgccgttctctttgaagctgaacttgagctcaattaattcaatgcagccattgaccttggcatccaatcatctactggcaagcaacttcagatccaaaggaccacgactgcacgacacggcagaatttacttgcccaccaaaaaaacggggaccggccgatggtccacgacgacgtgatcagctagtccgtgatgcaacggcagggggagatccgtacgaataccaacccaaatccccgcggcggggccggcgagaagccgtcttgtttcccggccccggccccggccccggccccggagaaatcgctatcaccacgtccacgccgccgctt

SEQ ID NO: 4022 - DNA, 373 bp, Zea mays
agtttctttatttgggtactggctgtgtgtttatcccttgttgcaaggaaaaagtccatttactctctctactattgcaaaagtcagccttttctccctcaactacaaaaccagaaataactcctccctcatctctcaaaaccaggcacatggtctctctagtttttccctcggtgtttccccccctcttttttatgtttatttcggctgaatctttgaagaatcatagtaaatcacagaaaaatcagaaaatataaaattcagttttgttggatttcacatgattatatctatacagtgaacatatgctatgctatgctttagtgcaaagtttttgctatagatttagatatatgttttttggtaattattt

SEQ ID NO: 4023 - DNA, 372 bp, Zea mays
ttgcattctgcgcagcacggcagcacgacagttttgccaagaatctacattttgcgcagtctgccctggccctactcatctagtgttctatacctctatgttctactgccttacttcaatagtacttagcttcatctctgccaaccagtttccatcagcccaacagtagcatatctagtgcctagtattgacttgacctctatctgttgacatgttcagagtttcatgctgccggtggacgaagaggtgctgatgttgaggtcttattccccgggtccaatgtggttggcagtggcagtgcaactgcaagtgattctgttcctcccgtgacctcaaatgttgatagcacaggcccgcgtcggcattatcagc

SEQ ID NO: 4024 - DNA, 420 bp, Zea mays
atgtttaccgcattatatctggattaaggcagttacaagcccataacagcatctgtagcagagcactacatgctctttttgtactgtgctcttggcaacctcttgtgtgttcgttgaatggaccacttgagcagtggacagtgaacttttcatcatgttgtggtgttgattgtagaaaaagctgacccatgtttgcagctggaaatgatgttaaatgctgcttggctcaaaaataaaacgaatggggagctcaagcatgtaaatcttttttttttctactaaatcttctttatatttgattgtacaaaccaatagacattggaatatgttgtggcatgtgttctacgtgtttttgggccccagtttcactggcctaaacataggtttgttcgctgggtctaacaagatttgtttttgcat

SEQ ID NO: 4025 - DNA, 421 bp, Zea mays
aggcgcacggcgccgcggcggcggcggccgcgcgcgccgccatgcagcccatgcaggcgtacgaggaggcgtgcaaggagcacgagcagcagcagcagcagtggggcgatcacgtcgtcgatgtcgccgacgcaggcttcgccgcggcggggttcacgggcctgcttctcgacggctccttgagccagcaagatctgaggctggcgccgacgacgacgacgagggacgacgaggcggacgccggcctgcacgagacggaggaggagaagagctactgggacagcataatgaacctggtgaactcgtcgtcgttgccgacgacatccgtggcagtgcccgctcccgagccggcgtacccgtcctcggcgtcgctgcacacgtcggtggctatgcccgcgctcgtagcgtacccgtcatcggc

SEQ ID NO: 4026 - DNA, 479 bp, Zea mays
attgacctttgtttcccacagaaaccacacagaggaacaatgatcctagacagtattagagaaattccactcgctgttcagtgctagtaccaaatcaaccttctggtaccccgttcagcagctcaatccagtggatttcgtaccaacatatgtaccctgttcagcagctcgatctatctaatcctagaagacgagtcaaaacttgcagcaaacataaatagacgagtcactggctgatattgcttggtgagaggcttggagtactcttaggggagataggcgttcgcttcatactgctacagggtgtgctgaactttgattctatccatcttaatcaaaaaggggaaaaaggtgatgtctactatttctctagagatacaataaggggcagaaaagcatggcagctgaataaatattcagacttgcattagcaaccatcaatagcttttttctagaggaagcagtgctgaacgtattat

SEQ ID NO: 4027 - DNA, 463 bp, Zea mays
agtgctgctctctgcacggtactcctctggccgtgaataaccatatggtgcactgggtgctgcacctctcatgtggttctcctggttgttgtatgttccttccaagatcgactggtgtaaaccttcctgcaatcgtgacagttttcttttcagtagactgaaatcccgctccctgcgtgtttgcggaagaagcaaagatatatacagggttggcagaaacgccatggttacgcatgcttgcgctcgagagctggaaagcgaacaaggggcacgtacctggccaggaagaagatcggcgagcacaaacaggagcagctcgtcgtcaaggtcgtcaaagctcacctctgccaccgtgctgcctgtgggcgagttggcgtagtgcacggtgaccctcctcagggccccagactgtcccacagtggccatgattgcccacggccaccgagacaggcgtgagccggtt

SEQ ID NO: 4028 - DNA, 419 bp, Zea mays
acatgcggacactggacacacacagacacaccgatcaatctcccatcgcgcgcgagcagtactgtttcacggtcaatggaatctctagcggcacagcacaggagcacactcatgctgtccgtgtactctagtagcacctcgactgcgccattttttgtccgcagaacaattttttttagttcccactgacgtacacgtacgtgtgtgctacagttgactgaaacattcattccatcgatctgaacctgataagggaacagaacgaggtgacgacggccgcggtactgaagctaacgcatttccagagatgagctagtggtatagtaccagctagcaactgatgatacagcagatcgacacgccatacatagatcaccgagcacgtactcattcttctgtctggcgtatgcagactgcac

SEQ ID NO: 4029 - DNA, 457 bp, Zea mays
caccgctaatcatcggctcttcctgcctccacttggttgctttgcctcctctcctcccactcagctgctggctcctgccgatcttcactggcacgagcaggagaagagaaacagagggtacttcattctctccaggttgtgtgtaccattgccagctagctggttcgctcagcaatggctttcttgggttttgttcttcagggctgtcaattcttgtagctgctctgctgttctaaagacataccttaacacaatggatacggattactgatatacgatattcctacaaagctttgatgtcaaatctaagcatgcaacttttattttatacctgactaaataatcaaaatatcattcaatcaaggttgaagcaacaatctcttgaggacttgggtccagggttggctgactgccgtactgcaccatctattcctgatgcacgtgatgttcggctctt

SEQ ID NO: 4030 - DNA, 860 bp, Zea mays
atgggattaaaaaaatcactgttttcccttttttcaaattttaattttggacttccatcattctaatttataaatgattcttatctagcttttgtgttattgattattggtagcaccatgtgatggttatctagagggacctaggctaatggtttcttgctcctatatatttcacagttactttgtggcctccatctgcatccccattcttatacccgttgcctgtgtatggcgaggcctccaaccacaggtaaaatcttctgctcatgaagtgcttaattaatttgaacttttttttagaaaaacaaaatttggcagtcaaaaatatctcttcttatcttgctatcttttggcagctctgttagtgtggaggagccagattattcaatatatacaagggcaagatacatgaaggaatattctgaaacagtaattctaaactgcagttagcacaacgctttcctcaacgtccctctctgcactttgttagagggaagcgaatggctttatggctcctcatcacctggctgtctgctttcaccgaacaagagtaaagcaagcagctccatcgtcgtgtcgtgtctgtcatttgcttcggtttcttgtccttgtccttgcacgccctgctccctccagggcaaattcgccccaacatgagttctgctggttcaggagcccaacagcaagcactacggcaagaattcaagcccacggacgtcgtcaagtccagtagagtggagggacggagtgggccgaccccgcccgacggtttttcatggcctacctgcaccaaaattctgccgggttcggctcggtggtctggtgcgtggtgccctccccggcgtccccgcgtctatcca

SEQ ID NO: 4031 - DNA, 447 bp, Zea mays
acggaaacccacctgtaaatatgaaacgacgattcaacttcgtttccgttgagggcttgaggctgtgtgaatgcgaccgcattcaattcgtgaccgggaagcggataggatcatgtcacggagagatagagagaggggattattagcaggaatcgccttcgcctataggagtagagcatctgtgcctgctgcctgctggtgcatggcgcgcgccgctctctcgcctctcatagccatctccttttctcccttgttccgttcctctcttcccccgttctcgaagcaaggtggtcgttgagccattaatcactggtcgccaagccggcgctcgactactaccgcatgcatatattagagcgaacgatcatcagggcggcgatcgatcgatcggtacggtccagctgacattgagcagcagatatacgtatgcatgctatgctagcacta

SEQ ID NO: 4032 - DNA, 325 bp, Zea mays
tccatgagctgggctttgcaatcaaaatggttatggctggaaaaaatggacccaaacaggccttggcagggactgaagcttcctatacaacagcatgtcaagaatctgttttcagattctctgatatctatagttgggaatgggcgaacggcaccggcactctgttctggaccgatagatggctaaatgggactgcaatcagggattttgcccctgaggtgttagccaaggtgggaaaaagatccttatattcaagaactgtggctcaaccccttgaaaattggcagtgggttagggatattaaagctcctctctcgctggctgg

SEQ ID NO: 4033 - DNA, 387 bp, Zea mays
ttgccatccaaaagccaaatcaaaaaaaaaaaaaagagagaggcaagcatcgattggtcggtggtactgctactgtagcacgtgcatgggccatggggtgttgtaacttcaaaaaggctgtgaccaccagagcaacgattggtgcacacacagcgagacgcggtgtgtgtacggcggtggtgtacgtgccggcgcagcgcatcaggaattcaggattcaggaggcagcagccactcagccacagagagagagagagagagagagagagagagagagagagagagagagagagagagagagagagagagagagagaggaggggcggcacaggcactccgttacgacgccacacgtgacgtactggggcagtcggagaaggtggcgggg

SEQ ID NO: 4034 - DNA, 627 bp, Zea mays
tggacgttgttgcatttgaggagatacaaaatgagatggtgttacactaggccattcatacgacgttcctcccagtaggttcctattgtatacataacattcaccaccaccatttttcataactccaccatttttacttatagcactttgaagcatgtcagtaggaatagcagaaggtaaaattctgtcctttgtcacttcagatttatgatccacatgtttcccatcacattcagttttttcctgtgcagatcttaccaaggagtcaactgaacttccatacagattagtagaagagacctcattgcttctggaaggtagacaagaggatgactgaaccaaggattcactttggctaaggtacaatgaggcctgcacagccactttgaaggcatcatcatgggcactctgaaaacgttctgtagcaagtgatgagtgaactctaggagaatacgatgtgtcttcaagttttgtgcccttactggtggatattacctttgttccattagataaaatggaagggtcagaacagctaacagcttcagagatcttgttcttggaaggatggacatacgatgggtgatgaggtgagacatcagcctctttagcagcttcatgcaaggcctt

SEQ ID NO: 4035 - DNA, 676 bp, Zea mays
cccagatcacgtcccaacaatagcagtgaatacagcccacaaaagtccacaaaaagttaagacagctcaacagccccttctccgcagtccgcaccacatgcgcccagatccagccgccgctcgcccactcctcagcactctccggtctccacacgcgctgcaccctagccctcagcccgccgctgtcaggcgtctcactgtctcagcgcttccgctcactcgcttggcatgacggcatgtccccgccggccaccgcccttactccctcaggtagtcaggcctcagcctcgggcacacagcgcatttgtttttgctgctccgtgcctccgtggacgtggcatggaggactggagctgacgactgctgctgaagctgaaccgtgtgcagtgtgctagtggccgagtgctactgtgctaagtgtgcaatactgacatactgtggctgctagtgctaggtaaggccgtaaggttatttcatattttcttttctttttttttgttattttggtttgatgatctatttgctagcagtccctgtttgctagtttagtaccccccccccccctcttgatccgtttctggatccaccactggtgataggtgattaatattgctgcctgggtgcctccatatttggcatgctatgggcacacgatgttctgcaggcatgcaagctt

SEQ ID NO: 4036 - DNA, 616 bp, Zea mays
ggggaaaacccatgatttcaacagcagcaagatgctctgatgtctggggctgtggacaactttcatttgctgcgatcaaaagaagagctccatccatgatagcagctccattaagcattgtagccatgagaatgtcgtgtccctattcaaggaataggtattgttaaacatacaattatttcctgttagacaaattcatctctattcaaggagataggtgttgttgaaacatacaattattcatgttagacaaagggtgtggtagccctttgcagggcctgcgcgcctctatttgggcctagtgcctatatggctaggacagatagattgatctctattaggcaaggatctctgttgaacggttttgtttctataaaccctcggccatatttgcctatatatgtgtaacatcatatctcctataatcaatctactattccttgtgcttaatcttacatggtatcattcacccgggtttcttccggcccttcttccgctgcctaggtgcgccaccgagctgtgttgtcttctctcctccagtcaccgccatgccgaccaaccctactcccccctccactcctctctgggagcaagcaatccacactgctaaatgtgt

SEQ ID NO: 4037 - DNA, 669 bp, Zea mays
ccaccatggaacaatgcatataaaagggaatcgccaatattcatgtaaactgaagttcaaagagccatcacttcttgaccggaatccccatctagtatgttttacttagttcctttctttgtgttgttaaatgccaactaaaaggttgtagttgttaacatgggatatagaacccacaagtagtcgtcaccattagcagtcaccgttaagtttcaactcaaatcaccattcgattttgattggattgcgccaacatgattgcttgcacattacatgctcgctacttattgtccctaggctacagaaacctatatttcccttttttatgtgtggcatctgagttgtaacttaattcaagttctaatttgcggtgcatacttgtttttagctgtatgtttgcctctttcatgcacgacattatgtttatctattgcctgcacttggtccacaggtacaaggctttgtagaggacaacaatgggaacaaagcttcgtttttgatagggatgtgggacgaaagcatatattgtagtaactctgatacttccaaggtgaagagcgccgatcaactgaaaggtgcctcgctgctgtgggaaaagaacaaacctgctcctaacccaactcgatacaatttatcttcattcgcgatcacactgaatgagttgacccc

SEQ ID NO: 4038 - DNA, 642 bp, Zea mays
tgccgctgcaacacaggtcccagctggatatgtcctcgcccagatgcacgcgccacagcaacatccaccaccgcagcaacatttaccaccgcagcagccacagcaaccagctcctcagcagcagattgtttctgctgggaaccagcatttcatccacaaccccgccactggcaccttcattccaatccagtcctattaccaccaccaccctgtacctcagcaggcaccccagaccgtgccgaggcagcaacaggcacctgcattcgacccaaacacggggatgtactaccttcctatgcagcagaacgcacaccagccatacagcatgcctcctggtgcccaggccaccttgccaccaccacctcctacccttgttgacacagcgccaaagccgaccgtgccaatccctcagatggctgtaaggcctgaactgcaacaacagcctggcgtctatcgaacaacagctgccgccacgcccgctccagcgcccagcgcagctcctcctggatacgccgggatggcataccaccacatcattcagtcgcaccaccacccctcgccgcagcctgtctcaaacatggtggctggcaactttggatacgagtacgctgatcccacgcgcccacaggtctactactcgca

SEQ ID NO: 4039 - DNA, 713 bp, Zea mays
gcagtgggactcgttgaactggctcaggcccagattcttgagctggagagtggggaggaggcagcgttggttgtgattcttcaacttctgattttttgctgtcctctatggccagtacagcctaaacacatagagatggacataaagaggcatagaaatgccgccttaaaattacttcaatagagtaattacaagaaacttttatggaagtaacagaaaactaagatcccagggaaatatcatactgaaacaaaaatatcacaaaacttataatgctcacatacctgatttctttgaactgttgaagcaaggggagcattgctcacatattcctccatagctgccaagaaggatgcaggcggctgtacgtattggtgtattggtgttaccaataggttatcagtaaactactcaaacagaaaacaacaataaagtatacaccaactatcgtaggaatgccagccaaacctgttcgatttttaggaatctctcaccccgcccaatatgtatacttttacatacttcatgaaattctgaaagttgttctgcctgtacaaaagtaaatgtgtcgtttctgatgttctaataaaaaggttaatgagttaaccaacagaagaaaataaaatcatgatttacctgctccattgctcttctatacatgcccagtgcccttattgcgtcatctctctgcatctcaaagaactgcaggcatc

SEQ ID NO: 4040 - DNA, 601 bp, Zea mays
ttgcatgcctgcagagctggagaccatggccgtggacgcgctggcggtccaggccgagatggccgacgaggacgcgccgttcgaggtctccgcggccgcgggggacacgggcgtgttcgactcgctggtgccctcggacgagtggtccgagtctggtgcctcggacgggcgcgtcaccctggtggcggccatccaggtgcgcgacccgtcgcggcggtacgaggcggtgggcgcgcccatggtcgctgtcgtgcagtcggcgaggctgttgggcgcgtccggctacagcgccgggaggttcaaggtgcgaagcctgcacgtcggcggcgtgcagatgaggtgcacgccgtccggaggcggcgggagcgcgcgctggggcgcggagaggcagaagttgacggcgatgcagtggatgctcgcgcacgggccggcccgcgccggcaagagggcggcgacgccgacggctcaggcgggggcgagagtgcagcggcccgacgtcgtgtggagcctgtcgtcgcgggtgctcgccgggatgtggcttaagacggtgcggaacccggacgtaaggattggcggcggcggcggcggcacgtgaggtcat

SEQ ID NO: 4041 - DNA, 638 bp, Zea mays
agcttgtggcgtcgaagtagcaaccaaaaaaagctgccgcacgaccacaccaccacacacaaagagccggggcaaggcggcgttgacttgggcctgttcatcgatctttttcgtgcagctgatggatcggtagtagtattcgacaggggaagattcatgggattcccgggaccacgcacggatgccagctgtagcactagcactagcactagaagcagcagcgacagccgagccgtggaacattcaagcaagctaagagggccatgcacatatatatatatatatatatatatatatatatatatatatatatatatatatatataccaaacatataaataaatatgatacttactggtagtaataataatgcaagctgacgacgacaatggcgcatatactactatatataccggcattgtattgccgcaccactcgaagagtccaatcaatcggaaaaaggatctttctatctgctcacgccagctagctagtgcggcaaatcagcaccaaaaagcgcgtgttttgccagcaaatgcgtcgccgccggtcgacccccccggccgggataagaaaactacggccattagtttcgcggcgcctccatggtggaggcggcaacaaattgctaccggcta

SEQ ID NO: 4042 - DNA, 1275 bp, Zea mays
tccttctcgtaccccggttcctctttgtcgacctgcagtcgctgcggaatcttctactggtacatggacaactgtttggactgatggacttaccagtcttgatcgttacaaaggacgatgctatcacatcgagcccgttcctggggacccagatcaatatatctgttatgtagcttatccattagacctatttgaagagggttctgttactaacatgtttacttccattgtgggtaacgtatttggtttcaaagccttacgcgctctacgtttggaggatctacgaattccccctgcttattcaaaaactttccaaggtccgcctcacggtatccaagttgaaagggataagttgaacaagtacggtcgtcctttattgggatgtactattaaaccaaaattgggattatccgcaaaaaattacggtagagcgtgttatgagtgtctacgcggtggacttgattttaccaaagatgatgaaaacgtaaactcacaaccatttatgcgctggagagaccgttttgtcttttgtgccgaagcaatttataaagcacaagccgaaactggtgaaatcaaggggcattacttgaatgcgactgcagctgcaggcaactgcgcgtcagtttgatcacacaggcatacgaaccctgagctggtcgtactcgtagcggctgacgccgacgggccagttggagtaggatcccttgaagaagcggtcggaccaccagcgcggcacgtagacgtcgatctggtcggggcccggcacgtcggcggcggggaacatgtcccgcagcacctccgccacctccgccttcgtctggtcgtcgctctggcgctcgatccgccgcgactcgtcgtcggtgacggtggccaggagcacgttggcgcccgggtactcccgctcgaacgactgccacagcgcgtagtagccgcgccggctgctcgcgtacatgaagaactgcttcccctcgcccacgggccagaaccgctcggggaacttgaggaagatcttggtgtacacccccatgtcgaaactgtagatcgccgcgatcttccagaactggcgatacgatgtgttttgcttgttagctagtgtatataactagatattattatccgtccggtcactcgatcagttgtcattcctcctccatggtattataattaattaattaattcattaattaagcaggtatatatagctagaagtgagatgcatgtgaactgacgggcagctgtggcttgaactgtatgagatcggtcgcaggcatcaaa

SEQ ID NO: 4043 - DNA, 604 bp, Zea mays
gcatattatatccttcaacccaattgtattttatttaaaaaaaagagaactgcataccatataccatgtacttcaatggctgtttttgcagtaatatgtcagcacttggtgcgcacccctagtacttgatttgcacgcttcagtttgctttcagtaccggtacggtgccacaagtagttcctctcattgactttgtatctttattttaccatcaagtatatatcctaatagccaattttgtagtaactattagttagcacgatccctagtattatcttctacatgtaatttgggttcgctatagaatttgagtaccaaatcacttcagataaaactataacgatcttatgcacctgcacaatggattggacaatcctgtcagctacttttttctcaactcaatctttttttctgtcagctactttactcttgcagtgaattattgaggcatctgctttggtgtatggattcggttatgtagcttgagatattgtcgttttagttaatacaataaaaatatgcatttatgtattaatccttcaatacaatcttacataaccaaaatttgtataactgttttcgacatcagatacttgcaattgtg

SEQ ID NO: 4044 - DNA, 599 bp, Zea mays
aaaagagagaaaaggagaaggcaaaagagattaaattggcctcaaaaagtagtctcatagctaataagaagaagatgaacaatgtcctagctatgtggaagcaaaggaatcaagaagggcaggccgcacgaattgtccttgatgacaaagaaccagcaaattctgatgataaatttagtcattcacgtagtggaactggattctctttgaaaagcaagccaaattctgaccttgaaaatgctatggataattctgttcgccaaggaattgcatcgacccaaatgttggattctgatgtaaagcctagacctgtcagtaacagcttaggtactacagttatgggtgtcataagaggttctactagaggagtgatcaagtcggatactacgtttcatgcattatctgatgccgggagcactgattcccgcaccactataatcacaagatcaaatgggttaatgacaagtcctgtggaacttgtaactcctgcaccctacaaaactgatgtgtctgccttagtctctaatacttcatcgggagtttctgggagtggtaaacgtcggttttctgaggcaccagggcaatcccagtacagggat

SEQ ID NO: 4045 - DNA, 530 bp, Zea mays
tttaattaatctataaaaataaaatattatagaaaccccatcaatccacagaaaatggttaccattaccacaactagagtagaattctaaagtcgtgtcatgttgacttttattattatggaaccaaagctgatttcatcactgattcgacacggctcagcattactgcgaagcgaagctagagaaactactggcggatgcgccagggttaggtagatttcgttgatagtagtaaaaactgtcacgccgacgctgctgggcgtcaaggatggatatacgggagcatgggggctaatataaaaaatacaaaatgactctattaccgaagacagcggcacaaaggtcacgtcagtgtgcagtggaccaacgctttgggcctccgccgcatcgccatttcagccgttaggaggtggtgtgtgacgagcactgtatcgccacagtcggtgcttccgtctgttttacttaagaagttggcactttctcgccgacgcgacgccgccgatgcaacgtgcggttccgctgtcacagtg

SEQ ID NO: 4046 - DNA, 607 bp, Zea mays
ataggcagattttaactcaatcaggtgtgggtgacacaacatccagagccagtaaaagtgaggcaagaaaatcatacagtcaggagcagcataatttgaaatggaagcgtagccaggagataaagcctgttaaccttcttccaccacttgatacggatgttaagaaagtggctgattctccaaccaaagaacgaatatcttcctggaaaccttttccatctcctgttacgaaggtcccaaaagaatctactcctactaaattggaatcacctaataagaaaacagatgcacactctacagttagtagccatgttgaattaagcagtccagttgaatctttaccacagcaacagcttcctgtcaagcatcaacataaaacttcatggggccactggtctgaccagccaaatatttctgaagagggttcaataatgtgtcgcatatgtgaagagtatgttccaacacagtatgtagaagaccattcaagggtctgtgcaattgctgacaggtgcgataaaaaaggtgtcagtgttgatgaacgcttaatcagagttgcggaaatgctagaaaagatggtagaatcttattcaccgaaagacctgccaaa

SEQ ID NO: 4047 - DNA, 608 bp, Zea mays
ataggcaggttttaactcaaccaggtgcagatggtacaatatccagagccagtaaaagtgaggcaagaaaatcatacagtcaggagcagcataatttgaaatggaagcgcagccaggagataaagcctgttaagcttcttccaccacttgacacagatgttaagaaagatgctgtttctccaagcaaagaacggatatattcttggaaaccttttccatcgcctaatacaaaggtcccaaaggaatctattcctactaaatcggaatcacctaataagaaaactgatgcacactctacagttagtatccatgttgaattaagcagtcaagttgaatctttaccacaacaacagcttcctgacaagcatcaacataaaacttcatggggacactggtctgaccagccaaatatttctgaagagggttcaataatgtgccgcatatgtgaagaatatgttccgacacactatgtagaagaccattcaaaggtctgtgcaattgctgacaggtgcgataaaaaaggtattagtgttgatgaacgcttaatcagagttgcggaaatgctataaaagatggtagaatcttatttcccgaaagacctgtcaaat

SEQ ID NO: 4048 - DNA, 658 bp, Zea mays
accaaccatttcagacttctcttctggtcccttgtatgcattataaagatctgaagacccagcagcatcagccttagcaagcatttcctttttcttcttcctcttcccagctgcggactttgacctggcgatctcaacactaggcttttccctggatactgatcgaactgaaactgttggttcagcagcctgttgatcatcagccctactctcagatttcagttgtccctcagatgaaactagaggaacattgcaaacagctaggtctgtttctggactaatatccgagtcaccttcgtcattggaactttgaacagtaggctctgaagttccagttatcacttccacagcattgctatcaagaaaatgtgaagtctcagaattcttggaaaagttattcatcatagcttgttcctcagaagcagatggagcagactctttcagcaactgctcctgattatttactataggggatgcatatgaatcatcagtattagaagtcactgctgatgcctgttcagtagggtccactgcacatgcatcaggcaattcatgtttggtagcatcagaagaaatattatccttgctaggatctgtcgcaacttcatcagtccgcttccttttgtcacattcaacagccaaaacagtgcagctttcg

SEQ ID NO: 4049 - DNA, 654 bp, Zea mays
ctgcatccgagatacggacccggatgatgcaggggggcatcaagctatccactcaacagagacgaatgcttcggatgctggcagaagccagggcttgcccagagaacatgctgcggatcaaggtggaaatttgcattatggcacaggacatcgatgaggccatccgtttgctccggcatatgagccacggtgataagtcacctccaaacgctcactcctacaatttggtaatcgccggtctctggaaggcagggagaggtgacgaagctgtcaagctgtttggcgagatgacagacatatccctggcgccgaatcacttcacatacactgtcatgataaatggccacttgaaaagactgggtaatggtctgaccccgaggaagaatgggaatggagatctggaggctgcactccagttgaaggctcagatggagcaggcaggcttcaagtcagatgaacccacctaccatttgctgatggcagaactctgctcggctgaacggctgggagatgttacagctttattcgacgagatgatgacacaagagacgacattacataagatcgtccatagcagcatgttgcagttcctctgtagaatcaatgaaggtcagctactgcgcatcatcgaagaatctgcaaagaacggcgttt

SEQ ID NO: 4050 - DNA, 668 bp, Zea mays
gcagatgcatgctttttcaatttttgtttgtttgtgctgaatacttgcgtgacctcgtgctttctggctctctatatttggaaggttctgcggtgctgacatcggtgaaagatgaggaggatcaggcttgcctgtttgcttgttatctttgtgcaagtgcaatgggcggcccttggaacgcatgatgtgtacatcgtgaccatggaaggggatccggtcgttagctacagaggcggtgtccaaggatttccagcaaccgctgtggattcggacgaggaaattgatctaaccaggtaatgaactactctcgctgatgcttttctttgccatggctctcaagactgattgttgttcaatttcgtttctgaagctttattgctatctgaacttgcctgccgttatttttcctataggatccttgatgtcaaactctgaaagttccttactatatttttgcattgcactctggcttgcgcttagcatgtttcaaacacaatagttttgccttcatttcaagcttactgattttgcagcgaggctgtcaaatcgtatgccctccacctccgaggacaccatgacaagctgctagactcgcttttagtagaaggaacttacgagaagctttatagctaccatcatctcatcaatggcttcgcagttcacatgtc

SEQ ID NO: 4051 - DNA, 642 bp, Zea mays
agagcactagaaaagcaagaaacatgttaggattttgaatactggatacgaatgtgcttatgacttctccgtatactgtttctgttaccagaaattgatggtgtcaaggttccatcccccatcaccattgatgtgccaaggattgtaatgataaagaggctaatctttgccgccttgctagactcgagcttctgcttcagccactgtgccaccctcagttccggactgggcgcttcgatgccataatttgacaccatggcatcctcagcctgctgatttggtatcagccttaccttggagtgccgcgatataagtgagtagagggcgaacgtgccacctagaacagcagtatgttgctgttaaatgtgaagtaccgaataaacagcaggcatatggtgactacagcaggttgacaggttgaaatttcctgtcttatgagcttaccatctccattgtcatctgcataaagcacaatgaagacgtacttgaccattggtatcaggattagggtgtagaggatgagggagaggacgccaagtaggtcatcctggtccttgatgccatcagggaaggtgctggatatcgcatagagtggtgatgtcccgacgtccccatagatgatgccaatgctctgaaatgcaa

SEQ ID NO: 4052 - DNA, 604 bp, Zea mays
attcattcacatcacaagctctatgagaaacttcaagctcgtacccatggcgatgctcgccgctgcattgaggaggtttgctcaccttgttgtactggatcttgctggcgtcgagcgtggtctgcgagaggccggggaaccgctgcttgaggcagagcagcacgtcctcggcgcgtctcgccagcatcacgttcttgtcggactccatcaggtccttgaccgcgatccagggtgacctctggctcgccttccgccgccacacgtgcatcgcggcctccacgcggtccgccgcctccagggcctcgtgctccgacgagatctccaggcagtccagcaggtactccggcgagaacttgcccgggaacgacatgtgccgatagatcagatcccccacgctggcccgcccgcactgcgatgacaaatgagaattcagtatagagaaaacattcagcgatgctgatgactcgcaattcttgggatccaatgatctgatggtaccttgggtagtgcttccttgtacaggtcggggatccgtatctccgcaagaacggcattgttgatggccatggccgccttgtggatctggctcgcgcagtcgcgcttc

SEQ ID NO: 4053 - DNA, 672 bp, Zea mays
aaaaacatcaacaacaaccaggtgatgaggtggagaggaacactagtgataaggatttgaccagtgttattaaaactacgtttaatcgtcaaaactctaattagaggttgaaaccgtgttttatcattttggcgttctaaactgtgaaacgcagtgtttcatactttttagaccattagctacttttgggcctagtctattagttattttttgggtccaatccggctcatggtcatgggtgaagttttggtaagccactaacctctctgtttcgcttcattttattgtctgaaattatgatatattggtatttttcctatgctgtttaaaagtcaaaatttcacccatgaacgtttcaacgttctatcgttttaataatcttgggtttgacaaggcacctctttagacgataatcaaaacaacaagctactgtaccatacgaaattaataaaaacagtgtgcgctagatattacgccaaattcgtttgtagataaattactatatcataatcaaaaggccaggaaccagtaagtagcaaaaaaaaaagtaatgaaaatggactataaagagggtgtttgaactttgaaacacgctgtcaagatggataggtaaaccgaaagggtttattgcaacacagtacacaagcaatcggtatgaatatggtgaaacaa

SEQ ID NO: 4054 - DNA, 695 bp, Zea mays
aagcgattgcatcatcaacacaacaactgttgcagaaaagaggatgatccatttcaacaggataagattagggtatgtaaaaaaaaagatgcactgatatattaccatccgaaacacatcaattgagcctcccacccagcaagcattaatccaacctgttgaaattgaaaaagcttcatatactagtacaagcaggtaggatggcatctattgttggtttggatatactagcttggttctattgatgactagctgcaatcagagctagaaactcagaaacatgaggcatgaccatgtcatcgaaattatcagaaaacacaatcttacatttactctctctactctgcgcatttcatcctcgaggagcgaaagttgcgcagctaaagtccaatgaatgcagtcaactgggctgaacaaaaacgaaagattatcagaacatgtagtcaaaattcatgacttgaaaccaaaagaaatgtttgtttagccccacttcataccaaattttcggtagggatgcttggatcattggtaaattaacaaacaaaaacaaaaaaaagatataaacattttttccattctcaccagctatcaatagcttcttgaatcagttctgtgctgcctgattggtcgtaaactcttgcccgtccgaaatcttcctcgatttggaagaccttagaacacacgttagcacagtt

SEQ ID NO: 4055 - DNA, 714 bp, Zea mays
agtcgaaacaggagcaacaccctgctaattatgaaacaaggctgaaaatatataactccagggagagagggtggaacaaaatgtaaaacataaagcggaggaactgactaaacaaaataaaagactaaacgcacataaaaggggacctctgctactgataacaatgtttgtagcagccatataaaaactgttaattttcagcattaccggtaaacacatgtctgcttttttttctgctgcatcgatgcatttagcagtataactccttcctgatatggctgaacatgcatctgagtatctgactcatttctgttagaatatattaagcaactcctgatatggttggtttaggattgattggattgattgtaatcctaggataacattccttatatctaggataaccttcctcatctctaggatacgcttcttgccctccaagttatgtactcctatatattcctcctaaaggctcaatgcaatacatcccaccattccatgcattatacaatctctccttcctacaatttcaaaaggaatcttgccaacaaaggcagggaagaagctaaacagacataagagacgaccggagagatagagccaatggcaaaagaaaagagaggaagaggatttgcatgggaacctatgtagaagtacagaagttctcctaactgttggcttttagtatctttttcagccttgctatgccactac

SEQ ID NO: 4056 - DNA, 589 bp, Zea mays
atacaaaagtgtttatatagcaatcacaaaattaataacctttgctgttacaattccaatcccaggcagttgtttcagcagaaatggactgctctcccaaagcttttgatgcagactatttgcaaggatcatagaattaatggcagatctgtaattctttttgtatataaaatattctcgcatgcatttggcaatcctacatccatttgagcatattgcatttgtttcctgcatgggagtccacttaagtcaacatagtaggggagaaaatcaaggggtgtctgaacctaaacaagcaaacaacctggttgagggataaatcatggattagagagtctccagttaagcaatcatttgctagcaagaatattttctcttctcttgtctgaacacgcttcttcctttttccattcttcatgacaatatgaaatagaagtctaccatctttgtcagcgtttatgtcatttagaatcttcttatcatttcggcgtagttggatcccttgatacaccaaaacataaaaataaaataaaataaaatgcttgacacttaataatcaattcaaaatctggacatgcacctacaagtt

SEQ ID NO: 4057 - DNA, 722 bp, Zea mays
aattacattaactccagtcgtcgatcagaattacattaacttcagtcttcagtcgtcggttattcttgagacggcgagtccgctcaactaccgaccctgctggatttgaaacaagaaaaatgtcgcttagctgaacactaacccgtcacctataccgacctactccgtactaacaataactagagaataaaaaatatgataaaggagcaccagatttccaatgcttaattaggtttatattgaaatttataatgcttaattaaccaggtttatattatttcagacttccaaacacatgaagctaaatcgaagatgagcttcatgtcattgtacaggaaaagaaggagtgatcattgtcattgtactcgatcacgcaccttggcgacgtccattatggcgtttatgacctgtggcacgtaggccttcatggcctcgatcgatctgaagccctgtaagaagccgtagttgtagtcgttccctccgatctcgccgaccaagaacagcgctccggcgagcttcttggcgcaatctgctactatattcaggttaaaaatctgtatgaacattgtactcttacatagctccatatcgatgagcaacaccgcagcaccttgtagcgaggggcaggcggtggcgttgaggtgcgccttgaaccagtcgagctgggagctgagcggcacgctcgccggtggagccatgatgccgctctgcaggtcgactct

SEQ ID NO: 4058 - DNA, 750 bp, Zea mays
tgcatgcctgcagcgaccagccagtcaagcgggaggaagaggagcggctcgatggccctggctacgacgacgtgggcggcgtccgcaagcagctggcccagatccgcgagctggtcgagctgccactgcgccaccccaagctgttccagacgctcggcgtcaagccgcccaaagggatcctgctttacggcccgcccggcaccggcaagacgctcctggcgcgcgccatcgcgtcggaatccggcgcacacttcgtggttgtcaacggcccggagattatgtccatgattgccggccagagcgaggctaacctgcgcaaggttttcgaggacgccgaaaagttcgcgccttccgtcatcttcatggacgagatcgacgccatcgcccccaaccgcgacaagacgcacggcgaggtggagcgccgcgtggtctcgcagcttctcacgctcatggacggcctccggccgcgcgcgcaggtcgtggtgatcggtgcaaccaaccgccccaacagcctggacccggcactccggcgcttcggccgttttgaccgggagcttgacatcggcgtgcccgacgaggtcggccgcctcgagatcctccgcatccacaccaaggacatgccgctagccgaggacgtcgacctcgagcgcatcggcaaggacactcacggcttcgtcggcgccgacctcgcggcgctctgctccgaggcggcggtgcaggtcgactaaagaggataccgcgggtaccgag

SEQ ID NO: 4059 - DNA, 658 bp, Zea mays
gcggagaaggtcctggtagaactccgggtcgtccggcagctccgcggactcatcggacggcaggacgagcgttggtgtcgcgaccagctccggggactgcgggttcagcggcgcctccttggtggtgggtccaagcacggacgacggcgacgggtgcgcgaacggagcagtcgaggtggacgacgaagaggaggccgtcggggtggcgcttgccgaaggaactggtgaggaagagggcacaggctgcccgcggcggcggcgcttctcgtcggcgaagctccgggaagcggataggtaggctgcggacgccgcgccggccgtgtcgaaggtgccaagccactgcctcttgcccgtgaacgggttgcggatctccgccgcccacttgccccacttgcggagcctcactccgcggtagctctccggggccccgccactggcgcacgcggcgacagcggccgccggaaggaccggcctggctgggaccttgccgacgaacgtctcgaaggagaagcgcttggccttcgccgggcacgtagaggcgccggcctcctcgtcgtcggagtccgagtccgtggcgtcaggatcctcgaagagaacccggacgcggcgcctcggctgggccggggcaggcgccggctgctgcggccgggacttcagg

SEQ ID NO: 4060 - DNA, 689 bp, Zea mays
taatgtttacttagtgaagtttgaaatagaagatgtgatgttactgtcttcagcagatcatgcatatggttgcgcaaatattgttttgtattgtaaactgtattattaacgtaatgaagtttgaaatagaaatactatagttgtgcaaaatattgttttcactacaaccatattgttcacataataaagtttaaaataaaaaattgagataagatatatgtattattcatataataaagtttaaaataaaagatgagataagaaacaggtaaactgctgctggagacatgcagtgctgtcatggctgctgctgcatcccttgtggtagaataactgcccagcagtgctgcaaccggaagcccaataggcctatcagatttatgctttcaaactaaactaatttgaaggtacaaatgctgatacaactcatttcattccaaaataatgtcgttctagattagcaaaatgcccagttattttgggaccataaaattatgtcacacgtcctctgcgttgataggctgatgctattgtgtactagtgtaagatgacataacttacaaaaaaaaaacttgtagggcacgtccaagcttccctccaaaaagcaaacttgagatgaagatgtatatgcatgtacataacagccagccatatatacaaatctagagaaaagaactgcagggcatgca

SEQ ID NO: 4061 - DNA, 610 bp, Zea mays
tgttatgctagttagattttgcaaagaaaagttcaattaccccagttatcttgtttccctgaatccttggtacacttgtagtttcttcttaattatgtaactttaggttatataatattatgtcctgctacatcttgattgctgctgttcctataataatattccatgatttggcatttttggcttcatttagctgaaccaactgtaatctaacttcttatcacccccgggctttaatgatgcttctgtagccaagggtgggctgagggaggcttttgcagctccagggttaggttacgttgatattccaaatgcacagataagaaaggtaaattttgatggccagaaacatttttttttttcatattagatgttagtaacttgagcatgtgttgatttctgttgtcttcaggttaccgcaaaccgcttgctagcatctaaacagaccattcctcattactacttgacagtagatgcacgtgttgacaaacttgtcaagtatgtttctaacctaatatatgatttacagagctcttttcgttggtgggacagcacttctaactttgagttatgtcattctaatccacaggttgcgaggtgaactgaatcc

SEQ ID NO: 4062 - DNA, 653 bp, Zea mays
gggttcagttcacctcgcaacctgttgattagagagtgacacaaggaactcatagttagaagtaataaaggaatcagtgctgttcaccaacaaaaagggctctgtagatcacaaattaggttagaaacatactggacaagtttgtcaacacgtgcatctactgtcaagtagtaatgaggaatggtctgtttcgatgctagcaagcgatttgcagtaacctgaagacaacaaaaggtcaatacattatcaggctgttatcatctaatatgaaaatgatgcctaacattctggccatcaaaatttacctttcttatctgtgcatttggaatatcaacataacctaaccctggatctgcaaaagactccctcagcccacccttggctacagaagcttcattaagacattaacacagggggtcataagttaggttacagttagttcagctaaatgaagtcaaaatgccaaatcatgggatattattacaagtttattaccaaaatgaaataagatacaggactcatgatgtagtgagggcctgtgaggccacaacattatataacctaaagtcaaataattaagtaactacaagtgtaacaataactcagggaaaccgagcgaattgaactttcctctgcaaaatctaactagcata

SEQ ID NO: 4063 - DNA, 753 bp, Zea mays
caaaattttggccaacgggcacccgaggcgttctccagatgccatggacaacagcttgtacaaaaccctgccctgctgtggtgagtagcttagctgctttagaaatacacattagacatattcctccactacgcatgtttacatatcctactgcaaattctctctctctctctctcgatgagcaggggctggcgtttcttcatgattaaactctggaaccacagccttcttgacgcccgcgccatgaatgcttgcaacacaatccttcaaggctaccaagacggaagtgcggaccccaagtaaatctacaatccagagaaatcgttggccagcgtgtgtaagatctgccggttccggcggttatttctgaaccccaaaacagctatgtgaagaactggaatggggccatagcggcatttgttttaaggtttagggttactccatttttccaagggaggaaactaatttcccttggaaaaatgaaaatccattgggaaaaatgagtttcccaacactagccattaaaagggtagcttcctcccacctagggggaaaaaaactaggagggaaaagctggatccttggccgagacaatcatcattgcttcattcgtgattcgggtgaatttatcgggacccacattgctggttggccatgtgggaagtttgtaagggatgaataaatggataaaaaggaaagggggaatttcaattgggccagggttcgaaccttttttgaagagggaatcccccc

SEQ ID NO: 4064 - DNA, 758 bp, Zea mays
ggtacccctggatgctctaacgtcgacctgcagaatccatgaatcagcgtgttgaaactaactgcatcaggaaccaacccatcttgacacatcctgactatcacgccagaagcctcttccagttgattaatcttgcaaaaattttctatcagtatgttgtaagtaatagcatttggccggcatcctttaagtatcatctcttcaaatgtttcattgacttccttggctttgccagctttgcagagaccattcaaaactgagttgtatgtgataacatcaggagcaatgccatacgtccacatcctttcaacaagctgaagtgcactgtccagcttcaatctcttgcagtagccatcaatcaatgtgttgaaggtaaagacatctggaaggtatcctttcacaatggcatcattcatcacaactgccgcatctgaaatatttcccattttgcataggccattgatgataatattgtatgtccaaatgtcaggatggcagccttcctcgaccatctcattcatgacctgcaaggcatgcaagatcagaccctggcgacaaagacccttgacaagagagttgtagacgacaaggtcaggcttcagatcttttgcttgtgcctcattgaagagttctagggccctctcaatgtcaccctcggcacacagtccgttgatcagtgagcaatatgtgacccggtctggtacaaaacctttaaagacagcatctttcagaagctcagtagcgtcgctgcaggcaac

SEQ ID NO: 4065 - DNA, 569 bp, Zea mays
agaaaatttatctaataagcagaatctctataaaaccaaacacggccatagaagcgtctgcccatgtcaggacatcggtcaccagtggagtggaccgatccacgccggtcaccagtcgtcctcgtcagctcagctcgaaaaacaccagccgacggagtggccgccgactgagagggagaaggacccaggtcggccgcgggcccgatggacctagaggaccaagaagcgcagaagcctctcctggtcaccgcgcccgggagaatcggtgatggcagtcacttagctgagtccgacgctgccccgtcctcctcttcgattgcggtggtggtcgccagcaccgcagtcgccgtcgccggatccttcgagttcggcatctcggtaaccactaaccaaggccttccgctgtagtttctgctacaccatgcattaaattccgtgcctctgtggagttggagtagatagataaccaaaactagctagaagacaactaaacaagaactggtggtgttttccccgggcaaattgtcagcacttgcttgccggggcaagctaatttcgagttcttgcat

SEQ ID NO: 4066 - DNA, 636 bp, Zea mays
aaataggacaatatcatcagaatgaagggatattcgctacccatgtcctctccttagaaggggttgcaaaagcccaagttcgtttgccattgtgaatttgtgatcaacgaatttagaacatccattaccaaaataaaagacatggtggggggcaatgtgtccccttgcaaatatttgggatgccagggatctgagcaaaagggaccagatagcatggccgcttctgtgacctgtttgtgtcgtggacaagggaatgtttgtggatgtgggatgggacaaacatgagtaatccggaccatataatgtttgtcgattgggcttaaagaaaccaatcttgcttcaaagaaatatataaatgtacaattgtgcaacaaagaccacactcaaataaatagttccaaagttatgaccatggtagctttgtatggcgaggctgacctaattacaaacagatcgctagtttcaaaaacaaaacaaaaaacatctaattctaaactacccacgtctgcatgttctagaatctcacgtccatcatatcttgcaaggctcctctactcaaatctcatattgcattccaacctgcaaggttttgctaggagctatcttcagactggaaatgttggacctgaagttctt

SEQ ID NO: 4067 - DNA, 603 bp, Zea mays
agcaacagctaggagacgagcgataaaaaaagcgtagtagtagtagatagacgcctggaaagacaaagagtgtgaccccgcaaaatttctcccaaaaatcatcaagcctttccggagcccggccctcattcttctgccaaatctctgcaagaataaaagatacgcagaagatatacgggactaattgttggattaattatctcgtggcgccggctgattatagcgtggtacgtagaggaagactaacgctaataaacaaaattaaggagctccgatccaccagcatctggatcgatcatactcataccgggagaagacgcggccgcagtcgcaggtgtggccgcgggtgccgcaggtcttgaggtgggccttgtagtcggagtggacggcgtaggccttggagcagcgggcgcaggcccactggcggtggccgctgtgcttgcggcggaagtgcttcttgatgccgacgaggtcgcccagcgcgtgcgaggggtcgtggtgcaggcagctcggctccgggcacacgaacacgcgcttccgcgccgcctccccggcctcccgcttcagcagcttccacggcaccttgtgccgccgccggtgcat

SEQ ID NO: 4068 - DNA, 655 bp, Zea mays
gttgatcatgacctaataattgcttcgttgataaacaccgccgaaatgctgaagaaagaaaagtcaagtaattggctttgtgaatttaaggagtggatggatgacaatacagagaaaacagaaggcgacaacctatctgttggcttaactaatggcaatgggaagtatatcaaacaaaagaaaaggcagaaagcacacaaggagacttcaaataacatgtcggatttggtacaagtttcagaaggtggtagtagctcaaaccttttggaatcagattcatctttcacagataatgcattttctggttcaaatggagtcatcaaacaatcctcaaatgaacttaattttgaccaagatcatctaaaaatgcacttgaattcttttcaacgacctcctcctctagagttagtagccacttcacaaactgaccccttttctgagttggaaaatggctctagaaatatgctggcaaatgggacaccatccaatacaatgagcaagttaatagaatcaagtccaccccatacatattcaagtccacagtcacctccacaatacaaggaggacattctacatcgaagactttttatggaggaagaatttttgcagatttcaggacatcttcattctattggttcacttggtagtggtagca

SEQ ID NO: 4069 - DNA, 662 bp, Zea mays
tgacgagcgcttggttcgcgcgccccggggggctcacgccgctatgcttgccgcaagttctggtctgcccgtcgtacggctgtctcagattctccagctgttgcgttaggtcatgggaactggattttgaattttttttttggcatttttcaggaagagatgcgtgcggatggggacgtactgctgaaatccgagctgattgatccatcctcaacgaacctgcaccagctggtcaggagggtgagactcatgaccatcagctccaggaaggcggtttggcaggaggatatcctcgtgttcaaattgttgattgaggtacgtgaaattgctcgacccaagtgtctttgtttggtagcatacagtatttttatttgtttctctgctagttgattgcaggaacgagctgccgatattgctaggcaattgagtgactctcattggacatcgacatgtgttgtcacgattagcaaattcaatagcttctttgttgacatggatgatgctcatattgcattatgttttttgacgcaacatgggaaagctaggtaccttttgggcaggaaacaagaccctattgaggcatgctcccttttttctcgtgcattatgttattctgctgaagcaagtgcccactagcatgctgcattttgttcagttggatt

SEQ ID NO: 4070 - DNA, 614 bp, Zea mays
aaaatgagtgataacctgatggacaaaggttagcgcctttggtgagcgcctgaagatcaccgggacggaggtcagcaaaaagatgacggccggaatgagctccatgagcttcaagatgaaggagttgttccaggggcagactcccgctgataagattgttgaggacgccacctcggagaatctggacgggcctgattggaactcaaacttggagatttgcgacttgatcaacacagagaaagttaacagtgtggaacttatacatgggatcaagaagaggatcatgatgaaggatgcgagagttcagtacctctcattggtcctgcttgagactattgttaagaactgtgagaaggccttctcagaagttgcggccgaacgggttcttgatgagatggtcaggttgattgatgatcctcagaccgtggtgaataacaggaacaaggcccttatgctgattgaagcatggggagagtccggtgatgaactccgctatctgccagtctatgaggaaacgtacaaggtttgtgagcacaagccttcattctctttaccattgtttcaaccaaaccaactgcacaacgcttatattgttccagttgactaatactact

SEQ ID NO: 4071 - DNA, 568 bp, Zea mays
cggccgccaaggaaggtgatgacgccttgctgaattttcgtttcaggttcgaagcagcctctccgtatttgcaaatacggaggaaaaacttgcctcggtttatcccttttctagaccccactcatctgttagccttcggcattaggcctgccccacttttctcattaaatgttcaacgctgacgcattcgagaaatgtaccagtgctgaaaggcaaacaaaaggttggatgggcatcgcaggtacatacatatgatagcaccacgatgcatacttgccttctcataaactttgctgctgctgccattcagtagctctggtgccatccatggaagagtgtcgcgtacaccaccagaaaccagagtgttgcgcttgaaccttgtcaacccaaagtctccaacctaagaattagcaatgaattattaatgtaacagttcaacgagagttggaaggccaaaccaaggtgaaactttgctgttcactgacaatgaatacaaactcctaacaatcgtaagttcgctactgtactgctgcgtatgatatgctaacagtactgtcccagctgcgaa

SEQ ID NO: 4072 - DNA, 690 bp, Zea mays
tacgcactacaagcgcaagcacgggctgaagccgttcctgtgccgcaagtgcggcaaggcgttcgccgtcaagggcgactggcgcacgcacgagaagaactgcggcaggctctggtactgcctgtgcggctccgagttcaagcacaagcgctcgctcaaggaccacgcgcgcgccttcggccacggccacggcgccttcggctgcaacaacctcgacggcgacggcgacggcgacggcggtgctggcggcggcgccaacggcctcgacgacgacgacgacgatggcgccgtctccgagatcgagcacgactactgcgccgccgcgcggtgatcgatcgtgcatcgatctgtacgtggtgggtgccacacgtatagctatagctagctagtagcttgcttgctctagtagtgctatatatacccggctgaccggcggtgttaatttcttgttctctcgcgcgcatgcattgttagtttgcggcggccgggctgtattacgtgttgcggccggcccggccccggcctgtcgttgtttgcttttgctctaattagggttgtggaggtcgtcctgatgatttatatccatctctaagctagctacctgaaggtacgttattagtttgtgtcttttactctgttattcgtgccgatccatcgagaggagaggactccactcttattattagcata

SEQ ID NO: 4073 - DNA, 678 bp, Zea mays
  unsure (1)..(678): unsure at all n locations
catacttatagtcatctaattaccaccttctacgttgcagtttctggaacctcttgagctatgttatagatcattatgtgcttgtggtgacaaacctatagctgacggaagtcttcttgatttcttgcgtcaagtatcaacttttgggcttgcccttgtgaagcttgacatcaggcaggaatctgatcgacacacagatgtccttgattcgataacgacacatcttggaatcggctcctatgctcaatggtctgaggagaaacgccaggattggttgttgtctgaactgaggggcaaacgtccattgtttggttctgatcttcctcagactgaagagactgctgatgttttaggcacatttcatgtccttgcagagcttccagcagattgctttggtgcatatatcatctcgatggcaactgccccatctgatgtgcttgcggtggagcttttgcagcgagagtgccatgtaaaacaaccactgagagttgttccactcttcgagaaacttgcagaccttgaagcagctccagcagctgtagcacgactcttttcaattgactggtacatgaataggattaatggtaagcaggaggtcatgatcggatattcagattctggcaaagatgcagggcgtctctctgcaggtcgactctgtaggacccccgagnccgagct

SEQ ID NO: 4074 - DNA, 648 bp, Zea mays
tgacgcaaggttagcttgttctctgaattcgacgaaaatgctactgtggtttgccattggatggcgtttcatgattcgattaattttcggtttcagaattatcagaagcgacctcaaagctgaagaagccgtcacgagtggctcgcgacatgttcccgacgcttcttgcagagatcgagaagatcgtgccagacaagtgcgatctgttgcaggagtcatacagcagattcaaggtaaattggtaacagtaattttcacacgacttgtgaataaagtaacgtaggatacgtgcaagttggaaagacttgcatcatttgtttgacaactttgcctacttcccttacattatatatatttatcggatcaactgatttgtctgctgacaacttccattgcatgcgcaaaatcagctgttctgttactgtataagctgttacattaggaaaatatatacagattttgcgttgctactcgacgagcaattgcaatcaactttacaattctgaaaaaagagcatgagttgattgtttgggcgtggtaaattgatgtttatgtggagggcttgatcataaattcataataatgctctactcgtactggttaacaacacagcagcagcctaaaacttcctttaacacaattttttct

SEQ ID NO: 4075 - DNA, 634 bp, Zea mays
aatattgtaagactgtcataatatccaacaatgaacagagtaccatgtcgagattaataaccgtacagaaatattgactcaagtacaacttgacgagaaatcatgccataagcaataagcatagcagacaaccaatcttgcgatctgcacaattatacttcggcagtatcgactaaaatctcgataaaccacagtgaacagtttttctatgtgcactatcccctcttcaatctccagaaaacaaacctgtatactaaattcgtgtctcgaactctcgatggtggaaatcactggctttcagatttaccggtttgttcagggccgttaccatttgatccagagctgccatcagccccttgagattcattatgctcggcattggtggatgtgctagtttcaatcttgggatccacctgctcacccttgttatacgtttctgtagctccatcacccttgttagatgtctcttctgaagaaccattcactccgctggaagaatccccttgggagttctctgcctcagctgagacactgctgttctcagagttctgttgtatggaatatgacgcttcagtggttgtacctgttcccatgcccttctcatcatcaccagatacagtctcagtattttctt

SEQ ID NO: 4076 - DNA, 669 bp, Zea mays
taaaaggaccacggcggtccaagccgttccaaacaaaggcagatggtgcagggaagcgtcctttgggcccgcgaagcaacaaaacagataactcttacaagtcccaaggagcgtgcattgcctcccatgaccgacatccaagaggggaaagaaaaggtaggagccaagttagcatccatcagtcctgataatcagcagcaacgggagcattgttgtttgagtcatgtggcacgtcagattccggtggcaatttgtttgggtctggcttgatggtgtcaccaacaaccggcggcttcgccttgcgagtcaaagacttggcctcctcgtaagagtaaatgtatatcctttttaccatcctgaggaattcactgcatcgaaagaaagaaagaaataaaaaatcaagagttaaatcagcgacgaagttaacggcctcaaaagttccgtcacaaacgaatcaagcgcagagagaccccccatacttccatggatcgtccccgaccagcatcgtatcatcctcgtcatctgtgtaaatgaccttccatttcttgaggttggcagaaagctctccctggatatcaaacatctcctccaacttgcggtggagatcagcatacccatctaacctcgtcaagtccactgccctgccaaccgccattccttgcatgatta

SEQ ID NO: 4077 - DNA, 690 bp, Zea mays
tttccgctctgcaggcgcacagtgaaatttacccaagtaaatgaggccttcattggtcaagaccaggtggacctattctttatagcgtacttgcttccaccttccaacccttcacggtacaataatgtccatttctcaaatgtgcaatcaacgaagttgtagtagcctccgtggagattcaaagtaccttcattcaccctcttctctatccatgggtatgttaacaagttcaacagagagctatttattgattcctgtaacaaaaggaagaaatcaatacatgtcagacaccgagctatttattgactcctgtaacaaaaaagaaagaaagaagaaatcaatacatgtcagacaccgtgagtggttgtgcttagtaatatcatactatgactacataaaccttgaacaaaagaaaaccaacatatttgccaagataaatttgaattgtataactagtacgagacatccatatctaaccctagtatagataaagactatgaacagggaagaacaataggatgagcaggcaagatcttgagatgaatctgaattagtgaaagccatggaattgattgatcctgtgcactacattaggcaatatttttgtaaaagttaaggctcgtgatcacacatcacccaagaatcaccttttcacaatgtttgcactgcatgtcaaaactcaaatttcca

SEQ ID NO: 4078 - DNA, 648 bp, Zea mays
tgctggaggttttcaccgcgagcatcgtctccgtcgcggacaactacgtcgcgccagtcattgacgacctcgagagcagcggcgcgcgcatggcgtcgctcggcatctggctcgacaccacccgcgacgtggagcgcctcgcgcggctagcgccgggcgtgcgcgcccggtcgctgcacctgcgcaagttagaagggacgcgcgccctgccgctgctgtccgcggagcacgcgccggagcttgccggcgtgcaggagagcctgcgggagctggtggtctactcctccgatgtcgacgagatcacggccgacgcgcacgtgcccatgctggaggtcatcaagtttgggttccttacgaagctgcgcgtcatggcgtggtcccacgccgccgggtccaacctccgcgaggtcgccatgggcgcgtgccacagtctaactcacttgacgtgggtgcagaacctcccctgcctagaatcgctgaacctcagcgggtgcaacgggctgacgagactgctgggtggcgcggaggacagcggcagcgccacggaggaggtgatcgtgttcccgcgtctgaagctgctggccctgctggggctgccgaagctggaggccgtgcgagtcgagggagagtgcgcgttcccggagctgc

SEQ ID NO: 4079 - DNA, 681 bp, Zea mays
acgacctgcaccgtcactttctgatgggatgcatgcacgtcaaggaggtttattaccataaaaactcagctcagatccaaacagaccacgaatgatagtggaaacctatagctttacgagctagctaaaaagttggatttggtacggtaaattctactgtaatatttctacccacaaaaaagtaatttaaagtaattgttgccgcataaattaaaccgcacacctaacttgcgtcatctatcttctccatcctttttctattcattttctttatatatatatgtgtgttatcggtgaccgcatattctgtttcattgtttatctctaaataaatatttttgcatgcagatgcgtctaatttggtatcattcattgatgagaaaataaataaattattgcctcgtcattttcttgctcccgagtttcttttagctcggtttccgatctgacgttttaaagaaagcactgagaagatgctgatgttgcgtacgttcctctcaattaaacttgttaaatcacaatcaagtcattccccgagttaactggcttacgtctctcctctccttccacacttcgagcaagcatcaagtcagctgatatatatagttcaggggtgccacgccaccattattgctatcgcgccctactgctgagtatagcccttgggtgcaggttgactct

SEQ ID NO: 4080 - DNA, 634 bp, Zea mays
attcgccgcgggcggaatcccccgacgagccgcaggcgggggcggacgcggagtcgccgcgcgccggggccgggctgaacaagcgcgagcgcgaccttcccgcctcgccgtcatcgccgctgccgccagctaagcgcaggtacggacggggtccatgtgtcgcgtcgcgtctcgcgtgcccgcaccaccgcacgtagagcaccaccgagtgttttgcgcggtgcgcgcccgtgacctgcttgctgtctgctgctgcggcgctggtacgggagtctggaaaccagagctacgaagatggctaactcggctcttgtctatttctgtgcgagcagccggagatcggtggagaagcgggttgtgtcggtgccgctggccgagtgcggggaccggcccagaggggccagcggggaggggccgccgccgtcggactcgtgggcgtggcgcaagtatgggcagaagcccatcaagggctccccctacccacggtacgtacgtactcctcctatgcagctgctgcttctgctgaacctattaatcagcatctgcatgcaaactgttgctgccgattagcaccagtctgtctgatgataaacctgcttcgcgcttctgtgtgtcatgtgcaggggttactacc

SEQ ID NO: 4081 - DNA, 632 bp, Zea mays
aacaagacaaaccatgaataactgcattttaggagttatcaaaatgatatcacaaaatgacaaagcagttgttctgaattttgtatataaagtagtatgcgagcttataagactagtcaaaataacacccagtttatgggaccttatggttctctataattatggatttgccggcttttgagaagcaattctattgggttttcttttttacttctaactgttaagtgttgtttcctttatgaaagcaaaacctatgatacaaaagaaacatatttgtggccacttcaacttctccatggaaatgctttcagaaaaagcccccgaaaaatcacccagcatgttgtacgggtttatgtcaagtctattgattttgtatgcacaaaagacaattcagttccaccccgatactccactaccaatttgtaataaacacaactaatttatgttaggaaaactgtcaatcaatcacctaattgatgtacctaattaattgaagaaaatagcaggctcgaataatttatgcagttcacataatcagctgtttctctttcgcatggacaatggaccagaaatagagcaattggatgttacctatggttataataaacccaaaacataacacactgtccagt

SEQ ID NO: 4082 - DNA, 634 bp, Zea mays
tgcagctaaggaacactcacagtaaatccaccctccttatggaaaaaggttgcagaggcacaattcaaccattcagacatgaatgtaaataagaaaacaaattcggaaaaaagtgaaatcttagagcacaggaaggtcatgaaatcatcagttgttgatttgtttcaacatcttgtcatcctcgcatttgcttaaaaatatgctagcctaacctagttcgtatggaactgtttgttcctctgtgttggaattagaaattgacagatacacaccaagttatcatatggatgaaaggaaaaaacatgttcaaaagtcaaaactatgtctaaccttaaccatgttctacccagctcaggctatgaatatgattaaatcaagtctactagaaaataacacacgacacagttatgagaatcgtgaatctagttatcttccgccttattttcttaagaactggaatactgatcatgtccaacttagtcaatgaagtacatatggatcgttgtagttttgcatcgttcaaaccgacaacttattttcagaattacaccagcagactaagagaggcatgtttaccttgccgcttcagaacggagctcgctagaggagcggtgtccttgcttgcactaaggga

SEQ ID NO: 4083 - DNA, 677 bp, Zea mays
tagtactagtaagatttcgtactcctttttttatatgattaatataaaataaatacatatcttttttaaaaatcaatcagatgatggaggatgcagttcattttctcagcaaggatacagttgtgcaagcgatgtcacggtctgctaataaagtatgttttatatttgtattattaagatattcaacataagttatttgtgtgcatgcttttatacatttctccatttttagttagaaacatttcaaccagtctctagtttgcttgcttattagcatctcgtgctgagatctagttcagaactgttcatgcttaatctgacgcatccaagttctgtcatagtcctgtcattgtgtacattgggatctgtgtaaattactatcgacaaaatattttaaatctatctcagaagctcgtcacttgtaggattgccattgcaattagaatcctttgaaataattcacaatgtttggatctgtacatgacagtatgttttttccagactagaaatgctatatctgggacttactcagcacctcagaggtccgcaagttctgctgctcttttggttggagatcctgctcttacattggacagggctgggaactttgtgcttcctagggctgatgttatgaaactgagagatcgtttgagaaatgaagaaatgctgcaggcacc

SEQ ID NO: 4084 - DNA, 716 bp, Zea mays
cgacctgcaggccccatcgctgcaagcatgcatgcccgttggaagacgccggaacgaaaacgggtcgtcgagctcgaatcgatcgatggaggaaagaggaaagcagcgcgccgagcctagcagctatggcagttagcaggggaggggccctctagcggcaggggtggggggctttgcccaaaaccacgacaagcggaggttgcatccagaaaagcccacgccctttctctcctttctctcctttttctctctctagcatcgacctgctgtcgagtcctcactggtcaattcagctgagcgatgagagagatggagtgacgggaggctgacacatggccgggtattgaggcgcggaattgaatctgattaaataatgcaaaaaggtggcgtgccaggacggaggacagaaagcaatcacgagacgggaggggttggcctttcgcctctagggttccgggtcgcccaccaccttaccggaaatggcaattgcgggacgcgcccccaatcactcaccacccctttcgtctcgcccttttaacccaatcccctctccacgactccatccacccatctcctgagtcctgcctgcgctcgcctcctttcttcccccccggccccttggcttttgcttggttgcatcgggccggtcgagccggagaggccggaaaagctagctagctaccagctctccggtgtggtagtacgtctgccggcag

SEQ ID NO: 4085 - DNA, 646 bp, Zea mays
tcttccacctaatatcttaattcgacgaaatactaaagcacatgcaggttaggtacacaccatacatgtgtggttagcttaattcattccaagaatcagatacctttatttatattctctctttttttttacaaatttatttagacagcgaaaaacaagacgacgcttcaaaaaagttcatgtgctaatttaattaagcggcaaatagtttttagatcatgcatgtttctctcttttgtttgtgtaacaatatgcatgcctcttctatcaggagctcacaccatcggccaagcacgctgcaccaacttcagagcccacgtgtacaacgacaccaacatcgacggcagcttcgcaagaacaaggcagtcaggctgccctagatcgtcctcaggctcatcaggcgacaacaacctggcgccattggaccttcaaaccccgaccgtcttcgagaacaactactacaagaaccttgtctgcaagaaggggctcctgcactccgaccaggagctcttcaatggcggagccaccgacgcgctggtccagtcctacgccagtggccagagcgagttcttctcggactttgtgacgggcatggtgaagatgggtgacatcactccgttaactggctccggtgggcagattagga

SEQ ID NO: 4086 - DNA, 670 bp, Zea mays
gcagacagttcccatcaggcttaatgtttcttcaaatacgaacgtcgtttcagttcagacatttccattcgggaaccaaatccaaccaatcagcgtagtatcttgagatggagataggaaatgtgcgataccgataaagcaggggtaaaatcttcacggcagcagaaaaacagattacgaggtgtctatatgtatactattctattaaaaaaacttaatatggacatgataccacggcttcaccatctcaatgtccagcgcccgcaaaaaatagtacagaacgagcactcgaaccagaacttaatgtggacatgataccatggcttcaccatccccatgtccagcgcccgcaaaaaatagtgcagaacgagcactcaaacctccagaaatttgaggctagccatcacatacgtactttagtatatacatataaacaaaatatatatttgtagtgtatacgctgctcccctgcctcgtgccaactaagatcacatacctagtgagagatgatgaagcaaagacagcaagagatttctttcttttttttctatgatatcattgtgtgtgctttattattaaaaaaaacaaaaaagaaagcaagggagctcacaattcttgtgcttctgcacacacactatggggcccaggaggcgttttcctgagggtcgtc

SEQ ID NO: 4087 - DNA, 1272 bp, Zea mays
atttgagcgtggagtagtcggccatagctgttcccattggtttgccctgtatgtaatcggaatctgatgtcattcaatgaacctattttttgggtgccatgcgaagctgtctaagatttgagtctcttcatgcatcaaattatgcatcatcctcgctggaaaaataaaaactctaccaaacatagacgattatttgtttccttttctcgtcgatgtttccttatgaccaaagttgttaggtttgatagttcgatggccaagataatttgagaaaaaaatgacttcttccattttgttattattaataacctattaccagtttcggggcaatccaagttccaatcagtgcacacattagttaattttgtactgcatttttttatcaaatataaaaaaagtagtagtcaaaatagcataaaccaaccaacaaactaaaccatggtacgtacatgttagtgctacgtcatatcgacaacgcagcctgccgatcatatatcatcttccttagatgtcagtgtatcctgcccgattgctgctgcggcagcagccccgggatgaatggcacaccgagctgtgggagccagtgctggccctggatgaagctctcgacggtgtacttctgcaggtgctgctgggtggaggcagtgcagccgtgcagggaaaggcgaacgctccggtccggccattggcacggcgtctgtcctctgacggatctctgagctcagttttttctctctctctctcttctctgtgtgtgtgtcttctctccacgctccactccgtcggacagagtcctcagccaggcagccattactcacggacgcgctcgcatggcaggtgcggttggtattgatggcggctcagcttttcttccggcctctatgatggtggggtactaggccctttttcacactttgtggtggccgtcaggcgtcagtcgtcactaggatccaagatgagcatttcgatcagatgtctttcttccccagctgtgccgagaccagagactgttagctctgagacgtccggtacggtctggccgtttctcgcgttccacacgggcatgcagctgcgccgccatttgtcgcccgatctctcctgtggtatacgttctggtaaaaggcagcaggtccactctacggccccattagttagcgagcgcattcctctcacgtagtcacgttggccattgcaatgcaacccggccccccagcagccaacgcgacggccatgatccattgatccgtgatgatgcgtgctccatggcgtgcc

SEQ ID NO: 4088 - DNA, 676 bp, Zea mays
taccctaaggattctgaaaagctgatgctggcaaggcaaacaggcctgacgaggagtcaggtgacgacgatgcctctgattaatcaagactagagtcgtctcatgaatctttacctctgtattctgaccgtgctcccgtcatgcctcgggtggtctccagatttcgaactggttcatcaacgcccgcgtccgcctctggaaacccatgatcgaggacatgtacaaggaagagaccggagacatcgagcaagactccaactcctcctccgacaacgcgccagcaggaagcaaggccaagacggcgtcttcgcgagacaaggaggaccacctggcgagaagctgctgcacgccgcgggccgtctgcgagagcagcagccagctgagcgagccaccaggaggagccagcatgagggccatgagcgtcgccgccgccgccgctggagcgcccatggggttattccagaacgagcctggccacgaccacgaccacgacgacagcttcatgagcctgatgctcaaggagcagcgaccgaacgacggcggcggcggcctcctcctccaccacagcgccgtggcgcagcaccaggacgagaacgcccggttcatggcgtaccacctggcggagctgggcaggtacggcaacggcaacgtgtcgctcaccctggggctgcaggtc

SEQ ID NO: 4089 - DNA, 566 bp, Zea mays
cttaatgctctgggaatctgctcaattcatgtgctgtcttttagcagagaacccttcgatcgttgcaagcaaaagggtcctggagttgggctgtggctcagctggcatctgctcgatggttgctgcaagtttcactccgtttgttttagctacagatggggatgaagaatcactggacctccttagacaaaatatctcctcgaacatggagcctaatttgctgagcagaatcatggttaggaagttattctggggcaacgaagatgatatgaaggcagtccgagagcttcatggtaacggcgtgggttttgattgcataataggcaccgacgtgacctacaatcccgatgctatactccctctcttcaagactgctaggggagtgatttctgagaaagctaacgaggactcggtccctgctctcattctttgctacatccagcgacgagttgatgaggactccatcctttctaatgcaacgtcccagggtttcaggcttgtggacaaatggataaatggagttcacgagagtaacggtaccatcagttcttggttctctggtaatg

SEQ ID NO: 4090 - DNA, 602 bp, Zea mays
ttcctcaccgtactcaatatgagtggatcgtgcgtatctctcccgcacttgtctctcaatctcatcaatatcctcttcctcatccctcataggaatagaatgacgtcttgagcccctaacaacatcctcatcaggaaggtcggccccagcatcattaataaaatctaaaaagaaaggcaaaggagcagatatcagtgcattagaaacatgaacatgattctattgcttagtacaataataagcacatagctcattcaatttcaacatttgcttggtacaacaataagcacaaagccaattcaattacagatgtgcatgtatttcatgattcaaactttgtaatcttcaccgacaattagtcttaacaatatgaaaagtttgtactacaagagcggttacattggacttagcatttagaaatactttctactgaccaacatttttgccatgaatgacattataagagaaattagcagtcaaagagtaatctcgaagaccacaccaaatcaaaccgtgccttatatttgggcatgtttgcttctgatttaagcgggtgtttggggctttggactgcggctgattgaatagcccagccggtcagc

SEQ ID NO: 4091 - DNA, 631 bp, Zea mays
ctgcagggccccgcgcgtccgcctccgccgccgccgtcacctccgccatcatcttggcgcagcagtacaggttctgcgcgcacacggtgcatatatatatgtatcgagtcatcaggcgggacttgataagcaaacaacgtacgcgcgaatggggagaagaatataatggcacggcacgtacgtcggttcgcttgcagaagtcgtagtcgctccagcaggtctcgtcgaggacggcgtcggggctccggctggggtccatgtgcacggcgccataggaggaggtgaagacgacacggcgcgcgccctcgtccgccgcggcgttgatgacgttcctggtgccctccaccgccaccgggacaagctcctgcgggccgggcgcggacgcaagcagcgtggtgaggcgtgagcactgagactgaaagaaaaattgaaggagagagagaggagagggcaagtaaaacgacgactgagactgaccgggtcgttggacaccggggaggcgacgtggaagacgccgtggcagccggcgaaggcggcgcgcagggaggcgcggtcgaggacgtcggcgcggcacagggtaaggcgctccttggctccctccagagccagcaggtgcgcgttcttgctgtcc

SEQ ID NO: 4092 - DNA, 736 bp, Zea mays
tttcaaaaatgacgcagcgctgttgacccccaaccccaacggttccagggttcagaggagcactgtatctctgtcaggaattggacatgtttggcggcactagagctagagctggagctccgcaaacctcggttcgcagcggacaaaaagttcgtgcagaaacggcaggataactgaaactcatttcacctcgctcgttcgttggctcacaatcatgtgatgcacctgtagactagaatgacttgagtcagagctccacgaacgaacgaacgccaacaccgcaatctcgtgaactcacaaaccaacaggaccagcgtcctctggtatcacagacgctgccgatgccgtgagcgtgtgatggtgcctgcatggcgccctctctgtttcgtgggacgggagctgggagcacgcgcacggacgtcggacaaagggcgccgctgcgcccacttccggcgccccggcggccaggggacagatgggatcgccgtctctttgctactgggcggcagcaggctttcaccgccgaggaacgcagacacgaaccactgccgctgccgagtgcccggccactccgcacttggggcactccgcactccgacagaccacgcaccagcagcagggagggcgggcaagcacgcagtttttttaccaccctgctccgggcgtggtggacggatccgggatggccgaacggccgccagatcctccgcgcggtcgaaacgaggccctgcaggtc

SEQ ID NO: 4093 - DNA, 619 bp, Zea mays
aagtgcaacagctcaacctttcaccataaacattgtgattgacaatttggcctagatgtgatttgtttgtcctattagatgagggcaaacaattcattttgaattcttaactgtctggtgttcaagtgaaaccatttggacatatgtgctgtttatgaatttaaccttgggctgtattaaatataatagcggagagaaatgatttggatgtcagctcacttttaagcatatttgtcagcaagccatactaggctctagttctgtggcacatgaaagtactgagaaaacattgtgtaagcactaagcagcagattgatttatactgtttcacttgaacagtcagagcatcttttgaaagccagcataagtcattttaaaatatcttcaaaaataattagttgctcttgtacaatccaatgatttatctatactggatttggttagagaaagccagtctttttgaacaaatactccgtatgttagtagcgggaggtctctgattctcccacttgaaggaactttgcgtagcatgacttcatgataatttttatgaggtgttcccacatgagaactgaactagatcaagtaaaaattcgagcctttctagctgaatcaacat

SEQ ID NO: 4094 - DNA, 1160 bp, Zea mays
tgcggcgtccagtagtagcccttcagcgccagcaggttcgggtgccgcgccttccccagcacgcgcacctcccgctcgaactcctcgcgcgaccgcaccaggtgagccgccgccagcttcttcacagccaccacgcgcccgtcgcccacggccgcgcggtacaccgtgccgaacgcgccgcgcccgatctctgttgccttgctcagcagcgcgtcggcgccggccacgaggtcctccgaccggaggctgctcccgggcccgaacgtcaccatcttgccggtggcgagcttgcccttgccattgcccttgcccccgggcggcggcgacgacgatgacttggtcgtcgtcgtcgagctggtggtgacgatgctctcgtccacctccttcttctgcccgtgcccagggcctccaacacccgcagcctcgaccctccgccgggccgacacgctgagcagcgtgatcacgatgacgccgagcacgatcgcgaccgccgcgaagatggccaccatggcggacacgctcatcaggaaccgccgcttcctcggcgcctctacaccaccgccgccgcccgtctccaggttgttgtcgccgccgccgccgccctgcgtatactcgttggggtccagcaccagcggcttggccacgttcatcctgcacggctccgtcaccagcgggctgcagtacctgcggaaccaccggccgccgctgacgctggcgcggtgcagcggcgcgcacgtgatcgagttcctcaggtacctggaccagttcggcaagaccaaggtgcacgccgccgggtgcgcctactacggccagcccgcgccgccggggccctgcccgtgcccgctgcgccaggcgtggggatcactcgacgcgctcatcggccgcctgcgcgcggcgtacgaggagagcggcaggacgcccgagtccaaccccttggcggcgcgcgccgtgcggatctacctccgcgaagtgcgcgactcccaggccaaggcgcgcggtatcccctacgaaaagaagacgaagcgcaagcgcgcgcagcagcaggccacggagccttcgacgagctcgtctgatgctgccgccgggagtggcagggctagagcagcagctgctgcggcgtccgctgctcaggctgtaaggagtagcggtgcacctagctc

SEQ ID NO: 4095 - DNA, 660 bp, Zea mays
gctggtggcggaacggtgcatgatgaacgtgccgaagccgctggtgctggaccccaacgagtacacgcacggcggcgggggcgacaacaacaacatggggacgaacggcggtggcgtgggcgcgccgaggaagcggcggttcctgagcgtgtccgccatggtggccatctgcgcggcggtcgcgatcgtcctcggcgtcatcgtgatcacgctgctcaacgtgtcggcccggcgccgggccgaggcggcgggtggtgtcggccctgggcacgggcagaagaaggaggtggacgagagcgtggtgaccagcagcagctcgacgaccaagtcgtcgccggcgccggcaccggggggcaagggcaatggcaagggcaagctcgccgccggcaagatggtgacgttcggccccgggagcagcctccggtcggaggacctggtggccggcgcggacgcgctgctgggcaaggcgacggagatcgggcgcggcgcgttcggcacggtgtaccgcgctcccgtgggcgacgggcgcgtggtggctgtgaagaagctggcggcggcgagcatggtgcggtcgcgcgaggagttcgagcgggaggtgcgcgtgctggggaaggcgcggcacccgaacctgctgccgctgaagggctactactggacgcc

SEQ ID NO: 4096 - DNA, 663 bp, Zea mays
gcagcaccccccggctcccgcgttctcgtgagggaaggcctccttccggtgctccacggcccgtcccggaatggcgatcacgacggcgtcctcgggcggcttgctctccttctggcagcaaccatggcagtccttaccctgcttgtcgcctcctagcgtcccgggcttccccgcgccagcgtgcgtgcccgtgcccgtgcccgtgcccgtgcctgtgcctcgtcgtcgccaccggcttcaccgtcgcgcagcacggcttggacgcctgcttgctcttgcacgccgtagcgctagcgcagcacctcgggcggcgggcggcgccgtccctgagcagcagcatgctgtggaggacgacgagcaggcacgtgccgacgtcggcgagcacggccacccacagcacggggcgccacgcgacggcgagcgccagcacggcggccttggcgccgacggaggaggccacgttcacggcgatggtgcgccgggcgcggcgcccgagccggacggccttgggcaccctgaggatgtcgccggacatgagcgcggcgtggctcgtctcgatggccgcggccgacccggacaggcccatggacacgcccacgtccgccgcggccagcgccggggcgtcgttcatgccgtcgcccaccatcagcgtcgccccgtgcc

SEQ ID NO: 4097 - DNA, 703 bp, Zea mays
agagccgacctgcagcgtgacagacagacaggcagtccgccatcgtccccacagccaaaaattctcgttattagatgcagagagatagatagatcgataaatgggctgaaatttcatgaatttggggtgaccttgccggcccttcctgctctggccttccttcttgcagctgttgtcccacaggtgcgcctcatacctccccgtccacctatgcctgcttaattaatttcagttttagttttagtttcagcttcggctccagcctccatggacggacgggcgggcggacggaccagtcaactagcccgacacggcgacgtgtacgtacgtacctcgtcacgccgcggtactgcgacgtcctctgcccgaacgtgtcgatggacttgcggtggtgcacgggctgcttctgccccgccgcgccgccgcgcttgcgcccgccgtccatcgacgccgccgccgccgcgccgtactcggagctggggtgcgccgtcacgcagctcgacggcgacgacccggagctgatggacagggccagcgcgtgctggtgcggctgcccggcggcggccagcagtgcgccgttctcggcgcgcgccgccacccagctcgccatcgccgtcgccgtcgcggcggcctcgtcgtccgccaccagctgggacccggccgaggccccaacgtacaggtccacgcacgacggctgcaggtc

SEQ ID NO: 4098 - DNA, 698 bp, Zea mays
gtgcccgccgagcccgtctacctctggacgctccccatgttccactgcaacggctggaccttcacctggggcatggcggcgcgcggcggcgtcaacgtctgcatccgcgacgcgcgcccagctgacatctaccgagccatcgcgcgacaccgcgtcacccacatgtgctgcgcgcccgtcgtcttcagcatcctcctcgacggcgacggcgacagcgacggcgccgccaggcagctccaggcccccgtccacgtcctcaccggcggcgcgccgccgccggccgcgctgctcgagcgcgtcgagcggatcggcttcaacgtcacgcacgcctacggcctcacggaggccacgggccccgcgctcgcgtgcgagtggcgcgaccagtgggaccgcctcccgctcccggagcgcgcgcgcctcaaggcgcgccagggggtcagcgtcctgtccctcgccgacgccgacgtcaagaacgccgacaccatgctcagcgtgccgcgcgacggcaggaccgtcggggagatcgtcctccggggcagcagcgtcatgaagggctacctcaacaacccggaggccaacgagagcgccttcagggccggctggttcctcaccggcgacgtcggcgtcgtgcacccggacggctacatcgagatcaaggaccgctccaaggacgtcatcatcagcggcggggagaacat

SEQ ID NO: 4099 - DNA, 668 bp, Zea mays
agccaagaccatgcacatcgcaggccatggcgtcgcagctgcgggaacacaacaacattcacatgaactttagctactggtacagggcaacggtaaatatagagttctcctgctagtatgatcgtaaagcacttcacaacgaccttgaaacgctctgttttgtgctgctatacttttgttttccttctgtatacattgtctttctctgctggtgcagctcagcagagcggcaggggctcgccgttccactccttgaggcactcgagcagcgggtcgatgtgcttgcgctggttgatggccacgagcaccttgttcagctcctcgccgggcgacctcgtcttctcgccggtcaggtactcggtgccgacctcctcgcgcacgaaccggtacagcgggtaggaccggcactccttgatcctgttggggaccagagggctgccgttctccacggccgcgcgcgcggcctccacctccttgggcagcgccgcgcggacctgctgctcgaactcggccaccttggcgaagatggacgtgtccacgtcgcgctcggcgtcgccgttggccagcgcgtgctcgaccagcaccgcgcggagcttctgcatcagcgcgtagttggggctgcacgggtcgtccgcgtacgcgaacaccgcctcgcggtcgatcgccgt

SEQ ID NO: 4100 - DNA, 663 bp, Zea mays
tgacctcggcggatcggagacggccggcctcgcccttacattcgggcatacgagagcggcacattggtacctccgtacctgtcaacgcgcttcattaaaccaggtctctctcactctctctctctctctgacgacgggtttaggttagagttcagattttcagaaaagaagactggagaatgcaggtgcaggttcccctagattattcagatcagacagaaacgaaattccaacaccgtaacacgacggtgacatgcacgcacataatctacttactgctcaggcggcacttccttcgatccagagctcccggctccttctgcacccttgggtcgctgctgctcaacgcccgatgcctcacgcgcctgccgcgaccgcaacagcatggcgcgcatggccggggtcaggtacgacgccgccgcatccgcatccgccgcctcgtccgacgccacatcagccgatgcagcgttggacgtcgctgcccctccggccggtccaccgccgacaccgaaaaactccatcgagtccgcgtcgtccgagcccatcgccgccgcatcgccggcgtcgtcagccacacaagccacctgcgcctgcgcgggtgcgaatgcagctgccaccgagttggtcgcctccccacccccagcgctgcccgccgagggctgc

SEQ ID NO: 4101 - DNA, 695 bp, Zea mays
agctcggtacttggtgggcctatcgagtcgacctgcaggccgcgctcgtgcgtcgtagcaggtcagctccccagacctgctgccttcctaccttatcttgtggattttggtcgccctattgcggggatcttgtgagatgacagcgcttggtagggaatcatttagaacctacgtaggagggtatttagacctttgcaagtttagaaatgaagcaagcgggccggtggtctcaagtttgggatatgtctttcttcccctgatgttcctgaaatcccttcctttatgaatgaggtatcgagcttagcatatattaagctggagaagcttaagctgccccatttattttcagctggatgcttaccagttgttggaggtgcaatttcaatgaaccatgaaaggttcatttgttctggtcaatttctctcctgttaccatttaccaaacgcgcccaaagattagccacccacatctttgaatctgacaaagggttatagagtagagtagtatgtccatcattgtatctgaatctatttaaggtcatggttttcatatgttctaggaaatctccaaatcctcttcactttacaatgatagtggtgctctagtgacatcttcaccatgtgttataacttactatatactagatgccattttagcttagcatcatttttgcattctcagttttttgtgcgcta

SEQ ID NO: 4102 - DNA, 692 bp, Zea mays
ttcaaatgtgacactatttccttccaaacacaaaatggaaacgtaaaggctcaactgcttcacgtcttcttctggtctctggccttgcattagtagtagtgtgttactacaataatgaaacaaacttggtccttcctccaggtccagtcaaaaactgtgttctcaactttgaaattttaaaggggcatggcatggcactggcctgacagacggcggaatggacatgtattctcttccgtccccgaagcgccaagaagattcaaaaccggcatgcaaatcgtcagaaacttgcagcaacgctttattctttcctgctgtatgatttggttcatacacttctacagacttcattcagagcagcactgcaaaaatggccatcagcctatgaccaacagaccaaggaaggggcaaggggggaagcaaaaggatgttccccgccaccacgaaaaaaaaagagagaggagttcctaaattaacctaatcgcgtccgtgtagcttttatccacagcttaattcatgacctaatctacgcacaatgttcatgactcatgagaagggtctcttgagccccttgaaatctaccgtctcaatgcactcaacgccgtctctcgacccattcaggagcctgagcagctcgctggccctctccttggtcacgcccatgcagccgacctgcaggtagactatagagg

SEQ ID NO: 4103 - DNA, 634 bp, Zea mays
gtgtacggctcccccggcaccgtccccagcagctccatgtcgatctcgtcgtggtgccccgggtactcctcgctgttcgacagctgcatcggcagcaacggccaggcactgaatctatattgcattctcttatatagaggtaatatatatacgtactctcgtgcactcacgtagaaggcggtgttgacgccggcggtgtaccccggctgcaccctgacggacgcgccgaagtagccgttccggtacgcccgcgcagacttgaacccgctgcccgagctgctgtccatccagagcgtcagggacttgccgtccggcgacagcgtctggtgctgcgcgccccacagggtgcggtaggcctcggagaagcccagcggcctgaacatgccgctggggtagtatcccggcgacggaggctgctgctgctgctgggctctgcacggccgcagctgcaccgcgagcagagcaagcgcgcatgccaggagaagagccgctgcttgccgcaccggcggaaggtcacaaggccttgccatccggagaggacttggtgaccgtgttgatctattgaacgtttccagttctgcaagacgttttataggaggtgagaatgcgatcaggcctgttgtgaggtgttggt

SEQ ID NO: 4104 - DNA, 831 bp, Zea mays
  unsure (1)..(831): unsure at all n locations
aacctccagatctggatggatatgtgcccgtacgtggtcaactgcggcatgggcccggcgatgggcgacgaggggggcgccttctccggccgcggctggttcgccaccgaccagttctcgctcgacatcatcttccacggccggatgaagcgctacgactgcctcaccgacgacccgtcccgcgccgccgccgtgtacgtgccgttctacgccagcctggacggcgggcggtaccagtggaacagcacgtcgatccgggacgcgctcggcctggacctcgtcgactggctggcgcggcggccggagtggcgcgccatgggcggccgcgaccacttcttggtggctggccggaccgcggtggacttcggccggaactccgacctcgaccacgagtggggcaccaagctcctcaacttcccggccgtcgagaacatgacggcgctggtcctggagaccaaccagtggaagcccaagaagcggcgcaatttggctgtcccctacccgacgtacttccaccccgagtcggcggccgacgtggtcgcctggcaggagaaggtgcgcaacaccgagcgcaactggctcttctccttcgccggcgggccgcgcccagggaacaccgagaccgtccgcgccgacatcatccagcagtgcgccgcgttcacccgctgcagacacgacaatcctcaagcgttccngggttgatcgtttggtgagtatgttaatggtcggtgtacggtcgcctgtctcttgttgagatttcactatcgatctagcttgttgtgagggtgatgcaggggtgacgtgcgattcgatgtcgtcttatgcctttat

SEQ ID NO: 4105 - DNA, 676 bp, Zea mays
aacggaacagctcccttctaagcagacagcacaagggtcgatacaaacaggtgactggtttagatacctccatccacactccctagagaacgaaatgacacaattcattagatgttttctagacaagcaatgcaaaatggaccactatgataggctgacaagtgttggaactcatactacatggtcaggaaaacaatttaagggaaagcgttcataattaggcaactatagggagtatacagatgaacaagatcacatggcaacctataagaaacaatgagcagtaaccagtaaattactatttaagccatgcaggcgacaagaccagggaactaatggcgcatagctgcataactaaattagagacatggtcacctggcaatgttcatgatactcatgagtggaagacagagataaggtgaaggaagagtgtgtatccggccctctggttctctacttaagatttcttcaactgaatttctttgccaggaacgagccaccattaaaggggtccatctgcataacagaaaagaacatgtacttagaaaaatcatagtgctaacaacaatagcaaaggctatttgccatgtggcagaagttgggaatcgcacccgctagcattttgcacagcaatgcaagctcctcgagcaattaggagctgcaggcatgcaagctg

SEQ ID NO: 4106 - DNA, 686 bp, Zea mays
ctcgcatgcctgcagcgggtgatgcaccaccgcgttcccggcgtgcatcatctgtttggcagacgcatatccatccacgtggacgtagaactggtgcaccaccttgcatatattccagaaaacctgcctgcaaggccaaggcacctcgctttcattcctgagcaccaaccgcagcagctgaatcctggaggcctcgatggctctcctcacctccctcttgacagcctcgatggagccgccctcctcctccagtgctagcagcagcagcacactgttgaccttgccttgttccttctccctctcgtacgactggaggtcgttaaggagacggccgcagacgttcatgtgccggaacatctcgttgtactcctgggaggtgaccacgtcctccggaagctccggcccgacgaggtagagcgacgcgaggacgatgggtccaagaccaaacgacggctcgccggccgccatgtactcctcgaaggtgggcaggtgccctgtcatcgcccagttcgcctcagccatcatggccctcaccgtgttcgcccactgccatgcatgcatgaataatcacgcgacgcgatgtgacggagtcagttgttcgttgctcctcatatcatcacaggatcggagaaagttgacttgttattaccagctcggcgagatgatggatgatgctgcgcttctgt

SEQ ID NO: 4107 - DNA, 652 bp, Zea mays
aaagattcctgtcactcactacactgttattcgaatgctgatatgaaacaggtttaatgcagtaacatacccgttgttcgaccactggcgtacagggaaagaacagcctggatggccacatacattgctgggcagttgaatgtctcgaacataatctgggtcatcttctccctgtttgccttggggttcagaggagcctcggtcagcagtatagggtgctcctcaggtgccacacgaagctcattgtagaaggtgtggtgccagatcttctccatgtcatcccagttgccgacaatgccgtgctcaattgggtacttcagtgtcagaatacctcttttggactgagcttcatcgcccacatatgcatccttttggcccatgcccaccatcacaccagtgtggcgtggcctgcctacaatgctaggaaagacagctctcggtgcgtcgtcaccagcgaaacccgcctgtgtttggcatcaaaatcccatcagtttattaaatcagaaatgaataaacaggcaaaagaaaactgaaacacatgtatggtagctaaaggattgacaaccggacagcagaaccaaccttgaccattccagtgccattgtcacacacaaggggctggacatcctcttcagccattcctcaaagtgtt

SEQ ID NO: 4108 - DNA, 669 bp, Zea mays
attattcatccttgacatgtttgatagtgtcccaataaataccccgtaaattcacaattttaacgataagcaagattatcctatgcagtcaaccaacaaaagtgttgtggtgcctttgaaaagagttaatgcacagttaacttaattatttcacaaaggcgcatactcattgcattttcttttgtaaattacataaacaggttagtcatatcatattgaaaactatgtaatgaaataaggtgaaacactcatagtgaaaagagtcacaactaaaaacaatggaaagcaacattacccgagcacgcattgcaactgcacgtccacgcccaactccaatagctgatcctttgccctacattcgaccaagcaaattatgtaccatatcaccattggttttctcacagcaaggcactaagcggtacagggaatcatcagtcacaaaccctaattctcgcttccaagcgcttgaacatgggagcgttcttgagcatatcaggtataatcataaatctgtaacataacagcagcaaaacccacaagcagaaaaaataattaggccgccgtaactcgacaacattgaacattgcatcacggaataaatctagtttttttattacctcactctgcttcctctgatgaagacgtgctccagctgcgaaaccttcccat

SEQ ID NO: 4109 - DNA, 635 bp, Zea mays
ggtgaatacataccattccttgtgctagactatgccacttcagcaatggctatgcgatgtagcttcaacgccatgtaagtgtattgcttgggagtatatgctgtgcccaatcaaccttatctagattttatcttggaccattctatgctttattcaggtggttttccttatacatgacaatatatcagttcggtcagacctttagcattggcaaattcttttcttataatgtgtgattgactgctgattttcctgcttttttttctattacttttatcaatgtgacaccgaaaagggtcatgttccagcaacctataattgaatctgtataaagcttgttccctcaaaatttcttgaatatgtcctttttcacagaacaaaattgagttttacaagatggaatgctgattggaaaagcgctacctccttgtatgagcaagctggtcggtgatttttaccatccttcttatttttcttcggagcaatttttcactggggaatatataagtgaaattcatttcttctttgaagcaattgcgtataggttcagaaaggacaatgagaaagcaaaagatgcttttgagaaggcctcaaaaggacaggaaatgatctcctcgtatcctttggaaatttct

SEQ ID NO: 4110 - DNA, 625 bp, Zea mays
aatatcgttctgtcaccgactgactctataggcttggcaatgcacttgcgacgctacagaaaggacgaccatcaccaatgacgacgaactcgatgggcagagtggccggaggtgcccggaaactgaactcgtcgccggcacttccgcacctgtagtagtaagtcgtgctcggctctagcgggccgatggtgacgtggtgtatggcgcccgatgtgtatgacaggaactggtacgtggcctggtagcccgtctcggaggcgtcgtactgtcccggagatgtcccgtagtccacgacggacggcgcgctgcggtcgtcggtgacccaagtaattcggatgtggtgcgcccccaccgccgagatgtgcacctgccgggatcggagaagatgactgcttataccacagcatccaggccggcagggacaacgtatacgatcgactctggctgcgcaacatgccaatcgaagctggcacctgttgaggatgggatgccggcttgtcgtgcgccatgagcgccagcggccgttgaggcggccggacgtactcgtcggcatggacggacggcgtcatctggggctcaggtcgtgactcgtgagaaatgcaaaagcagtgcctcgctcgaagtt

SEQ ID NO: 4111 - DNA, 668 bp, Zea mays
agagccgacctgcagctgcaaactgcttggtttactagactgtaaggccgatgctgctcagtgtctttatcaccagaatgttcatgttcatgaacttctctacttgcacaattcatttctcgactttggacaagataaaagtgcacaaacttgcaaaggaagaagaccacaagacctgtagagcgtaaagatttgagaatactccccacagatatggtgctcgaggaacgtaaccacacatttgtaacacggttagaggttctgtcagctggatttgaggagaacagcactgaaagctcctcaatctcatctaacgatgatttgacaccatacagcgcatgcaaggccagatgaatcaaagcatcatcctgcacaaaaatgatcgtcacacttaatagtggcctaatacgaaacatattgatactcttatatgaaactgtaatataactaatttcccctcctcaaatggcacaaatactgagtttcagataagaagttaaggatccaaaaagctaaaatgttcaatgcagcatagaatttcctggaataaagttccctaagctatctgtttacccaaactctcgatgaactgtcaaaattacaaccagtcaaagtaggtgagaggtagatttcactcacagtaaccgatgcgagctcgtagatcggct

SEQ ID NO: 4112 - DNA, 564 bp, Zea mays
atgtgatctctagaacgtgctttggaagcagctacatcaaaggaaaggaaatctttatgaagatcagagaactccagcaggctgtgtccaagccaaatgtgctagctgaaatgactggcctaaggttagggggtaaacgaaatactcgtgtatcaagtgcatatttgattgtgaataaacaaaatgaaagaactattactgacccaaggcaacacattgattgaacagacctgtaaattgtaaaattaaagctataaatgcttgcaggttctttccttcaatgaggaacaagcaggcctgggagcttcacaaacaagtccgcaaactaattcttgaaatcgtaaaggaaagtggagaagacaggaacttactgagtgcaattcttcacagcgcaagcaccagtagggtgggcattgccgaggcagagaactttatagtggataactgcaagagcatatattttgcaggacatgagagcacagctgttacagctgcgtggtgtctaatgctccttggactgcacccagaatggcagaatcgagtacgagaagaggtgcatgaagt

SEQ ID NO: 4113 - DNA, 689 bp, Zea mays
cttgcatgcctgcagcacatcacaatgcagccccgtcagagcgcgtcgtcgggcgatagtatagatttgtcccggacggacggacgggacgtaccggcgcgtagttggcgatggtcttgaccccgccggtgccgccgggcatcgcgcggtggaactcgtcatgcaccaccaggttgatgggcgccaggccctcctgaaaaaaaaagaacaaaaaaaaaacaaggtcgcgtctcgttctctgttcagcaggaacggaaccggtgtggcagtggaaactaactgaccttgaagtagttcccaacgggtgcggcgtagatgaggaaggtgtactcgggggccggagccagcccaaggatcgggccgctccccacgagcagaggccggaggtacagggctcccttcccctgcggcggcacctgcaaacggaacgcatggcacgcaaagtgatcgctggtcggcgccggcgcgtggctggggcggggcgggcaaacagcggaacgtacgcacgtacccagcgcctgttggcgaggactgtctgcctgacggcgtggacgaactgctccaccgacggcgccggcatgcacatgcgctcggcgccgcgctgcatccgccgcgcgttctcctccggccggaacagcgtgtacccggcccggtccggccgccggtacgccttcattccctcgaacagg

SEQ ID NO: 4114 - DNA, 727 bp, Zea mays
  unsure (1)..(727): unsure at all n locations
gaccctttagtcgtcctgcagcaacacgccctcgccgtgcggcagcttccgcgccagcccgttgagcacctggtggaaggcgtccccgggcctggcgggctggtggaacagcagcgcctgcttgacggagtcccgcgccagcaggcgctgcctccgcaggatgtcgggcagcgggatggaggtgaggatggagtcgaggcgcggcacgtcccgctccgccacgaacacgctgatgtcctcccaggggatggcgtccgcgaacggcagcacgatgtcgtcggcgatgatgacggggatgcacccgaacaccaccgcctccaccagccgggggctccagggcgcccaccccagcgggcacaggcagaagatggcgcgctgcatgtcctcgtagtacgtcgacgggtgctccgtcgagatgtcgaacagcgggttgtccttgaagttctcccacaccgacgcgcgagcgcccctgcatgcatgatcatccaccaaccatggcatatatnagtaaacatgtactatattggcattggatggaacggaccggagccgacttgacttgactttgacttgcctggcgtagtagccgccctcggggtcgttgcccatgtcgtagaagaggcccctgaagtagacgaagatggagcgcggcgtgccggggctgatgaggtgcgcctgcatcttgcccgggtcggcgtagggcggaacggtgatggggccgttgtgc

SEQ ID NO: 4115 - DNA, 662 bp, Zea mays
attatattacctactttaatttcgtgatgatattaacccggattcttttgtttttcagattttcgcactgcacatcaccggaactgtcgatgctgtcctgtcgaaagagcatagacgtgagatatgccgccatatctacaaccatcaggtacctatcacaagcactttttaaatagtattagggctaggacacctacaactcaattaaatctcaattaaatgagaggtatttccaggggtctctagtggacctaagtgaaaaaaaaacaaagaacttgtctatatatacacaacgtactctttatacatattatgttgtgactaaatttatatatatgatctaaactcttagagttgtatcatgcattattttagctatctcttttactttgaaaatccgatctgaaaacttagagttgtacatgctctctctctctacatatatataataaaacgacgctcattgattgattgattgattgattagaacgaggacggcggatggggcttcaatatcatagacgagagcgccatgttttcgacgtgcttaaactacaccagcttgagacttctgggtgaggtgcagcaggaggagaacgatgggctagctaaaggtcgagaatggatcctatcccatggaactgcaactgcagtcacgcaag

SEQ ID NO: 4116 - DNA, 658 bp, Zea mays
aaatttacctggctgagcacaggcgtgcggctactgttttggaaatttacaagataaaaaccgcaagctcaaaaaaaaacccgtacatctagagggatgacacgaaaatttgtagaaaaaaaatgaccacataccttatgtgaagaaaaaaaaactaacctatcatttcctgaagattttttttttctttttctttgtggctctttaacgatccaagtttttttgaaggaacattgtgggtcaactgccaacattgctcatgctggtctacaagagtatattttgaaaatgcacaagtgtatttttgaaatgggattcagctaagcccaagcacactcaaatctttacccgaaaatgaggtcacatcactatttgggattgtagcacgatgtgaatgtaatctgttatctacctgacatttgttgttggggcagcttcccttaacatgaaggacgtggaagacgaactggtctgctgttgagtttggtcccgttgcacttgctgccgctggtctttctgcttctccgcgagctgcatgcaggagtaacgctttctgtaaatttgatttggttcatgagaaaacagagggccagttgagcatggatgaggcgacgttgagttgcagcagcgtctgcctacctcctttctgcaagcatgc

SEQ ID NO: 4117 - DNA, 646 bp, Zea mays
tttaggtgaagatgattcaacagatgaggagcaactttggattgatatcaagaatgggaagcaatttgtctacccaagattactgtttattgttacaggtataatccattctgctatattaacttgaatgaccaaagttcaagcattctttagtttttcatgtattccaaattttctaggtaaaggacctgataggaagaaatatgaggttcagataaaaaggttgaagttgagacgtgttgccttgcggacgatgtggcttgcatcagaggactaccctctattgctcggtacgccagctaattttacatccgtgtgcacacttgtagcacaaaacctacctaatttgatggttttctaagcatgaatactttcttttaaaatattgcaggatcagctgatctaggagtgtcgttgcatacatcttcgtcagggctggacctaccaatgaaggttactcatatatacttgtttgattaaaggcggaaggatttttattaacttgattataacctgaatggttttaggtggttgatatgtttggatgtggattgcctgtttgtgctgctccattctcgtggtagcccagtttcttagtttttgatttgcgatattttgcttcggctagttcgctgaagcattgagc

SEQ ID NO: 4118 - DNA, 587 bp, Zea mays
tccttgccggcgatgaacgtgccgtgcaacccgtacgggacgcggctcggcagcttcacggcggcctcggcccgcatgtcgcgggcgttgacgacgagcatttccgacgcgccgcggccctcgtcgtgcacgtagcacagcacgtacccgtcatcctccgcggccggggcgtccgggcgcggcacgaagcagggctcgccgccgtaccggccctcgccgtagacgaacttctccacggtgccggcctcgaggtccaccttggcgaagcccgacaccttgggccacggctcggcgatggcgaggtaggcgtagcgcgtcttcctgcccagcagctgccggttcaccatgccggcctccaggttcacctggtcggcgtcgctcaggaccgcgcgccgcgaggacgtgccggtgcgcgggtccaggcggatctccgacagcacgctgcggaagctctcctcgccggcggactcgttgaacacggcgtcggctggggtcatgcaggacccgatcaccacgatctcgcccgtggcctcgtcctcccacgcgttccagaggtggaagcagaagcagtcggggacgtccaccca

SEQ ID NO: 4119 - DNA, 646 bp, Zea mays
tgcttggtatcataagacctgcgtgtctcttccttgaagttgcggtacagattgtgccaccctatcttggtcaaccccttgctgttgtagttctgcttttccttctcggcgatgcagaggtccaggaatattcttgtggtggtgtcgtcccagtgagcacggcatcgatccatctgcgcgtcacttttcctttttacatgtctttctgattacaagatctatacgccacacgtgcatcaccaacaacaggatacaaggaaagttagctaacacttgcctcgacggggatgtgcctcgctggagttgtatgcagatcgtagccacaaacttcaggtgcagagcatgatgacgtcgaggagtaagccagagttgtcaccctccagtggcgtatctgaaaattcactaaccagtcagaattatcaggatatttgtttatcgcctgaatttctaactaataattgtatcatgtgcatgcctagaaaactatgtgcatgatagaacaggtcatgcgcaaacacaaatttccaatcagtaggtgcctgcactgcactattccatagttgtactcgggctggaactgcacttacatttgagttggcctaaaattgaactctaggagcaaaaaaaatgttgcaaacaaaatgtt

SEQ ID NO: 4120 - DNA, 691 bp, Zea mays
tattgtgctcgactctggtgatggtgtgagccacaccgtccctatctacgaagggtacacgcttcctcatgctattcttcgattggaccttgctggtcgtgaccttaccgacaacctgatgaagatccttactgagaggggttactccttcactacgactgccgagcgagaaattgtcagggacatcaaggaaaaacttgcctacgttgcccttgattatgaacaggagctggagactgccaggaccagctctagtgttgagaagagctacgagctgcccgatggccaggttatcacaatcggtgcagaaaggtttaggtgccctgaggttctattccagccatccttcattggcatggaatctgctggcatccatgaagccacgtacaactccatcatgaagtgtgacgtcgatatcagaaaggatctgtacggtaatgttgtcctcagtggtggctccactatgttccctggtattggtgaccgcatgagcaaggagattactgcacttgcccccagcagcatgaaggtgaaggtggttgctccgccggagaggaagtacagtgtttggattggtggttccattctggcctccctcagtacctttcagcaggttgttaccctctcaaaatctaaatgtgacgcttctgcttgctctgcaggtcgactgtagagctccacaaggtaccga

SEQ ID NO: 4121 - DNA, 621 bp, Zea mays
atgactattgaacagtaatccaatgtttttaaattgtctagttgccttaggggtgataaagtcgactaggatgactagtctatgactagggcaactagtcgcccctagttggcagttagtcgtcctaccttctcggccgatatatatataaggtgcagtgtctaattgcatgttgtatagcactgtagcagtataatagcacacaatttagaatgatggtcaattgctagtgcttgtttaggaattttaatgggtaataaaggtgttattgttggctgtcccactcccaagcttgtggagttgcagcttttgtacctgaaacaaaatgagtaagaagtggcagtgcagcaaccaagcaatgaaggaaaaaaagataatgatatgaccaagcagccaagtaaagatggattaaagcatatgaccaagcaggcaacggccaaataaattggtctacaactccagattacgtaattgaaccatatcaaagtctggaacagcaagagttcaaatgcatctaaatgacaaagagaataggatattcataaatttcagatttgaagcatctactaaacaagtagatcatcatccaattggaagccttctcttccatctctagctgct

SEQ ID NO: 4122 - DNA, 603 bp, Zea mays
ataggatgctgctgcctgagcaggtaatggtgttgcaatatttgattgtcattgtcatttctttcctgtatacttttcatatgaccattgtgatttttcaccactttaggtcccatcaataccaaatggtatgtcaacatcatcagtagatgagggcaccagagttataggttctcaagcatcaatcaatcagagctcagactggggtggtactacatggagtattggccagaatgccagcgtgtatagcaatgaaaaagcagagccctcgagtaaaagctattgggaagaatcaaggaagcaggaagccaccaattccggcgtttctatttcaggacaggccattggaaacaacaagggcttggaccctcgtgataatgctgctaatcggggcagccggctgagtcatcatcaccgtggcaggtactcccaaatcagtgaatcttggctacttagttcaagtcactctaggagtaggtctgctagatttggcagcggtgggtcatcaagatcaacttcaaaggggcaatctaggggctaatgtaaattgtcaagtgcaggagagaaatgatgcatcttgtagctaacctgcatccttgatct

SEQ ID NO: 4123 - DNA, 639 bp, Zea mays
tgcaccgcctccagctcgctcccagccgcagcagcatactgccacccggcgacgtcgtccaccccaccaccaccggcgcccggcgcctgctgcaccgcctggaacgggtccgccgcgacgctgccggcggcgtcgaacaggctgagcgacggcggcaccgcatcgccgtacatcccacgcgacgcgtccgcggcgccgccgtcccacgcgaatcccggcggccacgcgcccccctcgccgccgctcggcaccccgcactgcgccatcaccagctccgccatctgctcctcctccgccatctgcgcgcgcacgcacgcccgcgcgccgcgccggcatataaagacaggagagcgtcaagtctggtgtgtcatgtcatgtcatgtcatgtgtttgtgtgcgcatggcatgcaaatgcaaaggccgtggctgttgcgagcggttcaccgccacatcttcgcagggggcggcgacgctggctcacgcagaagccgtgctcttctggttctggttctggcagctctctctagctaactacccgtagccgtactctagaaactaacaatcctggaaatggaatttctcacgtgatggcggcaaacagaaaaaaataaataataagaacgaaaaagaaacggcgca

SEQ ID NO: 4124 - DNA, 682 bp, Zea mays
acgcgtcgctccggcagctggacctctccaacgccaccaccagcaccagcaccagcaccctgctctccaccgcgatccaggtgacgctagcgtcgcgcaacccgaacgagcgcgtcggggtctactacgaccgcctcgacgtgtacgcgtcgtacaagtaccagcagctcacggtggcggcgtcgctgccgcccgcgtaccagggccacggggacgtcggcgtctggtcgccggtgctggccggtcccaacgtgcccctcgcgccctacctcgccgacgcgctccgccaggactgccaggcggggtacctcgtcctccaggtcaagctcgacggccgcgtccgctggaaggtcggcagctgggtctccagccactaccacctcttcgtcacctgcccggccttcctcgtcaccgccggcggcaacggcgcgcccggggccgccgggttcaggttccagaccaccacctactgccacgtcgaggtctaggtctaggtctagccggccccttgcctgtctgtgctgctgtgttgtccgtactccgtatacaaacagaggccgccgcctgcgaaggaaacagagatacaaaggcctgccttgcgccatatatcatgggatggctgcctgtctccctcactctctctctctctcagctgcactgcctgcattgctggtgtgttact

SEQ ID NO: 4125 - DNA, 651 bp, Zea mays
tggttggagctgaggtccagcacggtgagctcgcgcagccagcccagctcctgcgggaggcaggagcggaggcccgagttgagcgccaccagctcggccagcgtgcccgccatgcggcccacgctgcgcgggatgcacccgcgcaggcgcaggttggccagcacgagcacggacgccggcgagttgcccaggctgtccggcagctcgaagtcgaaggcgttgtcgttgaggaagacggcgtccagcggcttgtcgaagagcgccggcggcaccggcccgcgcagctcgttgaaccgcaggtccacgtacttcacatttggcaggcacaggatgtgctgcgggaacccgcccgagaggcggttgttgctcacgtccagctcgtgcaggagccgcatcttggggagggactccgggagcgtccccgcgaaccggttcgagttgaggtgcagcagcgctaggtccgccagcaggcccagctcctccgggagcgtccccgccaggtcgccgtggttcaggtccaccccggccaccgtctgctcccgcggctcgtccggcgccgccgcgcagtacacgccgaagtagccgcacacgtccggcccgcaccagctccgcgtcaggttcttggggtcctccgtcaccgcgcgcttcaaa

SEQ ID NO: 4126 - DNA, 662 bp, Zea mays
caactttatattcggctgcttgaactcaggcacttgtccagtaaggcgattatttgagacatcaagatatttgagggttttcagtgtcgtcaaagcatctggtatcaccccggtgagttgattgttagacagatccagccgctgaagtctagtcaagttcgcaaaagccggtgaaataagccctgacaagttccggcgaggcaatttgatttgagttacatccattttgatgcaggaaagaccaggccatggatcgcatgggttgttgcctgcccacttcttgagctgcaatgggtatccaaaccctgaagccaccccaagcagagtggtcaccagtggatcgcatggcccagggtcttcgtgacagaacccgttcccagaattcaatatccacagtcttagctgcgaattttggttttggcccttgaagaaagttattggacagcgccacatcctgaaggcttgtgatccctacaagagagggtggcaccggtccggtgagcttgttgtccctgacattgaaagtctccagctgcgtgttgggatcaaactccgggatcgggccggtgaacaagttggactgaagccacagtgtcttcaagctcggcaacttcgccacgacgtcaattggccctgacagcatgccgttcgacctctggctg

SEQ ID NO: 4127 - DNA, 635 bp, Zea mays
gaacgcgagtggtatgtctgaaaagggattattatttaagaaaaataaaaataatagtccgtgtcacgacgttagccgagttttggctcacgacgaaaatacctgccggcttacatcagacatgatgtacgttaacactctgtctaccattgtttactccattctgagaccacaggttaacactctgtctaatagagaggcttgtcagttttcaagcaggtgtcaacaaatacgtccctggagtcacgtcacagggcagctgaagcatcggaaagatggcaactggattacttcagtggtccaactgttttcactatatcggttatactctgttccatttcccaaaactaaggccaccgcactactatgtagtttacttaattttaaaacgtctttgcagtacgtcaggtccaaatgtaagaagcgagtcattagtctgaatccgagcctgacatttcccactgatgagcatcttttgggtcgacgtctgggacagaaggttcaccgaagagcgacgtgctaagcttcggatggggcctctttgccttgtctttccgagctttctcctgtgagatgacactacatactgtcagagttctgaatgctgagtaacaagtcaaacataaacatacttt

SEQ ID NO: 4128 - DNA, 632 bp, Zea mays
atcctcagttctcaaaactttgttgggctacgtcaaagctacgggaaggcccctgcactgatataaatggaccatggaaaggctggccatttaattcctgtttgttgcagagcagcaccttacctggtaaatcactaaatggaggggacaatgttgtaaagggaaaggaaaagtctgtctgtgtgagagggctggttgctgttggcttattagcttatagaggtgtctatgggtctgttattgaagtttgtgctgaggtgagaaaggtgttgggactgttagtcggacagattcaaactaaaattttggaaaagagaaatcaattccggtattttcgaatcctatctcaagtagcttatctagatgatattgtgaacagttgggcatacacctaccaaaggtcggccagagctttatgtttttttttttatttctgttgattctgtcactcctttcttactgcttaatatcagcaaaaaaatattggtgcatgatgctgatgtagatgattggcgcaattgtgttaacatttttatttatttattccaatctacagaacacatgttgatacccggacaggaacatcccgcatgaagagttcaagtgccaaagaatgtcaaaggaccaagtat

SEQ ID NO: 4129 - DNA, 639 bp, Zea mays
tgtcatactctttgctgatcttcttctgcggcatgttcataacggtcgacggcttcaacaggaccggcatacccaatgcgctctgggagctggtcgaaccgcactcgagaatcgacagcgccaaaggcacggcgcttctcgcagtcgtgatcctagtcctttcaaatgtggcctcaaacgttccaactggtacgatacgtactgctcatggcgtacacgttgcttaccttctttaatctgttctcaaatgtgactgctgaatgtatgtacgtatatatatttgaaacttcctttcagttcttctgctgggcacaagggtggcagcgtcagcaggcacaatctccccagagtcagagaagaaagcctggctcatactagcatgggtgagcacggtggccggcaacctgaccctcttgggctcggcggcgaacctgatcgtctgcgagcaggcgcggcgggcacagttcttcgggtacaacctcaccttctggagccacctccgcttcggcttgccgtcgaccatcatcatcacggcgatcggcctgctcatcgtcgccagttactgaacggaaccccacacaagctagggtctcggcctcgcacaagcggcggggtgtgtagccagatggcaggcagaac

SEQ ID NO: 4130 - DNA, 677 bp, Zea mays
aatggaggaatgaggggaggcctcactggtgagcacgatggccttgacatcgtcgtgggccatggcctcaccgtacttctcccataacccagcgaagattgcattggagtcctccgggagcacgatgggacatggtgatgagcggcacgccgtgtgcgcgtcattgtccccgccgccatggcccggccgtcctgactccttgttcgctggatcacgacgcgcggccgtcttggttggcgcaagcgattaactcgagaagacgacgcactgattgcggcatatatttccattctttattacgtacgtattgaacattgcacacatgacagcgacatacagagtgatcaggtgcaattaatccatgccactctgtccccagaaactctgccagttacagtcaaaggcaccaaaactgttacaatccctttatttttcatcatttcttctgtgcctcatgtttgtgttcacggaggtgttttgatcagcgaagcagccgtcaatggctcatcccgcaagtattctgcattattctgctcaatgctggacagcacctcacatgcgtgacctcgccgaaccttgctgcgaagctcctggtgcgctctgcggagaatataaaaacggttagcatgacgaacacagcctgctccatgatttgacatatagcgtcacactgtttt

SEQ ID NO: 4131 - DNA, 645 bp, Zea mays
aattgacagctttcttggagattgcatcatatcataaaataaaataaaaagaaacagatcagtcatcattgtcaaacaaactactacctccattccaaattataagatgtttaaacttttctagatacattgtttttactgtgtaactactaactggacatagtacaaatctaagtgcatagcatcaaataacaaagtttgatgtttcgactatcagcatcaaataactctataatcaataactggtacaaaccaaaaatagaaggggggctgtcattagtgtgatgcaccaaagttcttgcaaatacacttaaatatactacagctacaagatttgcatagcaagagaagggggaaatactgttagtaccaataggacccattcaaatacaaactgcaatggcaaaggggtgagatcaaacaagtttcagaacaactttcatgtgtttgtgttccactgacattaaactacagttaccagatcatagtatgatccgcaaagatacaattaaagcatgaaaagccttcaggaaatactgtggaggtctaaacttcactgctccctggcaatatagcagggtaccacttatgccgcaatagcatatcaagcatctgccattacatctcccaaaaccaactgtataa

SEQ ID NO: 4132 - DNA, 613 bp, Zea mays
agaaactgaaacgaagccgtgttgcgagtagtaggatggaacagtgcctcccatttggccagaatgccagacgctaaactggtggagatttgtcatattcattcacaggacaggacaaaactatcaacaggctcactgatgacagatcaagagaaaacaaaggaacgacacttgcacaggtcagttccaccccaaagtaactcctcgctcctatatatgtatgtatacacctagttatgtgggagcttcatttcagacgcaccagtgccttccttcccttcccttgagtgctgtgttcgcacacagattttcaccacctcctcctcttcctcctcttgtcctccgacttgtcagccgcgttcttgagctgcatggcacaccagcagttcagtcggtcgatcagacaccatacaccaattaattcatgtcaccaaaagaaatgctcagtagtagatagctctcaccatgatgacaaggatgcggacaaggacagccacgaagtcggtgaagagggtgagggcgtgcttgatgtagtccatgtcgccgtggtgcgccctctcgatgacctcctgcgtgtcgtacaccatgtagcccaggaagatgagcagcccaa

SEQ ID NO: 4133 - DNA, 701 bp, Zea mays
aagtcttccaaagcattggtccagtagaagggtgcaagctcatcagaaaagaaaaggtggatctttctttattttaattaaaaaatgactatagatagcttgtaacagataaatccataccccaactgcccccaacacccactcgcccactcacttgtaaaattgtgggtgccttttcagattgctcttcacatctgatttttggctttgctttccccgtatgtctcaagtctagttaccatgaaaatacagagttacagaccatgtaacatgctttgcagattttcattttctttggctcttgtttgatcaattaaatgcttgattatttctttcaatactttttgacaagttttcttttatctgatgcttaattgtatattagatgtattaaaaccactgagatacataaaatatttattatagtcacttgaaaataattatgaatagtactagaatgcttccttatgatgtattttttgttactcaacttattttggccgagtaaacaaaatgagtatcagacaagaatagcggggagaaggggggattgggttgattattgatactcctttttgaattgtaaaatattatgctaagcttttttagaacaaaagtttaatttcagctggctgactacaatcagcagtgtgctaatcttcttctactggaatgaaagcacacatgcactctgcaggtcg

SEQ ID NO: 4134 - DNA, 596 bp, Zea mays
atccttcagcgcgtgatctctcactcgcttcaggtccttgatgacatccgctggtagttcatccattcatatcatatgacaccgccatatatcagccatggatttttttctttttgtaggctagcagtgtaagaagatataataagcatttctctagataaataaatcccgtgcgtacgtgcctgtgggctgtttgggcatcgtcacgaagaaatggaccagattgtccgtgatggtcagcctgccgatgaagaagcctccaacgcgcaggcgcaggaactccgtgtcgaaggagtggccgtgcggataccaggtgaagccccgtagcaccgggcgcgggatcgtcctcaccggagacagcccaaggtacctggccaccgcggagtatgtgccctcgcacccgatcaggacctgaaagagctcgattaatttcaggcagaggatatatatatatatgatactgtatgtatgaccatcgactgcatgcaagttttaccttggccttcatggcagtaccgtccgccattgtcaggacggcgccgttgccgccgccggggtccgcagcgacggcagcgacgcggcagccgaatcggatc

SEQ ID NO: 4135 - DNA, 673 bp, Zea mays
tcagtcattgcagacctccggtcatcaggtatcgtgccattgcttatccgataaagatatctctcgacgtagctgcatccaaggggcacaatggtaggattaactgatataagtgatgcacatgcacataactcaattgttacttttgcttggtataagagcagacagaattgcagagagtccgtgagtgaagtaaaaaacaaaacatgaaatttgcaactgagcctacctatcttcctttgactcgatcccctcgttgccgaaaacgaatttccccattccctgccaaggcacacgacaatacgaactggggaagtgaataagacagtaagcatcaaaccgacttgccatccaatatgttgagcttgatttccactacgacaaaacgccccgtaaaaaactcaaaattggtgatgtccatcatggtagcaactcgcccccgcgaccgccgcagcggggacagttgttcccctaggcggggttcggataaggagcgcgagggagtcgagcgcacgaacctgcatgatgtttccggcgctcccggcgatgccgcggaagttgatcgagcggtccatggatcgcgccttccgacaaggtggcgccctgcgggctgcggcgatggagagaccggcgagggaaggaagggtggaacgaaccgcttgggtggcgtatc

SEQ ID NO: 4136 - DNA, 643 bp, Zea mays
tgctcctctcatcgtccgacgcgactgctttccatttggcactgtcggtgtcgacggacgcagatattctgtggctcaaacctttggaggcacgggcacgggcacggggcaccgaagtgttggtatacgcggcagccgggatagcgagcgtatggccacctacttcgtcctcaacaccggcgcgaagatcccgtcggtcgggctcggcacctggcaggccgacaacgggctcgtcggcgacgccgtctatgccgccgtgaaggtaagcccactgttgccccctggcttcagctagtatactgtgctgcactgctgcccggccgcgccgcagcggccctgtgtctgctgttgtcactctctttgttcgttcctcatttctgtgtccatttaggtccaattccaatgcttcttcagtctactcactgcatactagtttatcctttcccttcaactgttgcttgagtgttgcaattcctgaatttttccgccccccactgaatgactgaataatgtgcaggcaggttacaggcacattgactgtgctcaagcatacaacaacgagaaagaggtgatgtgcaccaactcttcagcaagcagatgattgatacatctggatttcgaaaccaaagtaaccggtgctact

SEQ ID NO: 4137 - DNA, 673 bp, Zea mays
ttgttggacaaattttggtcaccaacaccgccttcaaacggtatggaatgtatcgtgcacaggtgcactgatgaacacgatgcatttcgtgttggagatggaaccaggacaattatgcttctttggcctagaatgatcaagttactgttctgcaattacacattacgccgagctaaatatggcgtggtatgagcactaatcatccataagatgatgtggccctcttgttcaaagatcgccaaactgaagcgatcactcgccacctcaaaatcatagcatcgatactatcgtacggttgacacttcacaaactgtttgaatcttacgagccagtataagagaatctagaaatacttggctcccaggcattatatgcctcctggaaatgttggtgtgtcagttcataattcaagaatcaatcccagttcataaattaatcgcaacaaacagatgctggacattttaatcaatcctcggatcaccacacagctagctcatttacctacgtgctcggtgccgccgatgacaagcgtcggcagatcagcccggctgacgtcggggacgccggccagcggcagcggcgacgactggagcaccggcctcctccctctaagcttgaggagggaggccttgaccatgtccccgagggacttgaaggggttgctcaacttgct

SEQ ID NO: 4138 - DNA, 697 bp, Zea mays
tcccggtgatccggtagagccaacctgcaggctcgcctccacctccacccgctcgatccctgcatacgcatgcgtgcgtgcgcattgagccatccacgccaggatcaggtgaaaaaaacaacaacaacaccaccgacaacaacaaaggcccagccgcccaggctttgggtaaagaagaaggagctagaattaaaggacgtttagaatccagatccagcagctctctacacagggagggacgatggcagcagcagctgctgctgctgcataccgatcgtactggaagtaatgatcgatctgccggccgggggggccctggcagctggttggccggccggccggaatggacggcggcgggatggggtgggctttgttgaagcctgaaggcgctcatcacggacgtaacgtacgtacctttcactttggacaggcatctgcgtacccgcttctcatgcaacgccaccatctccactttcagctccgtgctctgcgaaacgccaccagcgatcaggaaacgcgcacaggattgggttgttcgttgtcgcaacaatgctgcctttcatgcatctgcatgtgcagtgcagtcccagctagctagtagcttgcgttgcttgcttgctcgcgagagctagttcatcatgcaaagggaaaaggcagcactgcaggtcgactgtagagctcaccagggtaccgagag

SEQ ID NO: 4139 - DNA, 564 bp, Zea mays
ctctggttagcctcttgagcttcagagagatcctctccagatgaccacaaattggaagtggctggctccaggaatctgccaccaactcacgaaagcctggcattttggtccagaaactctcgaaatgaaatctccttttccccgtaccttcttcttcacgcagctttaaaatcaaagggcaatgatcagaatcttctgaggccttgctgaataaagtagccgctgggaacaacccttcccagctcgaagtgcagaagacatgatctaatttaacaagagtgggggcctgtctctggttagaccaggtgtatcttcttccaatcaaaggaatttctttcagctccttttcatctatccatcttctgaatcttctcaacagggccctgttgatacaggagttgttcttgtcctcagacctggaaatctgattaaaatcacctgccaagatccaaggcccatcgcagcctgccctgacttcacttaactcatgtagaaaagcctgtttaagattatcttgatgtggcccgtaaacccctgtgaaccaccaaagtgggcctgaagcct

SEQ ID NO: 4140 - DNA, 1184 bp, Zea mays
agtaatgtccgtcgatttcaccagtttcggcttgtgctttataaattgcttcggcacaaaagacttacggtcttgccagcgcataaatggttgtgagtggacgttgggatcatctttggtaaaatcaagtccaccgcgtagacactcataacacgctctaccgtaattttttgcggataatcccaattttggtttaatagtacatcccaataaaggacgaccgtacttgttcaacttatccctttcaacttggataccgtgaggcggaccttggaaagtttttgaataagcagggggaattcgtagatcctccaaacgtagagcgcgtaaggctttgaaaccaaatacgttacccacaatggaagtaaacatgttagtaacagaaccctcttcaaataggtctaatggataagctacataacagatatattgatctgggtccccaggaacgggctcgatgtgatagcatcgtcctttgtaacgatcaagactggtaagtccatcagtccaaacagttgtccatgtaccagtagaagattccgcagctactgcaggccggggacatggtcgagggcgcgtacccggtcctggagcgcaacggcaaggagtgcgcgccgggggccgtgctccggctgtccgtgcagtacgtgcccgtggcgaggctcaccatgtaccaccacggcgtcaccccgggcccggacttcgccggcgtgcccaggacctacttcccgctgcgccggggcgggaaggtcacgctgtaccaggacgcgcacgtgcccgacggaacgctgccggaggtaaggctcggcaacggcgactgctaccggcacggccagtgctggcgcgacgtctacgacgccatatgccaggcccggaggctcatctacatcaccgggtggtccgtgttccacaccatccacctggtgcgcgacggccacgacgacatggcgctcggcgacctgctcaggaggaagtcgcaggagggcgtgcgggtgctgctgctcgtgtgggacgatcccacgtcccggagactccttggcatcaagatggtacacgccgtagtacccatgctgttgtacaacactgtttgcttattggattcttgcctgtaggaaggttacatgggcacaagggatgaggagacccggagatttttcaagcactcttcggtccagatactgctt

SEQ ID NO: 4141 - DNA, 698 bp, Zea mays
cttgcatgcctgcagcttgttcttccaggcgaagcccttcctccctttccaactcttcacaccttactaggatatctggatccagaaaatcggcaacgttgtgaccatccagtatctctggaagaatatcttccttccattcatcattagccaatatataatgtttcttgagacttgcagaatataccccagcacctccattctcattctcaatgtccttctcaagcttcttcttttccttagcagcagcatttgccctagcttccagaacagccggagggatgcaaacaggccgttccttgttgtcacgaggctttggaacagcaacatgaaacctattcaagcaatccatcatcttctttgatttcatcttcacatccaccctctgttcaagaagcctctcgcacgcagcatttttcacagccataacaccatcatctgttaaagtgctcatagtcaacaaaacaccctcttcattaggaccaacagcttgagttatagtcttcatagcctctgccttcatctccatgactaacttcatgtcatcctcagaaagcccttcaagtggctgcaagtcagtcttgttgcacacaatgaccaaaggcttattcataaacagagactttatactgtggaagagtgcagcttgctgagcgatactgtacccacaagatccagaaatgtccagaaagaacaac

SEQ ID NO: 4142 - DNA, 609 bp, Zea mays
tgttgccgtgctgggctcctttcagctgactcgtctgctctggcatttattacactacagatcgtgctcgatgggccccctctccccactggccactactacaatagctatcatataccaaaggccactagtttctccctacctcaccaataaaacttgaacccccaaaaaaaaaaccaagcactccttgtgatacgagaaagaacgacgtccacatacatggaatgaaaggctacagagcgctgagtttatcgatggcaatagcaagtgtctcttttgcttctgaggacatgcataatttttttttgtgggaacagtctaaaaggcgccgcctgctcgttctcccttcgatgggctggaatttgctcttcttcagacgatcgtgggccgtccgtcggcccaggaaagaaaaaggagcagaatgtcgtgtgcggctgctacgtacggacactcgcaaaggcttgtacgtaggtcctgaactttacctgaaaacacgacaatgtagcaggagtaccgtgacggtgaaccgccaacagctccaacaaggccgacagaaagaccgtcccgttctgaaaaagtagccaacgccaactaatcccacccgcaccg

SEQ ID NO: 4143 - DNA, 637 bp, Zea mays
atggtaggcaactgctagaatcctctaaaactgcccttgacaagggtaaacttgaagatgctgtcaattatgggaccaaggtatctttcttaaatcacgtgtaaatgtcacatcttttttcataaaatattcactgatttgtattttctctacgacaatacaggctctttccaagctcataactgtatgtggtccctaccaccgaatgacagctggagcttatagtctgctagctgttgttttgtaccatactggtgattttaatcaggtatattgtgttgcagttgtaaacaaatcagatcatttaataaactgctaaaggttttcagacaattcaggtggctacagctaagcatggttcaaaacaatgattatatatgcttagtgcttgcacaatatgttaaagaaataaactaatcatagcactaaagacatgacatgatacatttcaggaaagtaaaataaatatgatttcttttaaggagaaattgtgttagatgtgtatggtgagacgaagtaccatagagcatgtaatgactaatcaattgatgattttaaggccaatgtttctgtagatactagataataagctttgtgacagtgttctgttctagcatttgacatgttaaaagaaata

SEQ ID NO: 4144 - DNA, 582 bp, Zea mays
tagctcactgaagagtgacgatcgagctgttcgcacgcatgcacacatatagcgccatatgcaagcgctgtggtgtcagcagactagcaaattagagaggcttagctaagacacgtgcatgctcattgcacaggtggagtttagctaagaagctgcgtcgtctggagcgtggcgagcaacacgcaccaaacatctgtgtggtggcaactataaactgaaaaatatatatgtgctttgattatattagcaagcgctgctgaagctgaactagctagccaaataaagagttcatcgagcagcagtagtgccaagagagatttgcatgacaaggaaaggcaggtcaagcaagaacacgcgaattaatcccgatggttgatggagactggactggagagcgaggcatgcatgaacctatatctttctatcaatctatcttatcaacaccaccacatgcacccagcagccaaccagctgcttattcttggcaagcagtgcgttaacgttaaaggcatgcatggtatctatagcggcacaaagctaattttgcgttttcttagccttttcgacccgtgcagaagctat

SEQ ID NO: 4145 - DNA, 693 bp, Zea mays
aggttgaagcactgtccatggcacagcacgaccatcttgtgccactgtgggggtactgcatccaggggaactcgagattcctcatatactcctacatggagaatggcagcctggatgattggcttcacaacagggatgatgatgccagcacatttcttgactggccgacgaggctaaggattgcgcaaggagcaagccgtggcctttcttatatccataatgactgcaaacctcacattgtgcaccgtgacatcaaatgcagcaacatcctgctggacaaagaattaaaagcttacgttgcagactttggactgtcaaggttgatccttcccaacaaaacccatgttacaacagagttggttggcactctaggttacatcccccctgagtatgcgcacggatgggtggccactctgagaggtgatatatacagcttcggggttgtccttcttgagctgctcacaggcttgcgacctgttccggtcctgacaacatcaaaagaacttgtcccatgggtgctggagatgagctctcagggaaagctggttgatgtcctagatccaacactctgcggcacagggcatgaagagcaaatgcttaaggtgcttgggcttgcttgcaaatgtgtgaacaataaccctaccatgagaccacatatcatggaagtggttacatgcctggaaagcatcaacg

SEQ ID NO: 4146 - DNA, 1252 bp, Zea mays
cagttgttccattccatccctttgttttgtttttcttggcaagttgatactctcgtcttgtgcaggtacggcttgccactggaaagtatcaggacagggtacaagtccggactagaagccctgctcaaggagaagcctaccaaggcgatcttacttggcactagaaacggcgaccccaacgcggtgactccccttgaattgagtgctcccgttttagtctacttcactgtcattcattctacacctctatcgatctagctagtatactggttcatgccattctgcaacattttgggggccgggttcatgacatgtgatggtaattgcggtgtgaaacaaaaatcgttgtaggttggtcaacaagagttctcccctagctcgcctgactggcctcctttcatgagggtgaaccctatcttggattggtcctacaggtttggctatcctgctgctctgctcgcccgaattaactcaactcaacagagctagaccattgttttttctttaataattctaatgccttgcttgcatacttgctgtgggcggcatgcagcgacgtctggtctttcctgttaacgtgcaaggtccaatactgcagactgttttgcaactattgaaggatcatcgatggaaggtcaaaatgtccaagtgtgagtttgcaaaaaaatcaagtagcttatctgggatatgttattactgcacagggtgtagctactgatctggagaagatcaaagttattgagaattggcagactcctactaatgctaaggagcttcgtagttttttgggtctcgcaggtttttatcggaaatttgtcaaaaactttggtgtgattagtagacccttattcaacctgctcaagaagtatgccttattcgtttggacccaggatcatcaaacatcttttgatctgttaaaacaagcccttgtgtcagcaccggttcttgctttaccagattttacaaaacaattctgcatctacacagatgcctgtcagacaggggttggagcggttctgatgcagaacggtcatcctttagcttttctcagcagagctttgggacctaagaaccagggtctatccacatatgagaaagagtatatggctatcctactggctgtaactcagtggcgttcatatcttcagttcgcagagttcatagtttatacagaccaccgtagtttgtcacaattgaatgaacagcggttgaatactccctagcagcaaaaagtgtactctaagttggccgg

SEQ ID NO: 4147 - DNA, 719 bp, Zea mays
ttagaactttaacttgcttaagggatactgacttactgaattcccgagcacaatgctccagatcagcagaagaaagtgagtcatgcttattcttcaacccaaacttcatgcagatagtgtgagcagcaaaattaccactaaagggtgtaacttggccacacgcctggatcttcttggaacaaaatttggtgaaatattctttctggtcttcggcttaggagatgctggtgtcgacaaaatagttgataggggtttggtgaccatctcaataaagttgttagctatgtcccaggtattaacctcctgaagctgaagcttgggccgaatccttctgtgatagactttcagtattttgctagatctagatcgggagacctgaacagaaggtaatgctggggagtgaagaaccactgcacccacagcaccaaaaccatcaacgcacttctcaatctgaggcattccgaagtcctgagctgacacggtcaaatttcccaacaagtgctcgaccaatgcattagaagaaacaccaggagcctggaaccatgcagacttaactgaggcatggacctcaaccgcagcatgaaccggtgtaggagttatcaacgaaatgaatggcgccattactgtagcagcagttaaagaacatgccaggatgtcacaattcaaaaaatctggtgacataactgcaggtcgagttagacggatcaacgggtagcgag

SEQ ID NO: 4148 - DNA, 668 bp, Zea mays
agtagcccagtcagacttcatgacagggcaagggcacgcagttcccctacagttccaaaaccttggggttcgtgatcaacatgcaaaggggtgaaaggggccttaatcttagctccgagctagactaacgatgaaccgacaaccgatcacgaattagcaccggtgcaaatgcaatgtattttgaagctaagtggccgtgcagctgttccggtcaagagcctaaagtttgtaccaaatgacgcgcgattttgatacgcgattttgataaattggaggaaggaaggcggaagtgactagctgttccggcaattcacaagtaactatctgaactgcatcagtgaaaaagccttaatgatactagttgctaaattgaacagtggggcgaggttgtacttgactatcgtgaggagtcgcttctcggcggcgatgatgcggtccgtggaggtggggatccaccggagcgcgcgcggccacacccgcgcccacctcgaccccgcttgcgccggcgccggcgacgccggcatctccgccgtggccgttgaggcggaggcccgtctcatctcctcggctgccatcctggtcgtcgtcgtcgtacgtggcgacggcagcgcggcgcatacgacgcgggcagacgtcacgcgcgtttctcgccgacttttctcctcggc

SEQ ID NO: 4149 - DNA, 724 bp, Zea mays
tctgcttccgcagatcctctatatcgacctgcagcatatgtatcttacttctcactgcttcatgtaccattatatgttgaaggagaaaaactaatcatagtatgatatgacatcttcaaatattgtcattaaaacaaattcctagtttgaacccttcttttcctttccttttatctttcaggcataaatcgtccctgttggtgagctgttccaaagactcaaaggtaatgggaccatctgtcgcaaatgtatctgacatgccacaataagaaaaaaaaataaagataattttgtcaatgactatatcttctattctttttgactggctttaccttatggtctcggagagtggtttgatgctgatgcaagtccctttttccttagtaaccatgttacatttttttcatgcttatatgttgcatcaggttaaagtttgggacacagtggctccttcgagtggttcatcatcatgtgtaggcagtgctcacctcaactcaaacgggccaccaattgctatgaaatgccatgaatccctttgctatatcgctgctggagctgaagtgacagcgattgacttgaggacaatgaagaaggcttctgtccttgcactccagaaccacagaatgctttcttgtgagatgatgccttctgaatggttaatatgtactggcacgaaagacaggtaagctcacaaaatccttgcgagcacctaacttcatctatt

SEQ ID NO: 4150 - DNA, 631 bp, Zea mays
taaatcagctactatcactgtccaacaacatagagagctattaccaacctgaccctgttatcggatttgtttcagtacaacaagaaataaatggactgaccttttcgaattataaacatgtggtgtatgtttgtctctcagagaaatcttatcatagattgtctctgacgattccaaaacctgataaaccttatcacagattgtctctgatgattccaaaacctaaaacaaagaacgcacagctgaacatagacttgaagtaactactactcatgtaacgaaaaaggtctcatgaacacatactgcaagaggtcgcgggagtacatagaacccaagcactaacaaggtctataatcttaaaagctttcaagacttgttgcagtacacagcaaagccagataatcttaaagtgagaccgtctcaacctacaccagatataaattccattccagttaactgcaaaggaaagtaatcaccacaatacagggacaaatagagtgtgtctgacttcgtaatgatgaggaatagaatcaatagatttccaaatctatggatgagtagcacaaaggacatctacttccagttacatacaaatgacatcgaaacatttagtgaacgtgtgcaacacatg

SEQ ID NO: 4151 - DNA, 709 bp, Zea mays
cggcacccggttatccgctagaaccgacctgcaggttagttgatgttatttccttatactaagccttattgatttggtgtcttctacttctgagctttaatctcaatccatgctattgctttcttatgcaggacacagtgctagaattggaatttcagggcataaaaaagaaatttaccatgcttcaggtaaaaaaaaagctgattctcttttgtagaagatcaaattttgtaaggattgaagcatctgtttaatatgcttaattcatttccttgcagacatggcctgtgcgttcaccaaggcctgttgcatcgaagcttgctgcggatacacctcttctgacagggcaggtttgtctttaagttgccttgagcttggttgtcaataattatcaatgttttctaaaaacttgaaattgccaagcattttcagatgatgtttcacttcatcttactgaattaaccttaagtcttgtttgcttacaaatggttgcagcgtgtactggatgcactattcccctcggttctgggaggcacttgtgctattccaggagcatttggctgtggtaaaactgtcattagtcaggcactttccaaggtgattttccctcaccctttactactcctactcccccttctgttgtagctatacatattttttcttcttcattgtcttgatgatctcatctttaaactttgcctaatgttat

SEQ ID NO: 4152 - DNA, 624 bp, Zea mays
aagaaggttatctatatgtggacatctggtcaacagggattgcttgcgtttttttgggtaaacttcttgctagtcattaggttttagtataacaattccgtggaaactatctttttttgtagtttggtgatgaataacttcctctcttgctaatttcaggctgggctctaaagttgctatgtttcggtactcatctgttgagatctacactacctgcaaaccacaacctactctccagttcgtcaaccccatcagacaggattggtttgaaggacaaaggaggaatgtatggttcttttgactgttctgttcatttacttaagttaatgtacaatggtgcctgacgcttatactccatcttttaaggttcatgctaaaggtatggcgcttttctctggggttgcaagatttctacagaacttgaagaatgaacatcctgatgcaataacgttagcaatccattgtggccttgcattccctgttaaggacttcactgaactagaagagttgttgataaaagaaaaggcccagtttgaggtgagtatatgcattctattgaccttggtatttgttctatctattattttctatcgaattttaaatgtattgttctgcagggcagca

SEQ ID NO: 4153 - DNA, 654 bp, Zea mays
atcttcgcatgaagcttaacgagtgttctgctacggagataaagctagcgcaggccattgaagatgagatacatttaactattactgctgtgctttcagcggatgacaatagaaagacagcttttcaacttgctttccgcgaggatcagcaaattatcagggtaaccgagtctttctttaattcaaccaacgcaaatgcttgttaaggagaaaatttgtcatgcagtaactacttgcttttcttaggggggggagctaactatttgctttctgtatcaggataagtggatacatatttcccgtgctctgatggatgagagaggaccatggtctgctaacccttttccaaatgatgttgtgactcactggaaacttgacaagacagaggatagatggaggcggcggttcaagttcaaacgtaattacaaatttgatgaacgattatgtcagccttcacagtcaaggaatgaaagtacagcaactttagctgaccagctgtacattagtgccaaaattactcagaaaatgaagcaattccttgttaaaggagtgcggggaatcacagaggatagtagttacgaacaatttgaagacactaatgacgcgagtgaatcttcccagagtaatccttcagagagccaaaaccttaataat

SEQ ID NO: 4154 - DNA, 603 bp, Zea mays
ctccatttggtgagtagtgctctcccgtgtgtcacgtacgtgttttcagatggaatggttgctctgctgcggttccagcaagttctaacgcctgctcggtcgccgcgccgtttgcttctccactgtatacgaatcacagcacgaacctgttcggctggcagatcatggtgttcttcggattcaacgcggccatcaggtaataatgatcatattgccaatgccatcgacgtacgtgcagcaagcaggaacgtacgctacgcctcgcgttctcatgactattatattctacaaaatctgatgcagcgtgcgggtgtcgaacgagctgggcgccgggcggccccgcgcggccaagttcgcgatcctggtggtgctcatgtcttcggtggccatcgggttggccttcttcgtcctcgtcctggccttccgcgacgtgtacggcgcgcccttcacggaaagccccgaggtggtgcgcgccgtggccagcctcggcgtcgtcttcgccttctcgctgctcctcaacagcgtgcagccggtgctgtcgggcgttgccgtcggggccggctggcagtggctggtggcgtacatcaacctcggctgctacta

SEQ ID NO: 4155 - DNA, 714 bp, Zea mays
cctaacgagtcgacctgcaggccgacgcccgtgagcatgccgccccacatcccctgcaccccgccgcgcagcgggaaggcgatgatgtacccgacggggatgccaacgaggtagtagcagccgaggttgatgtacgccaccagccactgccagccggccccgacggcaacgcccgacagcaccggctgcacgctgttgaggagcagcgagaaggcgaagacgacgccgaggctggccacggcgcgcaccacctcggggctttccgtgaagggcgcgccgtacacgtcgcggaaggccaggacgaggacgaagaaggccaacccgatggccaccgaagacatgagcaccaccaggatcgcgaacttggccgcgcggggccgcccggcgcccagctcgttcgacacccgcacgctgcatcagattttgtagaatataatagtcatgagaacgcgaggcgtagcgtacgttcctgcttgctgcacgtacgtcgatggcattggcaatatgatcattattacctgatggccgcgttgaatccgaagaacaccatgatctgccagccgaacaggttcgtgctgtgattcgtatacagtggagaagcaaacggcgcggcgaccgagcaggcgttagaacttgctggaaccgcagcagagcaaccattccatctgaaaacacgtacgcgacacacgggagagcactactcaccaaatggag

SEQ ID NO: 4156 - DNA, 570 bp, Zea mays
tgcatgcctgcagagcaatctcagcaaacttctcctcacgatttggagaagcttttatgaacttgatactctcacgaatgttgtaaatcacaccatgaattgaagcaattacatcctgagcaactacattgaggatatgggcatagcacctcacaacaaacagctgtcccttaagcatgaggttgttcttattggacaggtgatccctaagatttgcactgtaaatatcatgggaagagcaatcattatccaatgtgatagtgaatagcctgtccttcatattccactccaaaaggctcgagctaatagcttcactaagtgcattctctgaatgaggagaagacaccatcatgaagttgagcattcttcggtgcactttccaatcggagtcaataaactgcccagcaagagaaacatagccaagagtctgactggttgtccagagtcctatagtgaggctgatccttcctggcatagtgttgaatgcttgcaacaggttttcttttgctttctggaaaacagcatacacctctccttccatcgtatcaacatccacaatcttgaaacgtg

SEQ ID NO: 4157 - DNA, 640 bp, Zea mays
aaaataaatcacatcttaagaattactttcagaggaaagaatcaagcaatcagacaagcatttaagaatatgtgtgaagaagtacattgacaggcaaaactaaacaaatagaagttaatataccataatatcacatggaatacattatgatagtgcagacacattttcttcaaccaatctaaattacaagatttaagttccttgttcattgctagatgttccatttggacaaaatgtcaatgttgaaaaacacagtttaaggctaccaataaagtgtaacatgttgcatggaaacaataacatttgaaagtggaaataagatgtgtgtatagtgagtgcaaaagatgcgattcagatccttaccaaacaatagttattatttgttgtcgcggcgagccacggaaatcattatttattcgatgctcaagaatccaaataaccacacccacaacaagaaaagacaaccctgtaacacaccacatccccaatgtaaatggctgcaagaatgcccaagaatttgttatatgcttttttattggagacaagataaccaggcctgactcaatgaagggctgggtgaaatcaacagctttagttcggctcattgtaattacgatatcccctattgctgcatcaaaat

SEQ ID NO: 4158 - DNA, 654 bp, Zea mays
agaaatgccgagtgagtggacatgtcgatgatacagaatgccacgtgaatacctctgaggacgaaatgtttccttccgagacaagcaaagcagccgtcggtatgcaggatcctgggcagaagaaggaagcgggcggaaccgagcatgcagcgaacaagaagagccatcttgtgagggcactgtctcggtcgtgtgatcttggatcatcgatgaacttgaccgatttccactctgctcgggcttcgctccagtcgaaaagcttcagggccagcgcgcccctccagtcgaagatcatgagcacggtggatgagctgaagggcgacctctctgagatgttcagcaaacctgcggactgcaagccaaggccacacccacaccctccacgcccttccaaacgagatggcggccgcacggctcgtgcggccgtcacgtccagcgcaccactcgcggcgtatcgtcctcccgccgagcattccggctatgtgtctcgctctcgcctcagcaggtctgcccaggttcttcctcctcctcgtcgtgggctgccgtcactgaggtatcgccggcacagggtttatccgtgccatcacagtgtgcagatggaagtgagatcttcttgccgtcacgagtgctgctaccacagctgccagccaccct

SEQ ID NO: 4159 - DNA, 635 bp, Zea mays
atcactgggaatctgcaccagtaaaataaagggcgaggacacaaagaatacacagctataaagctacctcaacttgcttatcatctcccgcagaaattcttgcgagtgccataatgacagggagaagaacattagctgatgcatgcctaaaatcatgagaagaagcccaattagtcacatcaaggagtaccaggtagccttatataatatgcacactgcactaggaaaatgaatcagacgacttacatcaaaagatttacaagttgagggcagaccccagcatctaatacatcttggacagcatcacctttatcgccacatatgtagtaaacagtccagcatgcatctgccagtatcttctcgtcagcagagtgaataagctggctgataatttctagtattggtttcacctacagtgcccaatcaaagcagattatcagcaaaccctttatccgcaaactgaacaaaaaaaaggaacaaagatagcagtaacaaaatcctacttgcacttcggctggcaattttccaaaacaaagatttgacagtgcccacatagcagttctcagaactggaatcttcatgccttctctaaattgagaaagtaaaggtgtaagagcaccatgatcgaagagaat

SEQ ID NO: 4160 - DNA, 662 bp, Zea mays
gtcaagagttttcacttacaagcatgtaaggaccaatcagtcgaaactggtgcatatatcctacaaagtccagactttctatcacttatttgactatgtacagctcaatgtccagaccatgtaaggtgtactagatagtatgctgatctatcatatttggatctgttaaactatctggtagatcaaaccatctgaatttcaatgtgttagctagtttaatcacggaccttagtttctggaatagcatgtaagcaacagtttggattggtatgacacaacatttgggtggaatccccgcctgctgggaaatcggcaatccatcaaacatatagtgggcaagcaccagtatagaactatcatttaccgaaagggacgacaagacaagagcatagacgaagaggattgttaaacaatacgaacccaagaacggataggatggtgaggcggactggatggagccgcagccaatacccaacggggatcgccccccgcagctcgatcaccggcagcgtcgcgagcgcgaacacgacggtgtcgtcgggccatccgagcctccgcagcgactccgccacccgtagcccgaatcctgacgccttgatggagtcctccgccgctgcccgcgccgcgccgcagccgagcgcggcggctgcaggcatgcaaga

SEQ ID NO: 4161 - DNA, 587 bp, Zea mays
cagacgacgcaccagcaggcggcggtgacgacgacgaccttgaggtcacaagggatcctacggtggtcaggggctggcgacggttgaaggccgtgtccatggtggtcttcagcggcggcgcccgacccaacaccaccaccaccacgacgacgatggtgaactttcccttcccttcctcctttgcacatgtcatagtttttcttcttcatactctcggacgatcgttctataacaacgattctaaatctatttgtattgatgtttttcattaccgtaattaagctctataacaacactatttgtattgacgttttttaattaccgtcagtattagaggccaatgggaatcgatatttctattagcggctattttagaatcgcaagtgaaaatgctttccaccggcgattttctcatctatatggatccttttccatttcgtgggctagcttccgtcacaaatcatttactagtatctttcttttacgtttgttatgatgctaacttttacctcaagccaatacacaacttgtccacggatgagatgagagggttacatatggagacattgaaaagggctgcctgctct

SEQ ID NO: 4162 - DNA, 678 bp, Zea mays
catcaaaatttaggaataaaaatgattaattgcaactcttagtacagtagataaatctacctcgatacgaatgccaaatgagttgtcctcataataaccaggctcgttgctgacaatcatgcccttctgtaaggctgtcaaattcccatatcgatagctaatgctctgaggtccctcgtggacatttagcgcagctccaactccatggcctgtgcctggatcaagaaacatgaaaatgttgcacatcataccttcaatggaatactaaaccaatccttctctttagagaattattttatgtagttaaaaaagttactaccatgtctataatccagtccaatcttccacagagatgaccgtgccagaacatctagcacaaagcctggagttctctcagggaacactgcttgatcgagagctatatggccctgtcacaagattttatgatttccatcaggcaggaatataagttgctgcaaaactaaatgctactaaaatgtatgcccaacaacataaccaaattgaatacctgcaaaactctggtgaagcattccttttgccttggggaagcctcaccaaaatgcactgttctggttatgtcagtagttccatcaatgtattgagcaccactatctaacaaaaacagattgtcacttcctacagagctgcaggcatgca

SEQ ID NO: 4163 - DNA, 625 bp, Zea mays
aagaagggcggagctggaggagggttcagcggccacggtcaccccgccaggaggcggaccaacagccgcaccagcatggcgcagcgcgacgagatcatccgccgcaccgtctacgtctccgacatcgatcaccaggtccccgatccatttcctcctccccccccgtgtcgtgtcgtgtcgtgtctagtcgagccagttgggaattttccccctcccgctagcagcctacctaccgataccgatcgattgaccgatctctgatgcgaatttgttattttctttctcgtcgcactagccgtgacgattaattccgggttctgtccgtgcgtgctcctgggcaacaggatgagatcacgagatcggatgatgttttgtcatgagcgtgatggctcggggagcacaggttggggtgtggcatacgccaccacgcacgcagtaggcagtactagaggcatgggcgttgccgccccccgagtatgagccatcctttttggccgctgctttggtagattttgatgccactttctgctagtttatcttgctgctgcttgcctatttgttccgtgcggaatctggaaagctgtgtgctctgttctgttttgccttttgtgtgcttggctgcctg

SEQ ID NO: 4164 - DNA, 633 bp, Zea mays
tctagcacctggcagtgagtgctctcgctctatggaaactcataaattctgaatcagcctttgcaatccaattctagcctcatagtgctccatgggcttcaggttggactgccagtcaacacagggactgagctcgtcgttctgccctgccgccaagtgcggagacatgttcctcggcaacacatcctcctccacctcatcctgcgagagcacagcatgctcctacgccgggtacaccaacagcacatcgttcgccatcctcgccaatgtgaccaccaccaacgtgtgtaacggtgagtgagtaggacaccgcttgtgtttgcaagatccaatagccatcatgttctgtgcctttggcaattggcggcagtgctcttgtctaagttgttgccgttggccctttgttgtttttgtcactggcagctgggatgactccgacggcgcagccggctcactcttcggcgcttcggttggagccggtgtggctgagatggacggagctggttgccttgtctctcttcacgctgtctttcttcgtctaggctatctgcggcaaaagactgaacgttgtcgccaagcgtctgtcgttagaatctggccctctgattcctagtttgatgttgtgagtaatat

SEQ ID NO: 4165 - DNA, 609 bp, Zea mays
gaggagccagtgcaccttgagcgcgatgcggagcgacttggcgcaggtgtcgatgacgaagcggtcgagggaagggctgggcttgtggacgagcatgtagcagacctggaagaggtaggcctcgagccccggcagcgggagcgtgtacatgcggttgcagaggtagtcgcgcactccagcatggtcgtgcttgtagagatagctgacggcaatccactcgcagaagaaggcggagtcgaagaagcgcacgagccagccgctgctgccaacgggcggggccacgtcggcagtggaggggatctcccgcggcgagtcctccgggccgaagctcaggctccgcagcccgagaagccgcaccatggccggcgcaccctcgaccccaactcagtcaacaaaccctactcaccgccgccgtctactcgtcttccaccgccggtcaccaccatcacaagccggcgcggagtagctcaatccagcacccccgacatgcagcagcaacccccgaatccaaacccttgcctccgcacgggctcgcgatccggagcctcccaaaccctagcctcgaaatcgcgtccagattcgcagcgaggggctgcaggtcgattaagg

SEQ ID NO: 4166 - DNA, 570 bp, Zea mays
gcagcaacacttgttttgtgttgtgccgctggatctttccgtccaccgttacaccgtacctaccgccttcctggccctcctgcaaacctcctggcagtgccgaagatgacggccttggtcaacaacccaccgtcgaaggtgcagcaggccagggccacagcgccaccgaccatgagaaccttgggtatgctgttcgcccagtgcttcgtcgccttgtcaacctctgcgccgtcgccggacgaagaagaactggcctccgtgttgcccggccctgcgatgacgagctcgtcggcactgaacctggtggtgacctgtgccatggcagcacacttggaaacagcctctccggcggtcctcccaacctggtacgcccgaaggccaggctctatcctcttgacgcagccccacatcccctgccggacgccaagcttcgcgatctcccatggaatccccatgtcctcgtggtggaacaagagcacctcgcatgcactcattgcaccgtcgccttttctcgactcaactggtagattagatacaataggataggttcagttcatgcacttgagtcat

SEQ ID NO: 4167 - DNA, 693 bp, Zea mays
cgacctgcagcttccccataggtcagtagtatgcttttcttggcgtgtctgactgggggtcttcgcagcacagcctgtactacacccggatcgagatcggctcgccgcccaagggctactacgtgcaggtggacaccggcagcgatatcctctgggtcaactgcatccgctgcgatggctgccccaccagaagcggacttggggtactgctccatctgaccatctccatggccaggccacaccaggccatgcgcgatgctcccatgccatgcttgtccctatggtccttgcctgcttggtgtgatgatttttgtcgtgaagaatcgtccttccctgcgcgttggtttggttgcagatagagctgacgcagtacgatccggctgggagcgggaccacggtggggtgcgagcaggagttctgcgttgccaacagcgcgggcggcgtgccccccacgtgcccctcgacgtcgtcgccgtgccagttcaggatcacctacggagatgggagcacaaccaccggcttctacgtcacagacttcgtgcagtacaaccaggtgtccggcaacggccagaccaccacgtccaatgccagcatcacctttgggtgagccttttggaacaagtgcctgcacctggccaggggaccactcgtttgtactcgtccgttaattctgcctctcttctcgttatgctt

SEQ ID NO: 4168 - DNA, 599 bp, Zea mays
gacatcgccgaggggatggcgtacctgcaccaccactcgccggtcaaggtcatccactgcgacctcaagccgagcaacgtcctcatcaacgacgacatgaccgcgctcgtctccgacttcggtatctcccggctcgtcatgagcatcggcggggtggccaacgccgccgacgtcggcgcctccaccgcgaacatgctgtgcggatccatcggatacatccctccaggtacgcactaggcactactacgtagtacgtggcatccaatggcacgcttccttgtcctgatcactctccacgcactgccccgtttgatcggttctcgatggactgaagagtatggctacggctcgaatacgacgacgaagggcgacgtgtacagcttcggcgtgctggtgctggagatggtgacgaggaggaagccgaccgacgacatgttcgaggccggactgagcctgcacaagtgggttaaggcccactaccacggccgcgccgacgcggtggtcgaccaggcactggtgcgcatggtccgggaccagacgcccgaggtcaggaggatgtcggacgtggccatcggcgagctgctggagctcggcatcct

SEQ ID NO: 4169 - DNA, 705 bp, Zea mays
tggacatgacaccttgaccaatcatggaagctaaggcccggattcgccctctctgtatctctgcccgcgcggaagccagattgaaatgcatgtactatacctactcgtaatgtttgcagtcaaactgcatgcatgaggaaaatggagacgatgatgtataatggagcaaggccatggacgctttcagtgcctcggtaacacgccctagagtccttttgcctctttacggaaggagctggagtgaggcagaagcaaaagccctctgcctgctcctgtgctgctgcgcgtgggcgtgggcgtgggcgtgggcgtggctgtggtttacagagtacactactcaatacccattcaacacaacagtgtgcatcgatgtcccctcccagccggccccggcccctacgattcacgcggccacaaagatttatttaccgcgcgcacatatatgtggcgaccatatctctctctttgtgctggctggctggcttcaggtgtcttgtcgtgaagaaaggtacctgcatgccttgcaaatgcctgtcacttagtcttgcccagaatggctggccttgttctgacggtatcttggccgtagcatcaattgcgcgccgcttctgctcgatcgatcgccatgcatgcagaacaaatgggctgctagctgcttttctttacaagctcttctctttaattttagtagatagatagatgctt

SEQ ID NO: 4170 - DNA, 661 bp, Zea mays
aagcagacgcctaaaacatggccgcagtatgctcctcattcacctgccgcgtctagtatttcggaaatattttgtatttattaaagcaggagagggaggcaagcagcagccgaggccgagctatctctctatttccccctcgcccagctcagatccgaagcctgaaggaaatcgcgccaacaggccctagccccagatgcgcgccgccgcttgctgcctgcgctgctgctactgcttctaggggtcttgcggcgatgctgggcgtcgagcccgagagcggaggcgccgcgtcctcctccgccgcaggtgagactcttggccgctgaatccgctgcgctggtgggtttcttgctgcgtttggtctggccgctggttttttcagttgtcgtcgtttgttggctggttgttggtgctgttcgggtcgatttagcgggtgctctggtcggcgcctctttgcggtgtttcagatgcgaattttcgggctcgggtggagacttgttcgtgaggcctatgggtccaagaatcttaacagaaatcgattttgtctgctggaactgtttcgtgtgatgttcttgcgtttagttcgcggttcttgttagtcgtcggggttgattaaagtcgtctcttgccgatgctgagatgacctgacgtttcttgtctt

SEQ ID NO: 4171 - DNA, 654 bp, Zea mays
aacctgcacagtcaaagaatgaaaaggaagtccaagcgttaccgaagtcttcaggcgatgcaaccagctatacctggaaattatgtaatagtagtgcctcaacagattacataccttgccttgacaacgagaaggctatcaagaagcttcgaactaccaaacattatgaacatcgtgagaggcattgccctgaggagcctcctacctgccttgttccactcccagaaggatataaacggccaattgagtggccaaagagcagggacaaggtgattctgtttattctgaattgtacaacaccgaatcatctttagctgaccaagatgcgtgtttgcttattaccacgctgtgctgttttttttgcaggtatggtacagcaatgttcctcacactaggcttgcagagtacaaggggcatcaaaattgggttaaggtctcaggtgactatctcttgttccctgggggtgggactcagttcaagaatggtgccctccactatattgatactattcagcaggtatattataatcatcccagcatctcatattagtcactccttagacttgtacttgtctgcctcacacttttgagcatcagtgattgatttattgttatactattccacaaacataatttgtcaaatagcaccatatag

SEQ ID NO: 4172 - DNA, 687 bp, Zea mays
tggagatggccttggcagcgagcttgtacgacttgagcgcgcccgcggcggtgactggcacgtcggctgggttgaccggctcaaggtcgatgacaaggccgacgtcgatccggtgcaatatggcgtagaagggcttccccgacgtcctggcgtgcacgaggatggggttgagtaggttgacctccccgaaggcggcggccttgtgaagcgcgacggagctctgcgagcggaagagcgtgcgcacatcgacgccgatgccgagcgcatcccgctggtcgatggtggggacggcgtgtggcgtgaggtcgagcatctcgggcgcgttctcgctgtaggcgagcagcgcgaaggtgtccgggtggacggcgagcaggcagccgaagggctggatgtagcggccccgctgcatgttctggaggtaggtggagacggtgctggtgcttgccgacgggcggttggcggcgcccaccgacgaggagtagtcgaagtggcgctgggagccctcgaactcggcgtgcagctgcgcgtccacgggcgtctgtgccaccacccgcgcgctgtgcttggaccgcgcagagctgctccgggagcacgtcctccggttgttcgacggcaacgacatctccgcttcgccccactccaagatctcgcctcctcctccttccccgccaccgaactagccgcagc

SEQ ID NO: 4173 - DNA, 712 bp, Zea mays
gaccagccccgccaatgggctggtgacgtgactctctcaaacactttgagctcgctcttcacctatcttagttccaaaatctagtgtttccagcactagacccgaagaaatccggtgggttgtttgctaaagtgatgatatccgatcgatggattacgcaaattgaatacgacatcattacacagaactacatatgtccattctacgggattccattcagcagagatacatatatacataatccatcctcggtgtaaaaatgatcgaacttttttggcacaagaacaggcataggcaatggcagaacaaaatcaaacacaaaacagattcaagctacaaaactttcatttagccaaaagtcgaccaacaccccagaacaaatgtcaggcattggaatttggatacatagcatggtctgctttcattgctacattaacattgaaatttggcgacatgtttttataacagtagtagtagacccacagcttcaactcaacaaccagacaggtggacgagaagcttagaaaagagatgtgcccttgcccttcttgtctccaccaatctcaaaatgcttgcatctctgtgacacagggagtcagcaaagagtgagctataaccaatggagaaatgctttgttcagcagcaagtttagcacgggagaatcaagacagtaccttgatggcgtgctgtgagtagtgcttgcagctctggc

SEQ ID NO: 4174 - DNA, 570 bp, Zea mays
tctccctcaccggcctcctctacagccggccactaagcgctcggagctggacttcgtgtccaccagcgaggtcccagttccggccaaccgctggcacctgcaccgctgaagaggcgggaccggaaatccgggccccgtcatcaaccaccatttctgcgggctccggaccgccgtgcccaccgtgtcctcccggatggacaaggcgtccctcctcgccgacgcctacatcggcgagctgcgcgactgtggagcagctcgaggccgatgccaagcggcaggccgcgacgacctccgccgctgccacctgaagcacactgacctcgttcggcggcttctaggagaaactcgatgtccggacaggatggtcgagcaggaggaggaggcgccgcggcgctgctcctgctgacaacgaccgcagcgagccacgcgcccacgcccccgtgcgcttcatgctcgcgctccactcgctggacttgctccggtgcagcacgcgtgcgtgtgccgggtgggcggcgcgaccgtgcaggacggcgcggcgccgtcgacgtgcctgccgccgctctgtttcac

SEQ ID NO: 4175 - DNA, 642 bp, Zea mays
aattcacaaggaaccttcgtcatcctccagcaccaagaggcggccagggaggccgtggctttggcggaagttttaaccaggatgtgcaacgacaacaaagatttgacagtcgtaggacaaaatagccagatgaaggaagtataccgtacaacatcctactaccatctgcatatcccacattgaattcaatacccaaaactgaagatggaacatttgacgtccaatgctccagttcattcacagtcataccattgtactcgtcaaccatacctcctaggacgtccatcatatgaacagccacccttcaaccaccggcatttctgccggtacaaagagataagagacgctggcaagctagaacaaagacatgtaggtatgtaaacaccatatcaacaagaacgacatgtacacgtcaaagagaagacaaggaacgaaatccacacaggcaattccacagcacgaataaacattactactagttgaatacaccctacagaactaaaaaaatccattttttacagacagaccggtacaccaatgctgtgcactcgctcgacattttacatccggagcggggacgccggcgaggtcccggggaccgactgaccaagacctacttaatcactagtactaggtgccggc

SEQ ID NO: 4176 - DNA, 600 bp, Zea mays
acttcactagtgttgctggagttctcctatgcggacagctcaagctcattgagcatgacggccttaatttgaggacaatgtggaagttcttacctgctgctgtgatgttctatatctccatcttcacaaatagtgaactcctgcttcatgccaatgtggatactttcattgtgttccgctctgctgtgcctatatttgtcgcgataggagagacgttgtatctccatcagccatggccatcactcaagacatggctttcactctccacaatacttggtggaagtgtgatctatgttttcacagacaaccaattcactgtgactgcttacacctgggcagtggcctacctagcaagcatgtccattgatttcgtgtacatcaagcatgttgtaatgaccattgggctgaacacatggggccttgtgctatacaacaaccttgaggctttgatgctattcccactcgagcttctagtaatgggagaatttgatcagatgaaggtcgacagctccaaagtgtcaaactggctttcatttgatgtggtcctccctgttgctctctcatgcctgtttggactatcaatatccttcttcggattct

SEQ ID NO: 4177 - DNA, 658 bp, Zea mays
tgtctaggatcatctgaaaataaagatggaagctgtaacagcttggtatcaattttcctaggtcgtccgcgtttcatcgtgtcaacagcatcatcatctattgaaaaaacagaatgacttgaaggagtcacggaaccatcaatgcgctttggacgtcccctcttcctcttaccactttcggcaggtgcggcaataggtggctggggagaggactcactatcttttgagtcaattggagtgacaatatctgaactatcctgcaaacgtttgggacgtccccttctcgtaccagattcatgtacactgggccctggaagtgtctgaataacagatgtgatatccccttgcgaggtcagaggaaccattacaggaacgtcttgtatacgtttgggccgtcccctcttcctcttgccagattcttgtggggcgtctgaagaaggcgtcagggaaacaatagtgttcaattcctgaggagctgaaggaactggagtaaccacaggaagtgaaggaactggagaaatagtaggagccagaggagctgaaggagccgaagaaacagtagtatcaggcacacgctttggcctgcccctcttcctcttaccagattcctgtgtggtagctgaaggaggagtttgcaaagatgtgaccgaactgttga

SEQ ID NO: 4178 - DNA, 626 bp, Zea mays
acaacgtgagctggtccgtgggctacggcatccccacgctgggcctcatggtctccatctccgtcttcctcgccggcaccaggctgtaccgccacagggtgccgcagggcagcccgttcacgagcatgggcagggtcctggccgccgcgctctggaagtggagcgtcccggtcccggccgacgccaaggagctgcacgagctggacgtcgaggagtacgccaggaagcgtaggttcaggatggactccaccgacgccatggccttcctcaacaaggccgccgccgtggccgtgcccagcggcgggccggcggcgacgccggcgtggagcctctgcacggtgacccaggtggaggagacgaagcagatcctgaggctggtgcccctcctggtggccatgatcgtgccctgcacgctcatcgcgcagaccaacacgctgttcgtgaagcagggcacgacgatggaccggcacatgggcccgcgcttcgagatcccggcggcgagcctgggcgcgttcgtgacgctgaccatgctggtggctgtggtggtgtacgaccgggtgttcgtgagggccgtgcggcggtacaccaaggacccgcgcgggatcacgatcctgaggcggatgggc

SEQ ID NO: 4179 - DNA, 716 bp, Zea mays
ttgccacaataaccacaatggcaaggttagcagaccgcattggcaccagaactgactgacgatgggcagattcgaaatggcaaccaccttgatgacagggtcgtccaggcacgagaccgtcccgaaccactcggcgttggcggtggagccacccagcggggtgtgcgcggtcacgcagatcccgtgcttctggcagaacttgacaagagagtcgcgctggaagtaggggtgcgtctcgatctggttcaccgccggctttatcttggcgtaggccaggcagtctctggtgaggaagatgtcgtagttgctgcaccagtcactcgacaattgcccccagtattactatttgctgtaaaagcgactccctctaccatgaaaagtacgtaggctggaaaactccaagaccaggggggcaaaaaaaaaatggaagcaagaaaatttctacctgattccaatgctgcgcaccagccccatggaaacaagctcttccatcgcgtgccatgtcgtttccagggagatagtggtgtcgatgtccagcacgccatcgtcacccagagcgctagaagtcgtgccgactcctgggagaaacacacgtttcggtgaggtagcaagtggatgatctttctaattgttatgcagagagcagagggcgaggaacttaccggtgtgccgagtggctactgggaaatggatgaggtagaggtcgagatagtcta

SEQ ID NO: 4180 - DNA, 1187 bp, Zea mays
tattatggatgggtgagctcatctataatataaacgtgaactacatattcactgcaaatagaataaaagttatagaactcacctatttaaaagtttcctcataatatttatcttttgtgaatgtgaactactgaacttgggaatcaaataaaaaagcaacattcctttatatgtattcctttgaatttctgattgaatgacattcctataatcttttttctacgtttacatattactggcagtcacctctatgagttagaacaacaccttgaccgcttcctgaagtctgcatcgatggccaaaataccattacctttcaatcgctcaacaattagaagcatacttattcagactgtgagtgcatcaaattgcacccaaggatcactcagatactggttgtctgctggacctggagacttccagttatcttcatctggctgtacaaacccagccctctatgctgttgttattgaaagcccatccttacaagtaccgtcctgctgcagaatcgccatatgcccaactagatcagatagtgggtggccatgcggggtatgctgatacaatcctaagctacaacctaactgcaacaaactgcttcagcaatgccaggagtccaggactgaacagcactgaagcagtcaatctggatcgaattgaacaagtgctggacagtcagtttccacatgaatcagcactgaaacatccggatgagcaaaaggagaagaaggcttgtgtggtcgtgcggaggtaaagctttgacctttgtgcggcttcggcctggttctggtagaacttggcgaagcggccgcggttggctggcttgggtttagagggctttttcgggcgcaggccggcgatctcctgcaccagcggcacgtgcaccagcaccgtcctccacgccacgtaccagcctggggcgacgaagcggatcagggaagggaacccacgcaactattcaactgaggagataaggggaggggagtcatactgaggaggatgagggtgaagacgaaggcgatggcaaggacagggcggatgaggaaaacgacggcgacttccgacgcagccgccaggccgccgctcgccatagcgccggcggcagctcagttccggcctcgcaaggaagggatccgctggcgaggttattgagcctatggcatgcgaggcccgcggaagcaagcaaa

SEQ ID NO: 4181 - DNA, 646 bp, Zea mays
gccgttagcgaagggccaaagccttgttgccctagcttgttcggcgtcactagtcgatcgaggaacaaagaaccatccggcatttacagacgtcaatcatcttatcgtcaccgttaattattgcaaactcacggttaatatataatcgatttaaacaccgtacctgttgcacctgaggctcagcgcgaggccgccgtccggcacgacgatggggtgcagctcccagacagcctcaagagatggctgccctgctctggacttcatataagcctggttgttcccaaaccctagcaaccagaacctgtccaggcctctgccgccgccgccgccgccgcctccggcagcagcggacaccaagctgcccacttccatgatggcgtgctcgacggggcagtagcagccctggccgtgatcacggccgccactgccgctgctcctccttctcgtctctgacacggcggcccaggcctcggcggcgtacgcgaggtcctcgaggacgagcacgacgcccttcccggcggcgcagccctggcggacgagcgcgcgcaggtcggcggccttggcctccacctcctccctcggcatccgctggaaggacgcggccgagaggggcacgaactggacgttcttgagccgctcgtgccgc

SEQ ID NO: 4182 - DNA, 602 bp, Zea mays
aaaggtgggaacaccaagggatgcgggtgcattggtactaaaaacattcctccggccacagctgctgaaggtggcgccatagccatcattgttggggctgccgccattggaggagatgacaccactgtgaccgaagccactgcttcagtcggagtcgaaactgatgctgtattgccaacttcttgtgtggatggcttcgaaaactttgcaccttttttaccagcagaaactggaccctctccaggcctcttctcttttcgagactcctcaaacttgcgcactttctctttagcttctttcatcacagaaaggacgtattccatcgcatcagggtcagtagctcccatttccacaatgtcagcaaagtactggtgtccatgcttgtagagattgtccacttgatcttcccgaatgttttctggttttgagcccttccctgtatctttagcagctttctgtgaaatgggggtttccttaggttcctcagggcatttgtagtcctttcgccatcgatcaagaatatatttgggaggtattagcatcacaagctcttgcttcaagacagcaagagcatggctacataaaatacctttaaactggaa

SEQ ID NO: 4183 - DNA, 646 bp, Zea mays
ggcaaaggcaaagttcctcatttcccagcgttttttttttgtttggaaaaaaataaaccatcgttcgtacacagttttgatgttgttttgtttacaggagttactgaagagcagttcaaggatccacggcccgcaactgggagcagtggcctgcaagttatggccaaatccaggatttgatgaagactcagaagaagaagaatgatttggagaaggctctaaataaattcgaaaaaaaaataagctgggttcagttcatcagcaatggggaagctgctttccaagttctaaactgaacataatcagcataaatgaatcaacgaatcgtctagctagctacgtacggatggagttctgagttgtgactccaaatgaaaacccaggttgggttgaaagtattggtgtcaatctgtgagattatttatcacttcagattgaatatatgattttggttttggtactctgttctcagggttaaaatattttttttttattttttggtactggtattgtgaccacgtccgtgcgttggaacgtgaataaaattatgtcacgataaattttaagtttgaatacgtgtttcctcaaccgctttcgtcgggaacgaaatgagttggttcagatttaatgacaagagcacgtacat

SEQ ID NO: 4184 - DNA, 1321 bp, Zea mays
ccgggtggtggacagctactcgtgccgccagatgtacctccgcagctacaccttctccaagcggaaggagacggtgcccgagcgcaccatggcgtgcctcggccgcgtccgggaccgcggcgccgcggtcttcccgctgttccacccgcagcggcacggcggtgggtcggccgccgccgccgctgcctcggacgccgcctccgtcggcagcgccagccaccgcacggaggacgacggcgtgctggggctccgtcgcggcagcaagcagcagcagaggcggcggcggaggaagaagaacaagaagaaagggtgcgccgtggtgcggaggctgcacgaggcgtcctgcggcgccgtgcgcgccatcttccgccgcctcctcgcttgcaccaccagcgtcgacgtcgccgacggcggcgcggcggcgccccgcagctagccagctagccgtctccgatcctcgcgcgctgatgatcaggagagggagagacgtgcgtgctatgctgctgctgccaacgcgaggtgttcttcgccgtgcatgcatgctgtgctctagctttcgccagttttcgtgtgcctgattttgctactagactagtaacagtaactaaattaaattactgctctcctctttccgtccggctgcagtttctacaccatgactaatagtgacttcagccttatatgcctttgcaagcaacaatgagattttgaacctctgcaacttttctgcaattgatggattagtcttttgcctacttaactacatataggtggtttgacagcaaataaaagcaatgtgtaggctgacacgtggttcttctaaatctaagctacagatgtataggtatcgtgtaaactgataatatctaaaatagaactttatgtgttggtgttaattttgcaagttcgctgagttttttttttcatccttttgatattggtttcatatatcacctaacacttgaagatgattttgaaatctgtgtgtatgccttgtctaaatgttgtcctttggacttttggagcatatctgatgcatctgtccagagcttgtgaaataacaactttagttgttttgtttgcttatttaccatacggacatacggtcggacttacttggccacatacgccatcaagtaccacaggatgcactagtgcggtcactgcttgattttttagaacactgggtttaaggaagtaatacattttttttgcattcttcttgtataaccatttataccacagtaccactgtgttatacagctcttgttaaaacacttccccctctttttggtgaatattactatttcctgcaattgct

SEQ ID NO: 4185 - DNA, 595 bp, Zea mays
atatcatggtgtgccatacgtagcacgagatgactttctgcatcccagaacccagattaacacagttcataaacttatgctcatacctgaagctgatcagagcccagatcaggccggctaggcttgcatacatgttgggatttgtcaccaacttcctactgaccaccagtaagaagtggaaggcaccataacatcttgccgagactcctttcgcttgcccctcttcgtgtccttgctgcataggtcctggagtacctgattctgcttcatctttgagacatgacatgagataagtattgttcaactaattctgtcattaagttaaaacctcagaagataattctgtcattaagttaaaacctcagaagataagctgaactgcttgctttataggtgcacaccaaaaaagaaatgtccaaatatacattcaaacataggttaattgagaaaattcagtacaatgcttaagacacaagcaccctcctgcctgtttcttttaaactttttctgtacaatcaaataggtagaccttcctgcctattatcttttcagtaaataaatgaaggagagctccatgtgttttcaccatattatg

SEQ ID NO: 4186 - DNA, 646 bp, Zea mays
accggcatgtacttggcggcccaccacggcttgtggctgctcaccagcagctgcacgtcgccgccgtaccgccgcgccgtgatgaacgctgggatcagcacgtccgtgtagtcgtggaacaggttccccgtgaacccccccgtggacagcacgaacgccgtggccgagctgttcaccgtgcaccgcggcgcctcgtcaccgtcgctgccgccgacaagcggacggagcgtccactccttgacgtgggacagcgcgaacgcgtcgtgcttccggcagtagggcttcaccttccactcccggtccagcgcgcccacgagcaccgtctgcgcgcgccccaccacgcgcacgtcgccggccgcctcgcaggtgtccgaccgccggctcgactcgtagcacaccggcctgcgcgccctctcggcgtggtcgtcgcctaccgcaatggctgcgcctgaaatatcggagtcggtcggcttggaccgagtctcctcttcctcctcctctgtcacagacagacggcaaaagtcagctggaatgaatccaccggatctgcatctgcttgctatacagcggaattcgctgcacgaacgggaaaggattcgcagcaatctagatctaggattgcgagaggaactagtcggtattacca

SEQ ID NO: 4187 - DNA, 616 bp, Zea mays
tgcttcacgtacttgatcgcgtcgccgagcaccgatgctttgtccatctgcgacgagcaccaccatccaaatcagttagttgaccggaactggctggctagtactactagtagtcgcgctcggcggcatgtcgccatggatttggccctacgtaccttcttgaggccggggacgatcttggagagggcgatgaagcgctggctgagcttctcgcggcgcttccgctcggccaagatgtggtcctggttctgggaggccgggcgcgtgttggcggacggcgcgttggcggcctcggccaccgcggccatgtcgtcgtaggaacgcttggcctggcgcgcctgctggaacggcggcatcgcggcggcgtccatcatctcctgcttcggcgccttcgcggcggcggcggcggcgccgtagtacccggcgcagccgctgggcggctggtgcgtcgtcggctccgccttggcgaacgcggtgtggccgccgaaggagaggatggtcggcgaggaggagtccgcggcgggggagccctgctccgtgatgcacgagtcccagctggtgttgaccttggccgccttgcgcgggcggtggtgcggctgctcggccgccgcgggct

SEQ ID NO: 4188 - DNA, 678 bp, Zea mays
caccaatgcctggagtaccactttgcagcacagttgtaaccttgccccatgttgtccgctgataatccatgctccagcgtcgaactttagttgtcatctgcttgatccactcattaccgagaaaaacacccaactcactatcattcaccttctgtatgatgtacttgccattattcatcaagaagatacaagcaagagatgggtcacggtatatcttagacttcatatccagattcttttgaagaacatccatgatccaagcaatgtgcacagcaagggatgatgtggaacggtcagggtcaacagccacaggcgcacctccattagccccaaaatcaccttccatcacctcttccaatgtctgccgcgacccacacgcagctcggagatagttcataacataccgagtgataggatgtatgacgccaccttgggcagcaattcgggcagggtcacggcggatgagattttccaattccataaatatacccttgatagaggatcccagtgtgttgcacatggcggagacctccgcatggagtgcagcagagtatgggtcagagaacacaggatcaaggtcagggagaatgtcacgcacagcctcgtacatgtcaacgacgcggaagaggcgctccggcgagcggcttgaggaagagatagcgtcaccgaacgatatga

SEQ ID NO: 4189 - DNA, 639 bp, Zea mays
aaagagtaatatgatggtgcaatgcagaaacaaggcatgaacaacagaagaatttaaaacaagcaagtcaagaaccaactcatttcttcaggcacataaaccttagcaacttcacaaatcagtataagctcagatcctgaccaccaatgtaccagcggaaacaaaggtcaaacacagaatctaaaatacacctgctagtgtcggcagtacttaatgatcgtgctcaagtactcaacaagcaactatctacaaggaaatgaccaaattataattttccatcgttcagtcacagttaacaagcaccagacactttgtaccctcaaataccaacacgcagaactacagatacaactaccacataaatcgtagacaaattggtagggcagattcaaaattagcaacgtaacaaacacctaacgagacacacttagcgaccagcctgcgtaccgcacggcgacatcccgacgctgaacacagccacaactaccagatcaggcgtcacgagcacggacaagcgaacaggaaccaggcagcatggaaatggaatcacacgagcgcggtcggatcttaccagtccagaggcgctggcggtggagatggtcagcttctggtcgtaagtgtagtccttactgagtagat

SEQ ID NO: 4190 - DNA, 662 bp, Zea mays
gatcggggtcggcgtatcatcatccatggtggtactcatgagcagcgtgtcgaggccgttcgacgagagcgtcctcgtctggcacctcgccaccgacttctgcttccacttactccaggtccagggagacccgtcccgcgccaccgccaacgccaccgcccgccgctgcatcgagatgtccaactacatggcctaccttctcttcgtcaagccggagatgctgatgcccggtgcccggcgcaagctgttcagggacgcgtgccgcgagctcgtgggcctgctcgaggaggatcgtcctgacgcgccgcgggcacggggcaagagagacctcgcacacaaggtcgtccagctgctcaagagggacggagacgacgtcctgggctcagcgggcgtcggcgtcggcgtcgttcgccgggcttggtgcgtagccgagaaactcgtggattcgcacagtggcgacgaggagaagatgtggaccgtgatacagggcgtgtgggtggagatgctctgcttctcggccagcaggtgcaaaggctacctgcacgccaaaggcttgggaacgggcggggagtacctgtcctacgtatggctcctgctcctgtacatggggatggagaccttggcggagaagatgcagaggacggagctgtacgagggctcca

SEQ ID NO: 4191 - DNA, 577 bp, Zea mays
aaatactggtccttcccctaaaagcatgtcttcctacagtccctggatatttactgttggagcttctgcccatgacagggtatacagtaactatgttgtgcttggcaacaatttgaccattcaaggagttggccttgctcgtaagttcctttgaagtactttttctgtacaaatgtagttacctctatataattgtaacttgtattgattgattctaaatacagctggaacggatggtgatcccatgtataatttagttgctgcaccacatgcactgaagaacaatacagccagttgtaatgaaatgtcccttggggagtgccaagattcgagtcacctagatgcagatttgataagaggaaagatactagtgtgcagctattctataagatttgtgcttggtctttcttctgtgaaacaagctctagatacagccaatgatgtcagcgccgcaggagttatattctatttagacccatttgttcttgggtttcaactgaacccaactccaatgcacatgcctgggcttataataccatcatctgatgactcaaaggtagggcagccaagagctaat

SEQ ID NO: 4192 - DNA, 661 bp, Zea mays
gccaaattcaggaggctcaacatttgaggatgactttccaagacccatgcgttcaaccaactcttttgcataggtaaggttaggatccggatgaccacctccaaagtcctcctgcaaaaacataagcgatgaattaatacctagccatattataagtagatatttgtgacaatagaagaactcattacttttgggacacaattcaacagtgagctttcatcagcaccaagctcttccacaaagatgtgtttggcataagctcccgcaacaccatggagcgcatcataactgaaagtgcaaagtgagattttagatgtgcaataatcatattattacggtaatgttaacatggttgcagtcatatatgaataccagaatgtaaactttggggaggtcagcagcttttttattgcttcgaagtcaaaaattgtcctggaattgatgtcagtaattaaatcattagattcccttgtgaacaaaacatgatccaagtaacatgtaatgatataaagcatcgatattctcacttcaatgaaaggaaacaggaaagaacaagctactcacttcattaactttatgtaatttacactagagtcaaagacatccacatcaaaggggccttcgggtccactgaagctggtgacaccgacaacagaaatat

SEQ ID NO: 4193 - DNA, 610 bp, Zea mays
ttgaggaaggactgcgtctgcgcgaaggtgagcgccagcgagatggcctcgctcatcgcctgccccgctgacctcacctccagcgggtagatctcgctggggatgatccacttgagcgggccccacgagacgccgaagccggccgtgaacaggcacaccaccgccaccaccgccacggcgtacggccgcgacatcgccttctcgccgttggtgcccagttcagcgccgaagatccacgccatggccaccaggcacgccagcaggatgcccccgcccaccatgaacagcgaccgccgcccgacccggtccacggccaccgcggcgacggcgatggacaccaggctcaccacgtcggtgatgatggaccccaggatcgccttctggctcgtgaacccgatggtgtagaacagcagcggcgtgaacagcgtcaccacgatcatgcccgtcagctcgaagaagagcgggatggcgacggccatcaccaggtgcggccggtactcgcggcgcacgatgcgccggaacgcgccggactcgtgccgccggtcctcctccgcggcctgcacgatgtccctgagctccacgcccacgtcggcggaccgcccgcggatgc

SEQ ID NO: 4194 - DNA, 683 bp, Zea mays
aattagattttcagatgggtgccaggccaaatggagcaactttgtgctcagatcataggaatttccattggcatctattccagtgctctctccacctgcgtaaggtttgacagtattagtagccgcagtgaagattcttttacagactaacatgccaaagcatcaagctaacctcgtctaacggcccttgtcagagtacttagggatctggtagctctagtgggattctggagctgccgcctgttcacaagaaaaagtaaataatacagatattattagttccacactacaacatttgagcagcacaagctcatcagctcatgtatgctactcaaaacagcttggtgtatggaaatcaatttacatgaaggaacaagaacatgcttaaaggtcaaatagttttgcttcgaacattcttctttgaaaagtagcattaccttgtagggtttcgggttgcttcaagtgttgtcgcctcactgttaccagtaccgcaaccaaacacacggaaaatgttgctgaagaagacaaatagctagtcagttcctgtcaatgaggccaagctgtattacaactgaacaagaatatcagactacctgtaggaaccagttgctactcttaatccatcaccactttgacaacactcaaatttgtcaaaaattgagtcattttcatataaatcacat

SEQ ID NO: 4195 - DNA, 642 bp, Zea mays
agtgttttccaacttggttccattctccccatcactttcaggtacaccaagcagacatagatttggtcttttcacatagtcccatatttcttggaggctttgctcatttctttttattcttttttctctaaacttctcttctcacttcatttcattcatttcatcttccatcactgataccctttcttccagttgatcgcatcggttactgaggcttgtgcattcgtcatgtagttctcataccttggttttcatctccatcaggtcctttaaggacttctctgcattggttattctagttagccattcgtctaaacttttttcaaagttttcaacttctttgccatgggttcgaacttcctcctttagcgtgcagtagtttgatcgtctgaagccttcttctctcaacttgtcaaagtcattctccatccagctttgttccattgctggcgaggagctgcattcctttggaggaggagaggtgctctgatttttagagtttccagtttttctgctctgttttttccccatctttgtggttttatctacctttggtctttgatgatggtgatgtacagatggggttttgatgtggatgtcctttctgtttgttagttttccttctaataatcaggaccctca

SEQ ID NO: 4196 - DNA, 597 bp, Zea mays
aaggcaatgcgccactctcgtagctagacatgtgtgacatgaacgatgcctaaccagattgctctccggcaagaccagatccaccctgtcgtgagcgcttcgccgctcaacaagctatttccttgccctctggccacccgaattcttccaagaatgacaacaccacgccattggaccagccaaaaccagtctgcaaaaaaaaaaaaaaaaaaagagctcaagtcagaagtcaaaacagaagttacatctctcgttttaatggttaacaaagtatcacagatcagcagagactgtaattactagaagataccaaggcagaaaatcgaatgagattgccagtcatcaggaatggccagactgctgatcatcatatcaatcttgagacaaaaaactttgaaagggcttttcaccatacctggggcttgtattctccaccgcctccagattctccacaagcctcaacatcgtacttctcatgcatcgcacccgttgctttgtaagcggcgtagttcgttctcacccacctcgtagcaatgtcctcagctagttttttggcctctgatccagaatgcagcagcccctcagctataaggtgct

SEQ ID NO: 4197 - DNA, 666 bp, Zea mays
tctcccgggacttggtagtttccgacattttcagagacggacgtggttgacagagggaggtgtcaaaatggccagacagtagacacagatggctgggagtacctcgggtgtagccgtggtgaccgcttccttggccttggactgcttgctgctcgtgcccgacgccttccgcttgcggcaggggccatcgcacgccccatcgcccgcgtgctgtttagcagcagcgccaggcgagggcgcgggcgcgggcgccggagcctgttcgcggagaagcgactggctgctggccacgcgcgagagcttcctaccggaggccgggaagcacgacagtctttcggcgcgctccgcgtccccggcgagcacgcacggcgccaccggcgtactgtggcacgacacgtaccgcgatgacggcggcgacgggacgctgacgccgagcctgctcgcgagctgctccatcattgcggcctcaacggcatctgctcctcctacggcggccgccgcgagcgacgatggcggtggcggtggcgattgcgactgcgactgcgacggcacgatcgcgcccaccgcagcctcgtgttgccaccccgcaccggcgcccataagcgcgtgcggcacatgtaccagcaggggatcgaacggcgcggcgccggcggctgcaggtcgact

SEQ ID NO: 4198 - DNA, 607 bp, Zea mays
aggatctcgttccacaggaggtgtactcctgatgagtgtctgtttttttataccctctttcccgctttaatgaaaggcagagctcctgccatttttcaaaaaaaaaatgtgcaaagttccagacagttttaaggtaaattccaatcatgtacaagggcttcagactcagtcagatgccgatgtacaaacatgttacattcgtgtgctgctgtgctttttttttaggaaagccatacgacgcactttattgattatcaaacatgttacatcgtttaccagtctgaagaataacaccagagggttcatcgaccccaaatacagtttcctttcaagagagagctactctgctagttcatgtgccacctgtgcgtttgtaaattggacacagcattctgggagcagtgcacggcatcctcgtgaaaaatgagaagaaaaaaaaaggatatttcttcactgcctccgtctcctttcatctccggtatacgtatagctggacaagacacacatctatacagatcgcatcactggtaaacttgcacagagtaaatgattacacgtccagctctttatgcggctacagctagaggtctttggctggtctttattc

SEQ ID NO: 4199 - DNA, 619 bp, Zea mays
ggagttgaccggtgcgaggcccatggttctgtgtaaccctgtagcaggtctgtcttctgatagcacgtgtacgcctaactttttttttcagcgccctgtaattcgttgagtagtccaggcttcgagttttctttcagccggtttgacctggttttaattagtgttgcagccaccgcgcgcatgattccaagagatcctttccttgatcacatcttcatcatagggctgtcctttcccactactgttttttagccggtcaattatggacaactcaacgcggattggagagatatatgctccacacacgaactttcttctcgtcaaacattcataaacttcattcacaagaaatccagagagtactctaatatctgcctttttcacatgccaatccttgttgctatcgtactgcaagcctgttcattaataacgagtactctaatatctgtcttttccctggggagaaaaaagagaactgcacaactgaccaaccaggctctccataggaagaaaaatggcacatcatttgtcatgtcctactagccatcgatcatccatatgcatgcataacaagcaagtcacgggcagataaaatagaaatccaatcataaaagttgtc

SEQ ID NO: 4200 - DNA, 702 bp, Zea mays
tccagtgccagctttgcatgcctgcaggtactctagtagtgtgccctgctagtgttcttaagcagtggtctaacgaattaactgacaaggttagcgaaagtgctaaattatctgttttagtctaccatggtggtgcaaggaccaaagatccacgtgagctggcaaaatacgatgtagttgtcactacatatacaattgtggccaatgaagtacctaaacagatggctgatgatgacgcagatcaaaagaacagtgaagaaccctctgctagcaataaaagaaagccatcggcgaatatgcaaaccaaggctaagaaaaagaagaagaaacttaaggactcaaactttgaccttgacagtggtccaattgcaagagtgcgatggtttagggttgtgcttgatgaagctcagacaataaaaaacttccgaactgtagtggccagagcctgttgtgggctaagagcaaagcggagatggtgcttatcaggaacacctatacaaaatgcaattgatgatctgtttagctatttccgttttttgaaatatgatccgtattgcacgtataactcgttttgcacaatgattaagcacccaattgctagagatgcaattaatggatacaagaaacttcaggctgtgctgaaggtagttctcctgcgtcgtacgaaaggtgataaaaatgtatttttactctatgtgtctt

SEQ ID NO: 4201 - DNA, 664 bp, Zea mays
gcatcaagaagttctccgctgcttactcgaacgtatgtactgggcaattcctattttcatacattacataaaaaaaatggagttcttatttatgattcggtgcttacaatggatcgtttctgcctcttgcagtgcgcgaggaagccatcctgatatctctgtcgtcatccccatcctagtagcgtagaaaccacctgcattttcattttgatctccctaatccctccggctagctgctttccagtgaccaaaagatatcaaagaccacttcccgtcttcctcccgtggctgtctgtcatctggctctgaaacgatggcagtcctgcaagttgctgctgctgcccctccccctgtctctgtgattgggttcgagggatttgagaagcgccttgagatcagcttctctgaggcacctgtcttggctgaccccagcggaaggggactgcgtgcgctctcgcgtgcccagatcgactctgttcttgaccttgctcggtgcaccattgtgtccgagctctcaaacgaggacttcgactcttatgtcttatctgagtcgagcctgtttgtctacccatacaagattgtgatcaagacctgtggaactacaaagcttctgctcgctattccgaggatccttgaacttgctgaagagctcctgttgccactc

SEQ ID NO: 4202 - DNA, 661 bp, Zea mays
gctcggtacctggtgggctcaccagtcgacctgcagccgctgtgctccgccgcctgcggccccgctcgatgcggccatcgtgcctgtgcttctcctccgcggcggcgacgaccaccacctcgtcctcctcgcggcgtactcgcactctcgtagaggtggccacggctggagaagacgacgaacgcaaccttggcacgggagctgggctacgtacggcacgtgtcgttcgcgaggacgatggcggccaactcggtcagcaccgcgacggcgaggtagggtgcgtttggttgtagaatggaacgataccttgtttggtcagagttaaagattagcacagccttaaaattgaaacgctgttgtcctgaaaccgaacgcatctttgcgcgacagcaggatgtcctgacgttatttgtcgtccctccaatttttaagagataactgaaacaacactgtaataattctgtcccaaccttttaaccaaataaatttatttgaagaatcgactcatctttgttttatcctattattgcaatcaaacatatgacttgacgttttaaggccccaggcccaagcacaacgcagctcacgttttgagctcgtgtgtttaactggtttacgccgcgcaaaattctcgcaaaagaaagcagcggtgtgtcagtgt

SEQ ID NO: 4203 - DNA, 624 bp, Zea mays
tgccgatctggaccacctccgccatggacggccggttcgacgggatctgcgacgtgcacaccatgcccagcttcagcaccggcagcacctcctcctccgggacgcgcccgcccatgcccgggtccacgcactccagcgcgttgccgtgctccagcagggcgcgcacctggtccaccagcaccaccacgtcgtcgtccccgtactccaccgcccgacgccccgtcaccagctccaggatcagcacgcccagcccgtagatgtcgcacttctcgttcacgcgcaggctctggcacgccagctccggcgccacgtacccggccccgccctgctggaaccgcccgccgcccatcgccacctgctgcctcccgccgccgtccgccagcagccgcgccagcccgaactcgcccaccgccgggttgcactccgcgtccgcaaggaagatgttgctcggcttcacgttgtagtgcaccagcggcggccggaacgcatggtgcaggtgcgccagcgcccgggccgtcccggacaacacgcggaaccgctcctcccacgtcatcgcctctccgccgccgccgccgtgcagccgcgcctccaggctgccgcgcgccgcgtagtccgtgatcagca

SEQ ID NO: 4204 - DNA, 614 bp, Zea mays
attattccggccggcggcttgcaaagcattggtggcgtcgtcggcctcgtcacacgggtggccgggcagtgaacagcgatggatttgtggagcacaggcacagcgcagtagtagttagtcaacaggtggaagcatgcatcaatcagctgatgagcgtttccaagcgttttccatcacacgtactgcgccactgtcccttgagcagccacgcgtcctcatcttaatcgcccagcagagacagagagcaaacaagcttcaacaacaacaacaacaacaacacagacgacaacaaaacgcagagagctgtagaccacacacacacacacaggttcaaggatactatataaggatgacgtgtctggaacgcaagaatttctcaggaattcgacatatatgtgtgtttctacgacgatgccacagtggtgaaacgatttttttgttcaattcgaaaaagagcttggtttgtgccttttggaagagctagctagctagcgctttcgtgccatggaatgcattggctgtacatgaatcatcacacccttcagcagcataattagtcgagagtgtgtgcatgagtagtcgccagtcgggtagtacgactgataagcaagtgt

SEQ ID NO: 4205 - DNA, 1245 bp, Zea mays
agcaaggaagcttcatgctgtgatcatgcctcaagacccagccaattactcaaatgtacagatagactagggttatatactaatggattccccatcacccggcacatggcctgttccccccgcttgaccacatacaggttgccaaatattataatgacaattaacaaacaggttaacttacaaggtaccataataataatagtctcattgatgccctttacttaacaatcacacaagcttgattaacaacactgggataaaatcaccaagtagattctgggacacacggtaggggacatcgcataacaccaatccagctacacacagatagattattgcttctggtccatgaacaaattgaacaagacaggtctccctccaactagtaattaaaacgcattatatttctagaaaaaaccgcagcacactgcaagggcaccattcttttgacacaatgggcagcgtctttaacgctgtatcttcttcagctcctgttcttgcacttgtccttcgttcttggtgctgtattttttaaaaaaatgaagaaaacataggcggttagagttgacatgtaaatcttataatggaactatggaagataattttatctggagacactaaccaagacctatggcttcagagctcttcatgatcctcagacgcctgcatgactcgacaaacatcctgcagccacctcttcccatctaaacaaatgttatatcgtcgctcaagactcggtcccatatgtatttccgtatatttatctgttgaacatgttatcgttttgtagactaatattttgtatcatacaacataaatacaacataacaggtcaaattgacatcctcaaaacttgccacgtgtagttgcttcgatcttaagtacatgcatacaggtgatgaagcagcagaaagaaaagagggtcaaggtatgctagtttacgttacattaattattgcacacagaacatgaattcgcagcaaacaaaacacaattcacttgtttggtgaaatttaaaaaaaaaacatttccccataaataagctctaaataataggtcagtcaactatcatcttttaagtgaatcttattttctgaatatatctacataaatgtagtcatgtataacttgaacatgcacaaaaaaaaaatggaactgtaacaaaataataagacctcctatttgtttgggttcggtcaactgatttgttattagtgtccggaacccaaacatgacagggttgca

SEQ ID NO: 4206 - DNA, 670 bp, Zea mays
atcatactgtgtcaactcgtagaatgtacgattataggccatcctcagtacgtgccacgagatcgatcgagcactccaccttgtcggcaacccgtcgctgataggcacaagcacaaccacgtacacgacgcgtgttcagttcaagagcagtgaaggccgaagagggtggcgtggatcgccatgtgggtagcggcatgcatatgcacgcatgtgggttgtggagacgccgagacggggacgagagcggagtctgtctgtgcactctactcgctgtcgttggaccatcaacgtcatccgagttaatataagcgatgggcgagctaagtgctggcgctgttcatgaataaatgaactcgatggaacggtttccatctcgtcgcgacagcgatgctgtgtcgaggaacgctgcgaggccagttctagccacgctacctgggttcagtcgcggttgattcgtgctttacgccgggtcagattcggttccaaggagctcatatattactctctcgctctctctctcttttatttttacaaaaaatcgtttgaaataaaagggaattgattcaacggccgaacattggtgcggcagactactgccgtcaagctgtacaacatacatggattagaatccagagaaacgcctttcagagtctgatctgatgaggcccgt

SEQ ID NO: 4207 - DNA, 689 bp, Zea mays
aggtcgaccctcctccgtgaccgtgtctccgtccggcccccgccaccaccgcactcccatccagatgggagtgcgcaagaggagctttcggcattccggtctcgctcgacctgccggatccccgtgagagtccccacccacaccccgagggcggcgtcgggtcgtcggggacagctgatttcacacgacgagccggcgagccggccggcatttcgtcgtcggatggcgccggcctcctcctcgtccgccggcgtcgcgtgcctcgtcctgctcctgctcctgctcctcgccggcgcctccgcggcgcacggctcgttccaggctaggcgtgctctgtcaggtgcgccacgtgcggggatcggaggctatgtgctcatgcttaatttgttatacattatataactttgcgccatgtgttcgaggcttcgagcagatgaccatgggagcggtatagtggcgcgatggcggaggttgctcgccgacgctgcgactccagcgaacaactctcttgtgctggctgcggcgaggactcaccggagcgaccccttcgccaaccttaccgcgtacagcggcggctggaacattagcgacgagcactactgggctgtacggcacatcacatcacatccaacgatgtcacaatccttcgcctcatcttcttcctctctcgccgctcatccgcgcttcct

SEQ ID NO: 4208 - DNA, 647 bp, Zea mays
ttagtagtattttgctttcatgtcattgtggaatgaagtttatgagctgcttagtggtttaaacgccaccataggtctttgcatttatgttgaattatatattgctcgagcacttaaaactttgataactaatattgctttccacttgcatctcaggtggctacattgctagaagttctgccaaatcgcttgacagctgatgtgttggagcagcttcgtctaagtaaacaagcattggtataaaactgcactctggaatcaatttcaggccacttcgcaaactttattttgattttatgtatgtattcatgtgtcaaggttgagctgggatcacgagcaggtgacctcaagcagatgcttatcgatctcctagatgatcctcatgaaatcagacgaatatgcataatggggagaaattgcacacttgatagattgagtgatattgtggagtgcactgttcctttagagaagcagattgctgaaggtacagctacaatttatcattgtaactttgcatatttctggagattatgacttgtatctatcttggtaaagcttgcatctttacttcgttagctggacacttaatatgccaaccgatggcatgttattagactagttttctagtaaaacccgtgacatatgca

SEQ ID NO: 4209 - DNA, 650 bp, Zea mays
aaacatatcccagtaggccttggacggacttccccactgacgtctgtaaggtggtacaaaatctgattgctgtagccgttactactaagctcggtgatggagccaatacccttttttggaaggacagatggttggatgggagatgtattagggacatggctcctgcaatgtttgacatggtgcccatgcgtcttgccaacatactattggtcaaagacgctctccctaatctccattggatctccgatgtaaaaggggcaattttagtcagagtcattgctgaattcctggaactttgtgaagtgcttgaggtagttgttcttcggcctggagtaagggatcgacatatatggaaatttagtgcttcaggggattatacagctagttctgcttatgaagctctcttccatggttcagttaagttcgaaccagcagaacgagtgcggaaatcttgggctcctgggaagtgcaagttctttatttggcttgtggaacataataggtgttggactgctgacaggctcagaaaaagaggactagaccagccagagcagtgccccttgtgcgaccaagaggctgaaactataaatcacttgttggtcaaatgtgtttttgccaagcagttctggtttgatttccttagttcagtg

SEQ ID NO: 4210 - DNA, 612 bp, Zea mays
agtttcagtcattattctcaggtcagaacgaaggcccatagcaactgtagatagataatctggcacacttttgttcttgttggaacaggcagatgtggagatagatttcgagctcacatccataggcagtgccgacccttttgacccttcctggctcttggacatcgagaagcagtgccgggaagcgggcgcgtcggctcatggcccgttcgggctcgtggttcttgcttctgagagcatggaagagcacacctccgtgcacttcagagtgtactacagatcacaggagaagcacatggttcttatgtgcgccgatctgaggaagtcagtatagtacacatgcacatttaatctaggaacgacctgcttcatgttcgtcggttcattaagcagcagagccttttctcccattattgcagatcgtccttgagaccggagctgtacacgccagcctacggaggcttctttgagctggacctggagaaggaaaagacggtggtatctctgagaactttggtgagtggagctgagcaaacacctcaagcgcctgttcttcatgttgtcgtcgtcgtcatcgtcgtcgtcgtaggaaatggaataacagcagcacct

SEQ ID NO: 4211 - DNA, 620 bp, Zea mays
actattttgcctatgtagaattttgttttgtgacgtattactgtttgtacatcacctgatctaactatcaatcacatacccaatgatgggcagggtgatattggtgacggccaagacattttggtgagggtgcactctgagtgcctcacaggcgacatttttggatccgcaagatgtgattgtggcgatcagcttgcgatggcaatggagatgattgagaaggctggaaggggtgtattagtctatctccgtggacatgaaggaaggggtattggtctgggccacaagcttcgtgcttataacttacaggatgatgggcgtgatactgtggaagctaatgaggaacttggtcttcctgtggactcacgggaatatgggattggtgcacaggtaatactgaattatctctcaagttacggtggaacctttctccacaacacttcctttctgctgaagtctgcttgtataggaaagttgtatcatatatctttctagagcttcaacatgaatttacttggaggcactgaagaatttcatgcatgttgcagcctgaaactgtgatgtacatagaatgaagtaaccctatcatgcagtgagtaggccactgacatttcactact

SEQ ID NO: 4212 - DNA, 622 bp, Zea mays
tgcatgtcctgcagacaatgtttgcactcccaatttctccagatgtggagaacttcacgccctccttagtcaccgagatgacgactgcgacaagataacgccaactgctcagtcaacaaagacttacaccatccatggcagtaaaatcaccaagaaaaaaaatcttctctacctgtgtctccgatgctgctaagatctttgcagatcctcataaactcagcagaaggcatgcggacgatggcctggtactcggaatccgggattccgaggtgctcgctatcaatgtccatcagtttcatctcgaaatccgcgatcttatcttgctctgatcatttccacacgggaacaacgacggtggttggggtgaaagagcgcccagaaatagtgaagaaaaaaatagagagaaggaacggccactcactgggcgactcgaacatgaaagtgacggtgtcggagccgtcgtcggccttgatggtgatgatgtcctcgttgccagcgcagcggagcatcttggccatgttgttgaggttcatgcccatggagaggttgcggtcgcagcggtagtgctcgaagccctcggcgcgaaggagcagcgcgacgagcgcgacgtggctcgagtcca

SEQ ID NO: 4213 - DNA, 603 bp, Zea mays
ctgcctgcggcagctctaacatggctttgaaaaaaaaaactcaaccaaccaatttctataatctaagaactaacaactaagcatacaccattgttggcaacctcaaaactaaccaaagaacaataaacgagttgcctcagatttttataatgtagcatataaataacagatgcatatgcaaaacttcaaataaacagcatgataagaatcttgcaaaaacagaataatgtcaaagaagcaaaggaacacaaatccaaagcgtatcacctgagataataaggaaaattctcaaaggtgacatcaatatcacttggattgataattccttgtttcatcccatccttaaaggcttggcatctacttggaggcacgttggttgaagcgttaagctccctgatgatgtgatccctctgatcttcaagagctttaaaaagatcatcaccagtcaaatcgaactcggatatagttgatcctgtaatcatcctcagaactggccttatcttataggttgcagtcttaccgatttccgcaccgagatgagcatcaggcaaaaagccattttgttgacatgcatcgttcgcagcagcatcaggagatatgggg

SEQ ID NO: 4214 - DNA, 628 bp, Zea mays
agtttgtttaaatagatacaacatcggtcatatcttcttggctgctgcattatacatgggtagttctaaattttagtttggtaagtgtagctagacgcgaaagggcctctagctgagttggttaggtggtctgagtagcactcctcaggtcctgggttcgactccccgtgggagcgaatttcaggctgtggttaaaaaaatcccctcgtctatcccacgccaaagcacaggtctaaggctcagccccggtcgtggtcgttctcacataagcttcgatgccgctgtgtatgggtggggcaggggttcgggggttttcttgacctgtgtgagaaggtcttcttcttaatacaatacccgggggctgtcttaccccccgcaggtcaagtaagtgtagctagacatgtacaggtgttctgacctgtcgtatatttcaatgaatcctatggtgcagggttctctttccaggaattacagtatgggttaacaagtgggaaatcgtgcactaacgatgtccaatagaaatcgagtcgtcattcaatatttgtgaacagaactgaggatgttgtagtcaccaccagtcaaatagttgaatattctagtgatgactctgaagatgagattgcaaata

SEQ ID NO: 4215 - DNA, 567 bp, Zea mays
tccctcccagctcctcccagtggttaaaaacaacaagtgtaccatgcataatgctgaacttaaccttgatggcctgttcttttttttttcagacactgtcgtcctgggcaacttcaagcgtcgaggaggttgcctcgaccgggccagggatccgcttcttccagctatacgtaaatgcactggcaccttcactaccactcctgctgctacacagcatgagtatatatctagctagctcttccttcaccagcttattattagcttgtcaatggccgtgcatgcgtgcacgcacgtcgttgccatgaatgtttttttgtatataggtctacaaggacaggaaggtggtggagcagctggtgaggcgagctgaaagggctgggttcaaggccatcgcgctcaccgtcgacacgccgcgccttggccgcagggaagctgacatcaagaacaggtgagatgggctgggcctgggttgtggcttcacacaataacagcatttgcttgatttgccttttcataacagctagctccatggaagcaagctgatcgtattcgtacgtggctgctgtt

SEQ ID NO: 4216 - DNA, 646 bp, Zea mays
tatttagagtgagagcccttttggcaatgcctctttcaacgctctaactctggctcatcttcaagctctatcaaacggtcataaaaaaatagcttcttatcgaaagcccttcaaaagagaaagagcataaaaaatatagcttctaacagatcctcctacattttactcgcacatcttttaaaataaacacaagaaaactgttttaccaaatgaattgcaaagcagctctgactttttagagaaaccaaagagccaggggagtcagtgctgaaactgtttttagaggaaccctgtttttagaggaaccggagccctaccaaacggcccttattctagatcgggcctataagtcagtgacccaaatgcaagtgaattgcaggtgaattaattgtagatgatcttgttgtgtctgaagagggagggctcaattgtaattaacatgtttagactttagagcgactccaaaagacttctataaaattgttccccaaaacttaatattaggggctgatgtaaaaaacgtttcctaaaaaattctaaatccataacagactattaataaattaaccgtaaattttttgaaacaacctaagcgcgagtcagagaagacacatgaattgggctggcattgacgacattctcgcca

SEQ ID NO: 4217 - DNA, 678 bp, Zea mays
cggtacccctggatcgtgctaaactcgacctgcagtttaatgcctttgagctgcaatcccatgcattctaatctgccaccagatgtcagatggtgggttcagtcacagccaaattttgggatccagaaggatattgttagcaagcggttatgttcgttgggcagggacattcatgagaagcaagtggaagattcagtgccacaacctaaacatgaggaaacattactctgtcaagcagttgacaccagcactgaaaagattggagatgctttggagcctccatggatggtttcgccagccttcacgaagtattcccttgaaacaggcttagaagagatgaagactgttggtagctattctcaagtgtcgaagtgcatagaaactctcagcaattgtttgtacaaggataatgaattcccagattttgaatgtattgacccagcacctttgaagaacccagataaggctaattttgacatagatgcaccttggaaaggtgaaaagactagaccatggtggcagattgctgacgaggaccagctggctttactggttgcagaaagagcaacacagcacattgagaattgtgacctaccaaggcctacccagacagtacgcattaacaggacagaaccatatactcacaaacatataggtgactttgggggaccttcatct

SEQ ID NO: 4218 - DNA, 653 bp, Zea mays
tcctgcagaggccctagtctggtcggcgcttctgcctcgtgagctctatggctcctatgtgtctagggcagaagtatagtgcttcattgctataatgggctggtgttactgtgttaggttgtgttaagctggtatggtcttcgagattttggaacacgaccctcgatccatggaaacgactcaagatcattgacccatcagactcgggttcacgtaccaaactcccgattcacgtcccatagaggtaatacccccttgtaccaaatttttttcaagtgtcgactcgcgaccctattcctcaatccaatcgacccgagaacattgtgactatgggtcgaagttagagaagattgaaataggacaaagttaaaacggcttacttggtcaaagtatgtattttgtccatcttaatttccatgatagcctgtccaagtgaccttcatatactgatgattttacaaacagcattgcaagcttgtgtacaccaaaaacggtttcaatctatgttgccttgtcctaacagtcaatgtttgtgtggaggtttgtgtttttatagtgaagacaaaaaaataaagattatattatgagcatgggtggctaggagaatctttggcaattacattatgaaattatgatgtacctcatctgtgaca

SEQ ID NO: 4219 - DNA, 620 bp, Zea mays
atggaggtcgaccggcagccagccccagccgaggcagcagccaacgtgcacgtgcacgtgccgatgcctgcccggaggcgcggggaccagatggtgcccaccatgacgacctcttcgctgaacagagctggaacagaggtctccgccgatctagtagtagcgaacagcgaggaggaggacaccagggcgcaggttccgttccacgcgcatctccatctccacccccgagccgaagccccgccagctgcgcgtagaaccaacaacggcgctcgccagcacgacgtcttccagcagcgtcggaaccacaggcgagatgctctgcttgctccgtcggcgtcggaggcttcgagcagctggaccggcagagagggcgccgtggtcccggtctggtcgcctcctgcggcgtcgggccattcggacgccttcgctgccgacgaagctgacgtctctagtaggagctatctgggtaggcatccgcagtcgcaccgcctgatgaactggagccaactatcgcagtcatcgtgagctcggatgcacggtaacccattttgttctcactaataaagtcgcgttgttgttgttatgattaatagtagctgaaatcgcgtctaacatctggt

SEQ ID NO: 4220 - DNA, 640 bp, Zea mays
tcatctcaagtgggtgcggcaaccatgcccaaggttaagaatccccacgttttcatggacatatcaatcagtggaggcagcgccgagaggatcacatttgaggttgtgaagcttgcagcagcatgcgtcgtctgttttgttttcataaggcttcactattttcagctaccgaggacatggtaacatgcaccatattaacttacggcgattgttttgcagctactcgcaaatgtagttccaaagacagcggagaacttcagagcactctgtactggtaattctagtttcattctgtgaaacagcagtatgcgtgcgcccgtgtcgagccgtttctgtagcatatgttcgagttctaagtcttagcctctgcggctctgcccaacatgtaggtgaaagtggacttggagcatctacacagaaaccactctattataagggaacacatattcatcgcatagttaaagggtttgttgctcaggtatttaaagattgctactgatctgggtgatggtacattgaaatcttttatgggactgggatactgagctatatggaatatgcatgcaattgacctttcttctattcatgcagctttgcactttgaaatctcttttctttaaactaaacttgtcaaatttcc

SEQ ID NO: 4221 - DNA, 615 bp, Zea mays
  unsure (1)..(615): unsure at all n locations
cttgctcctggcgtcctacactcggcactcggcatcaagcagccaagcaccaagcaccaagcaggcagccaggcgcccaggcaccacgctgtcacgcaccagcaccaggcagcagcacagcacaggctgcgcactgcgcaggcacagccgcacagcactcggcagcaccagcattggtattcaannnnnnnnnnnnnnnnnnnnnntcttgtaaagtatgcataaaggtcacgtctctcgagagtaatccaacacgaaacgccaatttttactagtatatgaagatgacgttcctttttgtgagtttgtgtgaaagccgtatctgtttcgtgtgcagcagcgttaaagtcgcgcgcagagtatgaagagaaagaaattcagtgaatatacaatagtcgtagctagtggaaagtttctgcggctcaccgtgaagagtgaacggagcgtgtcgcgatccaggccggccgtgttgtcatcgtcctctgcggcgtccagcagcaggtcgaggaagtcgttcttcttgggctcgccagcgtcgcggccacgcagcctcgcgtcgatctcttcgtcgaagatccggtgcagccgcgcgaacagccgcgccagccgccgccg

SEQ ID NO: 4222 - DNA, 691 bp, Zea mays
acccttagagtctacctgcacagatcaccaagatagaggagaatctcaagcatgccacagagctgaaacaagcatggctggaaaactacggccaccatggccaacagataatggaagctgagctttcccaggactacatccctgccgagcccagctgggaccaagattttgtcgggatggacggcaacacaacactggtgactgaatggctgcgctctgctagcgattcagaaagcacgttcatgacattgctgggcgcgggaggtctgggaaacaccaccctagccatggacgtgtacaagcgcgagaaggacaggttccgtgtccacagtttcatagctgtggagagggactgcaccatggatgccttgatgaggaagatactgttggagattgggagcagcatgaagcagccgccctcggaaagcgtcgacagtatccccgccaaccaactgaaggaagaagcgaagagaaggatcagcaagctcagagacggaaggtgcttgattgtcttggacaacgtccgggacccgagaatttactttgagatgcgtgatgtgatgagcaatctgccaggagttcgcatcatcttgacgacgaggaagacacaggtcgcagccgctcgtgatccctcgtcgtcacgtttcctgcaactccagccgttggaccacatcgacgcgctacgtctgtt

SEQ ID NO: 4223 - DNA, 597 bp, Zea mays
gacgaattatggagaagagtaccaaaaacaacgatagttcaacttagattagagtgctatttgacaatgaactatgtgttgcaagctatgtctatgttatttaaattttggaacttgtattagtgaataataagtgaccttgcagagctaagagatcttgcagagtgtcggcgagatcttgcagagctaagacatccggtgcaaacctctcttctccccacaaaaaaaatatagataaattggtcaatccggagttccggacctataatgctccgctggaaaaagacgttttaagtttcagttcgtttactaagctctccccaatggccaatctccctaggtcaaaaatgccacctcgagatgcccagcagctgggctactcaaaccggacagtacttacaaaactaatagccatgctagtcaactggttagtgtatggccatatgaagatctacgagcagtagagatactcttattcagtaattaaccctgtcctgctgatagcatcagtagctcagtgagcacccagctggagtgtagcttacgattagtggcaaatccaatgcgtatcggtcgactaaaacaaatactacaatt

SEQ ID NO: 4224 - DNA, 612 bp, Zea mays
aaacaacaaaaatttcagaaaggtatatcaaagtgctactgatttaagaatcggcgaaggcataaaatgttcacaacttatttgacgaagaacaaaacattaaccatttgaatattaatatgaacaaaacaccaaaaaaaaaactatgccggaccatgaacagtaggccatgtatgcgggctactgtgctctatgccaggcctagttggtcactgagtcattctctttcaaacctaaccaggcctgaaggacagggccaggacagcagactaaattctacactggactggcaaaatttatcagtaaaggtgctgggtgtcatcccacaagatttagaaaccatttaatatggacaaaataggttttagctgtagatcttgctgctcagtgtgtcgttggaacctggaactgctgtggtaatcctaggatcacttgcagagtccttgtacccttttcaagctctacttcctcttaacaaaaaacgtgcctcactgtaaggtcgacaaaaaaataaatgactcctactagaatgaacataaggactttacttctattgttggcaaaacatatttctttgttaacaggtttttacatatttttaagtgatagttt

SEQ ID NO: 4225 - DNA, 606 bp, Zea mays
tggtgcgcggccgccacgtgcgcaagcagctctccgtgacgctcaagtgcatgaacgtgctcgtcagggtccaggagcgcgcgcgggaacgccgcttccggatctccgcggacggccgccactcgcaggacatcctcgacgaccgaagcggccttgctgatcctgtcaaggaagcagaggtatgaagcaagcccttcaaaacttgctttagctggtggcttcgctggcataaggggtttcgcacgtttgtttcgtgcggagttctgccatagcccattgcagttgcgttgccttctttccttgtgcttacttcgtagtactgattattgagttgctctgcgctacgcctgcattatgatttacgcaacatgttcatatgtactcttcatggagatttgcaccagtaaaatcacatctccatgatgtaggaatgattttttacattaacgatgatgattttatatattgtttggtgttgatcatgtgtgtttgaattaatcttggtagggtcattgataagtaagcctgcgtctgatgatgccaccaataatgcatccttgcaatgtctttgatgtcacatttgttattggtatagatttttcgtta

SEQ ID NO: 4226 - DNA, 613 bp, Zea mays
gccgcatccttgcatgccattggcggccacctgccacctccggcaggaaagaatgacttgtggcagtaaaaaaaataaaaaaaaacaagatctcccctctctctctctcctctctcatcaccagctagtagctgctgcttctgctggatcatcggttgtagtactgtactgctacgtacgtaccggctctgcacacctaccgccgcggcccgcaactaccttaactagcgccgcgcgcctccgtggccacgatcgagcgtcgtcgtcggccggagcttattagctatggcgtcagcaaacccatgcacctagctatatgcatgcaagctagatagacgatgaagcagagaaagggggtgaacggatggagtccgcgtgtgtgcgtgtgtgtgtggatgatgagacagtggacgtgcctcgtcgagcatggagatgagcttggccttcttgcgctgctgctcgaaccggtcggcgggggacagctgcgggggctccttgttgggcgcggacgacggggactgcgcggcggcgccggagctggaggcgccgcccttgttgcccgggttgttgttagggttagacgccgaggcccctcgcccgccgcccttgatct

SEQ ID NO: 4227 - DNA, 1235 bp, Zea mays
tacggccgtaagctcgccctgcgaaggcagagcagcgtccgcaggaccgtgaaggccgccctgtggatgaagaagcgctccaaacccgtcatcaaggtgcaccagttcaccgtgctcaagctcgaccagttccatccgcggcgggtctggatgctgctctcgcgcctgctcaagaggcgcctcgtcggtctctccgacgtcgtcgtccatgcccaggccaaggaggccatcgcggcggtcctcaaggacgtcctcgacgtcgtcgacgacaacgccgagggccagttcagcaacggcagcaacgcgttgcggcgtcgcggcggcttccggcacctcgagtgggcgtgcgaccaaagcgagggcgccgccacggtgatcctggtgtggcatctcgcgacgacgctactagaggcgagtggcggcaagaacgacccgctgccacccaccggcgaggcagccctgatgctgtctaggtactgcgcgtatctcgtggcctacgagccgaggctcctgccggatgatccggcgtggacggagaaggcgtatcgtgacatcaaacgcgagctcgccggcttcttccagggctgctgcacctgcagcgtggcgcggctactccccgccatggccaccacctccgtcgccgcctcctctccccatccccatctgtcccgcccccgccggcggaactccagcgccacctccagaacctcgatccggggctgcctcctgcccatccgatgctcgtccgcctcgtcgtcgcaaccgccggcaaccggcggcgaggagggagagtcggggcgccggcggctgtcgaagcagtcgtcgtgggaggacagagatgtggagggggacgactacctctaccgcctcgggaaggaggctgacaacttgaacatcaccgttggcgcacggtccggcatcgtcgacgaactcttcgtcggaaacttcctcgggaaagactgtacgtgctctgaaaccagatcggctctcctacagtccactgattccatgaagcgccgtgaatcgcaaaaatactaaatcgacatacctgcatttgataagaataaagaacaatgtttgctcagcttagttcagtgtactgtttaaacatattgatatgcttggaaacaaaatcaaagggacgagttaaaagattttgatagcttggggtgcaacgtggttgcagcggatatcgtgttcgactaccggcagaaggcaactagaacgttcgagta

SEQ ID NO: 4228 - DNA, 561 bp, Zea mays
aattatctagaaaaaagaagcttcatagaatctctatttgtgccgatgatgtggctttatttctgcacccctctgatgctgatatctccaccactcttgatattcttaacctttttggtgatgcctctggccttcacaacgatgctaaaaaatctaatgtataccctatcagatgctcagatgagaccatcttgtaggtccaaaacaggttgacatgtgaaatttcttcctttccctgcaaatacttgggccttcctctttctttgcacaaattaaccaagcaacacgtcttgcccctggtggaaaaaattgctaatcatctcccacactggaagacagaattgatgaacagggcaggcagaagagttcttgtgcagcatgtccttactgggatgtcagtatttgtgaaaatggctattgatttccaccaatgggctattgatgccattgataaaataagaaaagtttcgcatgtgatgattatggctgaagaaaacagatcctacccagccttgggcagacctccaatacaggttcccagtaaagccgaatctttcttct

SEQ ID NO: 4229 - DNA, 609 bp, Zea mays
ggggcccctttagagtcgacctgcaggtccacataacagacacctcgcccttgaaaatggaatcgacaactgtgggaacatcatcctttctcacatcaggaagcttcttcttccgttcctcatcgatcaacccattgcgcacatggaccagaagttcttggcagtcttggtgatcagtggtcctgtaccccgcatccaataggcatatactttccatgagtctccgtgtgttcagaaatgctcctgcatcattcccagacctcgtctccaaaaagagctccttcagcgcaacaccgaggggccctgctggagcacgaggtcctagcatcgacatccacagatcgtcaagcgcaaggaggcactgcaccagtgcattgacgtagcatttggctctgaagttcggcatccctctgacagcatagccatggttatgggaacgcgctgctaaggcgatcaccttgaggctcaagctgtgggcacactggaagcagtaagcagcatcgggttggtctatccacagcgcaactggatggcaagctgatttggcatggagctgcgcatgcccgattggtccatcctcattgctcgccagtccggcgcagaaacact

SEQ ID NO: 4230 - DNA, 672 bp, Zea mays
gcttgcatgcttcagagtcacgggcccaaggttcaggacgacggcggcctgcaagtgccgctgctgaaggataaaaaacgtgccggcagcaaggcgccggcggttgttctcggtgagcatcgcgcctccagcatgcatgcatgttcagttttcctttatttttctcttcaaaacagaatgtgctcaaggctccaagcacgagatgctagtttcgctatgatgatttagaaaaaaaaagacaaaatgaaaacgaatatagagaaccttaaacgtcttagcatgtagcagtatatagtactgatcactggagctcgccgtgcagggttcgagtgcctggagagcacagcgttcaatggcatctcgaccaacctggtggtgtacctggagaccgtcctccatggcagcaacctggccagcgcctccgacgtcaccacgtggttcggcaccagcttcctcacgccggtcttcggcgccgtcatcgcggacaccttcttgggcaactacaacaccatcctcgtctctctcgccgtctacctcctggtacgcgtgcacacctcgttcatctccatccatccatgatgtccatgctacatgcgcatcgatcagacacggcacgatgctaacagatccgttctatgtctgcctgcctgcctgccgcgcgtgccattatat

SEQ ID NO: 4231 - DNA, 650 bp, Zea mays
aactctaccacctcttcttgctcacgcctgatggcactgctgctctcgttcctgcttccgagcatgctctcggacacgccttcggcatagtaccccgtgttcttaggcttcttggctgggcggctgccgaccatgtggatgtggtggtcctggcttgaccatggggacgcacggccagacctgtaacaccccaggctctcctccggacaagcggcattgtcccctgacgctcgagcatggttctcttcctcgcctcccccgcccccgcctggtgttctgtcaccggcgccaccaccgacggacggcgaatttgtgccgtctttggggccgaaaagaacggcgagcgcgtcctcgtgcgcgagcgccttgccacggaagtcttctgctgcactggtctcctgcaagccagcaacggcgaattcgtaaggtaagaggaccgaccattcagaataaaccattctgcaatttaataacaaccacagatgtccagctaacggtggcactgttaaactcacagaaagcaagaactggcattaagcacaacgggctgtacttaccgtgatctggttgtcccatccgtcagcatcctgtgtaacagtgctcgaactcttgtcccacccgcctcctcctccaggtccagccttgtcgtt

SEQ ID NO: 4232 - DNA, 660 bp, Zea mays
caggggactggttgccggacgagcctgaatgcgcggtcgggcacaggtcatcttcatggttggtggaagccgacgacgatggcagcactgctgattgcgcctgctgctgtggccgtcgagtggcaggtggaggtgagatctccttgccaagggcagacgaagacgatgacgacgagcatccttcttgcgagccccgcgactgaggggactcttccttgcatggcttgaggccctccacctttgggttgctaacgccattctgctgccgatctgaaacaagaaaagcacaagcacaaattggaccaagatctgatgaaaatgaaaacattcagaggccaggccacacacacagaaccaatcagtcagtcagtcgtggagatacctagcggcggcgagccgtcatggagctcggagcccttgaggatgtactcgttgccctgcgcggggagcaccaggtcgtcgtcggacagatcgtgccacacgaagccgttcttgtagctcctggcgatgccatgcgatacaaattacaataggagggaacagcagacaaaagcaaaaaacaaaggttggcttgcgaaatgcagcagtacctcttgcaagaccaggaatacttggaggacatgcccttcccgcgcagcacgttgaggcggttaatcacat

SEQ ID NO: 4233 - DNA, 611 bp, Zea mays
agcctaacccttcacaggcaccagaaccagtgtttgcgctctccatgatctctctgttatctgtgcaaatactcgtgcaataaccaatgatatctgtcatattatcacccaacacgtagacgtagacaccacatccaacagtgtacagattattattattatctgcataaaaactggcaccagtggcagtaggggcctcccaagacttggtgtaggtgtccacgcctgcgctcatggtgacgttgaacccaacagctgaagccctaacccatattgttgccgacatctagagaagtcacctgaatcgagctgttccccgacatgaagaagagcctgggagaaggagctgtttgatcgcaggtgagctcgaagccttgacggaagcagcccggccctatcccgaacgggtacgagatttgtacatccccgcagcgagaggggcagtgcgacagggaggcgttggtagggatagcaaggagcccatccccggtgccggcggcagcatggaccttggccggcgctcgcgccaaggcggccaaacacacaagcacaacgcatgtgcgaactagcagcactgcaggtcgacggtagagctacccagggtaccgaga

SEQ ID NO: 4234 - DNA, 665 bp, Zea mays
agcctttgcttcacaagttgataatagaggttcaagactacgatcaattccgtcatcaggataacactatgcaattccaattccattgagagataattcttattccccatgatatatgcagccaccggatctaaactgttcgccaatgggtctgactagaatggtaccaatcataccacgaacatcacacatcaaccaatgacacaaagatctgccactttgtggtttgtgctgccaaccaaactccatttcgcatgatatttcaacgtgatcccagagcatcttcccagcgaaaagcaggggcggacccagtaaataacatgggtgtacatatgtacacactaaatatattttttttttgcaaagtagtcgaagttaatagccgtgatacatgcatatgcacttgtaattagatcagatccgaatacatatagacaaatagtaagttagggtttgggtgcagcgtctcgcacagcatgaaggggagaccaaggggagggcgtaccttctcgtgctcgtcgccggcgaagggggggcaggaagacctgggcaccgtaggcggcagcgacggccgccccggcgtcgccacgagagagaaaaagaaataagctgggggcggcgatggacgaagaaaaaaaagcagactgcgccgctgcaggcatgca

SEQ ID NO: 4235 - DNA, 567 bp, Zea mays
atctaagctagttcggcgatgcccaaaccataaaattgctgccacatacaacacatgtatatgcaatcagatttgcatagcttaaccgggggaaacagccgcacaactgaactaatctgacaggatctcctctagctcagggtcctcctgtctgaccgcagaatcatcgtcaggttcagtgtcaatcacctctcctctcccactgctgtccggatcttcttctgtatcagatccatctgcctcttcatcagtataaacaggatatggtggtctactaatgccaatggttttccttattccactgtcagttacaggttccaggttatttccagaaatggacttgactattgctgagtttctgctggtcttttcacatatacaggcggcagggtttgcatgaaattcgcctcttcctggtgtgatttccatgggctctcccatatatcctttctggattgttcgcacttgtgaggcaaatgcatcccatgacatatttcccctcttcatgaataagggatagagctgtttagcatttggccggattgttctcttgtgtccaaaatatct

SEQ ID NO: 4236 - DNA, 605 bp, Zea mays
ataccgtttgcgtacaacagcctgagcagtgagcattcgcaagcgtcctgcgctctcagctgtcctctgaaatacagtgcctggaaaaacctgaaacagccctcgatcattctctccgtttgcagagatcagatcagatcagatcagatgaggggggtaggcaatactcgtacacatgcttctgcgatccgagacagaggctttcgtcggtccgtcttttgggctcggacggacgctccgctcatgggattccaaagctgcctgcctggccatggcccttttcctctcgtgtggtgtggtgaccaaagcgcagcgcagcaaagctgtgctctgaaagcccgaggctccaccccccaccccgcatctcctcggcgacgccatccgcaccgtccgatcggacccggaggagtccagcgtaccttgaatcttgcttgaccggctaatcttttatttgactacgaaatccattccgagccctcggctcaaagtcgctctccatcttttttttccctgagaaaaaagagggggtttttttcaccccccctcgtggaaagtgaagggactcctcaagatctacccttctgacaaaaaggcgcggcggcaaa

SEQ ID NO: 4237 - DNA, 628 bp, Zea mays
ttgcccagattgcctgagttgatgcatgtactggcaaccccatgacgtgccattgctgcacctgttgcagtcctgattggcagattttcttttatcatgtgttttggttcttaacaccatgtttcttagggtactttgctcttttcgtgatgaaaacatccttaaatgatatgccttatttatttggataccaaacaataacaggctaacagctacagaatgtcagaatcaattatttctttcatgaactctcttgcatttagtagactgaagggataaaaaggaaagtaatggcaaccttttggaagaaaatatagacacttgaaagtcatgcagaaacatttggtgaagcacggtaactttgggtgtaagccgatggtaataaagctcaaaataaacaatttttttttgcaagccctggattactctgtcatttcgatagatacctcatgtgtttaactgaaacctatcttgtgatgcagttctgcattcttctctttatttagatacctagagtccaaacttgcactaaatacgccgtgatatgctgtaggttgtggcaattaaagttatccggaataagcagaccggacagtctgaaggatacggatttgttgagttctacagc

SEQ ID NO: 4238 - DNA, 623 bp, Zea mays
acggcgactccctggtgttccacttctcgggcatcggcgcgcaggtggcggacgacgacggcgacgaggcggacgggtacgacgaggccatctgcccgctggacgcgttccagagcgggcccatcctggacgacgagatcaacgaggtcatcgtgcgcccgctggtgcacggcgccaggctgcacgccgtggtggacgcctgctacagcgccacggtcctggacctcccctaccagtgccgcatgtccaggaacgggttctggcagtgggaggacgagagcccgccgtcgggcgcctggaagggcaccagcggaggccacgccgtgctcatcagcggatacagcgagggcaaaggcaacttcgccatggtcagggacatgatacatacatacatactgctgatcgagctctgctgccttgcatctatctatatacctaacatgcatatgctgctgcttggacgacgcgcggcgtgcagatgcccgacgcccacgcgtcggtcgtcggggccatgacgcacagcttcgtccggacgctggagtgccagccgcgcggggtcacctacggccacctgctcagctccatgagggccatcatgaagaaccgcggcgggggctgcgatg

SEQ ID NO: 4239 - DNA, 638 bp, Zea mays
tggggagggccattattctctgtttctttttaacaagccattaaatctgcacagcacagcacagcacagcacgaacacaccacatacgcacagcaagtgtgtgttttctgaaatcctcttttttttatttggagctggaggtatgttgcttcatcctagagcactgaacaaagcggcggattgctccgcctgctgctcgcattgccaccttggcttgcctatatacatagtgaaacaaaaagaggatagacggacgagcgccgatgttttttcaaggctttatcaggagagaacaatcaattggaaaaaaaaaaggaagataaatgtgagtgagtgagtgagtggacctgagtggtcagtagctgagtaaatatagccttcacatcgtcaaagactgcatcagcggatttggcgccatctacctgaaaaaatagcagttcatatttatttacaaactttaatcagcacggtgtacgttccatacaaaataaaaagaattattattacccgtcggaccttccccattctgtcgtagtacagaacaacaggtagagtggagtcgtggaaaacctgaaaccgcttccttatagtgtcgacgttgtcgtcgtctcttccctgcaggtcggctctatagaatc

SEQ ID NO: 4240 - DNA, 692 bp, Zea mays
gcacttgtattgctcagtctaagtggatcatgttggaaatttatccttcttcattcatacttagtggctgggaagtttttttgttatcttggatgtttctactcagtcaacattgtctcaagtctcaaactctcaacatatgccatttgctggagccctatgaccttgcaacacagagtatttaggtttttgtttttgattaaatgtgcacactagttactcttcatattgtcatattgtattggtactttttttctcgaactacgtaggagagcttcttgtcatttcattgagagagaagaaacaagggtaaggttaaaaaagcataacccgaaaaacacaaagtaaatccaattgcaaaccacgcccattaggtaggaacccaacctaaaccccacaaatcctaaggattagggggcaacgacttggctaggagcttctaaagattgatggctccagccatgcaccaaacagttcactcatcactcatcagccactttttgaaggacagcgtccacatgaggtgccagaccatcaaagacacaactgttgcaatgcttccaaacttcccaaaccaccaggataataagggaattcaaccctttgcgcagattcttatgggccgcactgatagtaaccctccaccacttagaaaaactgcccgaaaagcccacaggggctgcaggcatgca

SEQ ID NO: 4241 - DNA, 588 bp, Zea mays
agaaagaagaggaagtagacgactgccccatcgaggaggtccggctgacggtgccgatcaccgacgacccggcattgcccgcgctcacgttccggacatggttcctggggctcctctcctgcgcgctgctggccttctccaaccagttcttcggctaccgccagaacccgctgtacatctcctcgctgtcggtgcagatcgtggtgctgcctctcggcaagctcatggcggcgtgcctccccaccaaggccgtccgggtcatgggccgctccttctccctcaacccggggcccttcaacctcaaggagcacgtcctcatcaccatcttcgccaacaccggctccaactccgtctacgccgtcggcatcatcaccatcgtcaaggccttctaccaccgggagatccacccgctggccgccatgctgctcacccagaccacgcagctcatggggtacggctgggccggcctcttcaggaagttcctcgtcgactccccctacatgtggtggccggccaacctggtgcaggtctccctcttccgggcgctgcacgagagggagaccaggaggcccaggggaggcaccacca

SEQ ID NO: 4242 - DNA, 637 bp, Zea mays
agctgccactgtagaaactagcagccgaacaagcttagcagggatttcacgaagaactagccattcgggccaacaaacctgacaatgtttggatgactgagagagtgtctgtgaaaatatatgtctgcaaagagacattccccaatttattaaacgccagttttgaaaatattgagatgataaagagttaaataaggaaactaacctgtgaatccacactcagaaaatcccagacttctatgcagcttgaaacaataggaatttgcagaaggttctgtagaattaataggtcgatagagttatgatgatgtaagtttttttttctaaacgaaactgctaacatctgtatcacagatcatgaagcgcaacaaaatgatctaacagaaaatgcatacttcaaggttagcctaccatactgcaacacaaaaacagaaagaaaatctcactgatgtttactaaatacatagtatatgatccaatgaagatcaagatgccaattacgtgaatgttacaaaataaagtaatacacaccaatccctgaatacataaataatgactcgtgtctttcttgagcaattggaaggagcacaacacccattatagtcctaagctaaaacaaagaaaatgtctgtttctt

SEQ ID NO: 4243 - DNA, 599 bp, Zea mays
aatgaaaaggagttaaaggccagtcacaacatagttcaaggggaaacaaggaagaataatgctgagtcaagaatatgccatgtgagttttatatcaaaagatatctacagttttatttgttccaatcttctaatgcggtagctgcatgttgatttcatccagtactgaatgagaagtaaatataatctaaaccgatttgctactgctactaggcaatcttcatctggaatttgcataatcatggttactaagtttactgaaatttctgttatcgttatatcctactatattctgaagaacttgagaagttttttcctgtacaagatatagaatctgtttaactgtcaaatacatagttgtaaaaggcaagtagtccctaacattggcatccattggcagggaatgaatgggcattatcctcatgaaccagtcatcactgaacttcagggtcggattacgaaagctgaggctgtattgagggacaaggaagaagaaaatgtgatgctgaaacagcaattggaacagtatgagagtaaatggtcagaatatgaggccaaaatgaaatctatggaagaggcatggaagagacagctctcttc

SEQ ID NO: 4244 - DNA, 797 bp, Zea mays
cgtgaaggcaccacaagggtgtaaaactattgaagtgtaaagggcaatgaggtatgagtggaacagtgatagagcgaataaacatttgccacacgggaaacagctaggtgcatgggagaaagatacgaggtcaggtcccctggtatcctttaaaagtcgaccgtcagagggcgctccaaacttgaaacaatagagggagccgttgcggaggaaacagtccaagcaagtgaggacaacaccactattagacagctgaaatccacaatcagggaatgtttggcactctgatttaatctctgagaccaggctggaggtggagtctgatgaatctgaagtttcagtttctttcttacgtgtaaaatggaccactttgcttcccccaacataaatacctggacatacagaggaaaattgcttgagaggcaatggaaaggaatttcaaaatatagttaacagtatatgattgctttacatattgccctgctgaagttctcttaataacagataatttgctcgaacatgtaaaaatgctattacttgaaaaaaaatccagagccagagaggatgtatgatgcattgatgcaggagaagccaaataggggggtttcaacaatctgagcagcttttcatgctggtagtgcagaacccagatcttggcatctgccaacaaaaggcactgactgtggagacacactgtccatgtagcacaattgtgacactgttgaagggtcgtataagcttcctaaatgaagatcgacctctgttatctgaaagtgaaaagacgcaaagcaaaagaa

SEQ ID NO: 4245 - DNA, 665 bp, Zea mays
tggaagcaaacgtcaagaagattgttactgtagcacgcgatacgtatgagaagtaagtcactactactgctgtagctttactgagttgcttcctcctataaacttatgcaccagcctatcctcttttaagttttaaccatcacccatgctaagggtcaccaaaataattgactagttcatgaattttgctcattggacaatcagaaacgttaaccttatttattccattataatggccttctttggtgtatcgttttgtttatcatcttaggagctgcacacatattgtgatcattggaccttaacatatatgcaaggcacacaccttctgttaatacgtgattatgtgcagtatccttcgaggaggaaacattggaaaatggcatatgaggaacagtagtttgtgatatacataattgagctcaaaagccaattacaagatctgctttagaagcatcttgaaatgcacgtaataaatattaatgaaatgagtcacctgacaataacatccgagtgactgttttctttctattttttttccagcaagaagtcaaacccagtaaatagttccatccaaatgaatgttctagtcagggtttaagctagagctgcgcctatcacattggatgatggaataagtcttgagcatctgtgaaggacagcgt

SEQ ID NO: 4246 - DNA, 669 bp, Zea mays
tccttgacgctatcgcgcgcggcggcctcgctaatccggaggcactccagctcctgcttcgtgcacttcacggcggtgtccttgtcgccgagcacgctcttgagcagggcgttctcgctccttgcctcctccagcgcctccttcgccacattggtgtccttcaccgcctgcttcaggatgtcccgtagcttggcgacctcggcccgccaggagcgctgcgagtccaggagccgcgcgttctcgtgctgcgcctcggcgagctcggcctccgttgacttcatgcacgccgtaaacccgtcctccttgccccgccacgcggtgaaggactcctcggcttcggcccggagccgcgccacctcgtcggacagggcgcggagcttctcgtccttgcgtttggccgacatgtgcaggcggtcggcgtccagcctggccgactccgcctcgtgctgcgcgcgcgccagctgctgcttcgtcgtgtgcagctccgcgttcacctccttgagcgctatcacgaactcctccatcgccttcttgctcttctcctccgccgccagcgccacccgcagctcgccgtgaaccctctgcatgtcgcggtcgcgccggtttctcgccggcatcgtggcgacggggcttctggcggcctcgagcctctggacggtctcctgcagg

SEQ ID NO: 4247 - DNA, 627 bp, Zea mays
acggcctaacagacaggaaaggcacaagcacatccaaaacaacgatcaaaataatcattggacgacaaaccagctggaccattatttgccattctatgtgatatcaacacctgcaaaaatttcaaccagggccacaaggacaaggataacttccctacatgaaactatcaacaagggattcagacatgactcatcctgcatgataaagtagggtactgaaaacataacaccactgctgtctgctaacagttgtgtgagtttattttccaaagatattacacaatgtatccgagggtaaagtacaaagatattgaacatcttctggatgaccacagatacctcgttgaaacatccaggtgacacgaagggtaggtttccatgacaatgtaacacaaccattatagagtaataaatatcgggggaaatggattataaccaccacacatcttaaaccccacacacccgcactagctgttgacagataggccccaaggccccaactgacagtgtatttcatccaataaaacaaaactactacgcaatagttactcttcaagcgagcaaccgccggtccaaaatgaacaattgcaggcactgctaaaaaacgatgcaccttatcctgcacct

SEQ ID NO: 4248 - DNA, 612 bp, Zea mays
tgagctacaatcctttttttatcttatgcagaaactacttttagggctcctttggaacacaggaatttcacaggaatgctatagaaaattttacatgaattagttcaaaaccacagaaaaaacgcaggattcaggaatttatacttcaatccaaaggaggccttacttagaaaagtatagagccagatgcactattgtttaactttcaaaaaatgggaacatgtccaatgtaataatcatgttggtcaaaatccagtagtaactggttttttagataaaggaacatcgttccggcctcttcaccctcatggatgaatggggccaaagtagtaactggtattttaggtcgaaggagttaaatgtaaaataggtactacgtatcagatggaagagttagatataaaatagcagtcacatttagattttgcttggatgcaccatgcgaactgaactgacgaaccactgatgaccctgttgttggttacaaggtactaacctattaatctctggtgttgaccttcctacagaaagctaggtgatctcttgaatcgattcaggaaatatggagttttcttttctgctgatacaatgctgaaggtggggtcaatgtca

SEQ ID NO: 4249 - DNA, 620 bp, Zea mays
tacggtgtcagataaataagcacagattacaaaaaactcaagaaacagattgtctatactctctagacttttttttacctatgccaggaaggctaaagtttgacgttggtgggccattttgtacaggagatgaaccaatagatagaagatccatcagaatgtcagtgcttgtagacggagctccacctaaacatagaccaaaacaaactcattcaacccttttatagaacagtaaggcatgcactactggcacaagttaaaaccaaatttggagtgtgtgttaagaaataataaacatgttgcactactggcataactgaaaaccaaatgtgatgtgccaagaaataataaacatctgataaagcatgatgtgctttgcgtgtgcaaaccaacaagcagcagaagcaaatcattaaggaaaatagtttagtgtaagacctataggagacgaatcagtcaaaccgatgcccaacagatcctgtagaaaatcattaggtgatgtagtaggggccgaagtagtcactggagcatcatcagaacccaaatcaagcaaatcagctaaaggagctggtggtggctttgctacgccatttggaagcttaagtgggcctccagaagtg

SEQ ID NO: 4250 - DNA, 659 bp, Zea mays
gtgtcagataaataagcagaaatgacagaaactaaaaaaaacagattgtctatacagacatacctatgccaggaaggctaaagtttgccgttggtggtccattttgtacagaagatgaaccaatagatagaagatccatcagaatgtcagtgcttgtagacggagctccgcctagacacaagaccagaccaaactcataagcaacatttcaactaagaatgtcgctgcaaccagagcataaatgtataatcaacagatgttaaccgtctgaaacaagatgcactcgaccatgtttaatcctatttatagaacaacaaggtatgcactactggcataagttaataccaaacttggagtatgtgttcagaaataagcatgttgcattagtggcataaaataaaaccaaatgtgtactgtgtcatgtgccaagaaataataaacataatgataaagcatgacgtgctttgcgtgagcaaaccaacaagcagcagaagcaaatcaataagaaagcaaaatagcttagtgtaagacctataggagacgaatcagtcaagccaatgcccaacagatcctgtagaaaatcattaggtgctgttgtaggggccgaggtagtcactggagcatcatcagaactcaaatcaagcaaatcagctaaagga

SEQ ID NO: 4251 - DNA, 617 bp, Zea mays
tacgcctccctgcacaacgagaagctgggcctccggcggccgccctccccctccatgtccatgtccagggacgacgaggcggacgcgctgaacaaccagcgctggagctggctggaggagtgggtcggctcgcagcccttcgacaaggacgtccccgtggcgcaccagtccccgtacacccgcagcgccagcaggggtgagcacgacgacgtcgtcgaccggctcggctgctcggcccgccgctccttcgcccggccgacgcgcacgccgccgaggggggactgctacggcgacgcggcgcagttcccggggtacatggcctccaccgcgtccgccaaggccaagttcaggtccatgagcacgcccaaggagcgctccgccgccggctacgacgcctactcggagcactgcttcccgttcgccgaccgcctgctctcgccgatcccgtccatgtcgcccatcccctccgtcgccagcgacatgggcttcgccaggccgcccgtcgcgcagcggtcgccgcgggtgccggccaagagccccatgacgcccgcgagggcgcgcacgcggaggtcgcacggcggccaccacagcttcggctccgaggctgcgctgcacca

SEQ ID NO: 4252 - DNA, 685 bp, Zea mays
ccgtgcagaaccccaagttcgtgaccaacaccacggtgcggccgctgtgcatcatcacggcgtccgacgtctcccacgtccagaccgccgtgcgctgcggccgctggaacggcgtgcgcctccgcgtgcgcagcggcgggcatgactacgagggcctctcctaccgctccgtccagcccgaggtgttcgcggtgctggacctagccaggctccgcggcgtgcaggtgcgccccggggacgacaacgcgtgggtggacgccggcacgacgctgggcgagctgtactacgccgtgggcacgaccaacccggggttcctgttcccgggcggcgcgtgcgcgacggtcggcgtcagcggcttcatcagcggcggcggcatcggtctcatgatgcgcaagtacggcgtcgggggcgacaacgtcgtcgacgccaggatcgtcaacgccaacggcgacgtcctcgacagggccgccatgggggatgacctcttctgggccatccggggcggcggcggcgagaccttcggcgtcgtggtggcgtggcggctgaagctgtctaaggtcccgccgacggtgacggtggtcaacgttctcaggaccatggagcagggcgccgccgacctcgtcgccaagtgggagacgaccatcctccagccgccagtcctcccggacctcaccatccgggtcgt

SEQ ID NO: 4253 - DNA, 711 bp, Zea mays
ttgcacgttacagagaagagtactaatatatcagaaaaatatttggtgtaatggcattatgatttcttggccatatgggaaatgagaaatgacttgcaagttttgatgtttacacacaaatttgggcaggaacgcatagttttattgtaaaagtgttaaacaagatgatttggtattcacataagctttactcctgaaatgtcatcacaggactaaaacagcatctactttgcaagaccttcccctgttcgaagtgccatgttcagattcgctagtgaaagaaaaaaccctgacgacctaattttagccccaaacaaagaatcgaaaggagatcacagttacctggccggtccaagaagcagaacacggggcggtcgaatccggggcactcacgccgaccaatcccgtcaggaagctccccgtcggcggcaagcagagcatggaagtcaactacggctgacagatcagcgccacctccctctccgctagacggcctgcatcctgacctggacctggacctggacctgcccttgacgttgagtgtcttgtaaagcttgtactgtttctccgcacgccggaaagccgtgcgctccgcagctgtggggtcggaagtgccgtacatcgccggcagcgcccgagtgagttctcgccgccgtggccttcctggaaatggaatgctgcaggtcgagtttagaggagcacggggtaccg

SEQ ID NO: 4254 - DNA, 606 bp, Zea mays
agaagaaatgtaaatacaacatccaacgaattgatcccaagctctgaactgtctgaattatgtactaatcattgacaaacggagcagatagatacatccgcagacatttttttttgggtccagagctttctcgttgtgatgcggataattccatgaaccaccaatagctggcaaaaagggtttatctgaagcagttgggcagtcacatttctttccttttctcctttaatctatattttctattttctcttccccaactgtaaattgcatgcgtattagcatatacgtgttgtgtatacgcaacaaacctagctaccagtgtaacagtagcagcgtggcaagtaactgagctgacggtgaccctaggtctgcttctgctagtgatgtaccagtaaccaaaacgacagctacagtatgaagatactggatttgaacgctagctgcaagaaagttttgcccagtggagaggaaaaagctttttttcttttctttgagcgaaataggtttggattaagggcgacactcagggcccttgagaaaataataaaaagatcatttgttaagcaaccaaatcaaatgattggggctgcgattgtagcctctgaa

SEQ ID NO: 4255 - DNA, 624 bp, Zea mays
tccactcaaaatcgccaggttggatttcagtgaccatcatttcttcagtgctcatgtaagtgcagccatctctttttatttttctcaccactgctaaattctgcatgaacaaatcaagacgcctaacaagtcatgaatcagaaaccacaccgatatgcgatacgatacggcgatacgtagtccagcatgtacatgaaacctgtgcactgcctaattctctgcaaaatatatgaaccactactcgcaacaatgcagccagctacttctgttctctgctaaagcaacataatactcgtagtttatgtggttgtgtatttgattaggggtgactattttccattcaccatgtgatggttgccttcctcttattcttgtttacctccaataggacctagagaaaattcaagaaacagcgaggaatctcatggacgagcacagcaaagataccatagtcttagttactgagaaggtagcgccttttgggtccttaatgtctaatcttttgcgtggtcatccattgtaattgtaattccaaactgccctttgtttgggcatgcaggattatgaccgtgatccagaggccctcaagacactggacgcaaacgtttgggtgctgtcttcttc

SEQ ID NO: 4256 - DNA, 683 bp, Zea mays
tgcatgcctgcagagatcaggtgaaagggacaagtgttgtggctgcgcaattagtacccagagtgtgcacagccataccacctcgctgatagctactacccccctgtgcgcacgctgcctccaatctcctccaagaaatgcgtcctcgtccttgaatcctactaaccatcaaactcccagctcccctcccagaccagtccgtggaggaaagtgagcgatggggcttcgcgcgggtttcctcctcctgccgccgccgccgctcctcctcctcctcctcctcctcctgctgctcatttcccctgcgcgcgggcagctgccctctcaggacatcctggcactgctggccttcaagaagggcatcacgcacgacccggcgggctacgtcaccgactcctggaacgaggagtccatcgacttcaacgggtgcccggcgtcctggaacggcgtcgtgtgcaacggcgccagcgtggccggggtcgtgctggacggccacggcatctcgggcgtcgccgacctctccgtgttcgccaacctcaccatgctcgtcaagctctctctggccggcaacaacctctcgggcggcctcccgggcaacgtgggcagcctcaagagcctcaagttcatggacgtctccggcaaccgcttctcagggccggtgccggacggcatcggcaacctccgga

SEQ ID NO: 4257 - DNA, 560 bp, Zea mays
tcttacaaaatccacatgtgaaatgttgatgaatgcgtcatcaccttttggacttccattttccagattgacattgatagagatcaattgctaaggcaaaatccagctgcttatacgcaatcattggatcttgctgtccgtggtctctacaggtatagttttgtattgttttatgctctagtttgatttccttttcctttaagtaatgctgcactagcactagcactaggtggtgagcaatcaattggacttccatggctccttgacatgtcagaatgttacagctagtctgttcctttttttacacaaggcagtatatcacttgccagttttttaccttttggctattaaattatttgttaagaagctggaagtttgatattatcagcaatataagcaatttatacccttctacaggatgagtgctttgtttcatcatttggcaacatcagtcacatctggtctggtcgatgatgatataattatagttcttcttggaatattctggccacttcttgaaagtcttttccgatcatctcatatggagaatgtgcatttat

SEQ ID NO: 4258 - DNA, 677 bp, Zea mays
agctcgtgcccgacatggacaaggtgactgcgcctgcacccaccggtttcagcgcgcgctagctaggcgatcgatagacagaacagtgcgcattgagttgctgccatatgctatgccaggaccactccggccggccagccagagctgatgacctacttgcgttcccgttgccttgcagcaaaccaacacctccgacatgctggacttggccgtcgactacatcaaggatctccagaagcaggtcaaggtaacgagctccggcggccgccggtctgctttcctcctccagaacccaaattgcaaggtcagagagccagtgacgtccaaatcacggaggctggcctcatcttgccccgccggctgatcgacggcgagcgagggttacctacagttacaaacaacgatatgtcgttgactcttcctcacctagtactagtagtagtaggaggaggagtatctttatcgtcgtttatcatcccttgtgttcacgcgttgcaggcgttgaacgagagccgcgccagctgcacctgcccggcgagcaagcaccagcagcggttctccggctgaagcaccggccgggccggcagtccctatcggtccccggcggctgcgtagcacgctccactactgagaacctgactgagaccgagatagagaggaacaccgccatcggtgca

SEQ ID NO: 4259 - DNA, 622 bp, Zea mays
tgtggaggggcggcgccaccaccgccttcgtcgctagggccctccgctcgcgcctcctcctcgaccccatccaccacccggtcacgtcgctcgctcctatttcttcggcgcgtacctcttcctcttcctcttccacctcgtccactgccgcggcgaacaccatcgtggaagaagcggcggcggtggcggctgtatccgtttcgcagcataccggatccatctccgacgcgctacggcactatgggaagtgctaccgggagctctcgaaagtccgcctcaggtgcacgattttctcccccttcagcgcgcctctcttacccatggatctgttgtaggtcgcttttcgttgccgctcgcaaaaaatatcccaccattcgtcgaacttgctttattgcttcgtttaagcagcatgcagtagatgaaataaccaagtgcggctattaagacggtctccagcaggtagggtaaaataggggacgtggaattgcagagtgaagtttgaaacagaggataagacagaggatctgctagagatagcctaacatgttttgcattatttttcgtggacccaatattttgaaatgccacttataaactgaataaaacaccatcatttcatgag

SEQ ID NO: 4260 - DNA, 555 bp, Zea mays
tgtgcgctagtcagcttcgcctcgctgccgaaggccgcgtacacaacggagcgaggcgcctgcccgtccagccattgcagcgctgccttgtggctgccgatgtcttgtgtgggtggtggtggagggaatagaccgaccgggatgaccggcttctggtatagcccactgaccacctgaagccactccggttcgaactccgcgctgctcctgatgcccacgagctggctctgttcgatgcacttgccaaaccggtagccttccgatacgccagattcgtccggggccaacaccggcgtgaaaaactcgcgcgcctccaagccgcggtacgcgacggtggtcgggaacggcacgtagtcgggtacaacggtgaggtcctccggcttcgtcctggcgtacttgccgcgtcccatgagcccctccggggggccatagaaactgagcgccgcggcgccgaacaggctcaggaacgcgcatggcacgccatgcctcgccgcggccgcgggcgcccagtacgcggcatagtcgatgaccacccagtccggcctctccggcacc

SEQ ID NO: 4261 - DNA, 576 bp, Zea mays
aaaaggtcatgaaaaaactcgtacgccgattgcagatcagttcaacgcaaaggtgctctccaatggccgctcacctgtacttgacagtctcgctctgcccaccaagcatgatgctcttcttcaactccaatcctgagaattcagagaccaagtgatgacccgatacctgtgcgcaaccgatcttgttggccagatcttatggatcagaggaagaaagacgatgagttcatgtcagtgaggcaagcacgggaaggcaagttgcagaatggctggttggtgcctctttcagtagggattacgcagcattgaagaattgatgggagggaagggcatgaccaagaagagaaggtccagctatgtgcacaagtcttgcttggaagatatataggtgaggcaagttggatccagggataaatcttgcactacaataatgggcagtagtagtaggccactagatacgatgctgacatatatacaggagcaggagatgcatgccaaccatccacatatttggtcaggagctgtccaagtctccgtgccagcaggtttactcaacaaacctagacctaacaaaat

SEQ ID NO: 4262 - DNA, 670 bp, Zea mays
gatcccccagagtcgacctgcaggtgcaggctacagataagagaagcgggaggcccttcgagggaagtgcgttgaggccccaccggtgtttaggcccgcctagccactattgttggtccaaacaaactgtaaaaagggtacataaaccatcgtaggacatgtgcatcttcatcatttctgaaaggtacagaaaccgtcgtaggacacgggatatcgaataactatgggtaccctaatcaaatcctgtaaagggtctgtgtctctgtgatattctacggattcagacctataattggggctaaagcatgaagtaaccttcaggatctatcacactgtactatctaagagatgctgcaaaactgctacttacagagagctcacccgatcacggtatctacagtgtatggaggttatcaagacaaacctgtacagcattagcttctaatgtgatattcttgggtagtaaagctcagcgaatgggcccagtagctcctacctctcccttccaagaattgatcaggcatagcagagcaagattgggcaccaagtttttgtcaggaagtcgcgtcttcgtcaatggtgacacatcattctcattaagccacatctcaatcgcaacccgttcatacgagtacccatcagacgcaatgcatggatcctgcattaccct

SEQ ID NO: 4263 - DNA, 680 bp, Zea mays
cgcgcgcccagtgatcaagttatgaattatagtaccatgccgtaatatagtataggtcatttcgggttgtcagatacataaatgaactagcggtttagttcaacaaataaactagcggtcgacaaatattcaagagcgaaggtagtaatatttatgtatttaaaaagtcaaaacgatatataaattgaaaagaagagagtagcattatattcctggttgaaaaccagtttgcattgcagtgaccacatcaataattaatgagggtaagatatgactgaagttctgatcacacctgaccgaatccaaacacaagtttgaggtggtattaagatggaaaatgaaaacacaccacaccagagttttttataaccgttagacccaacattatcgatcgatgttcatcataaagaccgaccacagaaacaaacaagcacagtaaccctgcctctgtgaacaggttgtccaaacattcctcctcaagctagtgctcatgttcatcattttgttgtttcaccgaggaaatcttccctcgtacttgtgaaagtactcctgcatgcatgcaacacggctcagtgagaacaccaaaaggaaagaaagaaagaacgaaagaaagaaaggctaactaggatatatatatataataatgtgcatgcatgacctgtatgagcttccttattttc

SEQ ID NO: 4264 - DNA, 670 bp, Zea mays
attttggatgagatgatggataatggtttcccactcacaactgagccaaacatcttgaaagagatgatcaccccacctaatattgtgaacaaaatgttgaatgttgttactggcaagagttctacccttggcagcaaacttccagatgcagctgcttcttttgtaccttggcgaagaacaacagtcaaggatgcaagcaatgaagtctatgttaacatagtcgaggaacttgatgcatgtgtgaacaggtattccagttttttttcctttttaatgtcttataaacgggatccattaattctgctaatatggcttttaggaccttagtcacagtaattggtcaaatgtttccggaaggtactcattgttcagcattttcgtagtaattctgtacattgagctccaatctatttttttatacctacaatttatgaatgctctgcactttagcaagtgctatgaaaatatagaaaaaagggcatcataagaatgaagattcatactattaagtagtggtatagcataatagcacatgaaactaccctacttatgttttatttattttttcttatgttactgaggctcctttgccgtttggtatcctgttcgttgattggtgcgcagagagggggttctcgtgaaatgtgaagcatacggtgaagtccaagta

SEQ ID NO: 4265 - DNA, 610 bp, Zea mays
tgttgaatgctgatttgttgtggctgattaatcgggttgatcgtcgattaatcgtgattagtcggctgatcgcccttctggcgatcagaaacgataaggcaatctgaaaacattggccgccaaacctccagagcgactcccgcgagccgtgaccaccatagctaaatcaacgcaccagaagctttcacggagctgtctcgtccacgagtgttccagctgactcctattccctgcgtcaatggcgagctctggcaatgaagggcgtgtggtggtggaccttggctccgcggcggagtcggtggctgctgacgaggaggcgcacgccacgcctctccacgagattgagtccctttgcatgcgctgcggcgagaacgtgagtgctcccgtacctcacctctcttttttgatggttccgtcctcttctgtttggggtgcttgtcgaaggttctgaggcctgttgcttcgctttcatggggttagggcatcacgaggcttttgctgacgttgatcccgcacttccgggaggtactttctgtgctcatggcctcagcttcttgttctgattagtatcgttggttagactggagttgtgaaatttgcttttgtgaat

SEQ ID NO: 4266 - DNA, 652 bp, Zea mays
aatgtgttgtgcccaatggttccacctacaagctgctctacaaggcctacaccaaggcgaacgataagttactagtgcagaagttgctcaagagaatgaataaacaggggattgtcccgaacaaaaagttcttcctggacgctttggaagcatttggcacctctgacaggaaacccaggacatcgccaggcataaactctgcaagcaagccaagtacagattctgctggtgattcagaaacagctacttctgacaaaccagaggtaagcgtttggcatgtagctgctacataaggctgttggtttgagcaagctcgtcgaattacctgacatcaggaagaacacatttgatctgcaccagaaaccgttaatacagtgtacttggagctacaggagttcctctactcccaacaggacgctcctttcttaacggaagaatgctaaaacctttcgtgtttcggcaaaatctgcttgtacatgtactctgttatcaaacgtaggtattttgtttctagtcattattgggcatcacaaaaattctggctctctgtactcgtcgattgttattacatgcctgttccttcaatccttctgtggtctctatttactgagcatctcccgatacataaaactgggaactggaatgacatgca

SEQ ID NO: 4267 - DNA, 604 bp, Zea mays
agctaaaatacgatcttccacagtgtctttaacggtcaagcgagatacagtaacaggcctagtctgcccaatcctgtgtgccctatcaactgcctggtcctcagcataagggttccaccagagatcaaggagaattacatggcaagcagaaaccatgttgagaccaagattaccagctttcagtgacataatcataactctaacctgaagaaagaaaaaaaaaatcttcttagtatgtctggaaactgtaaaagaaacaaaggcatgaaaaaacaaacataacatatgacctctgggtcagtgttaaaatccttcacatttttttctcttaaattgagagacattgttccatctagtctcctgtactgtatacagttgatattcagtgaaagctccagcaaatccagcatgccagtccattgggaaaagacaatggctttcacagggcctagtccacttctgcttgattccattgtataactttcagtaagaggatccatgacaatgattgaattcagtatatcaatggctgcttgtatcttggatgagacaaagctgctttgactgattgaagatgactcgttatctgatgatgaactagcta

SEQ ID NO: 4268 - DNA, 667 bp, Zea mays
ggtccggggtgaagaagatgggggagctccgtctggccgtgcgcttcacctgcctgtcgctcatgaacatggtgcacctgtacacgcagccgctgctcccccggatgcactacctgcacccgttcacggtgacgcagctggacgcgctgcggtaccaggcgatgggcatcgtggcggcgcggctggggcgcgcggagccgccgctgcaccgggaggtggtggagtacatgctggacgtggagtcgcacatgtggagcatgcggcggagcaaggccaacttcttccgcgccgtgtcgctcttctcgggcgtcgccggcgccgcgcggtggttcggcgacgtgtgccgctggaggaacgtggcgacgacggcgctggtgcacgtgctgctgctcatcctggtgtggtacccggagctgatcctccccaccgtgttcctctacatgttcctcatcgggctctggaactaccggcgccggccgcgccacccgccgcacatggacaccaagatgtcgtgggcggaggcggcgcacccggacgagctggacgaggagttcgacacgttcccgacgtcgcggccgcaggacgtggtgtacatgcggtacgaccggctgcggagcgttgccgggaggatacagacggtggccggcgacatggccacgcaggggga

SEQ ID NO: 4269 - DNA, 681 bp, Zea mays
gtgccaagccacgacggcagggcgtcgcagtccggcgtgccgcggtggccgcggacggtgttcctggtgggcgccatgtcgtgcctggccatcagcgcgacggcccacctgctggcgtgccactcgcggcgcgccagcgtggtgttctggcagctcgactacgcgggcatctccgtgatgatcgtcgcctccttcgtgccgccggtgtactacgccttcctctgccacccgccggcgcgggcggcatacctgtccgccatcgcggcgctgggcgcgctcgtggtggccgcgctgctctccccgtcctgctcgtccccgcgctaccgccgcctccgcgcggcgctgttcctggccatgggcctgtcgggcgtcgtcccggcgctgcacgcgctgtggctcaactggggccacgccgcctgctacctggcgctcggcctcgaggtcgccatgggtctcgcctacgccacgggcgcatggttctacgtcagccgcgtgccggagaagtggaggcccggggtgttcgacgtcgtgggccacagccaccagatcttccacgtgctcgtgctcgtcggcgccgtcacgcactacgtcgccgtcgccgtgctcatccactggcgggagaaggtggctgccgcctgtggcgcggcgtcgtaggcaggcggggcttgctgctcctggctt

SEQ ID NO: 4270 - DNA, 609 bp, Zea mays
ccatgcaagcatgcttcgatatttcatgctaggatcgaggaaggaccacgacaacatagctagctactttgagcacgctaattgaagcgaaccttgctcatgcagaccgctcacgcgctgcctcttgatgctcccgccgccgccgccgccgctagatgagaacgtgtcgctgctcgccgtcttgcggtccatgacgccgcgcagcgcctcctggatggacgcgacgagctcgtgcctccggttggacgaggcgccggcgcacccgccttcgacgtggccctctccttcctcgtcgtcgtcgtcggcagtggtgatgaggagcacgttgcggacgcggccgccgagcgtggcgatctcggcgcggcgggcccgcaggctgagcgcggcgagcgcgcgggcgatgtcggggatgaggcccacgcggtcctcgcagcacagcgacgcccgcgcgacgagcctgccgtcgtcgccgtcctccgcggcgttcaccgacaggtcgtccgcctccgtcggcagcagcaggtgccgctgccgagccgccgccgacgtctgccgcttcagctccttgacgtgctcgatgacctcggccagcagtgacgccttgtccgt

SEQ ID NO: 4271 - DNA, 653 bp, Zea mays
tgtagggaccatgccacgctcacaacagtctactaggcaacatattgtgtaagtaaattatgtttcttataataaaaaaacttagtcaggggagggaatggccgccctcccggtattatattaagaagagactgaaacaatggtcccggactcccggccgagaaaatccccgaaccctggcccaccaacactaacgggccagcgtcaaccgtcgactctgtaacggcccaactggagggtggcgctcaagacattgtaacccgagagcggatggggcacagcgaggggatttttttaaccaagccggaaaattcacccccgaggggaatcgaagctgggacttgaaggcgctactcgaaagcctttaaccactaggctagaggcccttttgcaaattatgtttcttataatgcccatgttagttggatgggttaaggtgctagcaggcaaagtaacaagttaatatgctagcagttttgtatcctacaggcacaaataatatgattctactgtactccagagtttgttttttctcatgtcaggtgtatatcccttgagggacactttggcatgacaatgactgttacacaagatgtagggaaaatgcaacataacctaggctaaaatccaaataatgtgagcattagaaatgt

SEQ ID NO: 4272 - DNA, 665 bp, Zea mays
ccccttttcctctatagtcgacctgcagctgtagggtgaaagaatagagtcacattatctacatatatagaaattcgatgaagcttctttcttattgaaagctgttggagtaagcccgcttcctctgcttcagaaaaaataaggccaagaacatccatagcaaggataaataacatcggtgagaggggacttccctgtctaagccctcttctatgcttaatatgtttacccgggaaaccattaagtagcacttgtgtattggatgaggctaataatccacaaacaatctctccaaatatgaccaaatcccatctgctgcattacttcaattaggaacggccaagagactgaatcaaatgtctttgttatatccaatttgagaagtaacttagccatggaacaaccttgatgtttgttgcactagcatgaaattatcttggatgaaccttcctcttatgaatgcactttggtttggagaaaccatctcattcaatcttttggccaggcaattggcaaggatcttagtgatcaattttgcaaaattgtgcactagacttattggacgaaagtccttaacctgattagctccttttttggaaccattgtaatatatgttgtgttgagtttgctgaaatgatcaaacttcctgcttcatattgctgaca

SEQ ID NO: 4273 - DNA, 583 bp, Zea mays
tttgctgttcagtggtttctttggtaggagatcgatcccaaacctccttttggacagattgctggctccatggataggctctgtgtgacttggctccggtccttgtctctcgggttccaaacagatttctccaaagtagaacagtaaagggttccttgactgaaaaatggctgggtaaatgatatctcaggaagcatatcagctcaatttctatctaagtacttcatggtctgggacttgattcaaggcttccaacttcgtccaggagtttcaaaccaacaccgctggaccccttctgcctcaggggaatactcttctaaatctgcttatcatcatgtctttgaggggatggtcacctttgaactggcaggaagggtctggaaaagttgggcacgttcaagatgtaaatttttcatctggctggcttctttaaatcgctgctggacagcggatcgattggctcgtcgaggtttggaccatcccacaaaatgccttttttgtgatcagaaagaagaaactatgcaacacattctgttacaatgtgtttttgctagggaagtttggttccataccctgtctctta

SEQ ID NO: 4274 - DNA, 709 bp, Zea mays
ctcgtcctcccgctcctggaggagctccgcgacgccgcgccccggctcaccgacgacgcctaccgccggctcgcccttctcggccgcgcgctcgccgccgcgcgacgcctgctacgaacctgccacgacggcagcaagatctacctggttggttcgattcgatgtgcctgtcagtgccatgcatgctcattaatgccctggcggcccggccggcccatgcatgttgtcatgttgatactcttccttttgtttttatttggtttggtttgatttcaggcgcttgagagcgagacggtgcttgcccagttccgcgacgtgtacgagaagatgcacagcgcgctggacgggatgccgtacgccgagctcgccatctccgacgaggtcaaggagcaagtaagccctcgcgcgcgcgccacctacgcatacgcatccccggctagctgccatcaatcctttacagtgccatgcattcaattcttccaggtggagctgatgaacgcacagctgatgaggtgcaagaagcgaacggacactcaagacatggagctgtcgatggatctgatggtgatcctccagaacaaggaggaggaggagcaggagaggaacgccgacagggccatcctggagaggctcgccaggaagctggagctgcaggctcgactatagaggatcgcgggaatgagaagcaaagtcactgggggcgcggggc

SEQ ID NO: 4275 - DNA, 508 bp, Zea mays
aaatactagaggttacagattgttttcattttcagttgtcatctcttttcattcactcagtagtcgatacatattcacagaattttcctacaattcaggttcaaaagcggcgcatatatgacattaccaatgtccttgaaggcattggactaatagagaagacacttaagaatagaatccgttggaagtaagcatagctttcttcctttgaccctttttttcctgtattatgatgcaaccttatctcagtaactcttgcaattcctatttgtgatgctattctcccatgacactatagggccctggatgattcaagtgttcaattagataatggtatttccgctttgcaggtatttgtttttgtaaactttttttttctattgaaattgacataccagtcctaagtgcatctgagtgacttctttttttccccagagaagtatgataataactagacctaagctcagttttgtgtaacacattgcaggcagaagttgaaaatcttagt

SEQ ID NO: 4276 - DNA, 730 bp, Zea mays
tgtgatggcaagcgatgtttccatcgcccagttccgcttcctggagcgcctgctactcgtccatgggcattggtgctatagcaggatctcatcgatggtacgagctagctagctagctgcctgtaacaccagcacacacgcacgtacaatgaagtgaggtagaagaagaagaggctgatgaacgacttgttatgttttgtttggcggacagatctgctacttcttctacaagaacatcacgttcggtgtgaccctgttcctgtacgacgcctacacgtccttctcgggccagcctctgtacaacgactgggcaatggcgagcttcaacgtcttcttcacgtcgctgcccgtggtcgccatgggcgtgttcgaccaagacgtgtctgctagattctgtctcaaggtactactctactgtatatctcatctagctagctagaatagatcgatacgcatgatgatggtcgagtcgtcgactaactttgatatgtggcgcaaatgcgtacgcagttcccgatgctgtaccaggaggggcctcaggaccttctgttccagtggcgaaggatcatcgggtggatggtgaacggcgtggccagcgccgtgatcatcttcttcctgtgcacggcgtcgctgcaggaatgtactctcctcgtcctgcaccggccgctcgacggagcagtcgcgcgtaccagcgcacgtgttggcgccggcgggggcctggctctcggcc

SEQ ID NO: 4277 - DNA, 602 bp, Zea mays
tgcaccagcgcagcacaccacacgccagcggctgccaagaattcaagacctgaaagcggagaagcacctagcggccaggtaaagtctgcaaaatggacatgaaagctactcctaacgactaatcatctgcaaccataaatgaggccaagaataaaagcttgtgtaactatactagttagcacaaatttccaaggcttaccgcacttcaatcattggtagacaagcaggttccaaagggattatatctctgtcagtcgtgtagctaccccagcttttgtcagaaacggcacgcgtatatatatgtgcatgcaatggctgtttctgatggctgctgaaaatggcaggctgcctgtcaagatagtaatgcttgctgtccaagtgtcaaggacactgtacagtgacaacagtggagagggatttgtcatttgtgctggctgtctatagtacagtatacagtgacagctactgctcaattgctacgagtaggtgacgagaacgagtttggggctttgggcggccagcccagagccgtagcattgctcgccgtggcttcggcggttgctgagactgacatgcgtgatgtaacgatgtctgttatgtct

SEQ ID NO: 4278 - DNA, 609 bp, Zea mays
aaaaatagtgattgttgataaaaaatttgaaaaggttaaatgggatggacaagctaacctctggttgcaaccaatgttttaaatcaccggagatcgctgccgctatcgccggagatcgcttctggcaaacaatgccgctaggagattacaattctgccgctattgcttgttgaccgctattagctgctattagccggcgaaatccgttaaatgggccatcttctagcggcagctaaatcaaacctgggccattttcttgcgcgcgtccgacccagcccattatctccctctgccttttcttgtgcaaaactgcaaaccctagctcagactctcatttccaaaaggcacttgcggctggcttcaacctgatggcggcggctagcttcaacagttcaagttcaacacgttggttccctgctagcggcaagcaatgaagcaagtagcaacaatcagggcagcactccaatagtattctctccactctccaacctccaattgttgtccagttgaaccggccgacaccatgtctcagcaagagaagcaaacaggcatgtatttttcaatagatgttcatgtgacgtgtagtgtagtcccttgtagctatgtttt

SEQ ID NO: 4279 - DNA, 576 bp, Zea mays
gcgccgcacttcgtgctcgtgccgatgctggcgcagggccacttgctccccatgctggacctggcgcgcctcatcgccagccacggcgctcgtgccacggtggtgctgacgcccatcaacgccgcgcgcaacagggccttcctggagcaggccgcgcgggcggggctcaccatcaacttcgccgagctcgcgttcccggggccagcgctcggcctcgccgcgggctgcgagagggtcgacatgctggacgacatctccctcatcatcccgttctacgatgccgtgtggctgctcgccgagccgctcgaggcgtacctccgctcgctgccccggctgccggactgcctcgtctccgactcgtgcatgccgtggactgccagcgtcacgcggcggcacggcatccttcggttcgtggtccatttcccgtccgcgttctacatcctcgccgcgcacatcctcgaaaagcgcggcctctacgaccgcgccgacgacgacgacgacttcgaaccgttcgaggtgccggagttccccgtacgcgccgtggtgagcagggctacggcgcaagggctcttccag

SEQ ID NO: 4280 - DNA, 613 bp, Zea mays
agaaggtggtgaggctgaaccaggagattgcctgcgcgcaggacgccctgagacacaagtcctcctcctatccgacggtatatataatctcatcgcatatgcagattttgccacacgtagagagatcgacagcgtgttgttgattgatcaacgatgaaacgggccggccgtcggcgggtatgtatatgctatggatgcaggtgagcgtggaaaccctaggagtgcaggggttcctcgtcaacgtgttctccgacaagagctgcccggggctgctcgtctccgtcctggaagccttcgacgagctggggctcagcgtcctccaggccaccgcgtcctgcgcggccgactccttccgcctcgaggctgtgggcggggaggtaaatactactactacttatattactagctagtagctagtccatcgtcagttgctgcttgcatttggttgctcgtcgatcgaggattcattcttgacaagctaattaataatataatactacacgacaacaatacaattctctctcattctatctttctctgttgcattgttggtctgtgcctgcacgcagaacgtggtggacaacgtggacgagcacgtcgtgaagcaggccgt

SEQ ID NO: 4281 - DNA, 632 bp, Zea mays
ttatttccaacccagatttatgagaagttgatctctggcatgtatatgggggaaattgtccgaagggtcttgctaaaaatggctcaggatgcttctcttttctcagataatgtacctctggaacttgaggtcccatatatccttaggtatggcattctagtaacagttcagtagtttgtactgctatctggattccttttctaatggcaccaactttttttaaaaaaaatgaacatctgctacatattttatccatagcatagtctagcttggaagattttgtactgaaatgttgtgcctactgatgctaaaagcaatatacattcagctttggtttatcctacagtggatgttctgtggagtagctgttagagtgtgatacacttgattatgtgcagcagtccacgtgagtatgacacgagcatacactgtatcaagaatgatgtagatgagccccatagaaaatcctcctgtttgtttctgtagaattgaatcttagttcaagaatcacattcctatttcaaatcttaattgaagtgttgccgccagtgagagcttgatggcagcagtgaagtcccccacaaagagatttttgtgtccagactcgtgagagacgagccaaggagatcgga

SEQ ID NO: 4282 - DNA, 651 bp, Zea mays
agccacgactggaaaaaggaacagcgctatagtcaggtaactaaaaactcgagtgaaggctacaaagagtttgggcatgaatatttgaacatcctactctactctcgcacgaactgcgtgcgtaccttcagatcatcatatttccactgggccgtgctgaaaccgctgctgtcagccaccaagctacgactacgaccactcttctgcaaaccacggggatgatagagataggttggcacacaacacgacataggacataccataccattagctacggttctgaatctgcacttaccgccaacacgtcgctcctgccgctgccaagcgccatgaccgggtgctccaccagcgccatggagcactcgtccttgggtcccgcgtgaagcactcggatagctgccgagctgcaccacgcgctggagagcaggtccgtcggctctggacccggctcttcatacacaatcaggcctctctcgaggtctgcttccatggctacggcagggcagaagccaagctagttcccttaattagcaagcaactcgggtcagagatttatatacattatacagtggacgccactcttggtagctgtgcagtgtggtgcagcccttctggtgtttctgatgcacagcctgcaagcaggcaatgcaa

SEQ ID NO: 4283 - DNA, 575 bp, Zea mays
aaacggtatcatagaaactgtttgaaaagctggggggaacatagaggtaataaaagtttttatagtcttgtcatcttctattcattcgtttacaagctctaataaattaattaatgcttcttctagaccttttccattggagttcatgggtatgtccttcttgccgcagttgtgaggttagttgtctttctatttccatctattatcctgaacttctactacccctaagccaagaacaattttgccctgttcattcatttttgtgctatgttttaacttgcattttgattgcatgtagccatgtatcacttctgtaattctgttacattttaagcatcaccagcttctgcatttgatttgttgttacatcaatattcaatacttgtcatctatataggtatgccgacgtcctggtgaccccaacaagttgatgttctgtaaaaggtgtgatggcgcttatcattgttactgtcagcaaccatcacacaaggtgaatttattgtaccctccaccaccacctttttttttgtatagattgcatttacatctgtttgtcatcactgaacactgggtgt

SEQ ID NO: 4284 - DNA, 663 bp, Zea mays
tttgcatgcctgcagtgactcgttcctgcgggctgccagctgggttcctccaagctccgtggtgtcggctgtggcgccgaactggtaggagtcgaagccgtcgaacatggagaggcagacgcgggagaggagcgcgtagcggcagtggccggacttggagtaggcgacgccagggtaagcggcctctgcggccgcggccaggtcccacccagcgcaccgcaggacctcggcaagcgcgcgggcgaaccggtgcgcgacgcggagcgcctcgcggaggacggagtcgaagacgcccgcggacagcatcgcgccgacggcgtccccgcccggcggaggcgcgagcgcgcggtcgaggcggcccgcgagccgcgcgttggcgtcgtcgagcgcctcgaggtccagccgcagcgcggcggccgcggcgtccttggcgtcgagcgcggcctgtaggcggttcaccacggcgtcgaacgaccgcagcagtgcctggttctcgcgcacctgggcctcgaggtgcgccgtgagggccccgccaccgtccgtcacgggcgggcccaccggcccgctcctcgcgatccgcttgagctccgacagcctccggaggtgcgacacagcggcggcgtccgcggccgccgccgcatccggcaggaacggcgcgtgggc

SEQ ID NO: 4285 - DNA, 663 bp, Zea mays
gtgagatgcgaatggatgtggattactaccaccaccatgaccaccaagatatgcctactcacattgtcaagtgtgccgacttcagggttcaggccatgctggacttctccaatgtaccgtgtcgttcagatccttgagagggccacgcctgtcagatgcagtcttgatcattatgacaaacttggtgtcctcaagctatcctactgcacatttagcttctcatcgcctccattcctgtgctgccaaagccttagattcctatggctcgaccactgccaggacatgctggagagcggcccagatggagcggcacagatgtgggaggcagatggcatccagcagtgcttccaaaggctgtgggtgctggatgtgcgctacacatgctgtgatcagatcttgtctggacggatgctagagttcatgactcagctgagggtgctaaatgtgatcggagccgaggattgggacatgcgccagttgcaggggcagcttcctaatatctgcaaacttggagtagcaaagtctacaattcaatgtggtacaactctctggaatggtgacttgttggcagggtccaagcacttgcggtttcttgacctctctggtaacgaaataatcagtagtggaaagagttgcatatctgccacagaaaaaagctgcagg

SEQ ID NO: 4286 - DNA, 605 bp, Zea mays
ttgctgatacctggcataggatattgttaattccagtgactggtggagtagttgtgggcatgatgcatggattattggagatttttgagcagataaagcaatccttatcatctcaaagggagggtattgatttcatggctgcgatttttcccacaatcaaagctatccaagccgcaattactttagggacagggtgttcactggggccagaaggacccagtgttgatattggtaaatcatgcgcaaatgggtgtgcggaaatgatggagaacaatagggaacgaagaattgctcttgttgctgccggatcagctgctggaatcgcctcaggtattttaattaattatctattccattcgtgatatggactcaatggaccgaaaatgaaaggggtgtatttccagttttgtttcagcttgctaagatattggccgtttttatctaaaaaattgcacttctgtttaggaagtagaaacatgaaatattttaggaataataaatatttgcttaaattcctttttacaaccttcatgtccttcatgctactgactttcttcccctatatcctctcctaacttgtgttactatggtctttaggtttcaat

SEQ ID NO: 4287 - DNA, 594 bp, Zea mays
aaactgtctggatcactagagccattcgatcacccacaagagacctcacctgccgaaaaatgtatatgtattgtcaggtactatttcttttaataatattgcataagcttatctttggttcgtataattaccacgttggcatccttggcaagttgtgagcatatggcaccactggagttctcatcacggtcaaaccacccaatctcaaaagtgaggatttttgcaagcatctgttctctcactctctttgtgaggtattcccccatggcaccgaagttgtaatgttgcccaatattgatcaagaatgagagcactgcaagagcaacaaagatgagtgcgtaggtccttgttttgtccttgatctcatcatggtctgccaagaagtagattgagatcatgctgcccatggcatatgcatatgcaggttgtatgcctccaaacacaattgcactgaaacttcccatcagagcctgcttccattctggtgcattaagcatcagtaacctcctgaatgatgggatgggaggctttggcttctcggcaatattatcattttctgcgtcacccattgaccgtcctgagcttgacctgcta

SEQ ID NO: 4288 - DNA, 654 bp, Zea mays
aagcaggtttcccgtctcgtcttggacaacgggtatatgaagaatcgactccacagtgtgagctacttttctcttttcaaatatacatgggcttgaactagaaaatgggttggtttcatgatgcatggcttgctgcattttaacaaagtctgttacagtattgtttacatgcctactgtaattctttttttccctgcttatgcattatcttattctgcttgctataacatttgcttgtaaatttgcagccttctgtagccaccaccgacacaacctgtgagtccgtggtgacaagtggtcagcacaaccaacagcaaaacccagcagttctgcatcctccacaaagggatgcgaacaacccagcagggtaagcctgaaacctggttacatttcaaaccttatccttgctgtaatgctaattttccttttgtccagtctactcgctattgctgaggagacattggcagagttcatgtccaaggcgactggaactgctgtcaactgggtgcaaatggttgggatggaggtaatgtacttgtttttctagatagtgtgctaccctaatatggtgatgcacctgatgttgatatctctgaccgtttcaaacgtgatactgattgcagcctggtccggattccgcgctgtttcgcacaa

SEQ ID NO: 4289 - DNA, 740 bp, Zea mays
aggggtgtccatggataactcaaagatagcagctgtagaaggcacttggcctcggtcatgaaccctacgggctcttcagggatttctgggcctaacagggtgttacaggaaattcatcgccgggtatgggaaattgcagcacctcttactgccctgctcaagctagagtcttttacatggactgacgatgcagatgttgctttttcgatgcttaagcaagccctcatgactgctcccttgttgcaaatgcctgacttcacacaaagcttcgtggttgattgtgatgcttcaggattaggattcgggtttgtccttcatcaaggggatggagctatagcttatttcagcagagcagtagcccctcaacataagaaattgccagcatatgaacgggagttaattgggttagttaaagctgttcggtactggagaccatacttatggggacgccagtttaaagtcagaactgatcattacagcctcaagtttaatagtttattctggatcagcgcctttccactattcctcagcatacctgggttagtaagctgtttgggtatgatttctcagtcgagtatcggtcaggaaagcttaatggagctgctgatgcactctctagacgggatgaagccgcaggtttacttagcatatcagccccaacgtttgagatcttcaatacattgagagaggaggctactacagatcctcaggctttagagcctcaaaacatctgttgttct

SEQ ID NO: 4290 - DNA, 644 bp, Zea mays
gtttgtgttggtgaaaaaacgtggagcgcagtactcggcagcagacactctatggctttatcgtcatcatcaccagtggttgccccgtgcaggttcctgtgcccccgcgccactaccgcctctcgcgacatcctctccttcgcgaccacagcaacaaggaggcggctgctcctctccaccgccaccaccaccattgccgccgccatggccgcttcttcctcctgcaaggtcatcgactcccacctgcacgtctgggccacgccacagcaggtgcgtaagcaggcaacgcgcgcgagcccagtttccgcgtcctgggctcctggcggcccgcgggggagttcagtaatccttctggggttgttttttttttttttttaccggtgactccaaccctatccgtgcaggccaaggaggagtacccgtacttcccaggccaggaacccacgctgcgtggcgacgccgacttcttactcgaggtcagtcagagaacttcagaaatgccgcattcatgtgcacttgaggttgccctggagcccattcgtttcagagtttctgaccatcggcggccgaatgagttgtgcccgtgctcttgatagatggattggtgggcgcatttttcgtacgtctgatgtgaaatcgcacac

SEQ ID NO: 4291 - DNA, 597 bp, Zea mays
gaggacgacgaggagcctggcggcgcgtcgtcgtcaccaaacagcacgctctccagcagcctcagcgggaagcgcgcagctccggcgaggagcggcggagaggtggccgaccacaccccgagagccggaggcggcagcgacgacgaggactccggcggtgggtcgcgcaagaagctccgcctgtccaaggaccaggccgccgtcctcgaggagagcttcaaggagcataacacactcaaccccgtacgtgtataattacttatatcctccaaaaagaaacatcgatcaaccttcaactcgatctaactaataataagaaccgttggctgatcagaagcagaaggcggcgctggcgaagcagctgaacctgaagccgcgtcaggtggaggtgtggttccagaaccgcagagccaggtgaacaaagcagcgcccttgaagcagcacacgcatgccatttatactgactcatcctccgtgggccgtggctaatactagtctaataataatattatcgttcaggacgaagctgaagcagacggaggtggactgcgagttcctgaagcgctgctgcgagacgctgacggaggagaaccggcg

SEQ ID NO: 4292 - DNA, 730 bp, Zea mays
gtggctgcttgcttgccatggcacccaactggtgtgtggtgaagatgaaagacctcacggttgcttccttcctctttttttttccatttcacttttgctttttaggctcagtaccctccagtaaattttgctcttctttttgtgcacactttttccctcctcctttcagttgcttggatggatgcatccctctttcttggcatcctccttcctctgacctcaccctcccagcatcggatgcgctggaaaaaaggagaggccaaaagaaactaatcagccatgatgccttttcttgtatgatcctgaaaagcacaattctatgttcagtgaacctcatagtaagaggcactgtcggtcacactagaacaaactaaacccaaaattacattgcatagttttatctgtgtgtgtctcttattcttgctgaataaaatttgctatgagctagctactcgtattattattgacgccctacgtccactgaaacattacacggtctctaacatgactcccgaactactgacagcaataaaaaattatctgtgtttgatggaacgggtttatacttgattttcgtattttattatgagatctagtaataccaacctagtggtatgttattcccgatgatcatgaacactagagttatgtgtcaacaacacctggcagttccgggatatagaccttgcatcatcgctccataaatttcgacgttgttcaggcctgttca

SEQ ID NO: 4293 - DNA, 615 bp, Zea mays
taccctttacaacttatcatctgtttgtttacgagcaaacgagaaggtacataatactaaccctgattgttttcagccatttcactaaacattgaacgcttcacttaatcacttctatccccatgcaataaacaccagacaaactgaactgataactacatgaccttcgaaggtcgtttattactgttgtttaagcgggcctgacatcggagtatattacacgagtaaaggaacaaaggagtgcgggaagtgggccagataagcaaacaattcttttgaatccatgtatcatcacgcagacatcttagacgctaggaccgagctttgcctcaattgaaggccgatgaagaaaatggaaaggaagagaccataatcttctgggtctacgtcccactgaccatctgactcgtcccagtgctgcatgagatacgatttaagctgttgatcatgtaataatcctattacctgtttgtgcgatgcacataggaaagcacataaaagtataaaaccaatattatgtaagggttaccattaattcgctgaatcattcttgctgctcagatctttggggttaccagttgcaatgcgatagaagtaaaatgctgccaccactcc

SEQ ID NO: 4294 - DNA, 648 bp, Zea mays
tacgccggcttccacgtggtgtcccggctggcgctcaacatgggcgtcagcaagctcgtcttccccgtctaccgcaacctcatcgcgctctgcctcctcgcgcccttcgcctacttcctagagaagtacgcacgcgcttcgttcgttcccgcattgcattgcatatatatatttgcactgtccgccatgcatgaacacgaacgaatccgtgcaggaaggacaggcccgccatgacgcccgccttcctgctccagttcttcctgctggcgctgtgcgggatcaccgcgaaccagggcttctacctgctgggcctggacaacacgtcgccgacgttcgcgtcggcgatccagaactcggtcccggccatcaccttcgcgatggcggcggcgctgggcatcgagcgggtccgcctccgccgccgggacggcctcgccaaggcggccggcaccgtgctctgcgtcgcgggcgccaccgtcatcacgctcttcaagggccccgccgtcttcggcccggcgccctccgtggccgcagccgtgcccgtgcccatgcccgcgccgggcggcggcaacaacaacaacaacaacaagagctgggcgctggggtgcgtctacctcatgggccactgcctgtcgtggtccggctggctcg

SEQ ID NO: 4295 - DNA, 648 bp, Zea mays
gggacaccgcgcatcctctagtgtcgacctgcagagcggcagcagactgcactgatatggtttgccggttcgccgcccttgtcgagcaccagaccatggtagtaatacgctacagcctgatggggaacacagagaaaaatcaacgtcagagattcagtcttggttttttctgaagggactatgctgtatcttcagacaaccttggcctccatccacttccacttgaggaacagcagaagcttcttcccgtacgagtcactcgtatcgcatcccgacagacaatagtgagcctgagcatgagagcataaataagtagcaatattgttagacgccgaaacaaccgaagaaaatgtcgattgataggactgtgttgtgcaacaccgacctgagaaaaatagctgacttgctcacaagctagcctcctctttactgacagcgttgccttctcacattcagaagccaagccaagctgtatttccacacactgttcttgtgcagttggggggcagtagaagctagttacaaattcggccacaccatgataccaaaaagaaaagacacaagtgtaacaggtgaacttacctgagccaatgcctgaattgagatggcctcaagcatgccctcctgcaagtaactgggaaaaccctt

SEQ ID NO: 4296 - DNA, 610 bp, Zea mays
atattcaaaagggaaacgaagatggcttgtttattagttcagttgcctctagctcaaatctgtgggctttaattatggatgctggcactggctttacatctcaagtatacgaactttctaattactttcttcacaaggtaagcaatcaattctgttgacttcaaagatctgtaagggtccttccccttttttcttcttaatataatgatattcagctctcctgcttatttgagagaaaaaaaccttcaaagatatgtaagggttcttcctctttgtaatagggtctttacccttccttttcttcttcttaatataatgatacacaatttctcctgcttattcgagaaaaaaattgagagaaaaaaccttcaaaaatttactgttctttgtttatgattgtacgccaacacttcactgattatacatcctcaatgatgtctcattgtcattcgcatgcttgtactgtgttaggaatggataatggaacagtgggagagaaatttctatatcactgcactggctggggcgaataatggaagctctttggtgattatgtcaagaggtaattaatgtaaatgtttgagcttgatgcttagactgcaggcatgca

SEQ ID NO: 4297 - DNA, 655 bp, Zea mays
aaaggatgaccacatgcagcagcactcatcgacccacgagggcaactttcgaaacatattccacatgttacctattataatataaacaaatgcataagcaccaaggatttaagcattgagctattcaggagtattaaggttcccaatcaacgttcagtagaaaccagtggcaataagcaagttaaagggcagaagcacacgatgcataacatgcacaaaactctgctaatacatgtgcttcacagacttccaaccacacaagcatggcaaacaatttttcccaataacaggagttggtagtaatgcatactgaaataaattgttgctaaaattaatgtttatccataaaaaatacacagggaccaaataatatgaatgactacaagtctacaaatgcaatagatgtttctgtattttatgcactacagtactaatgtattatacatacacagacacctttttacatcatccaatacccattctacaagtggggtgaggatactgaaagaaacttacaagtttgaggataataatactgtattcatctccagaagaccaccacagcttttatttagcacgaggattatagattcgaataaggagatgggattctatctataggactaaatctctaactataatttgatctatcagt

SEQ ID NO: 4298 - DNA, 687 bp, Zea mays
acctaagagtcgacctgccgtaggccatcgccgttggagttggagagcttggccgtcagtgagccgaacttggcgacggcctccccggtggcggccacgagctccttgctggggacgagctggccgtgcgggttggagaggagcgccagcacccggtggcagctctccactgccgtcctgttggcctcctccatcccctccatggacgggccgcctgcctgcaacgaagcaaatcaatcactgaaaccaacaaccactggtcgagcagccgcggagcagtttctcgcggtgacagcacgagcattcctctccgcacacggaggtaaaaaaaaaaaaatacagacacaggctgatacgcgccggtggctctaatcattccatgccaccccacccctagatttgcatccagaacaaatacactaataagtaagccggccgaaacgcagcagcagattcccacaatgatgaggcgcatggaaggcggcatttcggcgacccggggggcaagctaaaaagctgggcatccgagcacgggagcatggcgctcaaagcaaataagcaatggtccaaatcagtaccaaaactaggcaacatgacaagccaacccaacccagcaaacacctgaaaacctacacggcgccgctagcggaaagctcaggagccatcgccatcgccgccgccacccct

SEQ ID NO: 4299 - DNA, 543 bp, Zea mays
gccttccgcccgtccccgtgcagcgccaagccggacagcatggcgctgtacgtccacgcgttcttgtcgtccatcgcgtcgaacaccgccgcggccttctcgatgctgccgcacttggcgtacatgtccaccagggacgtctgcatgatggtgttcagcctcgctgtgttcctcagcagcgcgcagtggagactccgcccgacgtcgaaggcacccaggtgcgcgcacgccgagagcgcgctgaccgtggagctctcgtcgggacgccacccatcgagcaccatcgcgccgaacgactcgaggcattcgtcccacagcccggccttcgtgtacgccgcgaggagtgcgctccaggaagccgccgttcgctcctccgcctccagccggtcaaacgccagacgagccatcgccagctcgacgcacttgccgtagaagctgatcaggctgttctgcacgtgttcgtcgtgctggaacccgagcttcacgatgtgcgcctgcaactgctaatggaaacaaacacatctcacatccgatcccagcgcg

SEQ ID NO: 4300 - DNA, 608 bp, Zea mays
tcggttcatggcttaaactattattagtgatatttcactgccgatttatggactgagccggcgcgcgacgacgacatgaaccttcactgctggtttgtaagaactgctaatcatttttttagatttttaatctaagaatcggcgcgcgaagtttattcatggcggttgcaaacacagctgacgagccgacgaggcaacagtataacagtagcgtagcagttattcgcatgagaactaggacaaggctacccgaggcaggcatctggttttaccataaacggggccagcaaagcggcacgagagcgagaagagaatccaggccggccggggaagaccccgcagcgcagcaccccttggattttccgcggtgactgaggatgaggagagaggaggagggggcgtctaccgccgtgccccaccccccatctcaaccgcgctggtgcacagattaaccgtgccacggcggcgacggtacgttcgtgccgcctgccggcgtgtctttctggacacttgcctgccgcccggcccaccgcgggcgcggggaccggcagaagcgctgcccccgccggctggcctcggtccgctgcggcctcgccccggccctccgc

SEQ ID NO: 4301 - DNA, 740 bp, Zea mays
cggtaccccctgatcgtctagcgtcgacctgcaggtagtagaagaagaatgctgtcgttattgggtgcgcatggttatatatctcgatggagaaaagaaacagcttcctgcctcaatatgatttcatgttttggcgtttcttaagccgcgcgcagtttctctcgagttcgaatcatatgttattaattagtaattgctactaaaatttctctgctcttagctagctctagccacagttaactgctgctgctgctatagtacatagtgtcagtggctggggatcgatgcatgaatgaatgaatgacttcgagtatggaactatggatggatgctgttcgttgcgaaccagaacgggaaaatttccccggtcagctaacctctactcatcagctagcttcgtcatgtataacggtgcacacagtagtactaaatgatggacagcgaccactactgggacctccatctccctcggcaatggcaacacgcacgcatccagccagaagggtcgtcgtcgtcgccattgacgtcacaccgcaagctagctagctagctagctcgtcgccgcatgtggaaaaaaccaaccgatcgtcgtctctccacgcactgtcccagtcaagttcctactatggatctccatgcccttttctgtgcaaacacacagaccaacctttacctaaacatgtttgctgttgtagcctgactccaggtccctgcagagaagactatagaggatctccggg

SEQ ID NO: 4302 - DNA, 557 bp, Zea mays
acattctgccagatgcaatatgccatgttgaccatataattaaaaagttgttcgatttctgtttgataaactgtgcattggttcagtgtcgtaggatctatgatttttttttgctgtgcgtcatgttgccttctagttggtgtcaaaacaccagctctactggcaattgtttgtttaaattgacgcctccctaataatagccaatttgctttggaaacggtgttatctgctatatgcgtacatgctctgaaattgatgaccctttttaattcatctgtcttcaaggaaagggggttttttatagactaaattcggaatgtttggttgggacttttgtgttagaagtagtatttgatggagcatgtgaacctccattgtagtttactttacaaacttttttggttgaatgtattgatgtctctaatttcatatgtttctttataatggtaatacagctggaaagttctttaaagtctgccaaggaggcacaggacttgttgcgaagtcaagctgatagtgccagggcattgatgttcaaggatgaagagttcaagtca

SEQ ID NO: 4303 - DNA, 665 bp, Zea mays
tttcacgggtttatatgcaaatgtgcttagatcaggagggttgcctgcatgtttgctccgctcgggacagcagacagtagatgtgtatgcaagcaagcccagatcaggagggccatcaatagtgtctgtagttttacctgtggttttgccttgatcagaagcaacagttttcataggcctataagcaaatgcgctaatatcaggggggctggcagcacttcccttatcatcacttgtatatctgctttttgaaggggggcctagacctgttttctttgctgtgcgtctgaatgtgcctttttctggagctttaagaatagatctgcggcagaaataagcatggcataaaaaatagatacttaatcataacaagactgtactgtcgccagtaagtaaaccaatcatacttaatttccttagaagtttcaagtctgaaaaaaggttctagagctgcatacctcacagaaagtgtgtttttcacatcctttaaaggagcacgaaggccactggcacgggggccggggtatctgaaagatgatatcaatgcagcaaacttatccattgatttttctgcaattccactgtatgtattcacatgggaaacattgcatccaaatcttccttcagttcttatatttgtatcgtcaggatcatctgtatcttga

SEQ ID NO: 4304 - DNA, 656 bp, Zea mays
aaaattccctttttcacctttcctcctccctttccctcaaaagaaaaaaaaaccaaaaaggttcagggaaagagaggctcacgtctctctatccgtattcctactcccaaagcagggcaggtggtgggtgtggtccctggttcgcccgcatccatcctttccgtccgccggccggctcccgttcgccctccactccgccgcccccgcctatttatacccatccccgtccgctgccatcatcctcatcacaggcaacaaggcaccacacctcttcctcctcttcctcctcctagcacagctagcgcctgctccccttcgtctgtgatcatgtcttgcagcagcggcaagtgcaactgcggctccagctgctcctgcggcagctcatgcaactggtaataacagatacctcacatgacgagtactacatgctttcatgacgatggagtagacgcttccatgacgagtattaaattacatccgatcctcatgcatgcagcatgtcccctgacgtggagaccgccgccgccagcagcatcaagaccatggtcctcgctgcgccgaccaccaaggccagcgccggcggcttcgaggcggccaccgagggcggcggctgcgactgcaacacctgcaactgcggcaccagctgcggctgctcc

SEQ ID NO: 4305 - DNA, 667 bp, Zea mays
caatttaggccttggttttcttgggcacggtcaggcgctcccggaaatcatcctccatgagcaccaagccgtcccgcaggacgatcttgggctcccatcccagaacttctttcgcctttgtgatgtccggcttcctctggcggggatcatcaggagtgttctcggtcatcgtcactgtcacatctgggttgatcaactgcaaagttaagtaggcacgttagtaatctgtcaagatttaggaagaagaaaacattgctattatatagaatccaacttgcctccttcacattctcagcaagttccagcatggtgaattcacctgcggcacaagttacaaccatttagaagaactgaagaagatgggacccaacttggttaccacaggaatgtacatacgaaaacacagattgaatttacctgggttccccaagttaatcggtccagtcttgtttccattcatcagcttaataagaccatcaacctgcaatgaatggcatagttgatatagtgcactgacagtcttctgaccaacaacaaaccaattgagaatgcagtggaagacaaaccatatcggcaacatagcagaaactcctagtctgtgttcctggcctctggacagtcaggggctcaccgctaaagattgtgaaaagattagccgccaatctat

SEQ ID NO: 4306 - DNA, 628 bp, Zea mays
tccactggcaggagctcgcgcacgacctccggacgggcaccctgagcgccaaggtcacggagccgtccatccgggaggccgtggccgaggtgctgaggcccgacgccggcctcgcggacttggtggaggccgagtgcggcaaggagagctgggagggcatcatcacccgggtgtggcccaacaccaagtacctggacgtgatcgtgacgggcgccatggcgcagtacatcccgacgctcaagtactacagcggcgggctgcccatggcgtgcaccatgtacgcgtcctccgagtgctacttcggcctcaacctccgccccatgtgcgacccgtcggaggtgtcctacaccatcatgcccaacatgggctacttcgagctgctgccgcacgacccggacgctgtgccgccgtccagggacgacccgccgccgcggctgctggacctggcggacgccgaggtgggcagggactacgagctggtgatcaccacctacgcggggctctgccgctaccgcgtcggcgacatcctgcacgtcaccggcttccacaacgcggcgccgcagttccgcttcgtgcgccgcaagaacgtgctcctcagcgtcgattccgacaagacggacgaggcgga

SEQ ID NO: 4307 - DNA, 679 bp, Zea mays
aatgcgccacggaaggctccaggccctcggacacgcgtccggcctgagtgacttggcagctgtccctctcgccccccacacccccgccaccacaagtagtatatgatgccgctcgtcaccctcctccccttgccatctcggggatccggcactcgcctcccttttccctttccgcgccccatcaccattgccacaaatagcaaccaaggcagtaagcctagccaagccaaccgacggcggcgagagtatatatacacacacacctgacgcctctgctgctgctgggatcaacgcggcagcttagtgacgacgacgactcttctgtctctgcgttgattaatggacagtaacagatccatggcgacgagcggcgtggctccgttcgtggccaagacgtaccgcatggtggatgacccggcgaccgacggcgtggtcgcgtggggcagggacaacaacagcttcgtcgtggccgaccccttcgccttctcgcagacgctcctgcccgcgcacttcaagcactccaacttctccagcttcgtgcgccagctcaacacctacgtacgtgctccgatccgacacgctgccttcgatcatacgtactcctccctatgctgtttttttttgctctccttgctcagtgacctgatcgacggcgacctgtcgtctgtctgtctccact

SEQ ID NO: 4308 - DNA, 687 bp, Zea mays
cgattcctgtcatcgatctccgtagcccgtaggttgctcgatccggagtcatcggaggaggagaccgccaagctggcgtctgcctgcctcgactggggcttcttccaggtactctacgacagttaagttcgaggtggtcggatcatttgctgcttgtgttgtatatcaaccatgagccggcggcctgtccggcctgtggccctgtgctgctgtgcagctcatcaaccatggaattccggacgaggtgaccggaaacctgatgaaggacgtggctgggttcttcgggcagccactggacgccaagaaggaatgcgcgcagcaggccgacagcctcgaaggctacgggcaggccttcgtggtgtccgaggaccagaagctggactgggcggacatgctcttcctcatcgtgcagccgagggaggccagggacacgcgcttctggccgacgcgccccgcgtccttcggggactccgtggactcctactccctggaagcttcgaggctagcgtaccgcctgctggagctcatggccaggggcgtcggggccgccgacccggtgtcgctgagacgcgtgttcgaggggcagacgcagggcatgcgggtgaactactacccgccgtgccggcgggcggcggaccgggtgctgggcctgtcgccgcacaccgacgcgtccggcctgacgctgct

SEQ ID NO: 4309 - DNA, 670 bp, Zea mays
acagagagtcgttcagtcagagccctcaatactgagactaaatcgaaatcaaataaatctttggtgcaattttgtacaagttgattttttggagaagaagatcatttaccaatgttcaatgagaggcccatttgagttggacgcaagctctggtaatatcctctccaacactctagcccaccgccaatgtcgtcatcaccgaacttcttggagaagaaggatcgagaaagagttacatagctgtgaaacaaaagggaaaaatagtaagcacatatggctagcagctcaacgaaaaaggatattgcagagaacaaacggtgaagaggaggcactgatatcctacttgagagaaggcgactctctcaagacaacatccagtgcttggattgcgtcaaatggcgtgttccttagctgagaattgatcaattgcttaagttggtacacgttaggtcgtgccgcgtatcggattgtcaccttgtagtcactgaatttcagcaattaaagtaacaggacgctaaaaagtcagcattaagcagctgcaagtcacaagtgtactgcacataggagtatagggcacaggagtggtgcttacacttctcggcccgccttccccaacttgacaacaaactccattgatttgaacggcagctcgcctgcaggcatgcaagct

SEQ ID NO: 4310 - DNA, 667 bp, Zea mays
tctagagtccgacctgcagctgaatccatggctcagccctgttgcataaaatttgtcagatttccttgatatcattaccatttactaaaactatccaagtgggatcccttgcacgtgctagataaaccatttttccttatgattattgacttccactgttccagaatgtacagcgtactgaaaagcattctttaccatgttttaagacggtcactttctttgctacatgtatggttttcagtcacaaatcacaatccaatagctgtactctctctgtcccaaaagaatgcaattctgaggctgagactagtcaaactttctcaaatgtgcatattatatagaaaaaatatcaacatctatgtcttcaaatagatttactgcaaaagtatattttataaccaatctaatgatgcttatttgatataaaagatgttatatttttctgtgtgtaggtgattgaagttgaaattgtttgactccttgggaaatgagaattgcgttctttttggaagtactagggagtacataccaaaattttgggcatgtccagctattggctgcggcagcagctgtacagccattcagcaactgtagcacatgcagccatccaatcagcagctggcacctcagcaaacagccgcttatacgcacagggaacaggccttta

SEQ ID NO: 4311 - DNA, 642 bp, Zea mays
aagagctgccgcctccgctggaccaactacctccgccccggcatccggcgcggcaacttcaccccgcacgaggaagccatcatcgtccacctccagtccttgctcggcaacaggtgggccgccattgcttcttacctcccgcagagaaccgacaacgacatcaagaactactggaacacccacctcaagaagaagctcaagaagcagcaggccatcggcgccatcttcgcaccacccgactcctcctcgtcgtcctcctccatcgtagtaccacccgccgctaccaccaccaccaccaccaccgtcgaccaccaccaccgtgacatgctcggcgccaacctcctcgtctcctccaaggacacctactactacgcgcgcccaccagccgaggccgccgccgtcgcccgccgctcgccgttcgccgccgacggcgacagctcctcgtcgtcgtacgcctccagcatggacaacatatccaggctactcaccggcttcatgaagcagcagcacgacgacgctgctgctgctgccgacaccaagcccccggccccggccgcccaagtcaacagcccgccgcctgctgcttttctgtcgccgtcgttccaccaccacatgtccgccggcaccgggagtggcacgcca

SEQ ID NO: 4312 - DNA, 655 bp, Zea mays
ctctgtattccttcacactctcctccagcaacatagagacaattgtttattacacaagaaccaaaaaagtgacgtttcctcatcatatccggagcccggtgccatttgtttgtacgagcattgtagaatacaacacgcctcatagaacccctcaaaggatctttcccgccaaacaagtacagatagcaaccactcagaacggcacacccaaagcccaatgcttctgaatactcttgtggaactggtgggagtgacttccatagctggtggagtggatcaaaggcataccaggatatcttcccttcacggtcccttttaaagacatatacccattcttctgccactccaattttcttacgcaaggagtaaaagtaattcccagacaaaagacggttccatcttttgcaaaccatcctgagtttgggctgttcaagtcgaggaactcgtataaggcaggcaatagcaagatcatcaggaaggccaggtaaaagtggtgcttgagtcctgcacctttccttttttgagccccttgacttgcgcttgttttgtttgacttcaggttgcatgcacattttcgcgccaggaacaaacttcctggcctcaacaacagttttaaggcctgtatctaatctgcaagtcgactctagtggatccc

SEQ ID NO: 4313 - DNA, 640 bp, Zea mays
atttccagatcgctagtagctatcctggccgacagccaacagtgttatcgaacgctgtaaacggagttgatcacgttttccacattaaccaaacaatgtatcagatagcggcggtagcccactccattcccgttaccacttcaagtactaaaccaaacagcaccttagtccctgtaatcaaacaggtataactttagtcccctgactaaacattagttagtccctgaaccaagcaggcccataacagtcaaggaaggagcaagagttgcatatgtgaggaaggcagtcatataattcagatacagctcacggaccagacgagataaggtcactctctaccatgggtttgggagcactgctgcaaaaatatattggaaggaaaggaaatttcgtaacttaagaaactatagcaggactgatttctatgtcagatcgaatgcgtcaggtagaggattcttcagcaaaagaatatgatacaaatcagctacaggcttgactcatctgcggtggtggtagtgcctgctatcatgcctatctctgtctttgtccctggaatggcgtgacgacatctcagagctcgagctgtaatggcccaagtgctgcctgctggggtatgaatgcggggtccaggcaccatcat

SEQ ID NO: 4314 - DNA, 677 bp, Zea mays
gtaaaatagaagagcagcagcaggaaaacacaagcttccatggaagcagacagacagacaggcaggtaccctctcttctgatcaatcaatcgaaataggcaatttgcattgaatccatcctcagctctcctcaaacactgtactactgtacacaaccgatcaccatcacccggacacacactggaaccccttgcacaccgccagccaggccgcgaacagcacgaggcagacgacggcgtccacggcgacgatgaccttcacgtgccgcatccacagcgaccgcgacgactgctgcctccgcagcctggactggctgccgctgcgctccagcgacatgccgccgacgtcctcggccggcatcacgtctatcctcaccgctcgggtcccgtggtgctcgtcctcacagccccccgcccccgccgccgccgtgacgacagcttgtccctggaccgccgcttctccttcctgctcccgctcttcccgagcaggggcgccttggacgacgacgtgcagccgtcgccgtcgcccgcgcccgcgcccgcgccatcgagcacgaacgcggcgtggggcatcttctccagcgacgccaccagccgctgcacggccggcaccagcgactcgtgcggctggcgcccgccgcctgcgctgctccggaacgcgtcgcggacgcgctccag

SEQ ID NO: 4315 - DNA, 617 bp, Zea mays
tactttcaagaagtagcaaaccttgcagccattcagtttggagatgatgaatggactctgtagcaagaatatccttaccatacttagtcatagttttaccttctacgtcaaacttgttctgtaagtgtttagaagattttatttcttccaactcttgtttcagattagaacattctgttcttagcaaggacacttcagtagtgagttgattacgtgacataagttcaacagcgagctgttgagcaaggccctgtgtctcagtgcctaacttgtcagtaacatgctccagagatgttgcttctgtcttaagctgagaaaatgctgactcagccacctccaatcttgtcctgagccggttattctcatcatgaaccgcagctaaatctttatcagcacaatactcaggacttgagctatgagcccaatcattgctcccttgtgataaaagatgtttaacccaatgggcacctttttctggtgtaggactttgactggtagaacaaaggggtaagtcatttgagctcctaaagctattgatttcatgagcaccgtgtggatcattcttttcagtaaaaataccatctgaagtatgtgacgaattttcatagtcgtctgtt

SEQ ID NO: 4316 - DNA, 658 bp, Zea mays
taaacaaaattttgaaaattgtgaagtaccttaacaatccttttcattgctatatatgccttcgggatcttctgtgttatctttagctagttatcagatataattgcccatgaaacgaatgctacagaaggaattagataattaattccaagactcgttgatttagtttatccttgcagtctaatttttcatttcaaaaaataaatctgttataactcctttatactgttttgatttttccccttttcagttggcggctggtttgctacccttgcggtcgcaggatatacagcattagctgtgagaaaacttgtgaaaacacagcttataccagcagagcccatgagcaaggcatcgccattttctacagtagaaacctgggcatgcatgggctgctgtattcgttgcatcgttcggtgttgcatgtttcaatcccagagctcttggtaccacagcaagaacatgccttccctttctgctcgctgccactgtgctgggatacatggttggttctgggtaaatatgcttatataaactcggatcagtaggattcaaaatatgtagacagtttgttcaattttgtctgacgatttggcatttttcaggttaccatctggtgtcaagaaagtgttacatccaatcatcacctgcgcacttt

SEQ ID NO: 4317 - DNA, 954 bp, Zea mays
cttgcatgcctgcagatggctgaaccaaaactgttttgcaaaactgcactgaaccagcaaatggttgatagtttcttccatctggtcgcatagagggcaagactccgggtgatccaaaccgcgcttagcaagtctgtcagccgtccaacatctatcgtgctccacaagccaaaggaagaacttacactttcctggagcccaggatttccaaatgcgttcagcaggctcaaagttaacagagccaagaagcaaagtcatgtaagctgagctagccgagtattcacccgattcactgaacctccaggtatgcacatcgggaacatccggctggagaaccatcccctctagcaagtcacaaaggtccatgagattagcaagggctgtaacagaaatagcccctctcagatcagccaaccaattgagatcaggcaaggcatccttgaccaggcgtctagaagcaatacgcttgggcaccataccgaagacagcaggtgccacctccttaatacatttgccattcagccaacgatccttccaaaacagagtatcagacccatctcccaaatgagtgataacagccgcagccaacaagctttgcacaatgtcgcaagtttgaatctggaagtccgaccatggcttagtcctatcagatttttgcagccaaggccacctagcccgcagtgcccagctcatgatccgaagatcactaatacccagaccccccaggtccttgggtctagtgactttgggccaagtcagcagacaatggccaccattcacctccttcctccctctccacagaaagcctcgtcgaagcttatcaattgctttaaaagcccaagaagggatgtccaacgccagagcagcataaatcattcttgatgtcatcacaaattgaacataaatggctctaccagcctttgtcatcagatcagctttccacccaggtaactg

SEQ ID NO: 4318 - DNA, 659 bp, Zea mays
gtgaagagtcatggtcaggccgcgcagcgactgtctctggattggaatccaggtcgcaggaccagacgggacccttgcttgctcgcatcgcatcttgcgtttccggagtcccccgacgacccgacgacccaacgacctctcactttcttctttccttttacgagaagcgaccagcaaggcagcgacctggggttgaccaatagcatgaaggggcgatgggggcggtggcagccttgtcacttggcaggtggcggcagcgacgcggcgtttccttgccggccgcggggctctcgctgcttggatcgctgtgcggtcgtggtggcgcactcggctcggccggctcccccaccccccatgcctgccggccggccggcgagcgacgggtcgtcgcaaagccagcgcgcttttcccacccaaattctcccatccatgcagtacgcgacagagcggctgtgctgagtgctgagtgctgctgcgccgcctctgtttttttccggcagctttgccgtcgaccattccgctttgtgccctcgctctgctgctgcctttcctcagtttctataggaggataccgtaacaagaaaccatacttggcaatatagcttgttttcatctagtggtaaaagtctgaccaattatgcctcgttcgaaaatagcta

SEQ ID NO: 4319 - DNA, 659 bp, Zea mays
tggcagacgagcttgaggaagtcgcgccagcagagcacggcgtccttggcctggttgaagctggtgccgtagcgcaccggcgcccgcacgtccgccgacatgtgccgcgctcgctcggcaagcggcagctcgaagaagcgccgcgccacgtccagcatcccgccgctcacgtcgctcccgaatccgtggtttaccacctgcggcgcaggatgtcagctactggtgtgcgtgggtgggtgggtggtcactgaacaggctgacgtcatgcgtgcacgcatgcaaccgtgtcgtattcgtatgtatgagcagcaatagcctggtgacaggtgatgctactgtacgcacgtacgtacctgaaagaagccgtactcccggcacgcggcgtcgagcgtggccagcacggcggcgcgctggcaggggtcgcggaggccggcgaggttgacgacagggagcttgaccctgccgctgcccgccacggacgacgagacggcaaggacgccggggcggtcggacgcgggcaggacgtacctgtcgggcagcctggtaatgccgctgtccgacaggtgcctcacgcctttcatcagcgcgccgtagtcgtaggacgactcctgctgctcatggccgtcctcgtctttcttggcagctgctgctgctgcttg

SEQ ID NO: 4320 - DNA, 617 bp, Zea mays
ttaaatctctgtttgctgcgacttgttcttcttgtgtgtgagagtgggacgaaatctcgtgtgtttgtatgtggcagtttggctcgcttgtttgaatgtaagccatgtgcgcgtggtcatttctactgcaataggagtagagtacttacgatccaacaccgaccgataactactgctatagctcaatagctgtacagtagattacgaagctttgatccgaattaactgcgccggttaatgcgcgtgtcagcatgcacggtggtgctcattgctcgctcgggaaagaagcatttattaaagcggcagagcgactgatggagcgtgtcaatatacataccgatttcctcctcccatgctgttctgttgagaattgatggctgctcgtgtttgccctagccctgcctgatgaatccggataccggctgggtggcccctgtcctgctgcccggttgcagttgcagttgcaagcaacaccgatcaatttatctcgtggttgatgacgattgacgacgcatggtacaaacacgtgaaatgggggacgtatagtagtaactgcgagcgccgttcagatagattatgggcaatatccaccctgctatgctacccaccgcaaacta

SEQ ID NO: 4321 - DNA, 685 bp, Zea mays
taatccagcgtgagtatgctttaatatagcgatcatccagatttagagcttcagtgcaatcatcctctgcctccttgaatctgatgaattccaaatctgaaatataagacatcacaagaaagcagatcttggaaacgaaacatcaaggctccacatgacacattagataggtaaaaacatatcataaatagctctgatagcaagaaccaagactaccgaaaatatgcctcatcagcagtctcaaatagctggtggcaaccaaaatatggctttagattgaatggagatggggtacgtccagtaaaagcagaacaaatgaagaaacaacgtaataaggtgcagcgaatgcacactcccagagcaacttgccttcttagtttaagatatgccacagctctatttgcaaatgtgactgttgtagctaggagacagtccaatacttatattcaaatattcatttccgtggaaacaaaacacaggaaacgacaggtctagctttaccaaagcattttttgcgacagcctacaaggttgcagcaaaatggcctgggtattaacctgctccttttccgatgtagcatcaggcattggttcgtcgtttaagtagcttgagtatttcatgttgtacagatcatggaaacttttagcggaatttcctgaagtcccagtagatctcgccttatact

SEQ ID NO: 4322 - DNA, 597 bp, Zea mays
gtgcatatgcagagacaaatgatgggatgcatcgtcacatggcggacagcgcgacggcttcgtttatttatttatttgtttggagtgggggggatccgtttttattttggtggctggcgacggcaagtcggcaaccctgtcacggcggtcgtcctttgtgaattgtgattagccagcccatggccgagccctcgaacggctgtgcgtcgcgtgttgcgcacgcggccagccccagccggcgtcactgcatccgagctactcatacagtcctacctaccaaacaatgtcctctgcaaatttttcctgtagcattggatgcagcgatgcagagaacacggtcactcatgcctcgcgagtcacgttcttattaccaggctaggagtcaaaatcttccgatcgagtccgtagcgcactgattggggtggggcttgagttcgctctgctcggctacttgcacggatttcgatctgccgctgcgccgacaccacgttcatcaacgtggatcttcaggtggaaggtggaacgcaatgggctccaggattcctttccttcttttttttttaattttttgtatatttcgatcaaatccctccctga

SEQ ID NO: 4323 - DNA, 675 bp, Zea mays
cagaaaaaaaccatgcatgaaaaaatacaaaccggcagtcaggactcaggagggccatcggtgaagctagctcagcagtcccacagtacctaccttcaatattactggcacagccgagtagaacaggaacattgctaccgcgaacccgagaaaagggagcacctgaaacagcagcagcagcagcagccagccagcagagagagagaaggccatgcatgacaagaagggagaaccattagcaagaagacaagaaggatgggatgggtggggggaagtacttacagcaccactagtccatgtaatggagtgaagctcttctcgctcaagtacactactgttgccatcatgtcaaggaaacaacagcaaagaagaagaagaagaaaaatttcccttggacaggaggagggtgtaggatatggcataaaaaaatgggctagagctacttccagaggatacatttgtatggcgctgataagcgctccgaaaagccccagcatcgccatcagctccaccctgttgcttttcttgatgacgaactcctgcattgttccagtgacacaccgaccgtgcatgtaaaatttaaacactggtaacacgtgcgtgcgtgggtaaatctaatataatgcaagcggccgggtcgctggtttttttaattacctcggtgacattgtgcag

SEQ ID NO: 4324 - DNA, 679 bp, Zea mays
agtctacctgcagtatttctgctccaacaacagaagtgacatgttagttgatcgaaagttgagaactaaaaacacggccacataaaataaagaaatgcactatcaaaagtccagaaccaaagtaagcgccattagaaaaaggaacagagtaaaatgcatcagattttaaagaaacatgactcaaattaggaacagatagaagataataagatatatataattgagttgattaagtagatcaaagtcacattacactactattgtaggacagccaagacaaattccactccctgcgtccaaattataattgacttgtcctaagtcaatcttttccaacttcgacccagtttttttaaaaatatagtaacatctacaagtttaaataaatgcactatcaaaagatatttcatggagaacttagggaaactaatttgatgttgcatatgcaggtggattcttctataaacttaaataagttggacttgggggaaagccaaggtgaactattattttaaacggaaggaatattgaacaatgggaaagcttacttgtcaacaaaaatatgcttcactgcaccaaacttggaacactcatcttggacatcatctcgaatatccaagtcaaaatcaggatctgtctgaaaagaaaaagaaaaacttctgatcagtcaggtcagcaa

SEQ ID NO: 4325 - DNA, 646 bp, Zea mays
tggcgaccatggcggtggcgtcggcgatcgagagccggaggctggcctacgcgcggagccacggcctggacgccacggggggccagctggggctcaccatcttcgcgctgctcccgcagttcgtgctgatgggactggccgacgcgttcctggtggtgggcaagatcgagttcttctacgaccaggcgccggagagcatgaagagcctgggcaccgccatgtccctcaccgcgtacggcatcggcaacttcctcagcagcttcctgctgtccacggtcacgcgcgtcacgcgggaccgcggccacgcctgggtcaccaacaacctcaacgcctccaacctcgactactactacgccttcctcaccgcgctcggcgtcgtcaacttcgtcgccttcctcgcgctcagcgccaggtacaggtacaaggcccagtccaccgacacgatcgacgctgccgtcggcctggagaccgagaaagccaagcttcaggcggagccactgggctgacgtcgacgacgacgacggggtgcgtctgcctctgctgttaaaagcggagaagatcagccatgaatgcgtatcgtccaaggcgacgtgtgtatgtgtagcatcaactcacttgtaaaaaaaaagcacaggatttccacccg

SEQ ID NO: 4326 - DNA, 677 bp, Zea mays
ttcgcctactacctcatcccgagctacctgttcccgtcgctgagcaccgtgtcggtgctgtgctggctgtacagggactcggtgacggcgcagcagatcgggtcgggcctgcggggcctcggcatcggctccttcggcctggactggaacacggtggccggcttcctcggcaacccgctggtgtcgccggcgttcaccgtcgtcaacgtcatggccgggttcgcgctcaccacctacgtcgcgctgccgctgctctactggacggacacctacaacgccaggcgcttcccgctcatctcgccgcacgtctacgacgacgccggaaggccctacgacactggccgcgtcctcaaccgcgacaccttcacgctcaacctcgtcggctacgacgcctacagccgcatcaacgtcagcgtgctcttcgctgtcaactacggcatcggcttcgccagcctcatgtccacgctctcgcacgtcgcgctctaccacggaagggaggtctgggacggcctctgccggaagcggcagcaccagaagacagatgtcgacgacgtgcacacgaggatcatgaggcggaactacaagcccgtgccgcagtggtggttccacctcatgctcgccgtcgtgctcgcgctctcgctcttcacctgcgagggcttcggccagcagctgcaggg

SEQ ID NO: 4327 - DNA, 695 bp, Zea mays
agggaggtggtcctgggcatggcgaaggacacgttgttcatggacgcggcgaacctggtgccgttggggccctggcacgtgccgttgacgcggctccggcacgggtccgcgcccagcccgacggtgaagaagaacctgcggtccacggtccgcggcacgcgcgccgggtaccgcgcgctcgcgaggctccggaacatggccgagaagttggccaccgcggccgtgtcgttgtaccgcgggagcgccggcaagggcaggctccggagcggcgccgcggcggactggtgcgggccgtactcgacggcggcgacggcggtggtgttgtcgaacgtgccgacggtgttggtgtagggcgcgacggcgatggcgaaggcggacgacggggcggcggcggcggcggcggcggaggcggtgaggagcacgtccatggtctgccccggcgagatgaccagcgtggcggccgcgaacggcttgacgtagctggcgtccgcctgcaccaccgtcagcgtgtggttggccaccgcgaagaagagctcgtcgttgagcgccgcgttgacgaggcgcagcaagtacgtccggccgggcctcacccgcagcctgaacgtgtcgtcgccggcggcggaggagcagttgtaggtggggccaggcaggccgttgaaggtgtaggcgtcggagacgttcggggccccgccggt

SEQ ID NO: 4328 - DNA, 642 bp, Zea mays
agcgacgatcggaggcgccgccatcgcacaatccaccgtcgctgcctgctcctggtgtgtcctctctcctctctcctctccctctccatctccgtctcaaatcttttacccaaaccctaaccccgactgctatctattcttgtaagtgatactctcacaagatccgctgctacatccatttcttcttcttcttccacgttgctgggaggagacgggcgcaaggatttgtgcgagggagaaagaaagggaaggaaaggggataggacgggaggaggagcacgactgcttaccacgggtgttcttattcttccccagcccggtaccgtagatttctcttgttctgtgtagtgtgctttctaatttgtcgtatatatataaatatgtggaaatatattataaataatttcctttgaatttgacttgtacaagtttctataatttttacatgtaatgcatcagttatatgttttccatatctgcatgtgcacaggagtagcgccatttgccaacagcaacaatacgcgcttgtagcaatttcggtcggtagtgaacgcaataaacaaacaccgttaggggatctaatggcgctgttcaaataaaacaaacaaatccaggtaatcattacactgtaaaccgatagca

SEQ ID NO: 4329 - DNA, 664 bp, Zea mays
agtgaccttgtcaccattttctaccatggcctggagaccattgctggggctgtactccagttgcagagctctcgctgtgcccaagttgatgaagttgtgcgtggagcccgtgtctacagtgctttgagagcccttcccctaatagagacttccaactgcattgtgccttctgatcgaactccattgtgctgtggtgccatgagttccacgtcgatcttaatacgctccggaaggccagctgtaaacaggtgcaccttctgctcctgggagagtggggctgtctgggctagcaggtcccaaaatctttcctagtagtcatccaccgtcacgcagaagggaaggcgtgccagttcgccgagaggattgctgcgtagtggcagcccaaatcggagttggtagtgctgcttgaaaactccccaggacaaggaaggcttgtcacgctgaagctgggtgtaccatgtccaggcaattcctgtcatgtgatagaaggcaagccagactttctcctcctctaacgtgtgatgtccttcaaagaactgttcacaccgatttaaccactggagaggatcttccttgtcatcaaacatggcaaactcaaggcggtggaaacagggcacgcctgctgtagcggactgtaattgggtactggccactgtgtggcatt

SEQ ID NO: 4330 - DNA, 674 bp, Zea mays
ttgttggaagctaaattataatttgtctttgctgatcgccgctatgggtatatatatatatagtcgaccagcaagctgactgaatgtctttgtccgtgtactgcttgtctttgctgccaccatatgtaccagcagtctgttaggatgagaaattaccaaatgcatggccagaaaatttccttttttttctctaaaaaagttattttagtctatctcgaacttaattaatttgcagccatgttttattgtttttccttcacaaggatataatctactttaccgtccgctagtttatttttgaactaaactacgataaataaaaaacaacggaggaagtaatataacaagggatacatagaacaaagagattaactacacaacaaaacgaattacacatatatacaatgcggcgtgcgggtgacgatgaccgcgctaacgattgggaaagcactgatagcaccatgccaatgacctaacgttaccacacagagatatacgtgtcttcaatcatcgcacgaaacaccatttttcgggtatagccaaacggggtttagggttcttgatgcgtttataataaaaataatatacgcttatagaaaacgggtcccggccagccatacataataaaacaagtttcagaatactgcccaaattaaaccaacataccgtcccac

SEQ ID NO: 4331 - DNA, 630 bp, Zea mays
ttgagatgcttgatgatgaagtctacgttggggcggagaatagctataacctattcacggtgcgcaagaacagcgatgcggcgacagatgacgaaagggccaggcttgaggtggtgggagagtaccaccttggggagtttgtgaacagattccgccacggttcactggtgatgcgccttccagactcggatatagggcagatccctacggtcatctttggcacaataaacggggtgattggcattattgcctccctcccgcacgaccaatacatcttcctggagaagctccagtcgacccttgtgaagtacataaagggcgtcggaaacctgagccacgagcaatggcggtccttccataacgacaagaagacggcggaggctcggaacttccttgacggtgacctgatcgagtctttccttgaccttagccggagcaagatggaggaggtgtccaaggcgatgggcgtccccgtggaggagctgtccaagagggtggaagagctgacgaggcttcactagtgtagatggaacatggaagcgttgcttgtaagcaagtagtaacttgttccctgagctgtagcctccgcggctcgcacgatcaaagtgttcggccgtggctgcaggtcga

SEQ ID NO: 4332 - DNA, 610 bp, Zea mays
ccaaagtagtaagttgcttagaaagtctaagtgtaacagaacttcacatgcgcaggagtaccaataacgacaagcctttgacaataacattcgatgtgtttgtaaggagatgaaaaaatcgtggctgcgtgaacctttgatcgtaaaatttcggatcatgcgccaaacaggtgttttggtcagaataaaggctatggataagtaggggtggtaatgtgctctaaattttagtacactataaaatttaaggacgatcggatcatattaggatcgggctttattcctactcatttttgaactaatattatttaagggtcctaacaatttatgaagaaacatttggattgtgatccattaccacccctaatcacaagcaactatttcacaagtcaattcgtgtcctatggagttagagctatagaagaatggtctaacagcatttacagtatgtggaatctagcagtagaacaaggctgattaatcactttaagggtcattttgctacacaaagtaaaaatacagctaatgcaagtgattcacaatgcagcaacggaaagagaaggatacatacctcggaagcggttgtcctgggatataattccaaatgtct

SEQ ID NO: 4333 - DNA, 642 bp, Zea mays
gtcatctgcctcggctcgccgccgcacatgatgggctggttgaagccgccgttgaacgccacgccgaacacgtcgttcggggccatcttgctcgccgccgggttgtagaacagggtcagcccctcgccctgccaataacaactccatcccatcccattcgcgcatcagattcagtgttgacacacaacacaagcaaggcccgaaccccgagtcccatcccatccaaaacaacaactcgagtccacaacagtactcaccggggaggacggcaggccgttgctggtcttccagtacaccggcgcccgcccgagctcgaactccgcccacgtcggcagcgacaccgacaccctgcttggagtttggaggtcgatcagaagccgtgcgttcacgtccagcagcagactcgtcgtcagccaacaaagctacaagagcagcgagcgatggcatgcagcagacagcttgtttttgttacgccacttaccccgtgttctgctgctctacggcggccggcgccgcagtggcagcggcggcggccgtgcgaatgctcgcggaggagctccgccggctggcgacgaggactcctgcacgggtcggcttcggctgccggcggatagccgcggcgccggtgccgctactcaggcg

SEQ ID NO: 4334 - DNA, 599 bp, Zea mays
aactcaattgcctttgcatggtataaaaagttgaatttatagtcccgtttaggatttatcttttgcttgatttctatagaaattttcttatttagctcagttttattctatacactgacatgcttggatatctcagatgacagccatgcattgattactgaatgaactgtccttttttttctcagagaagcttcacaattagttgcctattgcattacaatatatagtattgatctttgcagctgaagttatactgtacatgggatccacgatccaagaaccatgatacatagactgatagtgtactcagctactttttatatagccatgggtgacttttgttcatgaattaactgttctttgtgtttttatattatgagctttgcaggttaaccagattaaggataaaatatctgggaaagaacagcacattgcagatttgcagaagaaagctcaggtgatctatgtcatgattttcaaaggattctgctgtcttcatttgcaccgttagtatatgagatagccaccgtttggccatctcttagtctcagttgggacgatgagttctgatgataagtcaaatgaaacatttttcgtgt

SEQ ID NO: 4335 - DNA, 629 bp, Zea mays
agaaaccaaaaattattttttcataatagagaacttattgaggaataagtgtggaaaattttgccaaacaacatgttagatgaattatcattgtgcatgtcaaagatgagaagtaacgaatgtgcctaacttaccaagacgatcaagagctgatggtggcattataactggaaagaagcaaaataataatcctgtaaacttccaatggcaactaaaatagatacggagctcagaactcagggaacagagaacatacttttgtcaccggcctcaagttgtggctgcaaaaaggtaaagaaatcttttacagtaaattccaaaattgtgaaatgtaatattatcttaaaagctactccctccatcccaattcccaaattataggtcactttagctttgacctaagtcaaacatctctaattttgccaactttttagaatacattaacatctacaagctcaaatgaatgcactatcaagaaatttcatggagaattttttgatgttgtagatgttgatccattttttctacatactttacagctagagaattttgatttaggaaaaaggctatactgactattattttggaacagggctgtagtgattattctagcattagatgtacagaat

SEQ ID NO: 4336 - DNA, 657 bp, Zea mays
tctataaccaggaataccggaaaagaacacacacttgacacagatacttgggtttcaaacacaacttgagaaactgcatggtggaacgactgatcacgagggcttagtttgggacaaaagggggcagagtgccatagcaatggctgccaaaggctcaagaaacagatatcctcacaggaggattcctgcaaaaaaatgagcctccggaaaaaaacacccccctcggaaaacaactggccctaggacgacgacgaacagaagacccaccatgacacaaacacgagccggaaaccagactcaactacagagcatagacttgagtactaaactactgcttcggtcgtgtatttgcatccggagaaggttgacctagcatctccagcgacgaataaccgccgtgttcctctaagcaaggatgtcgcaccgccagagctgcttctccagggacgcgatgttgtggttgccaatgaagttgaactggagattcagcccctccaaggacgaagacatgctgcctaggaaagggacgctcttctgggtgaccttcatacagccggacagcgagaggacgcgcagcctgagctgctttgccgctgccaagaccgcgacgccgtagtcgctgaccatgcagttcgaaaggtcgagctcggcgagctg

SEQ ID NO: 4337 - DNA, 635 bp, Zea mays
tccaatgcatgaattgttagctgaacagtgacatcaagaaaaaaaggaaagatgtacttattatggcaatgcatgtgaaatgaggtaatatgacatagagaagtagatcagctgaagcattgcttcctagttaatatttatgccgtcattaaacctttctttagcaagggagactaccttcatgaaacaattagaatggaaattgacaagggccatctagggaccaccaggccacaatacctatacacctatactcaaacaagaacacaagtctacaagagttcttatattatgtcatggaatgaaatatctcatcatctcgggcaaaatggtgaacaggtctagaagtcaaatcaataacctagaacagacctagtgctggcgtctctcacatgagtggggtatggggaagaaataagagaggcaagctgtcaaatcaataacctgaacaaaaaaatagacaaaatggagcaaactgaaaactggaattaactagatctagcatgggacaaaatagcacagcattgtcgttttaataacagaaaatggactcgttatcctaaaaagcgccagctagatatcgacatctacaagtgattccaatgcgcagggtaccccaagtctgcaggcatgca

SEQ ID NO: 4338 - DNA, 631 bp, Zea mays
aacattcataaagttgtccgcagcaaatcgtgtaaaataggagatttgcacggtagattacattgtttgcagagtgaagtttgaaatatgggatgagctataggatagctgctggagacagcctaacgataccacatcatcaacgattaactaatattaagaatgttaatacatttttttagagtgaaatgtatcgtaggtccttaaactttccccgcattctctcatctgggtcgatgaactctttgagtgatcatgtgggtccttcaactttttaagtggttcattttaagttcacccttaggtccaattatggacttgaattcacacctggaatgaaccatttgaaaagttaaagaacccatatggtcacattgagagttaatgaacctagatgagaatgcaggaatagtttaaggacccatgatgcatttcagtatttcactctattgtttttaggttgtctccaacagctaccttatcccatcccttgtctcatcactatctcaaacttcactctacaaacagtataatctacagtgtaaatcccctattttacacgatctgccgcggacagccttatgaggcaccttttgtccttttgagttcatgaacctttatgatgcacctt

SEQ ID NO: 4339 - DNA, 652 bp, Zea mays
tcatcctgggcctccagacgaacgcgtccgactcgcccgcctacttcgcgtccggctccgtcggagcgggcgcgggcgccgtccacgggctcatgatctgccgcggcgacgtcagcagcaacgactgcttcgactgcggcacccgcgcgtggcaggacgtgcaggctgtgcagccgctctgcaaccgcaccagggacgccgcgctcgccgacaaccagtgctacgtccgcgtcgccgccaccgacttcctcgcctcgcccaacaacaccggcctggtgagcgtcgtcggcggcgccagcatccccagcggtgtcgacgtcgcggcctacgacaccgcgctcaggcggcttctcaacgccaccgcgcagcacgcggtggacagctcggtcccgtcgtcgccgccgaggctgtacttcgcgacagggcagttcgtggggctcgacccgcgggtccccaacatctggtccctggcgcagtgtgcgggggacctggcgccggcacagtgccggaggtgcctggatgacctgatgacactgtggtggaacggaagtgggttcaagccggacggggaaagcgcgacgttcgctggctcgcggtgcaacctcaagtctgacctgggggacaagttctacaccagcagcccgatggtgaa

SEQ ID NO: 4340 - DNA, 666 bp, Zea mays
gcctccatgaggtgctagggttccctggccgacgccacgaccgtcgcacccggccgcctccgtccctgcgggccttcgccaccgccctcgccaaacgtcccgagctagggttcctcacagcttctcccaagcgccctccagtctcaccaacccttctgcggttctgcccttggcgccgcgcccatgagcctcaccgaggcgccgtccccgtccccgtcgtcgtcgagcgggagcgatgacttcgcggccttcctcgcctccgagctcgagctcacctccggtgctgactccgccttccctggtgacccctcctccgttttccccgccaccgacgacgagggcgaggacgaggatccggaggagctagaggttgaagccatagaacaaaacgggtacgtgcctccttcctgctcctccctcctcttagttcatcgctagacgactccatgggtttggcggcttcggccgcgcgattataaccttgaattgcacgcacatttagagttggatgatcggccttgctgttggattagggataagcagatttgccccgatttgagcttattagggtttcgtgcttcatctggtaaaacgtatgcttcaggagttcaggatttttgcttgccttttacatgtttcatgttttattggactacgtggagcctc

SEQ ID NO: 4341 - DNA, 601 bp, Zea mays
tggaggtcctggacgtcggctccaaccagctctccggtgcgatcccgcagtcgctcggctcgctctcgaggctcacgtacctggggctgtacctgaacaatctctcaggaagtgttccggcgtctctcggtaacctctcatcgctcgtcgacttgtttgctgacactaacagactcagtggccaaataccagactctctaggacggctgacaaggctcaggcgctcagctcccttgatttagcctacaaccatctcagcggcacaatcccagcaagcctgttcaacatctcatcagttgccaccttcgaattgtccggcaacaaggctctttcaggcgttctcccgtctgatatcggtgccaccctcccaaacctccagaacctgatcctcaacgactgccagctgcgcggccgaatcccccgatccatagggaacgcgtcgctgctcaggtacatacagctcggcgacaaccagcttgaaggggccctgccgctggaagtaggcagcctgaaggatctcgaggtgctaacagtggagagcaaccggctggaggacgagtggtggggaagtgatgactgggacttgatcgcctccttgtcc

SEQ ID NO: 4342 - DNA, 715 bp, Zea mays
tcctctatgggcggcttgtctggctccacgttacgagcaggaaaaccggatgagcaaccgacgattagatagcacatccaacacaacacaatcacacaccagacgactccagaccagactgacagtacatacatctgaggtagaggttgaccgcgtggttgaggaagccgctgccccggacgccggtgagcaggctcgttatgggcacgaacgacatggagatgacgtccgggaagccggtgatggtggagagccacttgccgtggccctgcccgctgtcgacgccgcctctcctgacgtgaatgcacaccatgtcctgcgaggatcccaccacgttctaagggcgttcgttattcacattttcttggtgacgagcagtgcagtagaatcgttggggggcaaaaccgcaacagtacgtgcttgcttacatccttgtgagacacgacgggtgatctgaaggactgccaggcggccgatccgggcccaacgtttagcccctgcgacaacctgccgcctcccgcggtggaagaattggaacttgcggtggaatcctccgagaacctgtcgtcggcgagctccttgagccgggcctgcacgtcgctctgcgtgaggctggagcccttgagctgcttcacgcacaccacgtccttgcctcccatcttcaccccgacgatgacgtgagtcccgtacttgtcgatgaacctgcaggcagcag

SEQ ID NO: 4343 - DNA, 652 bp, Zea mays
ttgacgagcgaacgcgacaggcagcggcaggcaggtccgcaggtgccttccagccagcgcgcactcggccgccactccacgacgcggctccaagtcctcgggccactgcccactggggggctcatgcctctggtgtctgatcaggacagcgtccgcttgcgaccagccaatcgccgatgccaaaggcccgcgaaagggtcagcagaatccgggaaacgcgactggtcgggctcgcctagttgtgtgtggtcaaaaacacgatcgagtcgtggagcacgcgcgaaagctgtaaagctttcccattcccagctcgactcgcggctgcggcactagctagcgcgttcgtgtgcctgtcctgtccgtgtgggtgtggcatatatataaagaggaaacggcgagtcgacgactaggagaactgggacgacagcagcggcgggcgacggggaacggggaacccctgtactgtatttcgtcgacctttgccatggcgtcgtcgatgatgagttctcgcgcgggcgcggcggcggccggaggaggagaacaccgccgtcagcacgtcacggtggcgtgcggtgggctgacgcggccgagtaccaggcccgtgccgggcgctgctggcccacggcccgggacgccgaggccgcggggtcct

SEQ ID NO: 4344 - DNA, 598 bp, Zea mays
tcacatttagcctagacagctatggcaactgagctgtttgaattgctaaatgactagaacaggtgccaagctgattatttaccagggtccaggggaggggggcttaataaccctgaaaggcattgtgatttacaaagcccgtggaaaaacagatccattgtgcggggaggatgggatctttcggattatattgcgtaagtttgccagggtcttattttgttggttttttttgtcagtgtatgatgtgctctactgttcactatataacaaactattttaacattttcttagcgatatgtattatacacactgtatttgtgtgtactaactttgctgttacattattctttcccttgaactaggcactgcaaggccagggtagcagcacctatcaaagacaataagagcaaacagccgaaggtgtatttactcactagttgaacttttcgtgttcctagcgttaaatcttgtttagtatccttactgattacttatcacatttttcctaaaaaatgttactttcaggatagacgtcttgtattaaccatggatgatctttctaaagctttgcgcgaggtaactacgtttccatttagtt

SEQ ID NO: 4345 - DNA, 688 bp, Zea mays
aaaacaatccttggaaaaaagaaaacaggtctgtcaccacgtcgcatggccttcgtgaacgcctgccctgaacctgaaccacggagctttcgttcttcacgtcgaccggggcgtcccattcgttgagatcgctcggatttttgtatatatatttttctgggtggaaactggcggagatccctcgctagtcgctactctttttgacccttgcgggcgcggggtttggagttgggccaccaacggtgaacagggtcagagccttttccacgcgggaaccttcgcggcagcgtcgcccatcctcatccgcagcccacgaaggcacgaggtggggcagggacacgctgggctcacgaagctgggctgcggctgcgcacagcccgtataaacgagacccccatgtcccaactgccttgatggccaaggaaacaggcctgccagccagccagccgcctttcgaaaccgagcaccagggagcagacgcggtctctggaacccaggttccagcgagcaacccctctagccaggcgctgagaatttctgtgcggaggaggcggatggcaatggtggcggcggcggaggtgagcgggcgcagggacgccgaggcggagctcaacctgccgccagggttccggttccacccaacggatgaggagctcgtggtgtactatctctgcaggcatgcaagctg

SEQ ID NO: 4346 - DNA, 908 bp, Zea mays
aaagatccaagattggccactgagggaacttcagtcaacctgatagaagagtataatctgttgcaatcgcagctcagtctcagcttatgtctgcgacgtacaagtagagcctgctattggagtttgttcctaacaatgattttttactatgtttcttcatataatttctaccctttctctataattaatctcacaaaatgaagtgaccatgaatttcctctgcaagtcttcaaagtgaaagtgcagccactgggttcacttgaaacttcagtattttatctgagaatttgggcagagcataatccttctcgcccaataacatcctccttcaacagttggcaccgtttaagcttcgccgattagcttccggaacttctccatgtgctcagcctgcaacgagatagcaatggacaggctgccgtcgccatttgcactcgggaggacaaacgccagaccttcatacgcaatgccacctggccccatgaacacaggccggccccatccgaagtcagcatcatggataggaaggcgcacccagctggtgagccctaggttcgggcagcggaaggtatgcgctccacgcacaagtgctgacagatccggttgaagctccaggtagtctaacgctgagcggcagtagtcgttgtccatcctatccagtgctccctggatgactgctgctccttctgccagctcactggtcaccttgcccgcctcagcaagtggtgtcgcggtgaagatgacattgccaaagtacccatctggtagtggaggctgtagcctttgtcggccatcagtggcgcaatacaacttggtgggttgttcaggaggtaggctgcgtgcaagggagacacatttccagacatgtgccgctagcactgcatatgtgctgaaccggggtgcacctt

SEQ ID NO: 4347 - DNA, 990 bp, Zea mays
cttgcatgcctgcagccgcaagaatagccctctggtacctgtctgtaaaaatgcaatccagggcatccaatgaacaaccaaacgccacttgtggaatgtttagacacaccgaatttggaagcatgatcattgaaaagtagtacagtactggtgtatggcaaagagagccggggtagcattaacgcgcgcatatcccatatcatctgcatatgtgccttgatttgattttccacgagcatagggattattaagtcaaagcaatgtgactttgtcgccgtaactctgggctgcgactgttcgtgtgcatctgtgtttagtgtttacctatgctacgcagctgcttgtcatcatcgaccgtaactctgagcttgactgttcttcgtgttcaccacctgtgttatgcagtgctgctgcgacgacgagcagcagcagcggttcggccggcgtgtacagccctccagcgatgggtccgtcggccctcaacgacaacagcgctgccgccggcgtcgtcctcccgatggctggcgctgggcggctgctgatcctggcctgctgctcgctcgtcgctctctactacctcggcgcgtgatgatcgtgtgaggacgagacgccgctccccgctgccgcttgctgttgttggggtgtcttgttccttagcccttttcttttctcctctagtggcagtggcaggcaggagagaaccttgtgacgatgggcgcactgcactgccttccaccggtggaggagagctgggcagtgtgaggcccctgtaaatcttaggttctagggagggagggatgctgtgttgacttcttggacatgtgtgctcattgtttcatcggtctttgtttagggttgatgcgctaagcttcgcactgcctgacttgtggctgatgttgctcatgagccgtgttgtttcccttgccctgatggagagtggttcatctgctggtggcgatggcgatagctgagagcctgagagtggttcat

SEQ ID NO: 4348 - DNA, 942 bp, Zea mays
atgctaaactggctaaatgagcagtggtcctggactaccttttgattgatgtgcttgagctaaccttaagagctactgcattcatatttcgattgactatttaaccttttagttgctaatcattttactacatttggtgtgattatgttgttgacaatagatgctttcatgattctggttaatattcatagttgttacccttgattttggtttcctgttttttttatactgcaagttttgcttgagggtactatccgactaaatatgataagactattacaatggaacacaaaagtctgtgaaatcaaatctgtatgtggaagctgtaaaaggtactccctccattccaaattataaaacattttggctccatgaatctagaaaagtcaaaacgtcttataatttggtatggagagagtataatattattttgagagctctcagatcgtctttagcagttcacctatatggttacccgaaacaccgtagattgcatttttcgtagagtggagtttgaatatgtggatatgaatatgtaagatgctgctggaaatatcctcacaggacaagtatactcacacactcacaccacaatacttaacgccaagtatactcacacactcataccacaatacttaactagattcttgtaaggtgcttatgcttcattttgtatttgaggcacttgtacacagcctacctatacctattctatattaaatacaaatcattaacaagttcgataccatttcacaagatcacactatactctcaagcatgtaattgaccgctcggttatgacaaaccagcagacagtaatgatgttcttgccatccaaacttgtgtttggttgaatttgggtccctttgcaatctatcactttatctgctgtgtagatgcctgaagcaatccatcacggatctgactgccaatatatgcaac

SEQ ID NO: 4349 - DNA, 999 bp, Zea mays
agagtatatggaatatctttccctgattctcgacgtctcacggtatagaatataatttctgcttatgatgctatattgctatctctgatgacgtggacaactataaactgtttactaatctataaccctgctgaacatgtatgttacatttgcactatagatactagcataaattatttgtcatgattcatgtgttgcacctgactaggcagaaagtttcatacacgatgataatatgatatgacatgcactttcccctgaatcaatgtaatctgttggttaacatgggttatggggataaggatagtttgcacaacacattttgtgaaactgttagtgagcgtgtctcttaggcactgataagttcaggtaaccgtataattatgaattatcaagctaggtcatggatttcagatcagtgttatcgtaatctgtccctgaatgatatgcttacattttcttttgttattgttctcatcttttgcgtctatgtttattacatgatactttgcaggaatataaacattttctagaggaagctaagaaacgtgatcataggatattagggaaatcacaggaactcttctttttccatgaacttaggtaccttagcactcctttatttttcttcatatctccattgcgacatctctggttaatggcgaattgctgattgtacttataaattataattgtgcagccctggaagctgtttcttccttccacatggtgctagaatatataacaaactgatgaactttatgcgaaaacagtacagagatagaggataccaagaggtttacactagttggttatttactcagttggatcagattatagacatttctgatcaattccactgtttatgttccttatatgcctatcttataggtgttgagcccaaatatttacaatatgcaactttgggaaacttctggacatgctgcaaactacaaggagaacatgtttgtttttgaggtatgcacattcacagaatat

SEQ ID NO: 4350 - DNA, 962 bp, Zea mays
aaggtaagatgtcgacgagaattcggtcgaagtagacacgtatttcacgcagaggatgatttttttaaagatccattcctcgtgaaggtgaccgggaaggccgtgatgctggacgagatcataaactacgtgcagtcgctgcaacggcaagtggaggtgcgtagagtctgtctcctctgtatcggacattaaagaactctcttgtaaaacaaagtacgagctgtagcttctgaatctgagcaagacggttcttgatttcgcgacagttcttgtcgatgaagctgtcgaccgtcaacccgcgcctcgaactcggcgcggacgacagcttcgtccccagacccagagacgacgtacgtaatttcctcctcctcctactcctcctcaccaccaccactcgaaatgaaatgaagtagtggatgatcttcctttttgtgatcgcgttgcccatttcttgagaactatatgcgtaacggattgcaggccaacaagatgtgcgccgccgcgacgtcctccatctccatggcacagcagccactgccactgccagcagcctaccacgcgctcgagggctcgagcccggcgttctgctacaccaccacgcccccagctcccggcaccgcggcgcagctgggcgttgctgcgtcggacgccaaagccttcgaaatggctcctccttcgtcggcggccaccgtgaaccaccacggcaccgcggagcggcggccactcgaaggacctgctgatgagaacgcgagtccccaggtacgtacgtacagcaagcaagcttatttgccaagttcgtccatctcgatcgtatcgctagctgtgcgatcgatccactccaaaactgtggacgcgtgacgcgtcaagggcgaagaggtgagaaacctgccgtgaatttcagatgggggggaggagcttgtgggaagagggcgatgatgatctgcaggtcgaataaagaggat

SEQ ID NO: 4351 - DNA, 960 bp, Zea mays
tccagggattgcagctgcatgtgccacgcactcatgccgtcacgtgccaggcattgggcaagaaggggtaccgagtacgtcactccacggattagctggacgttgggaacggcgccaaattatccatccagcaacgccggagtgggagaaaagaaaatgtatatccaaccaacatccagctagcacctagcaatgcatacagcaccagcaccatactcctctcctgctatagggcatattactgtacatcgcaccccgtactgcttgctagtcgcccagagcgagacgagaacgccattggtgtgccgcaccgcacgaaaggcgtgtcgaagcagtggaacgaaagcgccgaacgcccagcaagcacgtagcagtacatgcaagcagtgtcactcctggcacgtcccggtcccggccggatatatccggcccacccacccaccacccatcgtcgcctacatacatctacgagctacgacgcccgcgtgggtgcgacgccgcgcgccgagagcctacagctacaggcgctttgcgcacgggccatacgggtgttggttagcgacggcgtgaaggctggctgcactgcactgcacgagagctcgaacagaaagaaaaaaaaaaaggcgcgcgcctttgcgtcgctttggcgccacctttaccttggcagcctgcctcggtcgctttggcatctgctccgatctgggtatttggaccgctttctcttggctccgtctcgtgcaggcagggggggcatgtgtcgactggatattggatagggtaagggttaaacaacacaactgccagtagatgcttagatcgatgtgggtgcggtgcactgcgctgcatcacggtctccttttgaggtgcagagcatgatgtcattcaacgaatcaacgctagtcctgtcaatcagtgtgcgcgtcgtacggttgcggttaaagcttttgcctgcaggggtac

SEQ ID NO: 4352 - DNA, 906 bp, Zea mays
gaaagttaatcattgaagagctctaacgcagtgctaccaatcagtggcctacctgaccaccctcctgcatccaagatagcatatcttccattgctaatgcagccacctgaaaaagcatggtgacgatcttacaagaaaaatgagaagaaaatagtatatgtttctagaagcgcatgcatgatacaattcactgacctcgttacgtgcctccacaccctccctgttatctccacgaaagaaatcagcagtctgctcaaaataacaagatgctattagaaaaatcttattggatagggttatataggaccataaagaaactggaagtgcaagctatatatttgataaaaaaatcaagagttaaacaaaagtcggaggatagtgatgaatgtaccccccccccccctggtgcccaaaaaatgctacaatgggccaaaaagttgtaagtacctgattagttccatgcttgagccggcggtactagaaaacaaaatagcaaacatgattagcgataccatacacacatgcaattttctctacaaaattagcttaagctaaattatcacctttccaacattgaagtgttttgtttcatgacctaaccatcggagatatcttgtaagtttagctgctgtaaaggtcttacctcgagctggtagcccaacctagaatatcagcagatgattaaaaaaagaactgcatgcatacttatctgaaagaaagaaagaaagacatctcaatggattaactggaatagttccagctatcggaatacctgcattccatcttttagatgcaatatatatagctgaatcatgcacatcaaaaagtttatatgtttgtaaggctgtgctgtactttttctcaaagaaaaaaaaatgtactcacagcactcaataaatccatttt

SEQ ID NO: 4353 - DNA, 1005 bp, Zea mays
caagcgccccccgcaaaagccccctgtccggcccctggcacccggctcaacctcgtcggccgcagcggcctcggcggctgccgcgtacaaggctgcggccgcggcggcggccgttgccaactctgggggcgtcgacctcacccccgccgcgcggcgcagcaagaagcgcaaactccccgagaagcagctccctgaccgcgtcgccgcgctgctcccagagtccgccctctacacgcagctgctcgagttcgaggcccgcgtggacgccgcgcttgcgcggaagaaggtagacatccaggaggcgctcaagacgccgccctcgctccagcgcacactccgcatctacgtcttcaacaccttcgctaaccaggggcctcgcaccatcccaccacccaagaatgctgacccgccaacctggtcgctcaagatcattggtcgcgtgctggaggacggcgccgagctggatccttccagtgttgtgcccaagcacaacccagtgtaccccaagttctcccaattcttcaagagggtgactatagcgctggacccctctctgtacccagagaatccgctcatcatctgggagaatgcacggacagctgcccagcaggaagggttcgaggtaaagaggaaaggggataaagagtttgttgcaaacatccggctggagatgaactacaatcctgagaagttcaagctgtcacagccgcttatggaggtgcttggggtggaggtggacactcgcgcacgggtgattgctgccctctggcagtatattaaagcaaagaagcttcagaacccaaatgatccttccttcttcatgtgtgaccctcaattgaagaaggtgtttggggaggacaagctcaagtttgcaatgctgtcacagaggatatctcagcatctgtctgccccgccacccatcaatttggagcacaagattaagctgtcggggaatgaagcgcatagcagtgcttgctatgatgtgctggtggatgttcccttccc

SEQ ID NO: 4354 - DNA, 1038 bp, Zea mays
aacctgagcatcggcaccagcacgccgtccagcgaccggttgaagaaggcctgggacggcgggaacgagtcgaggatgatggacgacgagtgcggcgtcgagaccttgatgtaccggtccagcgccgcggccaccagcgcgttctggaggtagcgcatggcgggcatgagcagcggcgccgcgctcggctgcgccgagagcacctcggaccccacggcgatggccgtgatgttcacggcggggaagtgcgcggccacgttgcgcgccacccagttggccgccgtcgcgttcgagttgccgatggccagcagctgctcgttgggcacggacacgatgacgcggatgccggtgttggacagcgccgccagcatcgccgggtccgcgtcgtagagacgcacgtggcggatgttctgcgaccggagcagcgtggtgatctgcgtcggcgctggcaccgacgacatggccgtgccaatgttcacgccaatgtacgcacctgtacgcgatgacaacaataacaaataaatgcagagaaccaaagtgtaagaaatctttctttcttgatggaagttacgaacgagtgatagaaatctaacgacggtaacaagagcatcacagttttcctggtaaaaaacgccaaaacttaacagtcagatgtttatatgatcttctgattaatgcgagacaggaaattgcgttgtaaggcagcaatcctcaatataaaaacgcattctttcgagcaaagctgtgtggaagaaaaaataaaataaatcgttcgtacagtctagagtaatgtaagaaaggacgaaatgcatgataccaccatgcgttttcgtagcgaaaacaaacaaacaaacaaaagggaaatcgagctagctgtaaaagcacaagacaggccaacttggtacggggaaagacgttggaaacaggagccccctcaccatgctgctgtcccgggcccggccatccacagaaaatcctgggcaatgtgcagtggccagtgaccacgttgattcctgctgctgttgctgcaggcactgc

SEQ ID NO: 4355 - DNA, 875 bp, Zea mays
agacacaatagcagggaatgttatcatgaattacagctgaaaatcagtcgatagaacataaaaaggaatgactacgatacctaatgtattgatgaaaaatggtaaaaccatggaggcaggtgattgaacatgactagttagtttttatataaaaaagatccatatatgacatattcttatcaccaagcatgaactgactacaaaaccataaatgcaatacccacactagaatagaagtgcacatctttgtaatatttgtaccttcaagctctatgtcattttcatgagcagcttctaacatggacattccaactggaacacatattgtcttttctgagccatccttgttgacaaatgttactgagattctgtgcatagtacggagaaaaataaccacatcagtcatcagaggactgcctctactgaaaatgattattgaaagctcaaccctaacaattcagtaaaactgatcaagctattgtttagtggcatctattcctctaagtgtggaaggagcagctccttaaatggagagacaacaataacaaaagaattccatgttagaaggaactgggctaatctgatacctggttccaagatacaaaacaaccaaggagttaaaatttagttatataaagaggatgaaacataaccactgttcttaaggcgtcgcctaggcgtccaggcggaggtccaacgccttgcctcgccttaccgctttaaaaaccatgaacaagacacaaatgcacttacttatcctttgcctgactgctttcatcctgatcaccacttgttgcagttgagaaaaggacattccgctgaaaatatataaacaaaaaattaatacaaataaacttgagatagaaaccatcact

SEQ ID NO: 4356 - DNA, 913 bp, Zea mays
gcatgcctgcagcatcagggatgtgagaggggcagtagcaggccagaagctcttgatctgcatagagtggagaaggatctgcaaggcaaggggcagtaccggcatgggagaaggggaggggaagcggcagggaggaccagaggagaggtgccggcggcaacaacagatgtatgggctgcttggtggtctcttgggctgggctttgttagttccttcccctttctttttcttttttattttccttttcctaccttcttcacgcgcagcattgaagttcttcatattcatatggcgtcgccttgccttgcctcgcctaggtgtcgccttgttaactcaagatggtggctcaccacgttccgccttaccgccctaataaccgtacttttatcaaacttttgtttttctttctcataagagctcttaacgatcatcatgctgaatgctgcctacaaaaaacagctattaatttttttagtagttcattgctatagcaaacctttttctttatgagctgaaccatttaatccattaaaccaatgtgtatgcggagatatttacctacttttattattgtgttgataatatctttgctcttattatatgtacatctggttttgtttctcccaaatgctttgacaattccaaagttcatttccttatctagtattagcgtacctgtttttattgattgagggttgtatcagtgttatctttttaaattcgtcctgaactgttcgcttgctcaaataattactttttatggattttcttgtaatcagaacatctaaggagatatcagaccttgaaggggaactgttgtcaattagaaatctgcttaatacacaggcagctttaattcacggtctatctgaaggagttcagatagattcattaacttcaggccctgaaggtt

SEQ ID NO: 4357 - DNA, 940 bp, Zea mays
acacaaggccgcaaacagtacctttcattggaaagagaaaagaaaaagaagctctgcttgattgttggagtaaaagagagccatgtaggctatgctattgctatgccgtatggctagctaatgcaacggaagagcagtagacacgacacgatccatctgcctcggatgcccccccgccgcccatgcgtttgtaccagcctagctagctagagaatatgacaccaactcgctcgtccattcgttcaagaggggcagcaacaagagggtgcgcagaagaggctcgccatcatcagcttgtgaaagctctgaaggaaaacgcgcagagacagacagagagactagagagagaggcagagagggagcccgtacatggccgcgcgcggctgcgtagccatggcttccatttcaggcggttttccgagaagggcggggcgcggcggggcggctcggctggggccgggctgctaccaccagaccaaccagagctcgaagagggctgaaatgtcccggtccggggatgatcaatgttactgtagcccttacactcgcgcgcccgccgcaaacagtgcagagctagctagcagcccccctccctcgcctccgcaaccgcaaggctacgagtttttttttttttcgcacggagagatccacgccacggatgtcctgttcttgaaggcaacgcagtaaatgtgttgttgtagagaaggtagggttcactcacttcagcagcagagcgccaggcacgcagcagcacggccatcatccagtgcctgccagcggcagggaagcctggcctggggtgaatcgcgcgcgcgcgcgcctccgtccgcgtcatgggcgatcgagtaggcgcatgcatgcatgcatgcactcctacgtatgtgatgtagcgcagggcggcagggataggtaggctccgcgtctgcgtctccggctccgt

SEQ ID NO: 4358 - DNA, 1012 bp, Zea mays
attgccttgtacagatttagaaatgttgtcaatttatcgtactcttcatttcttcaatgctggttggatgggaacttgcattgacacgaaagtagtattaaatgaattgacactgtgagcagttaacactggaaacattagataatatcatgaacatatgtgaaattttgctgcctaactttgttgatttattgatgatcagaatatctgaaaacatcataaactatgttgcttgcttaataattcactaatcattcaatatcatatctatatgcagaaaaattatccaaggattcagaccgtggtgaataaagtggggacaataacaaatgaatttagagtcccgaagtttgagatcttagcagggaaaaatgatatggttactgaaattaaacaatatggtgcaacattcagacttgattatggtttggtctactggaattcaaggctcgagcatgagcatatcagattagtttccctgttcaagaaaggagatgttatatgtgacatgtttgctggtataggtccattttcaatcccggctgcacagaaaggttgtgttgtatatgcaaatgacttgaatccagatagtgttcattatctaagaactaatgcaaagattaacaaggttgaggactatatattcgcctacaacatggatgctagagtgttcatgcaaaaattgatgactgtgcctggcctggaaactagatcagactctcaagttgccactgatgaatcctattctaaagaaggggttccagctaatgaaatttcttcttcaaatggaaaccataacggtgccttcttttcttattagattcctattcacccctggatattgagtgtttgtggtcctcacacactaactgtctaactctactagtttttcttcaactctttttagatgttcgagaggacattaaaaatggtgctaatgaatcctctgcggcaagcactactaccaaaaagcgacaacaaacttcagaagaaggtaactatgctgtgtatt

SEQ ID NO: 4359 - DNA, 843 bp, Zea mays
tgttggttctggaatactagtgctcgccgtgctagcgctcgtaatctggaggtgcaacaatgtgccgccgccgctacacgccggcgtcggagacggtggcggaatcatggcgttcaaacacaccgatctatgccgcgctactaagaacttcagcgacaggctcgggggaggtggtttcggctccgtgttcaagggactgttgggtgactcgaccgctgtggcggtgaaaaggctcgacgatgcccggcaaggcgagaagcagttccgggctgaggtgagctcggtcgggatgatccagcacatcaacctggtcagactgatcggcttctgctgcgaaggcgacaagaggctgcttgtgtacgagcacgtggtgaacgggtccctcgacgcgcatctgttccagcagagcagtgccgccgtcgtcgccactgcgctggattggagcaagaggtacaggatcgccgtcggggtcgcaagaggattgtgctacctgcaccagagctgccgcgagtgcatcatccactgcgacatcaaaccggagaacatcctcctcgacgcgtccttcgcgcccaagatcgcggacttcgggatggcggcgttcgtcggccgagacttcagccgggtcctgaccacgttccgagggacagcagggtacctcgccccggagtggctgagcggggtccccatcacgcccaaggtggacgtctacagcttcggcatggtggtcctggagatcgtgtccgggcagaggaacacgccgccgcaggctctcagcaggagcggttactaccacgccgcggcgtatttcccggtgcaggccatcacgaagcttcacgagggaga

SEQ ID NO: 4360 - DNA, 938 bp, Zea mays
gcacggcagcaggccctaacgtgcccccatcctctcctctttctctctctctctctctctgcccacccacatgcattcatatcctccaccaccaccaccactcgtctcgcacgcagtcattcattcacacacactctcccttggcataattccgttacctactggctgtggctgctgcctgtaccagtagcagcagtcccagtactttttttccccttttattaaagaaaaaaaatggaggaagagaagggggaaagaaagaaagaaagtatccgcttactttaaccgcaatgcatgcacacgagaccacgtgactccatgagctgtatgtagcctgtccatggaagtggatgccgaagcatcatcaatgctgctcgcctcgcaggggcatttgtttcgtacgcagcagcagcagcagggcaggggggaaaaggtctgccacgcacgcacccagaatggtagtcgatcaagttcctctgtccgtccgtcgtcgtcgtcgtcaccgccgtttccggcggcctggatttattggcgccttcggcgtcctggtcgctcgtctttgccggtctcggcatgcagtcggcatcatcgcaataaagctagctccatccaccacccctcaacggtcagcagcacggcgcgtaccgtccccggccgcgctagctgcgcacgtttcgacggatttgggaggggaggccgggttcgccgcgccggcgctccccgaggaatcttttctttatccggggaggccacggccgggccagccgctgccgcctgcgtacgtccgtccatgcatgcttcggtatgcggcgactgcgcatgtgccattcaaggcggaggcgggcgtatgtagcactcctgctgcgtcgacgcgcgggcaacgcaaactgccgtaaaggcaaaccttcccgacgcatcccacattgctttgcttcgat

SEQ ID NO: 4361 - DNA, 924 bp, Zea mays
gcatcacctaatattgatgttggccagagtttagatggggttgttccagcagaactcctagtgttgccaacctcaagaagcttctcctaaaaggaaaaacaaagaaattccagagttaattaggtaagcctaataagagatacaaaaagactgtagtgagcacaatactcatgacaacagcacaactgcaaccttttattgcttggtgataatttggttaatttataaggttaaaaaatgtctgatactgcataccagtgttcgtatggcggaacgccgaacagaagtaatactatgtctcataaagggccacagccggggtgtcagtgtagctagaccgtaagggttttcaatagatgttagttcgtcttcttgctcagcaatctgagttgcttcgtttagatcaaattctcccttttcccctgaagctgctgtgccaagcatctttgggaccatctctggttgagaatatatttctgctaacaagttcattacactgaaaatgaaaatgaaactaggagatgagataacaaaagtttttccagtaacatgaatagagtccacttaagaaggaaaaaatgccaacaaacaggtgcacaagagtgccatagctgcaacaatactaatggtaatcagcgacatgaatagggtccacttcaaagtaagaaaatgacaacaaacaagtacagaacaatcccatcccatggaagaggaaaaaaactgaaaataaaaagggccaagtggctgaacctgcccacattattcaaacatatagatttgccagataaaagaaataggatttaagtatacctgcttgtagatgggcttaaatcgtcaaggtcaagcagtatatcccaaagcaacaccacaattggatgcaaaatttggtcatttagcctaactaaagagtcggcagctggaatc

SEQ ID NO: 4362 - DNA, 1038 bp, Zea mays
  unsure (1)..(1038): unsure at all n locations
agtctttcctgtcgtctctctcgactgcgctagccgcccagccctcctcgatcgtcagccattttctcggactgctcaaaggctgacgaagcttcagcgacacacagtgtgtagtactcaactgtatcccccccagtaaatacagtactctgtagcctgactctagtctggactgaacgacgacgatgcatatgcaggccttgaattgccattaacactacttcacctaacccttggcatagacatctatcgtgcttcagcctctgctactgcgctacgtctacgccgcgttcatcgatcgattggttcctcctcgatccgcctcctctgggaaacaagaacttcagctttgcagcactgtcgtagtcgcggagaaatctctctctctctctctctctctctctctctctctctctctctctctcttngcagcagcaacaggtcacatgcatgcatccagctgattttctaaactggtagtaaagcttactactccactcgcgcgtttagtcctagctagccagtattacttttcgagagattctacgacctgctactagccttttaggtgagcgtttgacttgcgtttctcaagatccgtgaccgtcagcaggcggcgctcagcagctcgagtgccaagaatccaggaaaagtccatgtctacgcgactccgagacgacgaaagcgactcggattcccagctgtgcccagtggtgtgtgtgctcgtactccggccgggactccggccggtactcaacgctcgttgtgtggctttttcctcctggcagtatacgagtcatcttccagaaaatgaacatgctttgctttgctttgctctgctctgctccagacatcggttctagcggctgcgtgtcagcaacagcaagcttgctatgctagctataggctctatagctagctagcccgtgcgtgcgcgcgcgcgcccgcccgcccgtccgttggatcttgatgaatctttttcgggcagaaaatggcgacgtactagctttcatgccgggaccagcaggcagcagcacg

SEQ ID NO: 4363 - DNA, 936 bp, Zea mays
tctcattggcataatttatacaaaattgctcaaaaccattcttctgtgatggtttaaccaaatgttacaactgaggaagtgccaagtaaatcagtactaaacaaaatgcaaatattccatacattgaaacactcaaacccataaaaatccaaaatacttatggatctccatgtaaattgcctccctgttccaagtgagtggttaatttggccaacaatccagtcaaataaattggcatagattgacttcgctagtgcatctcttgcttcaatggcctacagaaattagaaatcttgaacaaaattctaaaagatcaaatcaatagatccatgaatatatatttttaggatgctacatacctgagttaatgttagctttttaacaatactttcatttccagctcggattttacaagtggacaaagcaatcactagttgatttgcagtgcagcctaatagctttgcagcagtagacaaccctgtgaatacattacattacacaatcaaatgtctgcatttgggggacattttatactggataaggcaaagaaataaatggaaattatatacaccaaggaattataccttcgtttgaaacaacttccacatggttttcattatcaatcacacagaatgatatgttccccagccacaagacagctgcaagcatagaaaataatttcatttggtcttccttagatatttgaattgtatccaatgcatcctgcatatgaaacaaaaggaaaataacgaataagataaaatattagcacagctttggttggagaagttatttgaatttccacttttccagtaacattaccactagcactgtgaatttttttgaatcatcaacaccatcgattttcaagcaattactctgggacttataattgccgtccaaggcgcttttctgaccaccatttttctgcaggtc

SEQ ID NO: 4364 - DNA, 1020 bp, Zea mays
  unsure (1)..(1020): unsure at all n locations
acccctgtatcctctaagtcgacctgcagcacattgtatatttgcttccacatgggactagaatagtaaacactgccgtatgctaataggtaatgttcttacgcataagttcttgcattaggttgaatgcgtttgtgatcttccaccatcatcccgagtaattctgcgacatccgctgccctgaataccaaacgcatcatagaatataagaaagagtaatgcttgtaagttgtaatcactaaccacattagaactcaaatacagagtcaaatgtaacaagctgatatgaagttgtctgatgaaacacaagctggtaagggaagcttttttttaaaaaaaaaaaagantgacttctttgctctattgtcatatttgattctgaaagaacactcatatgagaaaaacactgccgaaaagattatataataagtatatttttgtacggcagggcctactgttatgacctgacgcgggacgccacaataggcgcaggtcagcggcctaggcggccagcaaggataaggattgaggtgataagattagttagataaggattagaagattaaggagataagaatagttagataagaggggatctcagatttgatctcttagatctagataaggattaggagggagaataaatacttgtaaacactattctatgagatcaagtaggtgattattttctagcctgcttcccagggagcagtgcgcaacctctctctcttctcttgctcgtgacctgcccatcaccagcagccacggcgcccctgcgccggactcaacagcgcccctctacgcctcatacctacaacctccatagcatccctggtaggaaccctaatcctatcaacccaccagatcctaatcctaccaacctggtatcggagatgtccagcgatcctccatccaccacccacccacccaccaccatcggcctccatcgtacccgggacgattgccgccgcgacgatgacacctccaccatcctccgcaccgcctctcacgcaggaatat

SEQ ID NO: 4365 - DNA, 956 bp, Zea mays
agcttgcatgcctgcagatttggagggccctttatagcttaacagagtcaaggaaaactgaagcacggcttaattacgtacacatgatccaataatacaatgctgaaaaaaagaccaactactatgtatgctatgcaatgcaaaccggcccggacaccgggctgcatgcgctagaatctagggctagcgctagggggtagtacgtcgaaggaagcgcggcgtctcgtctcacatcaggtggcctccgccatgaagcaatccggcggtttgtggcgccgctgccgccggaaaagagaagtctggccacattgaacccgcagcggcgcctggcatcttccacgtgtccacgctgtcgttgtccaccagcagccccgcggcgggccagaggaaggacgacgacccggctgcggaggcacctcctccccccatgagcccgaggccttgcatttgtccggccgcgcccaggtgtaaggcccccgtcgggagtccgagcccgaggtcgaagtcgaacgacgaccctgcgccgcggccttcgagcagcggcggccccgcgcccgcggcgccgagcgcgaacagtgagccgaggaggccgccgctctgtccctgtccctgtccctgtccctgcgacgacgatgtcgacgacgacggttgcaagggaggaggcatcatcggcgtgaggccgaagacgtgcggcgccggaggagcgagcctggcgtgctggtggtggtgcgccaggcgcgggcgcttgcgcgtggacccgccgacggggacgttgcggagggacccgcccagcgtccagtagcgtcggcaggcgcggcagaagtggcgcggctgggacgtgttgtagttgttgtagtagcagaacttggtgtcgcgcgacgcgcaccgcgggcactgctccccgcgcgccgcgccgccgccgccgccgctcttggccgccgcctcggcgcccgcct

SEQ ID NO: 4366 - DNA, 981 bp, Zea mays
agtcttgcatgcctgcagcaaattctccaatttttgctccatcaatcgtattgcatccgcccttttttcagggacctttccaatgctactacacagctcatcatgtttacaaatgctaccgttcaaaaataaacaaccgctattctggggactagacagatgcatgatttaccaccaataaacaatagctatcgcttttcggattttacaggcacacccttgtacatgctcacgcgcggcctgaggtcatccacgcgtggccttgcaaccttgttgttgggatcaaagaggaggacctcctcgaaggccttgagagccgatttcaggtccttctgctgctcatatgcgtcacccaggttgttccaagctgtcacatagcctggctggagctccacggccttctgaaactgctgaatcgccttgtcaagtttgttctctcgcttgtagctgacccccagggcattgtagaccttaccaacaaagcaacagtgtcttgagaaagagctaattcaatgagatatcccgtggacatgatttaacgtcttgaatgcatggattatttacattgtacagggtatttttcaactcaggttacaacatcaggagatacaccgtaatttctagattaagtgtcgatctgagcgtaaaaaagttgtatattctgtatagagaattatttggtgtacttcctgtaacactattatactaagacatttgtctgtggtcacagcacacgtgtttcaataacagtattatccttttaaatgagtaagatgaatataaactgactattacagagcattagttctgaggtgccaatgtgccataagagggtgattctacaacttatatcgatcaattcaagaagagaaaaacaaagtagttggctagactccaaaatgaagaaaatgttaccaaacagttgagcatagctaacctgtgcaagatcttgctcgtctctgtcccatttgtcaattgctt

SEQ ID NO: 4367 - DNA, 902 bp, Zea mays
acagactagacgaagtcgtggaggtcgcggcgcacggcgtcgtcgtcccggagcctggccatggccgacttctcgatcttcctgatccactccttggagacgccgtagatgccgccgatctcctccagcgacctgcaccgcccgtcctccagcccgtgccgcagccgcagcacgcgtccttcccgcgcgggcagcctgcccagcaccagcagcagtcgctccctcagctggccccggaacagcgccgcctcgtccggagacgccgactcgtccgggatcacctccgcgaacttgacgtcctgtccgatcgcgacctccgagtagagcgagacggccctgcgagagcacttgcgcgccagcctcacgttggctaccgacacgcccacggcagcggcaacctctgagtccgacgggttcctgccctgcctgtaccggatcccgcgccgcgcctccttcaccttgcgcatgatgctctccattcttgcctgcatttgtaaattaatcatgcatgatgtgtcgatcggaaaaacacatgcatatatatatgtcgatcggcgtacaggcagcagggtgactcctgagttttcagccagcagagcgagcatccctttcctgatccagtacttgacgtacgtggagaacctgcaccccttccggctgtcgaacttctcggcgccgtcaagaacgcccatcttcccagcctgcgcagatcgtcaagaatgccatttaatttcatcccaacagcagtaaccaaacagtccagttccagtcacacacacactctcgtagtaattaacctgaagcagatcgtccaaggccgtccccatgccggtgtatgttctcgcgatgcacctgaccagccactcggtggtcaccagtagcctgtcccggcagcagtaacc

SEQ ID NO: 4368 - DNA, 954 bp, Zea mays
ctgtgcttgcccggctctctggaccctgccaaggtgaagggcaagatcgtcgtgtgcgtcagaggggtgaacgccagagcggagaaggggttcgtggtcaaacaggcgggcggcgtcggcatggtcctctgcaacgacgccagcaccggggacaccgtggtcgccgacgcgcacgtcctcgcggcagctcactgctcctattcgcagtgcgtccggctcttcaactacctccagtctaccaagtaagcaaagctgcaagctgctgccccaagatctgctcatcacgtacgcggctcttcctctgcactactggtctcatcaccatctctccacttccgcgtagcaatccgttgggctacatcaatgcgacagacgcgagctttggcgtgaaacctgcgccgaagattgcagcgttctcgtcccggggaccaaacgccattactcctcagatcctcaaggtttagctcacaccgttcagcacccccagattgtcccacatcctgtgctgtgaatgagtaactactagctagtacatggtgtcgtcgctgacttgctcttcgatcgcagccagacatcaccgcaccgggtgtcagcgtgatcgccgcgtacagcggcgcggtctcgccaacggagctcccgttcgatgaccgccgtgtcccctacaacataatgtccggcacctccatgtcgtgcccccacgtcgccggcatcgtcggcctcctcaagacgaagtacccagcttggagccccgccatgatcaagtcggcaatcatgaccaccggtgagctacctacactacaccacgaactttatcgaagccatatctactatatatatacacatgttctctgggtccttgcatttttttggtacaaattacaatacagtagcgcatgcatgcatgatccgtccgtcccgtgttttgatgcgtgttgcactgcaggcatgcaagct

SEQ ID NO: 4369 - DNA, 990 bp, Zea mays
atcttgcatgcctgcagcattgattttgccactattatgttgaccttgttatcttcaactaggaggatctttgctttgttgctggttggagaacattttgatttcttgtggagtgattgttcttcaggaactttgcatggagcagcacctgaaacggataccaagtctcctcgggaactggaaacccgttcagcttgactattcagttcaaggaccattgcattatcatgttcttcttcagctgtgctcctaacactagcaccattcggttgttgagtagtagaagtatttgtaaaattatgttctgctgatgagaaaccatttaagaacaatttgcggtcatctggtatgtcaggcgggtcatagcacataagcttggtactgaataactttgtgttgttcattattgaaactccaggagacagaagggaagcccgcatttgtggcttaaaaaagaaagaaccttctatatcactgtttgcggaatcattctgacaactgtgcacttcatcgggatcatcactatgctcctctttttcagggattttacaaggcagcacaaatgtaaatgttgatccttcgctctctttgctgaccacagtcagagtaccacccatcaactcaacctaaatcattgtaaacaaacacacttttatcaattaccacggggtgcttcaagttacaagttacaaactacatctaaagttacaggtgttacttttgtatttctagttatctgtgttacatgtatgcgtaagtactctcacttatctgagttccatgtatgcataattattcacattaaaaaaataaaacgaccacgttctacaatattgtgtcctttaagtgcatcaatgcattggaagttgggaactgaagttcataccaactgcttgcagattgctaggccaagccctgtcccaccatacttcctcgcatgatcggcgctagcttgcatatacttcttgaacagcaacggtaaggacttct

SEQ ID NO: 4370 - DNA, 854 bp, Zea mays
tcaaggacaagctctacatcatgctggaagaggtgagcagcgctatagcttagctcgcaaccgaccgatcgccgagcgagctgggcagctcgggtctagctagatagctaatccatgatcaattaggctctactagtccaagacgaatctgaggggggagaataaggggggcaaaaaaaaaagctagcaggaaagtactactagcagcaggagttcaattatggttgccggaatggtgcacctgcgactagggcagggaagggacgccattctggggcctcgcccttcgcttttggaaacctctattctccctcgcccaccttggggtatcttccatccatccatcgaccctggggctggggctggggctcggggtcccctcccctcctccctcacccccggccggtcatacatgcagctgtgctgcggcagactcgcccgcacagtctctgcacagcgctatgactctgggagtgcaaggacctgctgctggccttttctttcgcttctgcatgctgctaggtgctagctactactccactgtccactgccttcttctttgcacgcccatccccttgccattcaatgtctcgggctcgatcgatcgcacagtagtcacgctcacgcaggcagaggcagtttttactggtactgtgctcagctgcgaggcagccgcaggagctcggctcagctagctctctcgcacgtgaaatgtaattggagagttcttctagttctaggtgggtttgcatggggtcaccaccaccggaagggcggcagaggcagcagctgtgcctgtgggcagtggcagagttactgcaccggcagttgttaccgtttcactgttacattgg

SEQ ID NO: 4371 - DNA, 826 bp, Zea mays
gacaccgccagcgaagccgatgcgagtgaaggtgggtgcgaagaagcgtggtcgccccaagggtagcaagaacaagaagaaattatgaatgccaatgatgaacatgatggttatcatcatagatcacatgaattaactgagatatgcattcaatcacactgccattgtagtcaaccgaagcactcgtctgctggttgaattctcacttgctgttgccaggatctctaatgtggagcaagcaattttattgctgaaagacttctttttcaatggtagaattcttccttttcgagattatgatgttaatctctggttcgtccccactgccgtatttgacattatgctttagctgtaactattgtatttgcatattcgtctaatttctgcttccctgaagacagttgtattgatctaaatcgataggtgtctagttactgtttattgtacgtttgagtttggtgctactctgctctagtgctctgtgtcgtaatgctgcaataaatggaatggtttaaagctctaattttaacgcgaattttgcttatgacactttccgtaccagaattttgcaccttggctgtccttattgcaatgtcgtgtgatcaaaatctatttcctttttaagttttttagcagctattagtttcactcatcgagatgcttgttctgctcttgtttattagtttacttgttcaagaaaatcgtatcgaactgggaactgttataaaagtctaaatgtgcacgctcttatcatgattatatcttctccgtcaaaccttttctttatttcttttttgctttgttgataggctcttctgaatcaagt

SEQ ID NO: 4372 - DNA, 1010 bp, Zea mays
tgcatgcctgcagggaccaggccggtggcggcaagggactactacgatgtgctcggcgtcagcaagagcgccagccaggcggagataaaaaaggcctattatggggtatggctccaatccgatgcctcgggttcaaacctgtccgtacggtgtcatcggtagatattgctgctgcatgcttaggggtgcaaactaggcgcaaatgagttttttttcctactaaagttgttgttacgttttgtaagtagtatagtcagtaagggtgtttagaaagtgctgataatttagaaagagcttggttagcgtctgatacgcattttcaatccaatgtgtgtctatggtctttatcaggatggtacatgctgctattgacgtttcctcaatacactaaaaaaatcactagacagttcccttttctattctgcaattgacattaccttgcctacctctttctgcatcattgccctaaaagcttgcaaagaagctccatccagacacaaataaaggtgatgcggatgcagaacacaagtttcaagaggttcaacgagcttatgaggtacttgatttctgtttagcgtgttgtgcttatacctaacttataggtatgcaggggttctgatgcatttttttgtcactgatgtagactctaaaggatgaacaaaaaagatcattatatgatcaggtaatgattcaactgtttcggcgacatatatcatatatgtttatgttttctactatttattagttagcacaagtttattgatgattcattagttgtcgaatgttcgaaacttgttggtagttctcttatccacatatatatacacaatactgactgtaccaacctttacagtaagattatctggtgtcttggggcacttgttggtagttctcttatccacatatatacacacaatactgactgtaccaacctttacaataatattatctggtgtcttggggcactgatgaaattggcattaacttctcctgcaggtcgactaaagagc

SEQ ID NO: 4373 - DNA, 1006 bp, Zea mays
agaaaacagaacggtgacggcggttgccagttagttgagtgcagctgtgcagtgcagtgcagtgcagtgggttactggatgggtggcgatgatacgaaaagggttcacttgagagctgagagcactcactcttggaggcgttggcgaagagggcgtagtccgcagagcccggcttcaggttcagcagtgctgtagcgagacagataggggcaggggacatcaggtattacgaacggaaaaaaaatattaaaaaagcatcaagaattattttacaagatgcaagacatcagctctttgagtatagttaaatgtctatctatacccattgttcatggtatatatgcttaattgaatctcagcatactcaataacatctacattaattcaatctcagcatactcaataacatctaccttgacactaacatgctatatactatttagtatcctctttgtccctaaatgaatgtatataattatatttccctacaggtttattacgaagaggaagtatataattatattgatctaacagtacagtataaaaattagtagatctgagagagtaggaagctaggagcatgggctgttggctagcacatcgagatccgatccacccaaagccggcccaaccaaagcacacagcccactatggtttcatcatttaaaaattgcaagtgatcagcggctttaatcagagctaacactgccatggtcagtgagggagggagcgggagtcgctagcactcactgatgcagagcgagacgttggagttggggaggttgcaggcggcggggagcgccatgagtcggtcgaagcgcaggccgagcgactgcacctggttgcgccccgtgtgcacctgctggatgatgtagcagaggcactcggggcgcgccttctccgtgtcgccggcgtcgccgcagcaggtggacgagggcgacgccgcgtgccccgtcgcgtagtccatgcagtccgtcagcttcccgaagtccccctggcacttgct

SEQ ID NO: 4374 - DNA, 910 bp, Zea mays
cttcccggcgttctcaaggccgatactatccgcttccttggtaccatagaacccctttgcaaaaactgtcgtgacaaataaatttatcatcaagggcactaccaatgccagggtggattcaatggaatagtacctcaacgcttcacggacttcgtattccttgtccgggtcaatctttcttgactgcacaagagcggaatggaggaacacgttgtggggtgtgatgacacatccaacaaggccaacggcctgttttatcgatctcgagcttagttttgggacaagaatacctatcgtagagaaattacagtgtgattacgagttcttttacatattttgaagggaaaatggggtcaagaagaagtagatgctcaccaatgaatagatctttgccactaggctcggtctctacaaacatccatgcgaaggagcacgccattgttgtaattagaaccgcaaatagagcttccaactttctcaccccatagttctcgagggaaagaatcataaagctgatgaaaacagtattgtggtaagcagggtgcaagtacatatatataggtgaaataactatcgagatttgacgacaattccatataccaagaaccaaatatgcttaccaatccaaagcggtaatgacaacaccgccccagagaggcaacaggccgtggctgaggatcttgatggcaatggcgctcccgatgacctcctggatgtcagcgctgaccaaggcgacctcggccatcaaccagagcgcgcggcgcgcccaatccgggtactcgtcacggcacagctcagcaaggtgcctccctgtggccaccccgaggcgcgcggcgtgaagctgcacgagtaggcccatggccgtcgcccacacgagcacccagagcagcgtgccgcccgctgtggcacc

SEQ ID NO: 4375 - DNA, 1001 bp, Zea mays
tgcatgcctgcagttttgcacaatttggtaagtgagatatagcttgcctcagtaagttctgcatttctgttctcaagaccagttagttcctgcttcaggcggagactctgcaagtgctcttgattaagtctgttttctatttcgttttgttcaaccataactacttgtcccaaggttttgctgttatctgccctattgccaggctgatagtggaaaaaatgcatgttttaatgaacataccagagaaacaatctagaagttgtgtttatggaaaaagttattaagaataaaaaagaacaggaactgtgtttatgcatccaaacattacattaccttttcatcattaagttcctcaatttcaaatatgactttcctgctagaattttctgccacagataagggagaaaagccatttgtatctgattcatttatttgttgagatgggacacttggtttgagacttgccttgagagcataagcctaaacaaaaagaattgctcagctgaatagaagggcacgttaaaaacactagagtgatcatagaaaagcatgcctgattactataacggccactatatcctccaaatgacaccagaaaattttctccattaattgtgtgcattactaaacttgagccctgtcataaacatgcctctgaatatcagtaacaggctaacagcaagattacctaacaaattagtacaatcaatgaataattgtgagtatataactttctaaaaaaggcaatttattagaccagatgagtttccccatcatgagagacttaaatccatatatggtcaccttgattgagttagaatttaaacttcaaaccagaagcaagttttttccttagttgaaaatactaaaaaaattcgagtgactagagtacgcagaatatcaatgagctcacctcacttacagggggtgcacgggcctcaagattagtgagaactgaccattcatacgtagacaggttgagtacaagagtatctgagaca

SEQ ID NO: 4376 - DNA, 1072 bp, Zea mays
tgcatgcctgcagacccatgtctccttggagacctccatggagagcttcggctcatacatcatcaacaggaggcaatctggtaactcaccactcttcttcctcctatgtatcactggtactgtcccaccttcacactcttctgctctagtttctactttctctacttcctggttcgcttccgcagactttgtttttccttcttccgctacattctcagtagtgtcttcttcctttccatcgtcataggattcttgaccttcctctgcactgtttggagcaacaacatcacaatccttttctgactctgcctcagaagtcgtcttcttcccctttctggatgccatcagcaccttaggctgtgcaacaagatgctcctgttcaattgagaagctccacctccggccatctctatcaatggagaaactagctctccttgaatccttcaagctcgagaagctagaccgtcgtgcctccatctcagctgagaagctgtgtcgcctgccaaccctatcactggatgatgaggccctgctactagtgctaacacacatcctgctactcaaccgtcgcaatttggtgcggtcctctttcagagctgccgagggagaatagctgttgattgatctcctccccatcatctcttcgtcaactttctcatgtcctggaacttcttcctcactgaccaccaactccaccatgtccggcccttggttttccatctctgtaacttctcccaaaggaacctccaactcggcatctttccgaacaatttgtgcttcctccacccctactctgcatgatgcaccctccttttcttccactagatctccacatttagaactctcttcagcttctgccttttcttgatttatctcccctgcttcagcgccatcattttcatcagaaccacactcttcacacttcaagtctttgacagaaacagctgaacagcgagctccatctttgcactccagtggctcagcctcagcctcctcttccttctcttcttcttcctcattgtcgttgaggcacccagccacctcattgtccacctgctccacggtagcgcag

SEQ ID NO: 4377 - DNA, 953 bp, Zea mays
tgacaagatcaccggtatgtaaatgtaatactagatcacgatcaaccgccgtaacgatgaaaaatctatttccaagacaaattttttttttgggacgcagctgacgacgcttacaaattcctgctcaactggttcaagaggttcccgcagtacaagtcacacgatttctacatcgccggcgagagctacgccggtgagtaaccggcggtcgaatggagcagttttgcttttgcccatctcaacatctgaagcacactccttagttcagtgagtcagagcccacggggctgacgacaaaactgaaacgcctcgggcttgtgcagggcactacgtcccgcagctgtcggagaagatcttcgacggcaacagggcggggcccaaggagagccacgtcaacttgaagggcctgatggtcgggaacgcgctcatggacgacgagacggaccagacgggcatgatcgactacgcctgggaccacgccgtcatctccgaccgggtgtacggcgacgtcaaggccaggtgcgacttcggcatggcgaacgtcaccgacgcctgcgacgccgcgctccaggagtacttcgccgtgtaccgcctcatcgacatgtacagcctctacaccccggtctgcaccgaccccgccagctcgtcggcgccctacgcgcggaaggttgccgttcacggcgccgcccccgggatcttctccagatacgtgcgttgcgtgcgtactttcgagcatcatccaagcctgtgcatttcttcgtttcagttctcatcttttgtttttttttcctgcatgcatcgcatcgatcttgatgaattgcagcgaggatggatcatgaagccagcgggctacgacccctgcacggcggagtactcggaggtctacttcaatcgacccgacgtccaggcggcgctgcacgcgaacgtgacaaagatcggctacaactggacac

SEQ ID NO: 4378 - DNA, 951 bp, Zea mays
agcttgcatgcctgcagcctatttcagttgttttccaagtaactgcaaatggtgttggcctgctagatcctggtgctgaaaataactgtgtaagtgtctgcccaatgaattttgtgcgcttatgtttctagtgcaacctgtgcacacatgttgtaaaattcttcttatgtcctcatgtctactgaatgcgatttatgcagttcttgaacagtagttcgctgagaggcttcttaagcactccttgacttgtttaaactgattaggattactgcactttttcttaaacattattgttatggctgcaatatttgtcatgaactccaactgggaaagtggaaattggaagttttgcattgcggatgaacttcactctttctactaaagttgctaatagggatgtttctcttgtataaaagagcatctaagttttttttatatccaggtagagaagggtgccaaggtggaccttccattttggcttgcgcatgggctgctgtctctggaacaagctgtctcaataaacccgcctccatgcttcacacagaagtatgttttttcagtgtctgttatggcattactgctacacagaaattcttggagcaacatcaaagcatgagagagcaaggagtattcttatttggagaaacatacatagaattccctatcaacaacttaataaaaggatctgacttttttttgccaccattgtagccttccatagtaaatagtaacattttgcagatctttctcttataacttaatgacagaagttattaaagacatgaaccttcatgagtcatgacgggaaacttcaaatggttctccagaatttgacttttgctggatggcttgagttatggttctgactattgaaaactaaagcgtgacatacaggttctgtggtactattcttctaacaaatctgtactttgttatctcattatcatatat

SEQ ID NO: 4379 - DNA, 879 bp, Zea mays
tggcaccttcaattacctgttgtgcggccgggtacctaaattcccggactcctttcaattcggaggggagaaagaaaaaaaagagcaagtcacatgatgcccattattggccattgcttgctgacgagccgctataaataccagctctgcgatagcgttatatatgccacagtgcgatcgcctccctgtgtcagcgctagtgtgtccgtgtgtggagctagcctagcacgcagcgatctgactggccatggtctccccttcgtcagctctccccaaggttcttggacacggctggcttgcactccatgcattgcatgggcctgttgattcttcacgggctagcgttcccatcccatcgagatattgctttcgattgagacggcagtagtcattcaccaccaggcgctgtttttcttgtggtccaggtcgccgacgaggccacccctcgccgcgccaagtggtggtacgtgacgttccacaacgtcaccgcgatggtcggcgccggcgtgctcagcctgccgtacgccatggctcacctgggatggtatggtaaccgactggattgactgaccctccactttgacggcatgcaatggctcgctgactcgagcagtgtttctttcttgttgcttggtttcatcgtcatcatcatgcaggggccccgggatggtggcgctgctggcgtcgtgggggatcacgctgtacacgctgcgtctgctgatcgagctgcacgagtgcgtgcccggcgtgcggttcgaccggctccgcgacctcggcgcgcacgcgctgggcccgcgcctggggccctgggtggtggtgccgcagcagctcatcgtgcagctcggctgcgacatggtgtacatggtgacggggggcaag

SEQ ID NO: 4380 - DNA, 960 bp, Zea mays
aaattggtgagacgagagtcacgatacgtgaattaccgatattttgcttgcacagatcagtgtagtggatttcaggttaggattttatgataccattgtctaattaagtaaaacatcataggaattttgatcaagcaaatttacatgcatccaaatggtttagtgcagtctagtacaactgtacaaacctcttccttttcctgcttggtgaatgaccgcagaacaaaattgatagcacccagctcctcaggtggccgtccaatgcctacaaaacatttttggggaggggggcatatttcatatttgacacctgaattaaaaataagtaaataattgcagtaccaataccaatccttaggcgtgcaaaatcacggctctgattcaaatggtcaacaatactcctcatcctgcaatttgtacaaatggttaagcaaaacaaaacatgatagttatgatagaactacattaccatggcgtgtgaactattgaagaaaacagagggttcacaagtatttctgttcaagttccattcgaagaaaaagaaatgtaacagccgtctcatagtggagggaaggcttgtgagtaaaaatcaatttataattatggtgttatacattatttctattgaagcattcattcaagtcccttccaatttagccatggagtacaaggggtaagacggcttctagaaaagaaatgaatacccattgtggccaccatgtcccccctttggtagcagacgcaatttcgcaaagggtagatcaagatcatcgtagatctataaataataggagaataatttatgtgagaaaagattctggtaacataacaaagtaccagctcaaggacaacaattaccacaactaattgattgagtggtatcttgaagtatgaaaccagctgtccgacctacataaacagcagtaaagagaaggactagggagaacaattgattttgaa

SEQ ID NO: 4381 - DNA, 964 bp, Zea mays
catcttgcatgcctgcagctgcagtccaggttttagtttgggatatcccatctataacttaagccagcacataaatgtatttttattccctgaaatcggtagtgtgtttgaaaaataaatgtatttttattaattctagcattcgaatatgcaacaggtatgagcaatggtccctctccacccgcttatggttacaatgaagagtggggtgaggaaggagattactataatagagggcgtgggagaggaaggtcacgtggacgaggcagagtgcgtggtggctactatggaggcgggaggcgtggtggctacagttatggctatggtgcgagaggcgggtactatgaagagcaagacgaatactatgatgatcctgaagaatatgcccctccaggccgtcgtggtaagtccagactgatggttttacatgttgatgattgcgttttgctttgcattcccaacttctcatggcttgtggtctgcttgtttcacagggcgtggcagaggaagaagggggatgccttggcgtggccgtggagtctactactagacgatgcgatgcgatgcgatgcgatgcgacatgccaaacgggtgtgctgaagctagcaatggcgtgcttggttggttatctgttctatggagttccgacccaggactagaattacccagcagggtccttccaggtgctgtgcctgtgcaactcgtctgggcaagttttgtggctcgctcgtggttttgtagctaggttaagcgagtgaagtttaatcactcggtagcagtgttttcccccttcggacggcatgcatgttgtttattttgctgctaatctacctaccttccaattttgtatgggatgatggtggatactggatgcatcagtttcatatttttttttctcctgataaatctgtagtttttataaagacggttacactgatacctgatgacaagatgaggcaggaag

SEQ ID NO: 4382 - DNA, 966 bp, Zea mays
gtgaatgtgaactcataaaacaaagcttactctttgaagtgctgaaagcaggtccatttcagctttccggattttgttagattcatcatcatcagcttcatcctttaacaacttagcttcaatgcatggatcttgaagcttctcatacttttcttcatgtacactgggttcgtcttcctgtatgataccatccatccgattattttggtgtttccatattgagtaatagcattaccatcttcttagttgtaaaatgctagcaacatacctgattatatgttgatgctagcaacaagtaggtgctatcaggttcctgagttgtaaaatgcaccacttgtgttgtttcatgtgtatcgccaataactgaaggtagagcagcagtttcagagaagctgacagcatcgtcagttcctgatgacccgtaaactatcattctccaatctgtgttatcatcgcagtggaaaatcagtgtgactaccttcaaaatggttgcatggctgaaagaagcttcattttgctcacatagtaaacctctcctttttgtagacatgtatcgcatgtgagagtgggtgcttttccatgatccaaaaatggttgctttgatttttggcatctatctaaaaatggttggtttgggtgcaaaccctaggtttcatttatcatattactttgagcataggtaaataattaatacaattgattacaaacatacataagctgtaatgtcttgaatttatttgtaagcatcactagtcactgatgcctaaaattcatgttagatgacttcacaactaaatttcaatctcttaggcattctatgaaaattttatatgtgagtacataatattttgactaaattatttgaggcaaagaactacataactttttttttgcaagaattacatctcgtctgtatatttaggatagtcacctccaaaaagataatcccattccgtcatttgtgcg

SEQ ID NO: 4383 - DNA, 988 bp, Zea mays
acaacgagattctcggcaaggggtcctcaaagactgtgtaagaagttcgatcatctccatcgtcgattcccaaatcctaacaagcgtcgtcgtggtgcgtggcactgattgctgttcctgcgtgtgtccgtccatgccgtggcgaccatggcgcaaccaggtaccgggccttcgacgagcaccggggcatggaggtggcgtggaaccaggtgcagctgcacgacttcctgcgcggcccggcggagctggagcgcctctacggcgagatccacctgctcaagtccctccgccaccgcgccgtcatgcggctccacgcgtcctgggccgacgccgccgcgccccgcctcgccgtcaacttcgtcaccgagctcttcacctccggcacgctgcgccagtaccgcctccggcacccgcgggccggcgccgccgcggtccggcgctggtgccggcagatcctcgacggcctcgcctacctccacgcgcgcggcgtcatccaccgcgacctcaagtgcgacaacatcttcgtcaacggcagccagggccaggtcaagatcggcgacttcggcctcgccaccgtggcccgccgccgcggctcgccgcacgcggcgcgctgcgtcgtgggcacgccggagttcatggcgcccgaggtgtacgcggagggctacgacgagcgcgccgacgtctactcgttcggcatgtgcgtcctcgagatggtcacgctcgagtacccctacagcgagtgcgtgcaccccgtgcacatctacaagaaagtcacctccgtaagaaattgccttcgttccgttctacagattactcttttttttctttcatccatcgattgattgatcaactgctgtttctctgggcaggggataaagccggcggctctgtacaaggtgaaagaccccgcggtgaggcggttcatcgacaggtgcctggcgccggcgtcgcggcggccgagcgcggccgagctgctcagcgacccgtt

SEQ ID NO: 4384 - DNA, 838 bp, Zea mays
aggaggcataggaaaatttggtggatatggctgttgttgcaagccttcatttggcacacttgtggctgggacaggagcacctccagtgtgtgcatgatgctctgtcttcatgatatcaacagggtgattattggatggtgaaattacttcaccggttcctagcacacaagatatttcccattactaggtaaagcaatacatatgaaacaatagttgaagctattaacctatgttgtaatgatgaaatatattataccagttgctaggctcttcacttgttcaccttgcgacacctctttacccaaactagaagttgggcgccctttcgaactatgccctggaataaaagaagacgtgtaaagagaactcctcttatatgcaaactaagtagatgaaactagcaattgtaactaaaaaatatacggacaaaaacaaattggcctaaataatttaccaatgctagcatttatatctagcacatatgtaagtaggtgaaaccggccattgtaattcaaaaatatacgaacaaaaaacaaaattaccaaataatttaccatagcatttatatctagcacatatgtagatattcaaggcagctcagaatttaacatactaaatataaaaactataaacccaaagaaacaatatggtaggggcaaatagcttgaaaacataaaaactatagagcacactttatgttgcacatacctcgttgactgtttgcttcagagccaagcgttgggaaatcaccagtacttaatgtgaacccaggcccacgtgatgaagattcctacacagttaaaatatgtatatgtgaactgaataatgaattggatta

SEQ ID NO: 4385 - DNA, 990 bp, Zea mays
agaccaagctcgccaccgtgcttctccccagctcagctcctgccgcgggagtcactactctgtactcatcagtatacagaagaacgactccagccattcggacggcaccaaggaaaagaagatgtaacacagcacttggcatggcgctcggcggccggccggagcagagaattcaccaatcaaaaaacgggatcgccggaaggcagggtacaactacaaccgtacggaggctacaaaaacgagtgggaatgaaaggaagggacatgggtgctacggtcttctcttccattttttgtgtaggctggttcatcctcctcggagggctgacgaagtgggtggtcgcggcgaggtcaaaatggcggctccgctccggctgctgctccggctgctggcagcttcgcacgtcagcttcacagttgcttggttaatgacgacgcagatggcatggttcctgggatctgctggtgctcagctcggctcaatgtcctatgaacagaacatcctcttctgcgatgacacaaaagaatgaatgcggtgttcagcttagcaaaactactgagatcgacgagtacttcagttcagcacatgaaagttcggcttgatataccttgactctagacgacgacgactcctgtacagattccagagtctccaccagtgccttctgcttcaccacggtcgcattcaatacctgacatcaaaaaaagacatttttagggagatggggaggaaaaccctgctaatagtaaatgaaggagtatttgagtactatatcgctataacatcacacccatatcagcaacatgtgctgatgtgcaacctagattttcaataataaatcatagtaacttactcttttggtcctctcgaggtcagcctcaacggatctgatccgctcgaacgagctcaacagaatgagttccttgtcctctgggatctgcggcggtttggtggcgaggtgactgcacatcgactcaagattgtcaaggc

SEQ ID NO: 4386 - DNA, 1040 bp, Zea mays
gctgacgagaagagcgtcccagagactccagagcaaggattcagtctaactgaccatcgagatggagtagctcctgacgccacgaacatttcagagaccagagaagacgaggaacaagacagtgcagctcgacaggcctacgtttcagtcgccgggaaggcaaaggtgtacgacgaagatggggaggatccagaagtgaggtggaaggatctttcagccgaggaggaggacgagctggagtctctgtgggagcaccaagacctgatagagcagctgaagctcgagctgaaaaaggttcggtccatcgggctgcccacgatcctcgaggagtcggagacgccaaaggctccgatggaggacctcaagccatggcggatcgatgccaagttcctgcgcgaagaccccatggacgagctgaacaagttctacaagagttacagggagaggatgcggaagtttgacattttgtgctaccagaagatgtatgcgataggtacgcctaattctcacgcaaacttatcgtttacccattttatccaaagatgggaaacaagaactgcattttaacctaacaaatgtgaccaacctatgcggcaacggcaactaggccggttttcatcaattaagaagaaaacagactcccaaatttaaatttgagagagaagagcttgaatctgagtgactgtgcatatgaccacacatctcagtatctcacctaactagttaaactaggctcactcccagaaaatgtgcatttctttatgatagttaaattaggctgcaagtctaaaatactagtcaagtttctctgctacaactttttttttggtttgtaacaaccaagcttcgtctacatttttaaagctaatagttcagtattgatacaacttttctcttgatggatgcatcaagaaaagagatcattttaaggcatctagtcatctaacccttaagacttgtcaagtaccccctccatcacaaatcatagattagtctggcctttaaaagagaccattttacggagggcaattttaaatttt

SEQ ID NO: 4387 - DNA, 937 bp, Zea mays
aagcacaattatagcaggtgcagttaacttctgtgagacaaatgctaaacatctagttgtgttgcatatttaaaaacacattaccaatcccttcgatggttgtagttgtaatttttttttgtgaagagcatctagttcttgtgttatccaaatcaatcaaggcactgatataagaaattaggtccaaaaaagctttacaagataagggtccagttagtattgcaagcaagtttctttgatggcttgggaagtaagcatgtgaaaagggaaatctccgccccaaatctatggatattcctcatggcataggcttgagaagaatgtctagtgctgatgataccaatgcattgtgaagttctagcacacaacccaaacccctgcacaaatgaaggatgaataaagagtttttacaagaagtccttaaacagcaagcccacaatgtataactaattcagacaatatatagagatgtgtaaatgtaacatctataatagtgttgttgataaaatatcacttagggctacagaaagcaaggttacaaaaactaaataactaaaatttcaataaatgcagtaaggaggcctcctgttgtatggtcttctttagaactttttctctatcttcttaatatataaaggggcacagttctcatacgcgtttcgagaaaaaaaattgagtcagttttatttctttaaaaaaatgtaaggtcaaaattggaattaaacattaaatgataaatgtggaataagctctacgaagatgtttttgtactgttcatcatgaaatctgtttcaaaccgctttcctaagataactttaacccacggcctgtttgacgcgttcctaattttgcctcgcctacagtcatgtcggagtttctaaaataactttttggtggactgccataatgtggcaagccactcttaacatttgctcct

SEQ ID NO: 4388 - DNA, 1014 bp, Zea mays
tggaaatatgagttttgacatacagtgcaaacattgtgaaaaggtgattcttgggtgatgtgtgatcacgagccttattatttttgtacaagaaagcattgcccaatgtagtggcagtgcacaggaccagtcaattccatggctttttactaattccgattcatctcaagatcttgcctgctgatcctattgttcttccatgttcattgtttgtatcaatattaggattagatttggatgttagtagttcaaatttatcttgacaaatatgttgttgcttttttgttaaatgtttatgtagtgatagtacgatattcattactaagtattactaagcacaacaactcacggtgtctgacatgcatcgatttcttcttctcttttgttacaggaatcaataaatagttctctgttgaacttgttaacatacccatggattgagaagagggtgaatgaaggcactttgaatcttcatggaggctactacaacttcgtcgattgcacatttgagaaatggacattgttgtaccgtgaagggttggaaggtggaagcaagtatgccataaagaaccggtccacctggtgttgaccaacgaaggccgtgttttacttgggtaaatttcactctgccccccgcagttcagcatggtttcgctttgccactacgttgtccatttcccattgcacctttgctccattgtggcatcgatgttctccgggtcccggtatcaaataactgtggcaaggctgttggcatgccagcttgaactgcgtgttgtagtaatgcatacacatgcgcaggcacgtagtctgcatcgtagcagttatttgatacaggaactttttgatactgtagaagcacaatgccacaatggagtgaggtgcaacgcgatggacaatatggttgcaaggtgaaagtctgtggaactgccgggggcaaagtgaattttatccagctatctgtaacatgtgtgctgtcttccggttgaaactattaagaaaaaataggaataa

SEQ ID NO: 4389 - DNA, 997 bp, Zea mays
gcatgcctgcaggcaaaactacagtgtgagtgaggtaccacgcaaaccatgtctgaatgatcaaatactagcttggtttcattctttccattgcactccctggttagatatttaggtcaaaagaacctcttcaagtaactatcactgggcaattgtagctgccaatgcctctcacaactaagtttgaaggaccacaacaagcagtaaaaaacatacatcacagtagatgtaacaataataataacttccacttacagggtccctgcgactcttgtgctaacatgtgatacatccggaggtagaagctttgccagaccaaaatcagatatttttggcgtcatatccttatcaagaagtatattgctcgccttgatgtcacggtgaacaatgtgagggctgacactgccatggaggaaagctaatccttgggcaacaccgatgcagatatttacccgagttctccagttgaactggatgttgctgtgtcgcgaatctatagaatggacaagaatgttacaggatgtaaataccttgctaaaaggatagtactccagaaaacaatattgagaattcagcaaagagaacaacctagaagggtatgtgcaagactattattttcaagataattgtagacaaggatcctgtggtttccttctacacagcagccatagagtttgacaagattctcatgtgttacatcagagattgcaagaagctcattaagaaactcctttgccccttgtctagaatgtaaagacagaacctttacggcaataactgtcccatccttgagtgttccctgaagttgtaagttagaaaggtttcaaacaccactagtgcattctggtccttcatcaaattgaaaatggctgtgctactaccttgtagacaggtccatagccgccctcaccaatcttattgccttggtcaaaatttgatgtggctctaaccagttccctgtagctgaatcttgttatattctcagaaccagtgaaat

SEQ ID NO: 4390 - DNA, 949 bp, Zea mays
atagcaacacaatgtgccccctatgcatccaccgggagcacgtgccctagatggcgatatcaaaacaagtataatgacaacaatacactagacttcttgttgatgtctaaggtcgctgtatacaaaggttgcaagctgatgtacaaagggatgagctaacatgtgggcaccatgagaaaatctgaaacaatgcgctactgttgacagtgaaagaacatgtaaccagatatatagtaatgaatcaacaccaattatatttcacaatttgtgactaaagaaaaaaacaatactagcattaattattctcatcttccaaaacataactctggacttatcactagcagtggccattgtgcacttatcattagccaaaaaaaaaagtgcatgcacaatttgaaaaaaaaaacttccgatacaacaaagaatttagccattatcagattcaccttatcatcatagcatagtagtttcaaaatggcaaatatgtagtactactgctccacacccgaattcagtagctgactacatataccaaagctgaaatacttcaaacatagcaaacaagatcagaagacatggcattcatgtacttacggatgcaagaagtgctcaaacagccatgagcgaagaacagacactgcacgctcaggaagccctctttgaggcctccaaatgttgtgaggctggctgaacgcgttcacgctgtttcccctcaggaggcctgctccaccacccatgagcgcgaagttcgccatatcgtccttggcaataatcccatggttggcgatgaccttgctcgtgttccgtagctggctcatcaccatccccttcagacacttgaagtgcttcgacatcgtccgaagagccatgaaagcgaagggggccgcgttgctcagccctgcaacagtctcgaacgaggagatcacggattgcagctgctggtagtact

SEQ ID NO: 4391 - DNA, 942 bp, Zea mays
gtcgacctgagcagctgcccacatcacaagttggatgcgtacgtgtacgtgtgcgtatatatagagagagagaggccttgcatgtcaagctctccacagggaaggagacacggcaccggttgatcagtgcacactgcacagtggtggtggtgcatgtgtgagacggagctctgttcgttccatgtgggggctataggatccgacattccaaccactatagtacgaagtactaaataaaacgattttggaaaacaattacgtacagtacatctggtaaaaaaactgtttccacagcagtcgtggcaacagtttgtgtcagtgagtcagtcaggagtactcctcctacaccagttccgttcccccgtgtgaattgaatggaagcaggctgtccctgtgctccggtcacctgtcggacgatttcatctccctgtggccgccttgttctctagcacggcgccccacatttgcctgtgctgtgccacatggtggtggacgccattattgctcgtgcatgcaaggcgggattggatctgaaggccggccccagctttgtccccgcggaaagcgagtcaaatgcgcacttttctttcctctcgacatggatggagccgagccggtgctgcttttattgagggcgaatgcagtgtcgacccctccctccctccctgaaaagaaagaacccatgtcgactcgactcctgtcccctgcacgctttctcgcgtggtgcatccatgctagtagctacgtagacccggcgttccgccctgctgtggcgtcccgcgcgacatgtgcacggatggcgtcccgcgccgcactcgagtgcctgcgtttcccggcttttgatcggatctctcgtctccctcccacataggcagcgccagtgcgcctgcaaaagcaacgcaacgcaacgcaacgactttcaggcactcgtcgtgtcatgca

SEQ ID NO: 4392 - DNA, 880 bp, Zea mays
cagtcttgcatgcctgcagacatgcaggaactggtttttccaggccaccatctcttagttcagatgatagtgcctgggcttggcatgaggctgatgttatacgagttgttgatgatgtagctaatggtattccatctacatacacaaatggtgtatcatcaccaccctccactccatcttgttctcaaaatgaatctttggatccagctgctcacttgataacagggaatgagatcaataatgaagctctgacttctccatcttcggtgcaagatagtcctgaagataaaataacgcaagttgcaaaggctgtgtcttgtggcagtgaagtagttaaggcagatacattgccatatgccatgctgcggccgatagttgttcctagtatatcacgaaggtcatcaagatctgagattaagggtgctcatgatcacaggaggagcccatgtgtaccatcaacaaggagggacatacctattctaagaagacctccatcaccagtagtacttagtgttcctcgcgtacctaggccaccacctccttcacctgctggagagtcaagaaaacgagggttccctatcgttagatccggcagctcaagtcctcgacattgggggatgagaggtttattttctgaagacaaaatttttcatagggctcagttttgctcggatggtcctgaagttgtatggccttcatggggtaacaagggtacttctggtacattggtgcaaacaattgaggatactgttttgcaggaccaccttgttaagatttcacagctatcttgtgatcaacatgtaagggtgtagtttcaaatcatccctcaatagtgagaatgattgtttattcaacttttctgtctttctaaaatatactt

SEQ ID NO: 4393 - DNA, 1004 bp, Zea mays
ttctccagctctcctttccaaagtcgtcatattttattcccattgctcctgtggtggtcctcctgtagctgttagtcatctaccagctttggagttgtagttgtgtcttctgctctttctaggtgggaggattctattccttagtgtctccatttgtagtacataagtcagtcctcttttctttttttcattatcccacacctgtacagtagaaactggagagtaaggggtgtgtccaaatggtcattttttggcgatgtgttggtaactgggggcagataaagggttaccttctgtcctgaagatgcggtctctgagctcctggtcgacatctccagtttgctgcacactcaatgttcacttggtttcacttaattggacttcagtggcgctggttctccaactatcttgtacgggtggagaaagaattcttctgctggagttgtatttggaagcaccgttgcaaaacttaagcatatttggagagaatctagtgttgaacaatgcataactgaacttctgtatggaggctgcatgtactgacagagggggtctatcactctattggtatatatactgcaagactgacgctggaatgctaatttgtttcatgtatcatttgttcccttacatccgatggaaatatatgttgatgatgaggcaaagttgaccctccatggtcttgtacaggtaatacaagaatactctgcatttgagtcgtgcacatttttttatttattttctctaaataattggaatcgtatatttttgcaacactatataaaacttagcgaggcagagaagaaccggaaactgaatgatctcttggacgctcttgatttcaaccaagttgtgatattcgtgaagagtgttagcagagctgccgaactgaataagttactttgtgaatgcaacttcccatcaatctgcattcattctggaatgacccaggaagaaaggtaaatttgctcaagcacttccaattagtagtgtcactgtagaat

SEQ ID NO: 4394 - DNA, 964 bp, Zea mays
ccggccattctgtagagtcgacctgcagtttgaaatgaaaaacagcacatcctaaaaaaggataaagaaaaggaaagtttcggtggatcaaccaaatttcttcattcatactctattctggcaagtaattttgtaccaaaggataaaggtatgtacaccagagaatattccaagtaaattcaaatttgtcaatgtgtgaaatgttctctctattattggaaactgttagccgttttccctcttctagatacggaatttttactatgcacctagacgcagtttacatatatatactttgttcaccaaaacagctccattcatactgtcgtttatgtctaatttggcaagtaattttgcatcgaggataaacgcatccataccacggcgtatttcaagcaaattcaaaatcgataacatagaatattttctctattttaacttataagttgttttgcattttttagaaataaaatttttattatatatttattgtatataaatacatagttccatagcaaataaagctatgcacctatttttttattattatagatttattttagatatatatatatgctcgtattgtatatccatttcgaaattttgaggtgttcacatatgcatgaatcttgccaaaaaaaaattgagtcatttaataagtagaaccaaaaagattcttcctccggatatggcagttaccgtagaattagctgtgtcatgtgaatccagcaccagagatccggtttataagcctcataggacgctttggtccagtagtagtgaacggtgcaaactagatatctctagatcatcggaacggaggttattgcattgcattgcatccatccagcgctcacagagaaaatggagttggtcgtgctaatcgtcggcgctggcccagccggactggcgacggcggcatgcctgagccagcgctcgatcccgtacctgatcgttgagcgcg

SEQ ID NO: 4395 - DNA, 876 bp, Zea mays
aacttctccatctcactgaatgcacaaagatgcctcgtgtttgagataataaccaacatggaactaatgtgcttggcaaggttatccttactactatctggcgcaattctatacatctttatgagagagatggtgaacttaaacatagcagtgatgctattctcatctacaatactatcatcctttattacactgccaaaaaaaagtactgtgtataagacagtcatcatcatcatcatcatcctcagagtgaacaatactggtaattagagaacagacttacctatgctgcaatgcagaggctagagcatgtataggaagtcctacaacacccaatttacaagttggcacattgattactcggtggttcttggagtagctctccagatagccagcaaaagaggtaaacattttcttcatagcaagttcctttgtaccatcagacaatgaatccaaaggaaatccttccatcagcaatgctaagtgtaagattgaagacttggaagagttttcaccattcagcacacaagtatatatttgatcaacagttgcagaagatgcatagctcaagatgatgcacaatgatcgtgcaactttccgcaaagcactgagaggtgaaagaacatcctctggtgatgcaacagtctttagtagaagggagacttgattaactagattaattgaagtctcagtttcagcatgacgaatgaagaaacaccatagctctgtaataatttccaagcaaaggaaatggggatggaaaatattttcaagtaagaaagcctctaactcgttccaagcagcacttgaagcaacagtagaaatcataaaagccttcaatgcttgtatgatagaagtatacacaggttgccaaac

SEQ ID NO: 4396 - DNA, 965 bp, Zea mays
tcttgcatgcctgcagtggtgcctagaaaaaaaaacagcaatcaagtgtagcgttacagttacacctgctgtgttgttgctctttgcaaaactactgtctagactccgcctggtaattagtgtactgatagcgaggtaaaaaaaagttagattatttgttagcagcggcagtgatttgacatctaaggaacaacaacacggtgtccaccgattctgctatcctgatggctcgcggcagcctggctggtcggcacacgacacgaagtgaagctgttttactggcggcatctggctttgttatctcatgggacagtgatccacaagagtaagggatcagctcaatccaaagtcaatagatgttccttataaaacatagaggtacagatgttctcatcggctatgtgtatttggggaaaaaatcaatataaggggtgtttggtttttagggactaatttttagttcttctattttattatatttattccttaaactaccaaatacataaactaaaattctaatttagagactaaaatagagctattaaaaattagtctctagaaaccaaacacccctcagaaaaaaaaacacaagaggctacgatattccagatctagagtattaatccaagaatttacattccacattctgcaatggatacaagcttccttctgaaagattgggattgggattgagagaactagatacaattgaattgatctttgtaaggggcagagctgtgaatgtattgtttgctatacacgtctacttccatcttaagcatttccctgacccttcgaagtttgaacatgatccatctcagttaattacatgccaggatgacagcttgatttcagatcctacctaacaaacagtgatatcaacaattggaagacagaataaattcactgacaacgacggcaggggagtggatgcctagaaagggcacggtatcatctgcaagggg

SEQ ID NO: 4397 - DNA, 960 bp, Zea mays
cccgccgtatcctatatagtcgacctgcaggggtaagacagcctcggggtcgagaaaacccctgatcccatgcctatacagtggcagtgtggcaccatagcccatgtgagaacacaaccgtgacaggggctgggccttaaacatgtgctttggcgtgggacaaatgaggggaattttttaaccacagccccacggggagtcgaacccaggacctgagaagtgctactcagaccacctaaccaactcagctagaggcccctttcacagcataatgtaaatatggcaagaatacattggcaacaattcaggtttcaaactctacaaaataatccatgtcaaaacttcccaacgctataaaaagacagtaagtagaaatctgagtctatatccactacatctataaaaaatgtatttgaaggacagttggatgagattgaaaggtctacacaataggcttctaaatcagtcttgtgtattgtaaatttatttgaaaaatatattaaggcatcaaatataacgcatcatgagtacaaggttcttacctataggtgtgccaaatgcaccaggaggaagtggatcaaattcaataccaagcactggcccatcatccctcaaaggctcccctataagtgcttctacagaattgatcacccgatgctccgcttgtgtaaggtgcactggtgccatgtgaggcagcataacttgtggaggttcgtagtatctcctcccaatctcgggcacagatagcctaggcacggatggccggtcaggccctctcctggaatagggtggcagctgctcacgataggttccaacagtccccgctatcatctcgctgggcggcgatggaggcggaagcacaggtgatggcgctatgactggggcgctaacctcgtcgtccctcagttgcctcttggccagcggtttccggtccttgagccggcggtggcagaaccacat

SEQ ID NO: 4398 - DNA, 732 bp, Zea mays
agctcaaccaagaagacgatcgtcagtacaggaacaaatatcaattttgcaaattccgattgtaacaaaacatgtgattcacctcgaatccgacgagcgagcggcagtagccgacggtggccgcggtgagcacggagctggtcgagccgcactcgctgcccaccagcgacgcgctggaccggtccagcctgacgcccgcccacggctgcgccgggtacccgtacgcggccgccgccggcacgccgacgtgcgacgacgagcgctgcatcttcctgggcgctccctgctgggcgcggcgcctgctgggctggcgctccagcgccgcgtcggtgcgctggcgcggcgcgctctgggaccgggccttggcgcgggacgactcggtgttggccatgtagctcgggacgacgccgtaggcgtcggcggcgtcgtcgtagggggccacgtacgggctgctgcgcgccgtcgccgcggggtcgaacgcgaacacgtcctccaggtggccgctgtcgccgcgctgcgggctgaggtcgggggcgaagaggaacggcgcgggcgagcactgcccgccgccgccttggtggtagaacttggcgaggcggggcttcctggactcgggtggccgccgcccgagcaagctgtttccgccccgcattacgccccgggttcgccgggcgttaccattttttccaaggaccccttatacagtggcttcccttatctcccgggaacccg

SEQ ID NO: 4399 - DNA, 883 bp, Zea mays
agcggtctcgaggtgccacaggacctgaccgatggaaggccggtcccgtccctcatccgcgacgcacttctcggcgacctcagccaactgcctgacggactccaggtcgtagcctccgtccagccgacggtcgaccacggtctcgagcaggccccgcctcttccgctccagagcccactcggggaggttgacctggtccctcggcagggccgggttgatgacgggccgggcgcagaggacctccagcaggacgacgccgaacgagtacacgtcggagctctgcgtcagctgctgcctcatgaagtactccgggtcgaggtacccgaagctgcccttcacggcggtgctgacgtgggtgcggtccagcggcgggccctgcttcgagatgccgaagtccgccaccttcgccacgaggctgccgtccagcaggatgttggtggtcttcacgtccctgtggatgacgccgccccggtccagccccgtgtggaggtagtgcagcccccgcgccgcgccgatgcagatctccagcctctgcctccacgtcagagcggggaggtggtcgctctcgctctcgctcccgtagaggtggctccgcagcgtgccgttcgccatgtgctcgtagaccaggatcatctcgtcctgctcgtcgcagtacccgatcagggagacgaggtgccggtgccgcagcctcgacagcatctcgatctccgtctcgaactccttggccccctgctgagactctgcgtgcccccgcttcaccgccaccggagtgcccgtgtccgtctcgcccctgtacaccttgccgaagcctccgactccgatcaccagggactcgtcgaagtccatggtggccgctttgatctccgcgatgctgaaccgccgg

SEQ ID NO: 4400 - DNA, 993 bp, Zea mays
cttgcatgcctgcagaacgtacttggagggcactctttgatcttcatcatcagagtaatttctacatattagagcgcggcacaatcgagctcattcagctcatccatgttagcagaaaaagatagacctttcgatatagcacattaacggtcacagtcacagaatctttgttaggttgcctagagagagtcatgctcgcttctagagaggtctagtccaaccacgacggtgtgccctgctatcgcctccatcatcgaggagtcgtaccggtcttactattgcgctggtggcgatgcgatacagtggtagcgacaggccgcggcaacgatgtctgagggtatgggttgccctagcgtgcaatctgcgatggagggcggtcgtggctgcggtcgaggcccgggtgcacacaacgacggagggatggccggcctagagacgacaatgggaatccgatcctcgattcctggcggggaattcctcattagccgatggggatggggaagaaactcccccctaggggtataaacgggaaaaattcatcccccaacgagtaaatagggatagggacggggaagcattccttatccccgttccccgcggggacatgttaaatttgcatgtgacgatgtttccgtgtactagttaatgataaaaataaataattatcttgtcaagagaccactaattgtacaaatgtgtttattttgatgtgtgcataatgctttcttgcatctggcaatgtgtataagtgacaatgttttacagtaataacaaagaacatatgtcctaattataatttaaatggggatgatgatccctattgaggatttatcgtcacggggaatggtgatggggaaaaaatattccttgcaagcgtatgtggaatcatcacggagaattttttcgttgcgggaacgtggatgaagagctattcactaacggggaattccccattgctatccctaggccggccctacgtcgatgacgccttcg

SEQ ID NO: 4401 - DNA, 931 bp, Zea mays
gaaggaagaggaagcccaaccccaaggacagcagcgtacaatcaggctgatgcttgttggaactcagctgttgatgcttgtaagcctcgctgcctggctgcgtcctgtgctgtagatacgagatcccgcagcgttcgtttgttgcacttgcaccggcttgctgctagcttgcgacaggactaggaggagctagccgaggaggaggtgtgtgactccatggacgcgggccagcaggatgcgtgggactgggactgggaggtcctgctgccagaccacaggagctcctcctccgtgcgccaccaccacggcagcaacaataataaccttgacggtaaggaccgcccatccatcccttctcgtctcacgtggtttcggttatggcagcgccagcgtctgaactgaatctcttttggtcggttggttggctggttggttggtcgcgtacaccaccagatcaagaagaagcagaggagcacggcctgctgctgcctccgccaggaggggacgacgtcgttgacgcgcacgacgacgagtgcaaggacatcggcgtcgtgccggacgacgaggccaagaagtcctcctccgtcgcgcctagcgctgccggcggcgatccgacgatggcctcatccgagggcgccgaggaagcgaaggagccgttccagagccctgctgacgccaaggccaccgccgacgacggcggcaagattgctgctcagcagcaggaggaagatgccggcaaggaaaacgacgacgacgacaaggcggcgcgtgcgccgcagtgcgtggtgttcagcgtggggaagctgaaggtgaacgggatcggcgcgctgtgctcgttcggcgtcgcggccgccaccctctgcgtgttcctcgtcggcggcaggcagcagcagcagcagcacaggcggcaggagcagcgggaggagacgat

SEQ ID NO: 4402 - DNA, 982 bp, Zea mays
acaccatgaaatggttatatcacagttaatatcttccattgcagacaccattgaaacaggaacaaatttctcttcatccgcatacacaaccaaattaagctcatatgcagacaaggataaaatttactcaccagattggaatgaattccacctcaagcaccgtgcctagctcaaactgggaaagatgaatgctccctatagatccggtctacacccaagattcctcagcctttattagacggggacgcgacgacctgagcacgattgaatcaaggcgagggaagaaggcgacgacgggggctgtacacgacggcgaggtcgcaagggcacgagaaccccaatcgggagagtgtgggagcgggagggcgcgagatgtacacggcggtgaggatgcaaaggtaaaggcgcagaaaccagagcgagagcgcgcaggcatgggaacagagggggagggcgtgggtgggaggagggtgggatagcgcgtcggcctggggatgacgagtcctgactcccgaggactagccaaacattgctagcgaccggaacgcgatgccgagcaagatgcaatggtgagctagaagacgagcctgttggaagccgttgcatggggttttctttttctttttacccagcctgttggaaaacgagcaagaagatgcaatgtctgtttatccagcctgatggatgctctaatggaggaggaatcgctatttaaaatttaaataacaatgagattgttccctatatatcctctttaattcccttgctattcaattacggttaacaagggaattttaacgcttcaattatctttgttccacttattttaacgcttcaattcccttgctaatcgggcctgagctctgtcaatagtgagcaatggtgagtgatttccaatcacacaatacacgatgctatttcgtttctattctgtcgaccgtcggctctgcctttctattctgcaggtcgactactagaggat

SEQ ID NO: 4403 - DNA, 1052 bp, Zea mays
agcttgcatgcctgcagtctgccctctgatcgtcgtcatcgactggggtaacaaaagaggcgggaggcgcgagccaccatgtgcgcacgccgccacggctctctctctctctctctcggtgcagcggcaggccggccggcccggcgttccgggtctggaatttggtcgccctcaccggagagtcgaacggcgcgccgcgcggctcgtgtgctctggcgatgctttcttgtgacccatccccccctgaccccgaggcgcggagtcgtcgttggcaaataaaatcatcagctcgtttttagagggcggatggtttagacgaaatggaaaacaaaatctgaactggacgcctagtggaaggaaaagtaaaggaatagaacagcagcgcgaaacaattcggcgattctttcgagtaactgcacagattgtaaaattttagtggtgactcgtttcttgcccttgggtggcaccgtggcagaattgttacgagctgttcaattcaaaacagaagaagaagaagaagaaaaagtttcaggcataagtactgctatacactgctagtaattactactcgtcgctgctgctggattaagcggtaaagatgcacaagggacagcaacaggccgaggtgttttcgcagcatctccaactttgctgtcgcaaacatgctatgatttccggatcagacaaacacacgtttcgcgatgtccatccacccagacccagacccaggagccaggaataaggatgaacccacaccatgccaaaagctgaccctgtcgatctggtcccgagcactcgagcagagcagcgacagctccagggcccggcggggcctccgctcgccgtggcagcgcccatcacgcaactgtgcgtgcgcctgtgcctgtgtcctgtcctgtcctgtgcgccgggacgtcgcgctcgctggtttttctagagcgtggcgcgccgataagaacgggcggggcgagggcatgacggcatgtgcgcccgagtttcgctgccgcaatgagtaaactactccggcacaccgcgacgtgccgacggcgaca

SEQ ID NO: 4404 - DNA, 894 bp, Zea mays
agcttgcatgcctgcagtccttaccagcatttgtcgttgaaagaaaggctgacagcatacggagcaacattttccaactcgaacaggagaagttctctgagctggaactgtatcgcctcgagaatatacatacagttgatgaggctaaagcactgaagatgcctgatagatcaggactacgtagtttgggacttatgtggacattaaatgttgatcgattcgtggaagatgaagcactgcttcaggcgcttgagccacatgagaatcttaaaaaacttacggtgcaaggctacatgggcgaaaggtttcctaaatggaaactagaacttggttcctcccgccagggccatcttcacgaagttggattaatgcattttccaatgtgcagcagtttgccacagcttgggcagcttgcaaatctcaagaagctttacctgtccaggatgccaaaaataaggagactgggaagagagttgtctgataacactggagggctcaggaatttgcaaatcttcactttggaatatatggagaacctggaagaatggtgcacaactatgacatcagctacgggccagcagcagcaggaagaattcatgtttcccgcgctccaagaactgaccatataccattgccctctgttaacgatgcgtccctgccctccaagaagcatagattattgggaagtaagagcaagcagtggtgcagcacaactgcttcttcagaaggacggcatgatgcaatccgtggcagactatatgggcttgcagtgtccctttgcttacaccagcgagctgcatgttagtggctccagcagcagttccacactacttcctactgacggatggaaattcaatggttctctcatcactctaaaggatttgacaagtgatt

SEQ ID NO: 4405 - DNA, 1028 bp, Zea mays
aacgtttcccgtgtcattcctatggaaatgattccctctgtttgaactctgaaccaatgttgaaactctgatcggctgccacagatgatgattttgaaccagcggttgcaaagcgtggagctcaaccgaagaaaacatccagcaaggttagaatcaaatgctaaccctgagtttactgagtactatttagttgcaatttgctgacaaaagaattatactttctaaggcaaatgattctgcgtctgaagatggagattatgtggctgctgaaaatcaaaagaaacaatccaagaaagtaagattctcaaagctatcttttcaactaatttgtgtataatgggttttttgtcggttttattaacaattcaaatttaaaaatctcacaggcaagtgcccatgtggacgaagaagttgacatgccttcgttaaaagaccgtctggcagcttttaatatcagcgactcctctccggatcattctggtactgtcaaagtagaatttgtcatcgtggtctatttgaatgataaaaatggagagttttctgtgaaaaaaaatagctgatggatctgtaactttgcagccatggaaactgaagtaacagaattaacagaacagcagaatgaaaacaaagcgacagagggagcaagcaaaagaggcggacgaaagaaggcgtcatcatccttggcgacgatactatctgatgttgatgaggaagtcctagaggtccaagctcagaagaaaggtagaggaaggaagcctgctgccgctgtgaagccgaaggctgctgccgccaggaaaagggcgccggctcaaggcaaggcaacgcagaagaaaatagatgagatgctcagggctactgaggataacaacaccagtgcttcttcccccgagaagaaggtccggaagatgaggtcctctcccttcaacaagaagagcggctcaatcttacagaggggctcgaccgcttctgcaagctctggaacaactgttgaagcttcgccaccctctggcagctctgcaggcatgcaa

SEQ ID NO: 4406 - DNA, 1044 bp, Zea mays
ttgggatcctccccagtcgacctgcagaagactgatgagctgcacaaatttcaggcaaaaatggaacgatcaacgggcaggggcaggtctggtgggacaagttccacgccaaggagctcaagttcacccgcggccacctcttcgagctcctctactctgacaacatcatcatctccaatgtcaccttcgtcgacgcgccgtactggaacctccaccctacctattgcacgtatggatctcactctcagctctgaaagcctaaagtcactgatcatctgttcccgtggtggtttgtgatcattgttccagtcagcggtgaatctcacgtgtcatgccactgttttgcgcagcaatgtgaccatcagtggcgtcaccattctagcgccggtgaattcgcctaacaccgatggaattgacccgggtagctagagaccagttagcttcctttgacgctgagaagtgagaagcacatgtttctgattctgaatttcattgcctgtgcgtgtgtgcagattcttcctcgcgtgtcaagatcgaggactgctacatcgtctccggcgacgactgcgtggccgtgaagagcgggtgggacgagtacggcatcaggttcaacatgccgagccagcacatcgtcatccggaggctgacctgcgtctcccccacgagcgccatgatcgcgctgggcagcgagatgtccggcggcatccgcgacgtgcgcgccgaggacagcgtcgccatcaacacggagtcggccgtcagggtcaagtccggtgccgggaggggcggcttcgtcaaggacatcttcgtgcgcggcctcagcctccacaccatgaagtgggtgttctggatgaccggcaactacgggcagcaccccgacaacacgtccgaccccaacgccatgcccgaggtcaccggcatcaactacagcgacgtgttcgccgagaacgtgaccatggccggcaggatggagggcatccctaaggacccctacaccgggatctgcatatccaacgtgaccgcccgcctcgcgccggacgccaagga

SEQ ID NO: 4407 - DNA, 874 bp, Zea mays
atgccgatggcgatgccaggagattacacggcggcagggttcgcgctcggagagtaccgcacgccgccgcctccaccgtcacagagcgtgctcgggttctctctcgacgcgcacgggccggggtccggtgctaccgcggcggggtacggttccagcgcggggttgcagggcgtgccggagaacgcgggcaggttattgttccccttcgaagacttgaagccgccggttggctctgaaggtggtggtggtgcaaccggtggcgccagcgatggaaatagcagccatactcagtttgaccacaacaacaaggagcaaggcggcggcggcacgggtgccgggcacgacaccccggggttctggagcggcatgatcggcggcagtggcgcttcttggtaatggagaaacatgcacggccggggggcggcgccatgcatgcatggctcatgcaaaggctccctgcctgcgagcgtgcatgggcatgcagtagagacaagggttcaataagaggttggcattggtggtggttgccctgacatgggagtgtttgatctctttcctagtactgggtcctggtggtgttcttcgtcttttctcgccgtcgtcgtcgcgagttcatgtgtgttttgctgaccatcgactttaattggggctctaacacaccagaggtcatgttacataagcttgatcgacatctctcggtcgtcttttcccatttctgatctctcactatatctgccattgttgtagctgcttcactggggcttgggcagcttgtttttgggctggcttcaagttaggatggtacatcagtgtgttcaggccacacaatggcacaaggtttagtgaatcagtgtgtttggctggtaacaacaac

SEQ ID NO: 4408 - DNA, 1021 bp, Zea mays
gccagtgccagtgccacaccaagacaccatcgatatgatctgctttttttttccttttggttcttggcaagagaaaaaaaaaagatgatgatgccatttcttccacgcatgcatcacttgctagcagtggatatttagatactatatggaacccacccggccggtcgtcatcagctatatattcggtagctgacctcgatcgatagatggatagatatcatgattatatatggtgataagctaacatgcaagcaagagacatagccccacggccacaccccatgtccgtaccgtacgcatgcaactacctagtaagtgtatggagatgtagtcagcttgctatcgttaaacaaggggatcaaaccctaattaattggtgtcggctgcccggcctgctcatggtcatgtatgtggcagcaggattgtactcgatcgcaagccggccggccggcaccaagctagctcttgtcttatctccatgcaagcctgtccgtctctgatcccaccggaccggaacgagcgatggaacgcagcacgtacgtacgccgggcccggccgggttcatggacatgccatgtttgatgtttcgtacgtgcgcgcatgcatgcacgtatacgatacgcgtgagagcggtacgcacgtaccgtgagaagacgcggccgcagtcgcaggagtggccgcgggtgccgcaggtcttgaggtgggccttgtagtcggactgcacggcgtagcccttggcgcagcgggcgcacacccactgccgccgcccgccgtgcttgcgccggaagtgcttcttgatgcccaccaggtcgcccagcgcgtgggcggggtcgtggtggaggcagctcggctcggggcacacgaacacgcgcttccggggcgcgccgccgcctgcaccacctcctgtgccgctgctgttattagcgtcggcggcgccgccgccgccgccagcagcagcagcaggaggcggcggcgcccgcttcacgagccgccacggcaccttgtggcgccgccggtgcat

SEQ ID NO: 4409 - DNA, 991 bp, Zea mays
aggagattgacgacggcgaggtggagatcccgtccgcttaagaaggtattgtgagcaagtttctgttattttactgtaataatattgatgacccattttgcattgaagttagccaatacagtttatgctatgctttgttcacgttcacgtcacgttccctttagcttatgtcagtatgaactctgggaattgccttcatttaagcgatgctccaccgatccgtttgttcatgaattgatagaatgtgattaaacattgttatcaagtgggtttcagggttttaattgctgttaaatattcaaaatctaaagatttagagttcaatgtactgaatgaattatgctttttctctcgctgatcgatgtctcagttatggatgccgtgttcagttagtagcttgacacagtcccttttgtaaccttgcaggattggtgtccaggactgtgttatctttgctgctgaagccattttctctgcctagattttctcatatttatttgaggtgggggtggacgtggacgtggaactatggaagttatcacagcggagttttgcttagaaactttgtcatgctttaagtctgagacaatttctgtcaaattttatgaacattcctaggtacaatcgaagttaccagtgcctgagttttgttggaatttttcatgcgatgtttaaaatttgactatattgcatggccaattggttatttgtctggttagtgattacatcgttgaggcgcatagtacttgaaatatgtttctgctacccgttgctatggttttctggtggatgcgtgctcttttatatatataaaacaaagtgttttttcattagctgcattgcacaaggccctggctggatgtggcagtagtaagatttcccaccatatgcagctaaacaatgtgctgtataacttgagtctcctttaacacaacaacaacatttgaaaagatgcattacaaatattgcttttttcaagaaggccatccgt

SEQ ID NO: 4410 - DNA, 1017 bp, Zea mays
attgccagcatccgaagacggccgaggatttcttcaagctgagccccagccccaaggtctgcctcctttcgccgttccttgcgaccctttttgttccacggggggtcagctcaaccctcatctcacgcttcttcttcttcttcttcatcggaacagggcaagctactgcgatcggtttccgccatgctgccgttcgccgaaagggacgccaacgccaccagcctcaggtgaccaatcaaattcaggtgttctttgcgcgccgcgctcgcctcgatcaaatccctttctcaacccccctcgtctgtgcgttgctcagggacggcagtaacaatctcaagtggcggggtggcggcgccgttgctgcctccacgccgccgaagccaaaggcagcgcccaagaagaggttccaggaggatagcgagaaccatgaccctgcgctggccacgccgcccccacggcaggcgccaagtaggccgccgttcggcgcccctcggtggaacaagaatgccaaggaggccatcaagtccagtgcggagaagcggccggacaatgctgagaaggaggcgctgctcaataagcacgtcccgccgaggcagctcaagagcaccctctcagcgaggaacctcttctctggaaaggatatacttggccagatttcggagttctacgatgagctgaagcggatggttggtggtggcgtcggccggcctgtcacagacacacaggaggagcacagctcagacccagtgtaaacctctcctcaatcctcatcgaaggaatgaagggattcaattgtcagattatcgctttgaggtccttgacagtttcactcgtgcaggaatccgagctatttgatggagaaggtggctcctgatgagacagtgaaggaggaggcgagacaagaaacggcgaaaaagagtccaagcccaatgtaatttgcaaatagtcatcccagtgccaacatatgggtatagtataggttatactgattgttgcttacggagctgattctgtttt

SEQ ID NO: 4411 - DNA, 916 bp, Zea mays
tcttgcatgcctgcagctgggacggctcgccgtcgccgcgggtggagaagcccctcagcaccggcacgatcaccttgctgtagagcagcacccatgtgaggaggaagaccacctcaaacgagcccatggacgccgcagccaccggcacggacaggatggacatgttcatggcgctgccctgctggatgaatgtggtggtcatctgcgcgtacgccgaggacacgatgacgctggtcacccatatgggcagcaggcgcatcaggatcttgagctcctccacctgggtgacggtgcagagcgtccacgacgacgaaccggtctcccccgacacgcgcatctcctccatgtccgattcggagacgacggctgccttgtcaagaaacgagaactcatcggtatgcgcgatcttgggctgctgggcgtccaccttgtcgctgacctcgtagagcatgtcggcgtcggcaggcaccttgagagcgatcttcctgcatgcggcgacgacgacctggctgaggctcttgagcggcgtgccggtgggcatgcggcgcttgtacatgggcgtggcgagcacgaaggcggcgaaggcgagcgcgaggcaggccgtggagatgccgaagccgaggccccagctgacgttgtcctggacccacacgatgatgaggccggagacgatcatgccgaagtcgacgcagaggtagaaccagctgaagaaagacgccttgctgtcccggtccgccgggttggcgtcgtcaaactggtccgcgccgaacggcgccagcgacgactgcaccccgccgcgcccgatcgccacgaggtacagcccgaggaaggcgacggtcttggcgccgaacaccgaggtggcgccgccgagcaccgcggccgtgggcaggaacgccgagaaggtgacgaacatcat

SEQ ID NO: 4412 - DNA, 969 bp, Zea mays
cagcttgcatgcctgcagctgcaaatatacgtatgtttcagttcggtttggggctcttttcagttcaaccaacggagctttgccttctttctgagctttccacatgtaggttcagctacaaattaccagccggttttccaccttatcctcggccacggaaaaaaaagaatcagtatatatgtctgaatgtctcgctgtagatcaggctaaaggcatgcccaacccaacacattcagcctttatttcacactcggaggcggcgtgtcaaaccaaaacaagcaaagcagcagcagtgcttcatcactcgccaataaaaaaaaaattactgtagatcccttgcaagactcaaagatggccggcctccaagtgcttcaaacgtcgaacctggcgttgacacaggggatagggccaggccaggccaggcttcattgcggagtcaaccaatcgaccttgagatgactgaaataaacaaagtccaaaaaggagccaattcctcttcctcatcagtggacgtctacgctacatgcatgtaccgaccggcgacgggcggcggcgagctacttttctctgctgctggcctcgctctcgccgcagggaatcgatcgacagacgacagctagctagctagctcgggcggagatggagttattgctgtgtggctttccacggtaccatccatcatcctcatcgcaattgggaacgctagctcctggcctaacaccatgcatcgctctccattagcgcgcgcgcatgctaatattatatatatataattaaacgatgatggctcaagagtcatcacctgtgctgtgccgggtaaccggataaggcagctcggtaagttgctgatgaacccttgaggatccggcagttcagcttcagcagcagctagctagccgcttttggttggagctgtgcctgtgcggcaggtattgtgttgccgcctgagtcaacaaggcattctctaaa

SEQ ID NO: 4413 - DNA, 887 bp, Zea mays
ggacccggacctccaccaccgccaagtagagctggacccggacccggacctccacccccaccaagtagaggtggagctggacctccaccaccagcaatgcctggtggtccaaaagcgcgtggtccgccaccgttgaagaaagcagggaatgttgcaggtcctcctgtggcagacaataaaacaaagctgaagccattcttctgggataaagttactgcaaatccggatcaagcaatggtgtgggatcaaattaaagcaggatccttccagtaagtttctttttcttgtttttttttttggaaatagtagttttatccttccagtaacaagcttgccaatctccctgaacgtagctagctattgcatgattattgttgtcgtatttgtactgtgcacatctctttactggttgcttgctaccaaccaaagattggtaacgtcaggtgaaccagtgatgctaactcttctggttactaattgattgataggtttaatgaggagatgatcgagagcctttttggttgtcatgctactgacaagaaaaatgctgacggcaaaaaggatttagcagcaaaggatacccctcaatttgttaggatactcgatgctaaaaaggcacagaacttagcgatatcactgaaggcactgagtgtttcagctgacgaagtacgtaatgcagttatggaaggtaaagctgaccatcttttgggtctcttctgtgttatatatgcagcagaaactatgtaccttatattaatgggtaaatataaattgatccagggcatgaactccctattgatctgatacaaaccttgataaggtggactccaagcagcgacgaggagctaaggcttcggctatacaccggggagctcactcaactgggt

SEQ ID NO: 4414 - DNA, 907 bp, Zea mays
tgcatgcctgcagatttccccttttccgttttctggttgaatcaacgggtgaataaaccatagataaatttaaattcctggatggatggatggtcgcagcggatgcagaaccctcacgtggacgtggagttccggagcgaaatcaagatcatggcgcgcatcgagcaccagagccttgttcgcttctacggctacatggagtgcggcgaggagcgcatcgtcgtcgtcgagtacgtccctaacggcaccctccgggagcacctcgacagtaagcgaccacctgccattgctgctgctctgcttccaactccatctgccatctctcacctcgcaagaaccaactccaaccaagcagggtgcaacgggcggttcctggacttcggcacgcggctcgacatcgccatcgacgtcgcgcacgccgtcacgtacctgcacatgtactccgaccaccccatcatccaccgcgacatcaagtcctccaacatcctcctcaccgactcgatgcgggccaaggtggccgacttcggcttcgcgcgcctcggcgccggcctgggcgccggcggggaggccacgcacgtcaccacccaggtgaagggcacggcggggtacctggacccggagtacctcaagacgtgccagctcacggaccgcagcgacgtctactcctttggcgtgctcctcgtggagctcgcctcggcgcgccgcccaatcgagaccaagcgcgagatgaaggagcgcctcaccgcgcgctgggccatgggcaggttcatcggtggcgcctcggccgacgtgctggacccgcacctcgcccgcacgcccgccgccgaccgcgcgctggaggcggtgctggagctcgcgttccggtgcatgggacccgtcaggcaggacaggcccgccatgagcgact

SEQ ID NO: 4415 - DNA, 1025 bp, Zea mays
cttgcatgcctgcagagagaggccaccagccgatccgatcgatcggatcggatcgcggcaccagatctcgaccaccgccggaactgggcgggggcgaagcagatgatgcggcgattaattaaccggcgtagcagcggctggggatctacctgcatcacgtcgatccacccgcggtagatcgatgggaccgtcacaacaaggacaaggtacggattaggtttcttgtactggtaggaatggatggtggttatgaatgcatgtgttgaattccgtacacgtgtgtgtgagagagagagagtgatggtgcgtagggctggttaatttcgtcgtctcagcttctttcccgtgcaatttaatctcaacctatgtatatactacaagaaaagggttgttgttaattaccagtgtctgaaattgtggtttttctgaactccaagtggcagtatacacatacctttgtttcttaatccttgccgcacttgactagcggtggtaataaatcatgatccaaattgctttcacaaaatgatagaaaactaaataaattttagtttaaaatgactaaaattatgtttcgatcctaatctaattcaatacttaaattttataatataaaatttagagctcattgtcacctatatctctgcaatgttctgcgtacgttttttttttgaaaatagatagatagagtatagtaatatttagccagggtccgttagtttcttccggctggtcatgctttaataattgagctgcatgttttttaagcgatatccattttttttctcatcattgcgtgcacagttagcgcagatatatatattttttatcttttttttgcatgcttttattctctgaaagggcgatgggcattttccaggaacgaataaaaagagcagtgcgatttggcctgtcgttctgtcgtagactgtggggcgatgtttttctggaagcgtgcaatctggtagatcttttggttgtgtaaagggagaaaaaagatggcgctggctgcttgctcctgcaag

SEQ ID NO: 4416 - DNA, 919 bp, Zea mays
ataaacaaggtgggctcctgacatgcagtgggtggcggtgcagccgcttggtctaacatccaaggagacagacaaggttgctcatggcttatatgtccctccggtgaggccttgggtggttgttgatgatatgcctctttggaacgatgaggcagcacggcttaatcaagagttgtcggtagcacataccacatcagggtgagtaggatgtgaaggaatcaacttgatcactgtgcaggttgccaaaagcgaactcactgatgttgattactcatgaccacatttagagcttggagtgattgatgcaggccaaatgttcgaggagatgcctctcaagtagaaacaactcataaagaacatgttatgctaatgacagccacaattcctggtatcgcttcctcgtacgcacttgctaaatgcatcagagtggtccaatgggatggcaggtcatctgagtatctgacatggacccaaacgatgggttactgtggcaattaattcactatggattgcactggagtggtgagaacaaatcaagtttcaagcctgtcatcatggctgtgctcgctcatgatagcagcaactcattcccattggatgatgtcacagatcttgaggataatttgcttgattaaagacctcttgaagccaatgcggcagctcaggctgaactgaacatgttcagggctcatatggaaacaaaggttgctgcatgggaactgttgaatgaggcacatcatgcggatgtgtggaatgagggcatgccatttaacaatgagacacaggacaacttactacaataaatgccatgtgatgtagcacagaggaccaaagtcatgaaacggcaaacgcctcagagacaaaggctgttgcaaaataacagtgcttgttctgtcttcctgcaggtggactctagagg

SEQ ID NO: 4417 - DNA, 909 bp, Zea mays
agcttgcatgcctgcagcactgctgctgcctctcgccatcgaattgcctatcctaagggaattctcttgtttctggcagtatcaggaaaagaacagaaaacggcaccaccgcaccatgccctgccctcactcggagttcacagagtccacggcaggggaaaaaaaaagtggcaagtggcgaacggcgcccgagcaaattgcgcaaccgacgcggcgatgattcggagccctggcgccgtggtcatcgtgacagagaaaaggaaaccaccaaactacttgctgtgctcctaattaactccttcgggcatcagcggacctacatggctacatcactacgtgctgcccatgttggcgactattcatacagcgaagggtgcatctagccatgacgcacatcactgaccggtcagcctacttgctactacacatcgcgacagcagtaaatatgatagcgattgacaacaatgtatactttttcagacttgtaccaaacctttcatggtcgatacagatacactctggtgcatgcgcatgcattgtgtagatttttatatacatatctgtacgcccttgcaatggagaggctagacatgtgcaacacgttgtggatgaacggggccaggatgctgtaaaaataaatgtatatacattggttgcccatgtacctaccatagaagtaaaccacatttcctaaagctgtagaaaacatttcaaggtttgtttgggatacaggggaattgaggggatcagagaggctaaattcctcttctatttaattttaaataacaaaggggattttagccccctgcaatctcatggctctcaaacatgccactttcctctagggcacacttcactaacctgccaaagtgcagggcaaggcaaccccacactgtataaattcctcct

SEQ ID NO: 4418 - DNA, 1022 bp, Zea mays
gggaggaggcatcacgtgccgtccccttcccttcccttcccttcccttccatcctcacccacattccattcggatcgattccatccccagccccatacccaaaccctaaccctaccaccgccaccatgtccgagcgcatcgacctcaacaacacgtcccaatccctggcgccacccaagcgcggccgcggccgcccccgcaagaaccccccgcctcccgctcacccgcgccctccggatcccgacacccccatggtcagcggcttcgctccgggcgacatggtctggggaaagaagctcaaccacgccgcctggccgggcctcatctactccgccggagggaacagcaccggccacgaggcccagctccttgtctcctacttcggcgacaaggccttcgcctggtgcgacgcagccgagctcaggccctacgagccctacttccccgtcgccgagctctacgacgacggcggcgaggactttgacgccgccgtcgaggcctctctcgacgagttctcccgccgcgtcgaggccgccctcgcctccgccgcccgccctttcgcctccgccgatttcctcgcctcgctccacgatctcgccgcggatcgcatgggcttcaccaacagggtgcaagccgccgtcgccaaggcgcatctcagagccttcgacgccttcagggctctgccggacccacctcagtacaccttggagctcggtctactcccacacgtcccgctcccgctgcccgatcctaaagctgacacggatgccgccgccgccttcaccacccccgcatccagttccaggaggggcaggaagaggaaggaggaactcgtcaaggacgacgactccgatgaggactgggaccccagcaagaggggtgccaccgacttggattccgatgtggacttcgaccacaggagggggtccaggggcaggggcagggggagggggggcagcagcggtggcagcggcaggcctcgaggaaggcccaggaaaacagatgcctgcaggcatgcaaga

SEQ ID NO: 4419 - DNA, 770 bp, Zea mays
atcttgcatgcctgcagtccgatcggtcgaaaggcaagtcatcgtcgcatattcagaggaaggagaaatggaaaaaggcttccagtagtgctagatcagctccttatgacgcccgaaaaacaagcaaaaggaaaagcccccatctcgaggaaagagtgggcacacctcgtcataaacccaaatcgaggggtggctggactggtggagatgatctaccattgaagaagtacaaatccaatgggtggggctctccatctactcccaagaagtcttacgcaaaccaccagttcttgtctggttgtgactacctcactccccagccttcacgaaggcacaactaccatggtaccatgtcttcaccgaatcaccaattcttgtctggctgtgactacttcactcccgagtcttcacgagggcacagccatggtaccatgtcaccgaactggaattattcacccagcgccaggaagcatgggttctcgtcatcaagattcgccgcggctgccgccagcaacacccatgtccggttcgggagaaattagctggatgcacgcgcctgatattgttgttcgttttagccatagatagataccaattatctcctggggatgaactctacctgtcgtcggttcatgccctttccatagttgtttgttctgagattattatatatgtaatcgtggttcaaactatttattatttttttttactgtcttccatggcatggcgttgatgccttttgcaaaaacggcaactgaaagtctgtaact

SEQ ID NO: 4420 - DNA, 1024 bp, Zea mays
attgagcattagctcatagttcttatgccctttggcaatggtcaccccctgcttcttggacaaccgcaggggcgcgccgttgggcaggtatggaaccagagcgggcgacggtggtggcagccccctcccttctctgacgctccgccgtctccagtcgtccccaaggtcgcacttgacctccccgtccgacccccagaagtgcacgaggctgcctcccgagccattgctccagccagacgacgagctgccgcgcccgctgaccgaccgcatcagccatttgagggatctcagagacgtgagcgctgattgggcctcggttccggagcgcacgcactccggcaggtcacgtgcaaacacctccctcgggtcgcgcgcccggggggagttgcccatcgccgccggggacgggtagtaaacgcccttctggtggacggcgccgctgggcgcctcgcggccccagaagccaacgtagaggctgccgtcggcccagcggaacgtgccctgcccgcggggtcggccgccctcccaaccgccatcgtagcgattgccattggcccagacgagcgtgccgcggccgtggatgagcccagcgcgccagccgccggcgtactcggtgccgtcgcgccaggcgtagcgtccgcaaccatcggggagccccgcgcgccactcgccgtcgtagcagtcgccgttagcgtagcgtttctcgccggcgccatgctcgaggttcttggcccagacgccgcggtaggtgtcccccgaggcaccaacgtaggtgccggcgccgtgcatgaagccgtcgaggaactcgccctcgtaggtggcgcccgagggccaggagaacctgccgcggccggtggccttgccgcggcgccactcgccctcatacatgcacccgtccgcccagaggtacttgccggcgccgtggggcacggcgccgcgccactggcccgtgtagatgtcgccgttggggagcacctgctcgtgggggtcggcttcgtcggctgagccactgcaggcatgcaag

SEQ ID NO: 4421 - DNA, 984 bp, Zea mays
attgcaacaaaacaaattcactttgggttcacaaattcctctacaggatgtacttttcacttgaactgttatgtagatgtaggaacaaggaatggttcagtttttaggaataatgtgcatattttatttcagaacattttctagttggttgagtttcagatttttttgtaccaagctgaaggattaaaaaggatccgtacatgtttgcaaattattttagaaattgttctcttaggtttctctgatgtaaacaatggtagctgattaagaccaatgactgcctgcaacattgattgagagatcaactagattgtttccacaagcttaatcaagagatcaactagattgtttacacaagcttaatcgacatttcagaaatcatttcagaatttttatctctctttgtttccacaagcttaatcgagagatcaactagattgtttatgcctttgcagttatcatcttgtctcatgacatcaatataattatcaagttgcaactcaagattcagcaaatcagtgcccctgatgtcattagggtagaatttagcaagtctaattgtctttcacctggatcatgtggaagacgattgatatcatagaccggcggtgctggtgattgcgatggtggtgaagaattaggcataggattatgattttttttcgatcactctttcttcctcttgttcattactaggttgcccttgatttactgccggagttgaagaagcatataccatggaggtagcaagcttctttgcttcatgttttcgaaaaagcgaagcaatatctccacccatcttcatgttcaaatgttcaatcactgtactgtacaagtaaattgatagggcacaacatcaaaattatttcattaataatgaacttcatatttacataaaaacttcttctaaaatcacgaaacatcactaattaaaattgcaaagataaaaatagggtttgctaaaaaaaattaacctctctgttg

SEQ ID NO: 4422 - DNA, 962 bp, Zea mays
agcttgcatgcctgcaggcatggaacaaggtgttcgtgatatcgtgcctcgtttcagtctccgtggactcgctcttcctctacgccccggcgatcgacggcgacatcgggtgcctgtacctggacgacaagctggagaagatagcctgcctcctgcgctccctcaccgatgccctgtacctgctccgcatggcgttccagttctccacagcctttgcggctcccactcctcccggagcgtttggccgcggtgtcctggtcgacgacctgctggccatagcgaagcactacctgtcgacgtatttcctggtcgacgtcttggctattctgccactgccccaggtagtacggtaccctgttctgttctttacgccacagatacttgtatatcgatcgatcagggtgtcgtaccgtcagtccgtcacacactgtatatatatatatatgtcaggttttcgtgtgggtagtgcggccacacctccagagttcagaggttatgaacgcgaaaaacgtgctgatgttcatgatcctacttcagtacgtgcctcggctggtccggataataccactctacctcgaaatcacgagatcagccggcacagtagtggacactgcatggccgggggcagcctttaacctgctagtttacatactcgctagccatgtaagttctctgatcatttaccaatgctgttgaaatatactcacaggatgtaagtcctctgatcatttaccaatgcattggcttcttacaggtccttggagctctttggtacattctggccatacagcgagaggacacctgttggagagaagcttgcaacagccaggaaggctgtgatctggcaagtctgtactgtgggagtactgcatctggaaacaacagtacgttcttgcaggatgcgtgcccaacagatggcgatggcgccgatgtggacccaatcttcggaatttatctgccag

SEQ ID NO: 4423 - DNA, 854 bp, Zea mays
ttcaacctggcagtacgatttctgctgctgcgcggttggagccgccgccgccgccttcgccttcttcgcaggacccggaggggtcgctgcactggcagtgcctaacgccggcgaactcttgccgctctgccctagtccacagccatcttcgaaatacgttctcttgccaagcttcaggccgagcaccggctctccgctgctgagcaccgaaccagtgtccttgtcgggcgctttggcaggtgcgaaactgatgagctccatgttgttcttgttcttgttccccttggcattgggcagagaatggattgacgcggatacggaagaacgcgccggttcatgccctgtggcctcaaggcccgcaaactgaggcgcggcagcggtcgtcctgtggctctcgctcccgtttgcggctgcgggcggcaggttctcccagtcccacagcagcacggaggccttctggttccagtccatgtccatcccaaacgagcccatgccagtgccagtgccaggatccgaaatctgagctgctgctcctcgtcctacttgcctgccgaagcggctaactctgaaacaacaacaacaacaacaacaaaaaggaagagagaagcaggttaaagagcagaaagggttcgggtaagaacaagcatatctgggggctggggcactcagttatgcatcatgattaggttcgcagggtaagtacgcgaggttgcaagaacagaaccgttgaacttttaacagaggaatcgtcgatcacggcaagaacagaacatagtgtagcagcaccaagagagagaggcaagggaacataacccacacccacgagtacgccagtcaaggcgctgcaggtatca

SEQ ID NO: 4424 - DNA, 792 bp, Zea mays
gttcaagaattttgtgtctagattcttaaatctgaataaacaagttgaatatattaactgcaatgaaaacatatagatgtcatctgccacctatctccacgcacagtctggctcgacatcacctgcccttctcgtgatatctgattactgttttgctagtgctagctatcgatgttgttcggggattagtagtgttctatttcatcctcttaatgtgttcgcatcagatagatatatgttcatatgatttaaggatatcctgtcagcagcttacacatttgtctatctccatgcttcctttctttagttggagactggattattttttgttgggataaacttagtacattatcagagcatcttaactctggatatgggtgcctttaagggatatccaataaacaaaatttgaacacatttggtttgtcgtataggtacaaagccagcacatgcttgggcaggtttgatcagtttcactaggaactgttcactaattgactgtctcagtaatacaattgaatagcctgcaactcagttagccatgactttcttcgtcatagtttctttagctgaattattttgcacatattacatggatgtgcactacccatgttgttcaatatcccacatcaatatcgaattgagtatgatgactgatgacaactaccagttattgtttcttgaattggcaacaacttggtctgtgagtcattcccactttgcccctacccttgctgagtagtgtcatttcttttaggcataccttatagatgaatgattttttacattact

SEQ ID NO: 4425 - DNA, 892 bp, Zea mays
tgcatgcctgcagatgacaggtgccagtagtgtttatttaccatgccgtactgtttggagagagagagagagggaaatcatgcctgatagagacaaggatgtgccttttccaaaccgaaagtcgctttgggcggtctatccaaaactagaaattgtgcaacattttctagtgtttcctgaatcgtcattgtcgtcttcgtctatttaatgaaatgttgtgccgtgcgtgcatcgtctccttgtggttttggttaacaacatgagcaactgaatggacgaaattaacaagggcgctcaccttggctggagcacgggagcaagtctcccggctggccgttgatgaggagggcgtcggagacgttgggtggcgcgccggtgatcatggactggcggagcacggcgatggggtccctcctccaccactccgctgcacaaacatacgcgcacacgtcattgtactgcacaaacatatgtgtgtgtgtatcggagcatgtacctaggatgacgggggcctcggtgtgtggcttggggaaagggtaggggacgcccctcctggggtggatgacgagcgcgccgtgcacggtggcgcggagccaggagctgtgcgcgtgccaccacagcgtgccctcctgcccctcgacggtgaagcggtacgtgtagctgccgccggggcggatggggcactgcgtcacgaactccggcccgtccgcccacccgttccgcagctgccggaggccgtgccagtggagcgtcacgttgtacctggccaggttcacggccctgaccgccagcgtgtcgccgctgtacacctcgatcgttggccccgggaactgcccgttcaccgtgatgatctcctgggtcttgcacagcctcttcactggcgtcccctgga

SEQ ID NO: 4426 - DNA, 949 bp, Zea mays
gcgccgtctcacctgttttctctctcgtcgcacgcagagaaaataaaaaagagggtggcgtacttcggagggacacgtaccagcgcggccgaggtccgcctcatctgggcccgcatggcagggaggcgggagcgcgtgcatatcagtggctggtgacagtcagagggcaggccggtcagagggagcaggagcacacgcagagggagagcggtgccgccgcggctgcatgactggcatgtgggccccgatgccgcccgaggccagtgaaggatgccacgacgccatgggctgtgtcacgtcacgtgggcggggagcttgccgaggcgaggaacatgtgtgggtcccgctgccggccctgttcccgagtctgtagggcgggcgagtggggtacgcccacatcccgccaggccggcggagggaattgattgatggatcgaagctcctcggatttgcatttgctttcgccccaaagatgatcgtggcctcgtgctccagtccaggctcggaggctccacccgctccagctccagtgcagacgcagagaggacagaggacttgccgctccaaaccccaaagtttcgtatctctttgatccggatgggatttgtttttgtactcgcagctgcccgctcgtacctgctacgcacacagcgtctttttggttgggacatgtcatggataatgacacggcacgtcaagcgctagacgacgggagctgcaacagcctgcaaggccgtcggccgtcggccgtctccgggcaggtgcagagaagcgcagcacagacacgggacactgggacaggactctgatctgctgggtgtcaagatcacatgagccccgggtcgttgaccacgacctcagtcgggggtcgggactcgggaggagggtgatggatgtggatggtcttaaagctgctgctgctgccaagtcagtgctacgaatactctga

SEQ ID NO: 4427 - DNA, 921 bp, Zea mays
acaccaaattataccaaggcataaccacataactagtacaatccagccaagatgcaacatctaacttgcacatattcaccgttgctagagtttgaatcaaaaaacatgagaacatgctattggtatctgagcaaataaatagtattggtcattgtttcgcgaatacttcaacatgtgccaggagacaggtaacactgcacaacgggaaaatgcacaatgctgtttaatactggccaattcgcttatatgcttcctcttgacaaatgaccagactgcacggtcactctttattaggtaaagaagcaacactttttgtgcagagaacatcaagcttcctaaaatctaatcataattcctcagaacaaagtattctagagtacaaatttgcaacaacaaaaaaacaactatgatatcttggtcatcatgtttactaaaattcagaaataatatcaaaagtagaatgttagctaagcagacatcacactctaaagaaccaaaatcaaatgaaaagaagactatccaagagaactgaattctgggtaattctacaaggacacagaagctcaaatgattggaccattgcagagtcaatgcacccagtcatgataataaatgtaccttcaaagtacatgtagacaccatcctttcggcgccatggcttgcgctgcctcacaatgacagctggcatcaccttcttcctaaggtcaggctttcccttcttcacagttgccataaccatgtcaccaacacaggcagaaggaagcctgttaaggcgccccttgattcccttcacagaaatgatgtaaaggttcttggctccagtgttatcagcacagttcacagtggctgccactggtagacccagtgacatccggaacttgttaccagcagaacctccacgtcctgcaggcatgcaaactg

SEQ ID NO: 4428 - DNA, 920 bp, Zea mays
gcccaaaccctagcaacccgtcctccgccatggccgacgaccactactcctctaagaggaagtacgacgacccctcgccgccgccgcggcgcacggggttctcttcgggcccgccgcctgcctcgccgctcgcgggcggcgccccgtcgtacaacagcgtgccaccgccccccgatgagatccagctcgcgaagcagcgcgcgcaggagatcgcggcgcggatctttaacgccgcagaggccaagcgtcctcgcgtcgacaacggcgacgatgacagcggcggcttcggtgtaggcctgggcagcactggtggcggtggccgcatcggcggcggaggactcggcttctcgtcctctgccggtggtggtgagtggcaggacttactcttgttgatcccattcttggtcgcgtagatctgtttgtctatgcttggtggtggactcggcttctcgtataaaaggattggtggtgttttctttgctcggtttacgatttgatttgggggatggatcgatagatcaatgtatgtgagttgcggatgttcaaacttggttcatgtttaatgaacttgtcacctgtgagctatttagaagcacgatcctgttgttacggtctccaatattttttgataactcacacgccacgatgcagctgtggggtgttaattttttcaaaacaagctgcaattaaactattcaagtccaagtcaatcagcgttctccacattttttgttagttttactagctcctcgtgggtttgttagttttacacgttctacctcatggggaagtctaggaaaatcctaaaatagttgtcatctgtaggagttagattttttattgtattcattgcaattattgtgtagttttttttcacaacatgccattttcgaaacagttgtcatctgcaggcatgcaag

SEQ ID NO: 4429 - DNA, 1025 bp, Zea mays
aaagtacaccattctgtttatattgttagtagctctcttttgctttcttgaagctacgtggtgaacatcgtcgtcctctactttctgagattaaataacgattacaagctgtcagcgtggcttatgtactgtacatgcatgtgttcttcgtacttgcatcaaagtgacattaatacgatatacgtttgagtcgattcttcatttggagtcagcagggaagagaaaaaaaagctcataaaggaagatgccagtagtcgcagcgttctaagacacaagacgtgcgtgatcactggatgcttgttttgaagagctttttacgccttgagctagcctcacaggaggacagcacacggttcgtctgcctaccttagtttgtgccaccaggtcgttttcatggtacacactacacacagctagctagcccacagcataatcatataaattatatatacatcggcctaaccttttccatcgtaatggaaccacagtacagcaggaacagatgcaaccgcactttctttgatctccctctcccctgcgcgcgcgctgagcctcacaggacgagagcacacggttcctctgttcttgttcgtttcaaactccatgctagctacacagagccctcaacaatcatatataaattacagactttattagctgaagaatccgatcccatttgtcttgaacagcactgaacactcatatagtaactagctatggccaatcacacgttgacagcaagaacatatgctccgatccgtgcagagcagtcatggagagacacgaacaatggacagcaaaacgcaaccccctgcctaatgaacacatttatttattcgttccaagagtatagttcaccatgcatgttcctgtcaaatccaaagcaacaccaccaccattcttcacatgacgctacacgccgccgacgggtcgtcgtcgctgaacgtccggcagcccctgtaggccccgcacggcgctggcaacgggcggacggtcgtgccgtacagcctgccgcagcagtagca

SEQ ID NO: 4430 - DNA, 978 bp, Zea mays
acccctgacatgggagcaagagtcactcctgacaaacctgcgcctctcgctcaacatctcgaatgaggagcacttgcttcagttgaggcatctcctatctctttgaaaattttcaaaaactaatgtgccttttttatatctgtggattacctccaacccgtagagatctttgcaggcttgtagcgtatgtttcccaccttgactgttgtatataaagaagagttcagagaaatccacttatagctgttgtacttcaccagaactttgttgctaggagtaaatgtcttgcatttttttagtgtttttacaattcaaggaaatgtgaagcatatcatcgaaatatatttgtcatgctgataataatcaaggttgaaatatcagttcctttaaatgaagctgaagcatcaattgtagttactgatctcactcattgtatctctttcttcgctttggtatcgttctgtatgtttgtggctgaaatgtttcgccattgataggtcctgattaagatctatctttaatactcctagttatgcattggtgctgctgatgtttaaacctcatgctgtgaacacacagatttctgtgcagtggatgaataccactttatgagaaagaggtcgctgaaacaaacagtgcactgaagtctgaaaaccaggtgctcgggtgcctttcttctctcccgtcaggccatcatattgaaggcatgtctgggttttatagacgctgcaagagttggcccatgattcattgatcatggtgacggataagaccgggtacgccatcaaataacctagggaccttaaaatgtgttcatgccctcttgaagttcaaattctgtttatatatattagatgtccccaagggaccctgttcttcattttaactgaaaagttatgtaaaattttcttttaatcaaactgcaattgtgtttgtcaattgttcagccaacatctgtgcttgtaacttggaacctgt

SEQ ID NO: 4431 - DNA, 1015 bp, Zea mays
ggaagggatggaccagaggagatatgcgtgcgtgaaagatggatgcacggccgatgaaaagctcctgcctgccgccgtgacccggccgtgaaggaagaacattttcacgttatggcatgcgtttcggcaacaatactactcgagtgttgtggtgtggtgtgtgtgtgccatgcatgtattgggctatgctacgctacgctagtagtagcagctaatcgttgctttgtggttcgctttcattggtgggccggcacggcgcgcggcggcggcgccgtgcgtatctatgcacgtggttattattatggtcaccgcacactacacacaccaagatatttgtgtagtagtactatacatactccagtgtgcatgagcccagaaactttggagtcacgagtcactgatcggtcggaccattttgcgtacacgtgcatgcaagtgccatatcctgccagaaacaagaagatggcataaaaatgcaggagaacaggaaccagagatgcatggatcgagtatgtgtgtagcgtgccgccatacatacttatccggccggtgcggtgcggtgcggggcggtgcgccggtgcggatggggacgggcgcatcgatcggctggccgccgcccatgcactcctcctacctctcctcccatcccatgcgcgcacgcccggcggcccgggtcggaccgaaagaccaaccgggcggccggcccccatacgcgcccgcccaatcatacgcagcgcgctcgctcacggtcacggcatgattagccccggcccgaacggatcgatcgatcggacggagtgtgcgcaacgcgcaatgccagcgcgcaggccccgccgccgccgtgcgtgcgatgcccgcgcgcgccctacgtgttgcgccctccgcgtctcggcggcttgccgcgccgcgcgcagtccacaatccagccacctggcgggccggcccgcccgcccgcgcacaatcatgcaaaactgaatccacagcgctcgctccgccggctcggttaagctacgag

SEQ ID NO: 4432 - DNA, 984 bp, Zea mays
agccgagcaaactcaccaggttcttgtgccggacgcgcccgattgtctgaacctccattcgaaaatctttctcggcctgacccctgatcaagtatacagcaactgatgattttttttttgttgtaaaatgatcgattcatacgatcactggcgtggctaattacgcggttcatctgacactgatctgaagagtggatagaacttgaatttgtttgtgtacacaggaggaaacgtgaagcaatttaatccaaatcgaaacgtgccaaccacctcgatctattctcgcgggcatcaagcacatatttggtgataataaacttttctttttttaaaaaaatgaaacgagaggtttttcagcatcagatccagcaagcaaaaaaactgaaaaatacgatcgcgaccagactagaaaagctttgcgtgtagtttctgctcacgcttcggagttcggatccaaccgaacaaatcctgaagcggagggaagaagccaacctgttgttgtggaggtttttgatggcgacggcggtgccgtcgcggagcacgcccctgaacacgacgccgtacccgccttcgcccaccatgttggcggcggcgagcccgcccgtggcctcctccatctcgcggcgcgtgtaccgccggccccacccgcgccgcgccgcctctggaacctccgcatcgctgccgccctggtcgctcgcggtgctctcgccgctcgtcgaattcgcgaaatgctccgcgaggatcagcggcgccttctgctccgccttgatggcctggatcggcggctgttcgaacgaagcggggcgccagcgagcggcagcctcctcggcgtccttgttggccggcggcgggagcggcggcattgtcgctgcttgatggtgcgcatgcacgcggtgcttgagggacttgctggcgccgggccgatgcgggcacggggccaggcgcggtgcgcggcgccggctgcaggcatcaagcaaattcaac

SEQ ID NO: 4433 - DNA, 973 bp, Zea mays
gcagtggcgtgtggcagagaagaacacctggctggactactttagcaggtacctcactatcaccaaacatcacagcccaacccaaattcgatggattacatagaaaatctccagtaatgatgacctgaataaatgagatggcgagaaaagcctcggtaaatgggaacatttggtgttatggtgtaaaaaaaagcaaaaacttcacgatttaccttggtgatctcatatgaaaatgcccattctggagagatctcacgaatattaaacttgtttgtctgtcctaaagcaaatgttgtatcttctctggagtagtgttcaaaatgaccatggtcaaacaactccgttatttcagagccctgagaattgctttgaaatgttaatgctgtttttgtttgccaatctgggttcagagagcttccaaatctactgtcataagctgaaatagtatcagttacacagttcgctctatttctcagcacagagttcaaagatggtgagtcaacggtggcttctggtcctaaaagaaactttttagcagcagcaagttgtatgcgtaaatcactgctgtccaggcgttctggtggatggtattctgaatttttctgatactcgacatccgattgctgtgcaaaaatgcaagtcattgatacagttcagtgagagtataagcatgcaaagacatttatgaaaaaattgaacacaagaggtataatctagatatggagagaacaagacatttaagtacactttgttaaatgtactttaaaagattatcttcaaacaccaaatgttaaaaaaaatacatattgaatgaggaacacttcaaggcgtcccacctaagaatctttgaaaagactatcatagattgttttcacaattccacatgcatcagttttttgtgttctacaaggaagaagaatcccaagttacgatttcctcacctggtatatggatgaaattggtaaacctgaac

SEQ ID NO: 4434 - DNA, 884 bp, Zea mays
aaaatttgacatatatgcaattgaaatttgatgtaactttatcacatatctctagaagtagccgcctgaagcatgcagattgtgtgggagttcgatttcacacgtgtgaaactgcacttgtctagtgactacaggggacagcaaaagttgtcacagatggtacaagaggcacaagatcgacgtagcatctcatgaattcttcccttatttaaatatttagattcagctttagtgaaaatgtgtagttcttctctagattgcaactaatgttgtggtcagatttaacgcaggaataattagttttggagttggtgcttactatgtacatacaatatggctctggcaattatttaaaagtattaattaataactactgtatctagaattctagatgaatttgtagtgtagaatttcctaataggttctactgtatttagattcaactcaggatcaggaataatcagtttggagttggtaatagctatgtgtgtacgatgttgactaatgctttcttaaatggctctggcatttgtgtaaagtatcaactagcgtatcagtttggagttggtactagctacgtatgtacgatgttgactagtaatgctttcttaaatggctctgacatttgtttaaagtattaactagcgtatcttcttgtaacattgattttcattacttagactgatgtcactggcataaacatttgaacatatatttcacattcaaagtagcttgtatcacagtagatcagttcagtgagtttatgaccgattagagatcaatttcaatggtcgtttcattaagtttacttagatgagcaacaattaatgttgttagcagttgatcactaagatattagttttgttgaagggacttgagtcctc

SEQ ID NO: 4435 - DNA, 1020 bp, Zea mays
gccgccttcagaccattgtcttcaagaatggcatggcaaagtccatccatcatgctcgtgtgctcatcaggcagcgccacattaggtacaaacaataacatttcttcccctggagattatgtttttgtggtatgatggttaactagtaacacatttagttgaacaaagctaatgtcatggaacatgtactatttacatctgtattttaccgagtaactttttcttacaaggttgggggtgtacatcaatttatgcgagcacaatgatttataagtgctgttgtaaattttactatccatcttcctgtttgtcttttgggccatatgatgagactttgtgcaactcacgacggtcgtctgagacactttgtgtgtaatgttgcagtcctattttctctgatgctcccttcgtctttgtttctgatgcatttagcatttttgtgtttcttcatctgtttacattttacactttcctgtgaggcgcagactcagctgttatatttggtggcacagtgaggaactaattttgctaatgtatctatgaggtcagaaggccagtgaatcgaatgtccttttcattctgagtgccaatgtttctgtttttttcctttttgctgcaaacagttcttatgtgagaaactgagaactaggcagctgacttagggacgctgttaacatgttggtttactgctgattattttatttgttatctttaccaaatactgctataatgcatagaaccttcacctggactactttcaagctatttgttgttacctgagtcttgcttcttaactagttcagatgtatgaattgaagttatctcgattttaatgcaaaaatacatctacactctttggaattggaatccacagcagtggtggtgattccattgagccatacctgtcgtgatcatgttacgttttttttatgttcttgatgcaatgttttcttagttgcatgttcaatagcatgcattatttgttggcagcaatttcaccccaatgtaactcgtctattt

SEQ ID NO: 4436 - DNA, 888 bp, Zea mays
gctcccgttggttctctcggcggcggcggccatcctgatcgcctggcgtgcaacgccgccggtcgtcaaagcacgcctggccgccctccagtccggcatagcacgtgcgcgtaagccaataatgttggtcaccgacttcgccacagcgcaccacctgctcgtgcggggcagcagcgccggctccttctccaaccgcccgccgtccatggcacccagcgccgtcctctcgggccgccgctaccacaacatcaactcggtgccctacggccagctctggcgcgcgctccgctccaacctcacctcgggagtgctccacccgacgcgcctgcgccactacgccgccgcgcggcgccgcgcgctacaccgcctcgccgcggacctcagggagcagcagctcgccgacgacggcgtggaggcgctcgcggcggaaagcatccgtagcgcggtgttcggcctcgtctccaccatgtgcttcggcgacggcggcgtcgacgcggccgtggttcgcgccatggccgacgtccagaccgagctggtcctgtccctgtccgcggtgcgcaccttcgcgttcgtgccgttcctcgcggtgtccaagctagtctaccgcgggcggtggaacaagctcgccgcgatacggcggaagcaggaggagctgtacctcccgctcatcgatggctgccgccgcaggcgtggccgtgacgacgacgactccgacgggacgccgccgagttacgtgcgcacgctcctcgacctccgagtcccggtagaactcgacggcgaccacgatagcagtggaggcgagcagacgcagcagcggaggctcgaggacggtgaactcgtgggactatgctcggagttccttggttctggcaccgagtccgtgtcagc

SEQ ID NO: 4437 - DNA, 958 bp, Zea mays
ttaataacactgtcatcatatgaatccccattgcacctgttagccattgaggaaccataactataacctgcaaatgaaggattcacaataagaaaatcacaaagggaacctataatggaaaccgtagcatggaatgaagtagacaattctacagtggcaaaaggaacacggcaaaacaaaacaaagaacaaaaagcaacagaacagaagagaaggaatgatgacaataaaaattaaaaaatcgccactgccgcactgcgaacagctaatgaactggaaaatgcatttacttgagaatatcttcccacaatttgggtaataattgatcttattttacaaatccaaatatctccacttcattgtgttaaagctttgagcacaaagccagacaaatcattttcactaaaatatgttgattcatttgcgttaggatttatcacttttcaaagaaattgaggctttcttttgcaagaacattcagtgtacagtcaagtacacactatacggacttgtgaatctgctccacagagccatcagggaaggccataacaagggaagatcaaaacagcacctgattgagcatacattcatgctgctgcttcgcttatctctattcccaaatgccaaagttacacaattggcccagaggaagccagcagctgcttccactgaaacacacctgtattctccatattcctatggaaaaggagaaggcatgagtttcgcagacaactaaattattactgaacaaatcgggcgagatcatagtcattcctagaagaacagtaaagcaacccaaaaccaatttgactaaacagaaactcagccaataaacagataacgaaacattcagaatcccgacaaggatgtgtttgattcaactttctgaaccaaattcactgccaaaaatctggaatcccaaccaaacagttacaacagcataatagattcttgaaaat

SEQ ID NO: 4438 - DNA, 885 bp, Zea mays
agcaggaggaggtttcgtcagtcagtcatggtcacacatgtgtgtactgtttcggttgtgtgtgtgctctcaccgttctgatggaaccgatggtctgctccaccaccaccgacgattccgcgtaggccgcctggcccagggacgccatcttggtgacgacgttggacatgaccgcgcccgccaggacgagcggcgggatggtcgccatcatgaccagggtgagcagccagccctgcgcgaaggcgacgatgaagccgccgaagaaggtcaccagcagctggacgaacttgccgaccttctcgcccatggcgtcctggatgagcaccgtgtcgccggacatcctgcccacgacctcgccggtgctggtgtacttgtcgaagaaggcgatctcctgcctgaggatcgtcttgaggtacaggttccgtatccgcgccgcctgacgctcgccggtgatcatccagcaggtgacctctggtcggacggcgaacagttgagtgctcagtgctcagtgtctggccgcgttacgcaagaggtggaacttacggacgaaggaagcgacggcggaggccatggcgaggtagacgaagtcgagcgagaccatggacacccggctgacgacgtcgtggacgctgagcgcgccaccaaaggcgtcgatgaggttgccgaagagcacggtcatgaagggcaaggcggcgccgttggccacggccccgagcgcgcccagcagcatgagctgccacgtcggcggagtccgcgaacgcgaacagcctgtggaacggcacccgcgtcgccgcagcgccggggggctcccccgccccgcgccccttggcgccattgcccgggctccgagccgaggggccggacgcggacgccgtgcctgccgcc

SEQ ID NO: 4439 - DNA, 908 bp, Zea mays
gcatgcctgcagcgagaggtaaatactcattattgtttgtttatcattgactcagtacaagcactgtacctttcgttcccattaaagaagaaataagcatgtgatacacatattgttttttgagcatctatacacctaaccttggcatgctagaagtatgtatattacatctgatgatctgaaagaattacatggtagctaattctatacgatgaattttgcaaaaccagggtctaatttgtcttgaagggaaagggtactgtggtaaatgaccttacataaattatgtaaaacaagtacgaatagtgaacagcagaaagttggaaggctttcatacattcattctctttcccactcaactgggccttgtcatgaagattatttgttccatgtttttaatataaagctcattttgtttcagaggttgctaagcttacattttattattttgtttggcagctggcattgtcattgaggagaaaaattggcctccttttctgccactcatccatcatgatatcaccaatgagataccgagtcaccttcaaagaatgcaatatgttgcatttgcgtcgtttcttggtatgctgcctctgattctcaatgtcatgaaacctttcactctgatgaataatcttcaatattctcttttatttaatgttgcaatggacatgttttccatgtaagcaacgagactcttaccttcatcgagaggatgacactacgagttggggaattttcgtttatttctcaattctcacacactactcaaatgccatacccatctaagagttgagatacatatttatagcccaaggggctgcaacatatgcttcctagagatacgaatatgctattgtacaaactgcactaaacgctacacaaaagatgatgtcatctagtcaaaa

SEQ ID NO: 4440 - DNA, 995 bp, Zea mays
tgcatgcctgcagcgccatgaacaggcctagaacaggggcaagggcggcggttcagagctcgcattgcagcgggtgcagcaggacacgggagcgcgtagaagtagaacaacacacacctaggctgaacatggccatcccgagacccgcgtccgacaggatcgaaatcgaccgggcgatgatcgctggcatctcgatgccccacctgaaaaagagaacttttttttaacttgaagaaaaaacatgcgtggattggaaccgatgaggatggatggatttgagaggatggtcttggttccaacttcccagccacggacctacctgtaggataccagggaccagacgacgccgatgaggctggagtaggtgttggggttccggatcagcttcctccacaccatgatgaggatgagccgcgtcatcacgctcgccggcggcatcgccaccgccgcctgcctcccctcgccgtcgtccttggggtacagctgcgccgtcgagttggaccccagcttcgacagcgtcggcccgcccttgtccgcgccgccgctcccgttcttcgtcctgctgctgtagtcgtcgcgcccgtactcgtcgtaggcctgggctcctgcttgtgttgtgcacacccattggtgacaataaaaatgcagcagacaacattttggttaggaaatacaagcaaaaaagatcacgcattgttaccaacctttggcgaggacgtcggcatggtcagcggcgccggcgccgaagacgtgcacggcggcgcgctcggacacgggcgaggcgctggagctccagacgagcatgtgcaggtccttcctcttggccggcacggcgacggcctgcggctgcggcgagtgtcctccgccgccgccgccgcatgcgcccttctcctcgtcccccgccgctcctccgcctcccttggcggcggcgccgacgatgttgaagaagtcggcgtggttgaagctggacccgcgcggggtggggttgcgcgacg

SEQ ID NO: 4441 - DNA, 1037 bp, Zea mays
aaacccatctgccttcattgtctctatatgcagtatactcaatctattacagcatttattagcaacaataaaatcattcatgaacatgtagaaattctggtagacacttgtggcacctacttctcctagtatcaatccttgatttatcaggcacttgaagggctctttagtggagactacacccatgtcataaagaacctatgaaacatcacttagttagaataaaggccatacaacaatgtatgttagaacaagggagaacacccttgaaatccagacattaaccactggtccccatattttctaagagcaacgaattttggctaacaggagatagaatttctgatggatattgtatagctttaaaaatagccaattcaggagttcgtgatattatccaaaacttcatgcaccaaaaatcctattcatcataaatcagcaaaattaaaagtaaaaaaacacagcccaagggaagagaatcctaaaggcattgcttgataagttgagaaaaggcacctcaaagctggctcttacccatatgggaacaccggtaccacacccatactttttgggatcatacagcaaggggacttttttttgtgagaaccagggtttgagcccttgtttgtagcctcacaactggaaggcttaccaccatgctacaagcatgttctaggcaaaatcatagtaatgcaaacatggtagcacttgcaacaagatatcaacaaattaagctacaaggtttgtgtgggacaagaaaaatagctaattccatcacctttaatggaactatagaagggcaaaaacttatattcaaacattaaaaaaaaataccttgtgccaaaatcttgcataaagcaagtgcaagacagaatgttcagcaccaccaacgtagatgtcaactggaccccaatacctgtgtgatatgaaaaacagaatacagttagttccaccatgtagcacaccccttatgagagatgacacacgaaacaaggatgcacctttctttagccttatctacccataaactgcaggtg

SEQ ID NO: 4442 - DNA, 896 bp, Zea mays
ttgaactccatcctgttgttgcttctgatgaactcctccttgccaagaaaactactacactgaaaaggcgtcggcacgcgggcggtgaggatagcgtagcgtagcatagcatagcatagcataccgcaggcgctgctggttgacaaatggcaagcttattcccacagctcgcgcagatggagcacggcgtagccggcgcctcccatggcgcgccgagcttcctgttctgcaatggcgcaggtgcagccacggcagactcagcctcgctagagacctcgtccggtgttctcgacacctccccacgaggcggaggcgctgattctggcggtaggaaggccccgacgaagcccagggaagacagcgccagcgccagcgccagcttcagcttcagctctgcgcactccaaggtactgtggttttcggttcacacaatcacaccacaagattaagctctggtgcatgtgagaacagaacaataatgttccagcggctcaagaaagagagagaacgttttcacaacctctaaaaaacagaggattacagtccttgatagagtttggtttcgtgaactgaacaagcaggactcgagctcgaagggaagcaccaagaataggggagggaaaagaggcagaagcagcaaggaggtagacgaggaggaggagcccaaggggtacatacacgtcagggcaaggagagggcaagccacggacagccacagccttgcggagagggtacatactactatactagtgtgcagcatcgcctgcgtattttcacccaccgccatcttgctgttgacttcgtggttgtttgggccgcaacctttttgctcatcatctgttctgctgccatttccttcaggtgaggagggagaggatcagcgagaggatgagggt

SEQ ID NO: 4443 - DNA, 1016 bp, Zea mays
tttgcatgcctgcaggacaggtaatccatgtgtttcttttttggattgtttaatttgagctcaactatgtttggtcattctgtcgtgatctggagtccaaatttgataatgaactgtccttgtttcttggacacagtcccacagttgtatcttctattatttgattatgtttgttggtttctaattttgcttgccttgcatcagttcaacccccttgttattcagccacaagccatgacacaacaggctacccggcatgctcgccgtgtctatgtgggtggacttcctccaacagctaatgagcaggtaattacttggatagcttaatttctcctcatttgttcctatttgatcatctatatcttaccaattcattatttcatacagaccgttgccatattctttaatggagttatggctgctattggaggaaacacagctggtccaggtgatgctgttcttaatgtctatataaaccatgacaagaaatttgcttttgtggagatgagatctgtggaggaagcaagcaatgcaatggctttagatggcataatgtttgagggagcaccagtcaaggttagaagaccaacggactataatccttccctagcagctgctcttggcccgagccagccaaatccaaatctcaatcttgctgctgttggcttaacacctggctctgctggaggattagaaggtccagaccggatctttgtaggtggtctaccatattatttcactgaggctcaagtgcgggagttgctcgagtccttcggacctctgcgtggattcgatcttgtgaaggatagagaaactggtaactcgaagggatatgccttctgtgtttaccaggatcttaatgtcaccgacattgcctgtgctgcccttaatggcatcaagatgggggacaagactcttactgttaggagggcaaaccaaggagcttctcagcctaggccagagcaagagagcatcctgctgcaggtcgatactagaggattccccgggtgcccagt

SEQ ID NO: 4444 - DNA, 794 bp, Zea mays
tgcggtaggccgaaaagctccgccgggacattgccagagaggttcttctgcccggagagatcaagaactcgcaggttctggaggttgccaatggtcgttggaatgtgaccagaaaaggcattgccgctcaaatttaaactgtggagagccaacaaattgccgatggccggaggtatctcaccggtgaggttgttctctgataggtccaggaacgtcaggtttcccagctggaagagctcaccagaaaggccaccagtgagtctgttcctgggtatggacaatgcctctagccacgacagattccccaaggtcgccggaatctggccggagaaagtgttcccaccaagatagacctccctgagcctcgggagaccacctagagctgatggcacctcgccggtgaagtggttgtcctcgagatcaagcacctggagtgcgctgcatctgccaatctccgcaggcacggcgccggtgaaagcattgccgccgaggcgcagctcaagcagcgcactgagctgcccgaccgctggcggcaactcgcctgtgaacgcattgcccgagaggtcgagtagtgtcagtccccccgccccagcaatccaagtcgggaacggaccagcgagcttgttgccgccaaggtccaccacccgaagatccgcggcgagacctcccggcacgtccacctgagagaactcgttgcggccgagctgcacgatgcgcagagacgagttcccctgacgaccaaacgccgccgccgggatggtaccggtgagctggttccgcgacaccgagagaat

SEQ ID NO: 4445 - DNA, 919 bp, Zea mays
agcagcagcagcagccggggtgggcgacgtcgtggacggggagagcagctggtgcccgtacggcggcggcgcggcgaggaaggcggcgtggccgtggtgcgccgccgcggcgtagtactgcgcgcaggagaggaggtggtggctcatgcagagcctgcggcgcatcttctggcggtcccgggccttgtggttctggaaccagtagaagacgttcttgccctcgatgcggccgtagcaggcgaggtgcgccgtgatctgctggatctgcgacgcgttgggcgtgcgcaggccgccgcggtacatgtcctccaggatcatcagctgctccggcgtcgggcaccaccgcgtcgaccccgccgccacctgctggccctgctgctgctgctgctgcgacggcatgtcggtcgtcgtcgccgtcgtcgtctacctcctctagccaagtacgtacgcacctccagctaggatttgatggctggctgagctattggtgtacgagcactcgatcggtcgatgagtttgattggttggaagctgctgtctgtgaataagctagcaaaaaggtttttggtttggtttggtttggttggttgggtgtgtggagactggagagagagggactgttgagagagacaaaatgggtactagggagggaggaggaggaggagcagatgggtgggtgtggacggaggtctggattggaagaagaggatgagacgacgaagaagcatgtagtggggagaggccggccactactgcttccttcttcctgtctgcacagtatatataatggatgcagaagacactatacatacacgcgcacatgcccaccaccaccaccatcgtaggagttgagtttagactttagagagagagagagagagagcgagagagagagagagagagagagaggaggacgtgt

SEQ ID NO: 4446 - DNA, 905 bp, Zea mays
cttgcatgcctgcagaagccctcagtagatcctccaggtcaaagctataggtgcaaccctccaagaacactaacttattcttctcagcaatttggccgccgctactgaattcttgcttcggcttctcgctcctggtggcagtaccctttcctttggattccacatcaatctcgtccttgcctttcctctttgaaaagcacacaaccacgactagcatcagcaatgcaaacccaccaacagcaactgcaactatgaaacccgtgcctagtttcttatcatgatgtgtcaaaggtggagattgaggcgatggagatgattcaggtgagcgtgctagtgaaggatgtgagcattcagctagaggtagcccacacagtccatgattccctgaaaatgaaccctttggaaatttctggagagatcgaggaattgagcctttcagttcattgttgctcagatttaatagtttcagactgtgaagcttgaggtcagggatggatccagagaaagaattatcttgcaaattaagaacggttaactgagtgaggttttgtaaacttgcaggtacttctcctgtgaaggaattgtaggagaaatctattacactgaggttaggactgaaggaagaaggcaaccctcctgaaagttcattgtgctgtaggtatatggaacgtaaagacggaagggaggccacatcaactggaagacttccggtcaatcgattagaccgcaggctcagtacttgaagagaataaagcttgccaagagtgtttggagaaattactccgataagaccagcagccggtaccctcaattcaaaaacttgtgactgatcttctgagcattttacgccatgccatgaacaaactgaggtatgtttatcccagttgagcttgtttccatgatag

SEQ ID NO: 4447 - DNA, 1005 bp, Zea mays
tcttgcatgcctgcagcaaccgcatcgcgggcgggcggttcgctgggttcttctgtaggcagaggctgatgaagtccttgaagtccggcgaggcgttgcacggcgcctgcggcgagtcggagtagcagatggcgaacatgagcgcggcccagtcgccctgcttccccaggttctcgcccagcgggaagcggcccaggtagaactcgaggatgctgaggccgaagctccagatgtcgccggcgtagccgtcgtaggcgccgtcgttgaggtcggtgttgatgcgctcggggctcatgtacgcgatggtgcccacggaggagttgcaggggtccatggtctggttgaggatgcggcccacgccgaagtcggcgatcttgacgcggcgcccggagtcgatgagcaggttggagggcttgatgtcgcggtgcacgatgtggcggcggtggaggtaggcgatgcccgacagcacctggcgcgccacgtgcgccaggaagcgctcgtcggcgatgcggtggctctcgagcgacccctggtccatgtactccagcaggatctggagctccccggcctgctcgtacatgccgtggcagcgcaccacggccgggtgctcggcggtgcggaggatggcgatctcgcgcgtgatctgccgccgcaccgcgtcgtcgtggttgccgtagagcaccttgagcgcgtaggcgcggcccgtggggcggtggcgcaccatccacaccgtcccgcccgcgccgctcccgacgcgccgcacgcgctccagctcgcacagcggcggcggcgggttcggcggcgcggcgccggccgaggtcggcggggtgggcgcgccgagcgacgccggcgccgacatcgacagcgaccccgacgacggcgcggaggacggcggcggcgggaggggcagaggcacggcgagggaggtcagatcccgctgcggcagcggcagggtgaggtccgggcgccggcgcgaccgccccggcggctgcaggcatgcaagat

SEQ ID NO: 4448 - DNA, 976 bp, Zea mays
ctgcacccgatccagttcccgctcgggtacagattcacgaacaggaggacctaccaagttaacccaggcaggacaacaaaacacaaccattgaagactgaaaaccacccgccccacacgcaattctaagcacaaatgggagtccacagaagaaacggatcgagtaaaagctcaaggcaacacgaacaactagggtccatccatgtgttattcagacctatcacgaacaattaagtacacgccctgccacagcgaatgcagagtttcagtctttcagacaccatttgcaaatctagaaacacaagttgttgcctaagagtaactctccgatcagtcagctaaaaggtgtggaggctgcctacacatcatgtcttttagcatacacaatcagggggtgaggttctcaggttggtggctgaaatcaacaaaggatgcctgtacatgcgacacatacgcactaagtacaggatagttaacagtggctactacagctacggggttccgcggatccctcatgcctcgatctcctgcgcctgaggctgctgctgtttcttcccggcgtcttcgtctccctctccttcttcatcctcctctgatagcttggtcaactcgtcttggatcataactttgatggcttctttctttggggtcagatccattttgtagtgattgtctacaagataaagtttgttagtgcatctagcatgaacgactgaaaatcagtaaaacatgtctcaaaatcttaccgagcttcttcagaatgtcactgaaagttgcctgcgaaatcggattcccgaagaggtcaggttactataagaaacttcgacgagaaattaaaaacgaagaacagaaagttcgtaaaaaaaacatgacaactagtacaactgagaaaatgcttgtgggattccaaaatgattgactatgctaccataatcatagacacaggatcacataaattggaacgtaagtaatgattt

SEQ ID NO: 4449 - DNA, 893 bp, Zea mays
cttgcatgcctgcagtgcagggggaaaaaatggttgccaggtttcagaagtttttaatgagagatacagctggtattctattcactacatgatgcaagatttcgcttacatggcctagaaggctttggttgtttgaactggaatacactcccctgttcctcctgccactaacgatctccagcaatagtactccatagctgaacacgtccgacttgacagagaagatcccatccattgcgtactccggagacatgtaaccactgtcgtatgtaaaagaggcacatggatttgattagtaccgcaaaatgtatgtgtacgatgagcgctgcatcccttaatctatcacaacttactatgtgccaaccacttttaaggtgttaatttccgtctcttcgttgccaaatattcttgccatgccaaagtctgaaatcttgggagtcatctccttgtctaggagaacattggccgccttcagatctctatggatgattctgtacctcgagtcctggtggaggtagagtaaacctcgagtgatgccttctattatacgataccgcacttgccagtcaagcaccacagtgtctttctctgtcgatatataggaggaggttaggttttttttttttttttgctgtggaaatatcatcaaatattcatggtgagaaaaaaaaaggtaggtaccaaacaggaagaagtccaggctcttgtttgccatgtactcgtaaacaagcatcctttcctgtccgctaatgctgcatccgagaaggcgaacaagattccggtgctggagcttggctatcagcaaaacctcgttcttgaactcgtcaagaccttgtgcggatgtcttcgagagtgttttcactgcgatctccattccatcctcgagtttaccc

SEQ ID NO: 4450 - DNA, 951 bp, Zea mays
tccgtgccgcgacgtactccagcagctaccaatgttcccttttgtttcctttgtgctaacccgcgaccgattttggctatctaaattgaagcagaagtaccgttcccacaggaagcacatgcttgcgagggaggtggaggcagcgacgtggacgacgcaccggcggccgatgtacgctgcccccagcggcgccgtgaagaggcccgactctaacgcgtggaccgtgccgaccatcggtttccctccgccggcggggacccctcctcgtccggtgcagcacttcgggaggccactgcacgtctggggccatccgagtccgacgccagcggtggagtcaccccgggtgccaatgtggcctcggcatctcgccccccgcgccccgccgccgccgccgtgggctccgccaccgccagctgacccggcgtcgttctggcaccatgcttacatgagggtatgtatgcattgtacgcacggccggccggccggcaagtctacgtgctagttatttttggatgcaccgtaagttaactagcttcctagtagctagggagatttagctagcgttctgacggccggatttcgttttaccagcaggggcctgctgcccatatgccagaccaggtggcggtgactccatgcgtggcagtgccaatggcagcagcggtaatggtcgttcatcgtcaacaataatgctgtcaaacaaatggaaaatggcgttcttctttaataagaacttggtcatgttggtgtcctgattttcagcgtttccctgctccacacgtgaggggttctttgccatggccacctccgatgtacagacctctcgttcctccagcactcgcaggcaagagccagcaagacgcgctgtttcagctacagatacagccagtaagtgtatagctagctgtagtgacattcatgtttcttttcatgcaacaacaatcatgtatt

SEQ ID NO: 4451 - DNA, 882 bp, Zea mays
cgacctgcagtactcttgttttttgaacaagatatacagtgttccccagcagcacattgtaggtctcccatttagagccaaaatttcgatgcatcagcttaattgcttgctgacccagactcagagaggattggaaaacacagatccaaacaaaaaaaatcacattgcatcttggaatacattgcatgctgcgacctagccccggggagcagtcaaggcagtggagtcacccagcaccttacgagcgcgcgagtacacggcgttggcagactccgatgttcccatctggttacataatcaagagcagcatgtcggtgattccagacaaaatggcaaccacagcatatattacacgtaatagtagtagtttgtgatctcaccttcagctccaggtcgtagtagctccgccacacttctctttcctggggatacaggtcgagcgctgaatcatatagccgccgagcatctttgagggcgccgttgtctccgagtgatgcaaggttcgcctccagcgctatgcagtattgcatgaacttgaggcttggccgaggtaaagcaagcaatctgtgttggattcaacaagcaaaggccaaagtgtcagggcccaacactctggaggcggtatagtatcgactacagttacacatttcttctttttttaacttcaatgcacgagtagcggaaaagactgcgaaagatacagatggcctatcaagccaaaactacatacacacatatttatttaaagaacaaactacgcacataacagatgttatttcaatgtaacacaaaagcagcagccagatacatggcatctgaaaaaaaaattaaaaaatgctaatcagtattcatgattgtcatgataggttaatcgaaacaata

SEQ ID NO: 4452 - DNA, 1459 bp, Zea mays
tgggctttggtactcttcagctggtgagctatagtactcttgggtggcacaacctccatagcttttcaaatttcagaaataataaaggatggtaaaattatgtttccgccacgcatgacaagaaaagtcgaacatcataacagaaatttcacctgaaatttacgccactagaaaatccatcaggctgcttattgttcaacaaggggttgcaaatcaccgacctggattagttaaatgacaatgttcaattgaatctttttggtactccctccgtcccaaaatattatgtctatattcaaatggatgatgatgaatctagatacatatacaaaacacatgcatcaataatagtatgaacctactaattatctaaaacaactactattttaggacgaagggagtagtatttatacaaaatctccaagtgatgtgagaagcatatgttatcaaatggaaacaagatgatctgaattggatgtcaaaatctaggattgattgctgattcgattgaagcaatcatctttgcaacataagggggtgtttggttgctcctgctaaagtttagctcgggtcacatcaagcgtttgacttttaaataggagtatgaaatatagacccaaccaactggactagattcgtctcgtcttttaatcttcggctgacaaattagttttataatccaactacatttaatacccggaacggaggttcaaacattcgatgggacaggggctaaattttagcggggtgtaaccaaacacccccttaccaggacagaatcttgatttaagtcaaggtttgggtttctgctggtagaaggcacttcggtccctgcaccatggcccaatggggatggcatgtaccgagcctgcttcttcaacctgtaatgtgtctgctgcgagccacccttcggaaaggactgatacttccttcgcaagaaccttgcaacaaaaagcagctacacagttagtgaagctgaaaagcagtaataatgccagcatgaagaataagaagatgatactagtagtaacatggagccacaaagcaagagccggagaactgccatacttgacttcagcaagcagggcgaggcttcttctcttcttgctcgccagcctcctcttctttgcctcggtctcctgcatcaaatgttgtattgtattgtatcagcttccaagtctaatcacaggtatacttaattgttggttttagccatgctattggatggaattcttgaatccccgtgaccccgtcccacggcagcaaagaatcaaacagccaagcacaaacataatacgagtactagcaaccggaacaagtggggatagcacgaggaattcagcaatcaagccggcgctgaatcatccatttaagaacaggtcgaaacaagagagctgcacgaaaactagaaagggcgaagagattagtgggcggagcaagaatcgatcggcgacactca

SEQ ID NO: 4453 - DNA, 921 bp, Zea mays
cttgcatgcctgcaggaaataaaacaccagaatctcaagaaaggagtgtgattcgaacctgccgagaaaatactctggtatgtaattcattttttttggttctgcacaataaacattggttaatactcatttgtcaccagaaatttttacttgcagtggttttgacatagatcgcctgaactgtgtcaatcctgtagaattaatccaatccacaacagcatcaaaaaattgatttgaatgcagattgtagatttgtcaaaccgaggggcattaaaatttctgtatacctctgaaatgaaatgagaaagtgttgggagataagagatattgaataccagagataaccagatcagttgtgtgtttttaatactttgtatgagttttttagataaaataagaatgcttttttctttgttaggagttccttattgagttcttttcaaggtatctgaagcctttttgttagcagtacttttagagaagtgggattgatgagcaggcggacttacaagtttcaactttggatgtagtaaaaacatatttcttatcttttgttatcatatgtattgcagccacactatgaagctactgctgagatgactgatgtgaacccatgtgtatctcttactgtacgtcttctatcacttcagtcgaagacatccgtgcacattgaggaaatctacatatttgctgatcctgttgagcccaccgatgatgtttcagtaagaggtcctgtaaacatgggaggtagttctttgctggcaatgcttgttcctggccttatgcaaatgtctaaatcaaggaatttgaaaatcgatgacagttatttttctgacggatcaaggaatcaagaaagcagcaaatgtgaaagctttaaccaggaagcaaggccatgtagcacaaatgattcaaaacatacgt

SEQ ID NO: 4454 - DNA, 918 bp, Zea mays
atctgatgggagaggcaagtttgcttcaacaggtctttgcaagcctatactctctacctcttcaaatgacttgactgtccagctagtacagttttcagccaaggacacttcaactgagatgccttcctcatcaatgtagatgacatgtttcacagtgtcaagttgcccacttatatcaatcagctttttaagttcttttcgtccacatacaacagtagttacctcggtctaaagagcagagtcaagaataagatcagctgaaagtacaacaatgcacctataataggtatgacattgtaaattaatcttcaaggaacaatgtttgagaatgaatgccactatatgatgatcataaaagagagagatgccacagctagcaaaagcgaaaaatcaattgtgttgatatatggtatcgtatgggcctgacaatgatataagcaaagatttcaaatacataaacaacacagggtgaagtaacccaacctcatttagtgagtgacatagcgctccctcccccaaagaggcgtagattgtgacaactgcaatattttgtctgaagcatgcctagcaaagagagggataaatattaactcaatgtaaaatagcataggtaaaatgtggtgggacaattaatttaacgcaaaataagtaaaacattataactgatgtttacattaaatggtgatataattgaatgaaaccggctttcatgtgacaatacagataacttgttaaagctgcatatccatatcattaccactgcccattcatcaagaaggcgaacatcactgtgtctcttgaatattctacctatatgttttttttgcaaaccttgtattgtgaagaaactcaacgacgagtttacattatctgaacttcagatgtttgatgctcgatagcatctatatttgccaatat

SEQ ID NO: 4455 - DNA, 954 bp, Zea mays
aaaaacattttgcaggccaaacagtccaactccataatatgcattcaacattgacgtacaaacaaataaactaaaaaaaatagaattgggccagtaacaggctattaacagcttcagaagtttacaaacattgtctcaaactctacttaataccttaacttgtagaaagttgctactatagactatgcaaaattacacataatcatcttggaggtcaaacaacagaacttcataatatggatcgccgtgcaacaataaatacaaagcatctaacaacagcttactaacaggctagtcttctttgtcccaatgtatcagtaacatattagccttcacccatcactgtgactgtgataatagctacactcggataaattatttactaacaggaaaaatatttcagttcaaaagaacctcagtttagggctttaggccaaacacatgcaccggccaggttcaatggtaaaccacaatcaatcaatgacgagatgcagacaaatccaacccttggatgaaatatgagcggtaggaaaacttacatgctgaagcatccctggcacttgacatcctgcaacacaaaaataagatttttcacaattaacacatgggggatagagaaaaggtgaacggaaaacggcctagtttacacccaccacagatacgggagaatattagggataagaacaagtaccatgaagaaggagttgggggactggacgaggcgcttcttcttgtgcttgagcttctcgagctctgccggcgggttgagaaggtcgatgtcgttctggagaacctgcgcaaccaatcaatctcaggatccgatcgagcacgctggcgatgagcggcgcaacaaatttgaatcttgagtaagctgaagatgaggggattagagcttaccatcttgcctcgggcggcggcggaggagagtgcgtttgatacggcggcggaggagga

SEQ ID NO: 4456 - DNA, 875 bp, Zea mays
agcaacaacaacgtctccatggtatccacacgtgtggggatgaaacactgtgatgccggcgtgctagcaccatgcgggtagtgagaggaaggatgactacagcttaggcccccgcaaccgtagagagagaagtggtggcggcggttaagatatctttctcttatagcactccagctccttcgtatatatagactcctgctgggtttttatcctaaaagtctattagcattcttatagatcatgattgcgtcttgggtatataatcaacaacacatagctttgtgccaattagatatgactgatagctaagagtgtttacaagaggttattgttctcctggcgcagttcttcttagaattgatgaaagtgcctagaatggagtcgaaactgcgagtattctccttcaagatccagtttggttcacaagttgctgatctgagaagaaacttggatatcatagactcttcttgtaatgaggtatgctaataatcagtcacagtaaactccaattggttttgcattttatctattgagtagaatcctgctttatcagatccgaacttctctcaagttgaaagaaataatgaagaaaatccttctccttggaaatactctgaaccagggaactgctagaggtaacaataaattggctcttttgtttgccgtccagttttgtcagcagtttgattgacaacaagatagtgtaactctttctttgtgcagcttgtttcaataagctaaaaaattaggtagaaactttggtagagcctataatgagtagcaatgttgtttcacattgttgctttgtttgtatcattcatgttcttttgaaaaactaatattctacaatgcatgtgctttgattaaatttgttt

SEQ ID NO: 4457 - DNA, 1042 bp, Zea mays
atgatgaatattccatggaaaaaccgaaccctacccaaggaagtcagtaccgacacctttctttaaatagtaccaacggggctaaattaatcgggtcacaagaccctagacaacaccaaattaccaaccccggcgacgcatcctgtcagtgagattaaattatcagcacgccatcagatcctatatgccaccaaattaccaacccagttgtttagattgccaggttgggaccaaactagacctaagtttttgcccctagatttgtcccaaagcactaataccccaccctcgattcctcaattagcaagcagatgggggaccaatacacagagaatgaccacatcagcacaagaattgtaaatgataggatcagtacacagcctggtgcgaggattggatgacacggtgcccttaccggctgcattgctggcagaagcgccgctcctgtccgccgacgaccaccaccggcgccttggagtgtgcctcacagaccttatgccgccggtggtactcgcggcaccggctgagatcagagcggcagccgtcgacggagcacgcctccgcgccggcacctcccacggccgcgcgggacctcctcccggctcccggcgccgccccagtcggccgcgagctctgggcaagacccgcggcgaaatcctggagccgcacctcggcgtcggcggcggaggaggacgggcctgcgaaggacagcatggtcggaccggggtccgtcgccgccgcgccccacgacggagacccggacgccgctgcccagtccatgccgccgccggcgaagaaggaaagaaacgcctccgcctgctcccaaacaagaaaccttcaagacggcgaggacaagttcaggaaaaaattcctctgcaagaaacaaacaaatagccaagaggggagcatccacgcaagaaggcccgcaggatgtgcaataaagctaccgcaagagaagatatacgtatggcgcgaagcagaaggtggctattcaagtgcaagcaaaacagaaggggatgaggcagactgcaggcatgcaaga

SEQ ID NO: 4458 - DNA, 940 bp, Zea mays
ttgcatgcctgcagcttcacaatagcctgctcaatttcattcactatttgatcaacagcttccagagctttagcagaagataatgaacgtttctcagcaactcgatcaaatccttctctgaggctgtcaatctccattagcagctacctggatatgaccaaaaacatcatgaaccaattatttcatcgagaaaatcactatcaagaacattagaaagatgaatcacatgaaatcaaactgctaatagatcactatacttttgaaataaaaaatcacagcataggttcaacctttaagaattacaaatgatgcttgaaaaggatcaaaatgaacatggaagctagcccaatgcatgaccgacctcgtcagcagataggatagcaacttatatggtctacaatttaaacagcagataagtttgcaaatcacattaacgcagaaactaatatgttttcatgaagaatatttaagagctactagaaaggtaacaaaccaatgaagtaccaatgttcttaaggttagcaaggcaagaaatggtaacaaatgcctacgtgacaccatacacatcataagaaacagcaaagcagaaacagggaggaggaagagaaaggagaaagagaaaggagaaagaaaatgaggagaaaagtcaaatggcttgtttaggactgaatagctttgttgttgtagtagtaaaaagagaagggtgaaggagaagagatggggctggcccagacaatactgttagcaataatcttgttcatgcatggacgcgtccaggttcaccaagtgtctaggttttttgctatcagtgctacctagaattcagcttatacataataacggacagatcataaagacattgaatgcattaattaggagattattatataccatacttgaatgtaacattcagctctgtataaatagaggaaacagaaaa

SEQ ID NO: 4459 - DNA, 893 bp, Zea mays
ttctcctgggatagatgctgcatttctgtgtgcacgtgctgacctaggccttgttggggttctcgtgaagttacaatagtcaatcaaactctccttaccaacgtgcatctcaacttccatatttgtcacctcaccatcacaagtgttgtgatccaaagtagcctcatccataacttttttgtcatcttcagcttcctcgtcaggaatctcatcttgaatcttaccatctgataactggttgggatttgactctgtaataacataacaagaagcatgatttacatcggtatctatcccttgcttcactacctcagtttctgaattctgcgtctccctgtcatcctccacctcgccttcctcagtctcctccggcacctttggcgcatcattagaatccttaatagtatctttgaaagagctcataatctttgacgttgcatcctccatgcagaacccttctacagccttcgctgtcaatggtgtcccttccctcagtgcctctgtatcatgaggcctcacctcatcactcccccgattgccgtgtcgctctcgctccctccgaaacccaggtgccccatcttcatccttatcctcctcgtagcgccggccatttggaaatggccttctcctctccttctccctgtccctccctgaatccaaataccccctcctgtatttcccatacttcatcttccctcttccattgtagctgccacggctgcaatcatctctgctactggtgctactactagtgtcattggctcgcctaggattattgttgtattcatctttgtaccgcctccggccataacccccccggggttcctgctgttgcagctgcggtggcggaggaagaggatgatcaggccacgcgccagagatgccggcgccgc

SEQ ID NO: 4460 - DNA, 878 bp, Zea mays
catcttgcatgcctgcagctgccctctcccagcggcggcatgcagcacggtggatccacggatgtcgagatacgtcgacacgctggactcctcgagcagctccctgagcatctccacgctcccgcccctcgccgcggcgtggacggcccggctcatcatctcaagccggaacacggagctgcgcctggcgctggcttcgccgttccggcaactcgtcgagcacctcggcgacatggcgtggtcgagcagcagcctgaacacgtccgcgctcccgcccctggctgccgcgtagaacatgtccgtgacgccgtactcgccctcgccgaacacgagcagcgggtccctctccagcagctcccgcacgaacgcggcgtccccggccgacgccgccgcgtagagcacccagccgccgtacccggcccggagcagcgtgttctccccggcgccggggcggtggttcctgcactcgcactccagcagcaggctgcgggcgacggacgcgcggttccgggccgcgtcggcgaagcgggcgtcgtcgtcccacagcgcctcgaggcggcggatccggcggagggaggtgagcttgatgagcaggttagggtcgaggtgcagcagctggcggacgatgtcgtagtggccgtcggccgccgcccagtctatcggcgacgcgtaccaccactggtcgcccgtgctctcccaccgcagcgggaagtagcaggaccgctccatcgccggagcctcgggagagatccagcggcgggctgccgctgcgcctgcgctgctgtacctgtgcgcctcgcagtgagccgtggtcagctactcacatagtcacatggcatgtgatacaatcatattcatacaatacaaggccgtgccaa

SEQ ID NO: 4461 - DNA, 1047 bp, Zea mays
atataccaacggtgatctccacggccgaggacttctccaatatctcatagtttccaactgtctgatcacactgactggctttgccttcttccctaggctgcacttcagaccttgggcccagacgttcaagagcagatcgtctgcccttaacccttatgcacatcgtcctccgcagagccccttctaccatcacggtcccctggtggcgaacgtgaacggaaacgccatctccgccgtgcagaaccatccataactgctgggacctggatgggacctaggacaacatgttgtcccaccaacactttaataggaacatgataggcaagagatagcctaccaacgcctggtccatttcccagcgattcagtaatccaaaggtctctagactgagggaatgaggtcgggtcataacaccaaccataacaacgaaagacatccaaattcttgagttgtaaagtctcatcatgtacgtccagaacccaggcaaaagggttcaaaatgtgttggacagtggtgagttcccaggcatgaattggaatgccacatagctcgaattccacagggataggcaaacttgcacctgaagacccaaagaacatggaccatcttttacaatacagggagaaggcgcctgcacgaatagtgttccatctcactgtcaactggtcagataactggagggtgggaagcatgagcaggaaatgtccatgagccaatttcctcagaattagcgaatcagaattgacttcaagttttagagcgaccgcatctgcgatatcagcatctgacacaagcacatcactgaccacaaagatagacactgcgttcttcaaatcctcttctgctttatctatcaaactgttccaaccgatcacacatggatgctgatgatgcactgggctgggttcagccagaggggtctcgtcatttctgggttgatcagattgcccacgacccggatcagaaccacccctaggagatgacttgcactttcgatggcgtctgcgtcgcgggcggggcgggagggggccctgcgagacaggacca

SEQ ID NO: 4462 - DNA, 949 bp, Zea mays
cgagtcgtagttgaggttgagcccggacgcgtcgatgctcccgccgtcatcgtcctcagcgtcgtccagcaccgcgtcaccgccacaggccgaggaagctcccgcagccgcggcggtggcctccgccttgcgcttcttgtcgtagtcctccccgccggcgttgcggcgcagcgcgcgcttctggaacagcgtcggctgcgcgcccacgggcgggaaggtctccagcgggcggagcacggcgggcttcccgcgcccggagaacggcaccgtaagggacgccgaggcaggagggggcgccgcggaggaggagccggcgccgttgttgaacatgtcgaacccgcccaggccgccgaagtccggcatttgcgccggcgctgtgccaaagccgccgaacgaggaggcgaggaggccggcgttcagggacatggaaaaggacgcggaattcgatgtgttccctgcacccgccaacgggaccaggtcgccaccggacccgccgccgagcgtgccgaggccaatgtcgaacccatggacgtcgaacgtcgcggcgccgccaacgttgaagagggagaacatctgcgagccggcgccggggccgggcaccggccccggcggcgccaggagcaggtgcccctgcgcgccggtggcggcggccgcagccacggggtcgaagtaccagtcgtcatcgagcatcgccggtgagctgaaaacacatccggccccggcaacggcggcggccgaggccagggctaggaggttctgctcctcgtgcccctgcgccggcaccgtcagcaaccccatgggcgtcggcggaggcgcgtgctgctgctggtcgtccatgtcctccggtacccagagcgggttgccgaacggcgggagcatgatgaaggcgccgcgcgagggcgagccgtcgtcctcgctttcttgggggtggcagagctgcaggcatgca

SEQ ID NO: 4463 - DNA, 942 bp, Zea mays
tggagattcccagtaccaggaccctctgtctggatgttacaacccagtggaacaccacttatctgatgttgctagctgccttggattataagcaggctttcactgcactagaaacatgtgatgatagctacaatgaagctccatcatcagaggactggaggaaagttgaggccgcctgtaattacctgaaactgctctacgactccgcacatagcatcatggcagcagcaaacccaactgcaaacatctttttccacgaagcatggaaacttcagctagagctagcaaatggcacaggacatgaagaccccactttcagaagcatcgccaaggatatgcatgagaggtttgacaagtactggaaagattgcagcctcgtgttggccgttgccgttgtcatggatccacgtttcaagatgaagcttgttgagttcagttacacaaaaatttatggggctgaagcagcaaagcatgttaaggtggttaatgatgctgtacatgagctgtacgaggagtatgtggctcatccactcccactgaccccagcctatgtggagcaaggtgaaggggggaataatggagcagcaaatgcgaatagcagtcaagggcctcctgcttccgctggcgatgggcttctagacttcgatatgtacctttctgagatccagagtagccagccctcgaaacctgagctggaacagtacctggatgagtccctcaccccacgtacccaggagtttgatatcctgaactggtggaagctaaacagagtgaagtttccaaccctctctagaatggcctgtgatatcttggccattccgatgtccatggtaagcagtggcagctccatattcactgctggaacaggaagccgcatgctcgatgactacagaagctctctccgacctgagacggtggaagcacttgtctgtgcaaaagact

SEQ ID NO: 4464 - DNA, 982 bp, Zea mays
gaaaactagtagcaatgagtagctaattcctattttatcgaagtacattttgagaagctgtatcttgcctccttgattgcttgagccaactgagactgatgattattcccatcaatggccgtttggaaaaagcttgttatgagtgttcagttgatagttgacatttcttaaaatactaggggaaatttgggactcacgagtcgtttcatgaattgccaggttgcattaatttactcgtaaaagcttgttatgaattgccaggttgacatttcttaaaagtcacgactctatttcctgtcatttcatgaattgccaggttgcattaatttactcattggcatttgttgttacttttctatctcatggcatcattaccatggtctgaaaaggtgtaaatcattgtgtggcccaattcatactttctgcttatgcaacagtcgtttgggttttggtagaactcgatagcatttctgttgactccagaacgttgtgctagattctgtacatgaaacatcctacctatttactctccatttgtaagaaaaatctgtgctgagacacaggagtacagattgatgaactataactaaacaattaatttattgtgtggaatatcgtttaagcttcaaccccccttcctccaaataaataaataatgtggtttcggtattacccacgattctgtttcggaccttatcgagaggcatataacctggagtctttttccatttgcagggtggtggatttgacaagctcacattggacagcctatacgatgatggaacctacaggcagatgcagcaacaacagctatacggatcagcccctcccaatccattcatggcaagcgatcccttcgccgtatcaaatcaagtagctcccccaccatcagttcaaatggcggccatggctccacagccccagcatttgcccatgatgattgaaccaaatcccttcggaccaccacagcagcatcacgcgg

SEQ ID NO: 4465 - DNA, 898 bp, Zea mays
tctttagcaaaatgtacctacaaagcggtacacgacgatctcggccgcacgattaaggttctgtggcccagattagatctgagccccggtaggcacacgagccacaggatctacgatctacggctcaaaatcaatcactgaaccggtatgcagcttcgaccacacgatctccatccaaccgcccaagttacatctcgcccgaatagtacacacatccaaacctggcctctggcttctaaatcgatggctcactagtcatcttccccagctcgacactagggcacgcccgacagcgctcctagcggcggacacgccatgccgtgccactgctccctacgaaactaactggttgcacccaggtcccgagtccgcgcccaaccttgcctccatggattgcccacaacgtcccgtcagtgactagaataccatggaggagaaagtagggctcactagagaccaacgccgagacgggttgtccgccaccgaggttgatgccgacccggcttgacccgcttcgtggcgccgcgacaaaccaccggagatcacccggcactgcgcctgagccccatattacgcccagtacgctgaccggccgtagtgcacacttcttccccccacttctctctctcgacctgtggcggcactaggtttttagggacgggattgggcacacgagcatccgcgccgattatatacgagctccccatggcggccgcatcgcggggaggttgttaagcagtccgccaacgtccgaattgcgcgctacgattagtaagttgtttaggatgaaatatggtggccacgcttgtccccgacgggtgggccccaaacatcagcgccttcaccagccggcccatggtgggcgacctggtaagcgccagctgcaggcatgcaagat

SEQ ID NO: 4466 - DNA, 922 bp, Zea mays
cccccactaaccaaagcccttaggggcttgtttagatactttattcacttcaatacacatgaatttaaggggactgtggtatccaaacataacatagcatagatggtttaaacttgagaaatatgacagtcccaaaatgcaatatgttcataaaattcaaaggattacacaaagatatccatcaattcgactcccatttcagatataaccatcaattcgattccatttcatcatcgtttcaatccagcagtagacacccaaccacacaatacattttcaggactccacgatcgccaagaaacagatcaggaactagagcagcacatacggcgaccaccactcagtgcttattcctcggcgaggtcctccttgacccagccgccgacaagggcgccgcggctgttgcagcagccttcctctttggcgacaacctcgccggcgccccagcagcgggtacagaagccttcctctttggcgaagccctcggcacggtagccttcctctttgttgacgtcgtcgccggcgtcgcggcacccggcttctgcttgctctccaacaccagctgctgctgctgctccgcggcgatgcggtcgaactcgtcgctgagcttcctcgcgcgcctcttcttggcggcggtgacgatggccgcgaggggctcgtcctcctccgactcgccggacccgtcggagtcctcgtcgtcgtcgacaagctcacgcttcagggcccgctcccgcgccgccacctcctgctcgtcctcggagtcgccgctggaggcgtcgtcgtcggacccaagcgcggcgagcgaagccggcatgtggccagcggcgcgggccttggccttggccttgaccctggcatcgcggtgcgcgcggcggcggagcttgtcgacggagccctcgatgcggccctgcaggcatgcaag

SEQ ID NO: 4467 - DNA, 1027 bp, Zea mays
gcagaggtactctagggatatcagaatgatgagcaagcacagcaactgctaactcagctggctgtaacaccaacctgtcccacttcgtcgttctctctctcacaaggaatcatccgttataagggccaagtgtggctgggaaacaatagtgttgtgcaatccaaggttatttcagcaatgcacgattcagcgcttggtggacattcgggttttccggtaacatatcgttgcattaaacaactgttttactggaagggcatgaaacatgacattcaccagtacgtccaatcttgcagcacctgtcaacaggccaaaccggatagatctcactacctaggactgttggcacctcttcccattccgcctcatgcgtgacattctatttctatggactttatagaaggactgcccaagtctggattgatggactgcattctcgtgatcgtggatcgtttctccaagtatagtcactttctcgctctgtcacatcctttttcagcaaccaaggtggccaaattatttctggaccatatatacaagttgcatggaatgcccgacaacattgtatccgatcgcgatcgagtattcaccagtacattttggcagcaattattccatctcacgggtgctcagttgtgcatgagttcagcgtatcacccctaatttgacggtcaaacggaacgggtaaatcaatgcatcgagacatatatttgcgatgttttgtgcacgtgtgtccaaacaaatggtttcagtggcttccggtggcggaattctggtacaacactaactttcattccgccatagccagatcacctttcgaagtgttatatggacacacctaagcattttggactccagatcggtttagcagttgcaactcctgatttggcgacatggctccaagagagggaagtggtgtccaatctggtgaaacaacatttgtacagagcacaagcacgaatgaagaagcaagccgacaagcacagataaaaaagggagttctaggtgggagatcaagtttatctta

SEQ ID NO: 4468 - DNA, 1012 bp, Zea mays
agaaaaaaaattataactcaatcgtattagctccattctcgaatatttatggcttgctagttcatttttaaactaaaatgtgataaataaaaaaagaacagagacagtatcatgctacatagctagagttgcttgttcaaaattccatcgacgatggaaccagaacaaacttttggatccatttcctgtagaaattatcaggaacagatctgaagcagcatgcatagctgcaagtagaaatgcagatttggatttttgctgacattacacatagtcaacatatagatcaacgtactttaatgacacatattgaatgaaagaatatacttccaacttcctatgcaagtcaatcaagtgtccatccagtcatatccctggataatgggaattttatccagtagccacctgttaagttcgaaagaaatttagcaacacaaattcagaactgtcaaaacgaaaggtattctaactgctaatagagctatgcaagtcaatcaggtatgtctagctcggcaccccttggaaattcttctttcatacgttcacagatatagcattcaaatcggaaagtcatgaatcaggtggtgcattatatttctcatctgccttggggttttctctccgccgcaactcaaagtggtcctcatcggcacaaggatcagggtgtcgaagagaaccagtcgtttccatgctcacctcaggagatgtttcagtgttgagctcgtcttctacagttttttctcctgagtggtcactttcatcactactgctgtacgcttggttcgacagcagcatatcaccttcactcaccttggagtctacttcatcaatcgtcacatctgtcagagggagtctctgctcgataggcacagcattgctgataggttggcctgtcagctttctataagcagccagctgggtccggtatcgctccttgtcctgtacacctctttcttgatatacctgaaatactaggaagtcatacactacacatgtatatagtgtggatagt

SEQ ID NO: 4469 - DNA, 923 bp, Zea mays
aacagcagcagcagcacgacaggtagagaagccgcctttacaagttctgagttctgaccccgaaactcgaatcattcgcaccaaagctccagcctttttcgcatgttcgcgtgcagagccgcggcggccgcgtctctgatgctgggcggcggcgacgaggcgcacaagttcatgggccggccacgcctggaccgtgctgacttcgcgaacatgatgaacccgggctcgcggcagatttacctgacattcccggccgacagcacgttccgcgaggaggacgtctccaactacttcaggtatgctatgcatgcacacatgttaatgtgattgatgctgcaatctttgcttcggtagaagaaccccgtttggttggttgaccctcgcgcttcttggcaatgcggcgcagcatctacggtccagttcacgacgtgcgcattccctaccagcagaagcgcatgttcgggttcgtcaccttcgtgtacccagagacggtgaagctcatcctggccaagggcaacccgcacttcatctgcgacgcacgcgtgctcgtcaagccctacaaggagaagggcaaggtccccgacaagtgcaggcatgcactgcgagttcatcctttgcttgctcccagcgaccgcaatggcggccgccgccctacgtgcatgcagttgctccggggattgactgatttgctgttctcgctccgcaggaagccgcagcaaggggacttctccggctgcacgacgcccactggcgggctggacgccgggtacccctttgatctgcaccagctcggtaaaaggaccccccagcgatgtcctcttgatcttcggttggccgtgttggcgaacttgggccagtcgttgatgcctgtgtggttttttgttgtggtgatcgtcaggcggcaggatgctgcaggcatgcaa

SEQ ID NO: 4470 - DNA, 834 bp, Zea mays
ccctctccattctcaagtttttttttgcagcagccatctcctcaaccctagccgccacccccccccccccatctcctcttctccaagtgtcgttcttcctcgtcggatcttcttcgtgtgggtgcaagtttcaattggagaattggtgggaggaaggaaggaaggaggaaaaaggtggaactcaaggtgatcttgaagttatctttgtttttgcgctaaaattcaattgattatatgtttatctatgcgaatcggtagaggtgttgtccagaatttttgtgggagggcgaacatcagtagttctagggatttctgggaatttttcgtgggcaattagtggggatcagtgggagaatcatgtagagctttgtcatacctttccaacgagtacttatgcgctcgattcggagttataatttaggagatatcgttgtttgaatccggttatgttgctgtccaaaaaaaacagatttttcaggtgggtgaacagcagtagtattagcagtttctgggaatttttcgtgggtaattactgttaaccagtataataatcatgtagggctttgtcttatctttccaatgaatacttatgcgcttgatttggaattatattttaaaagataccgctgtttgaatccgggtatgtcgctgtccaaaagacaaaaaaaacatattacagggttcatcttgtggactgttttgggctaattagatgttggaatttaattataaattgtatacaaaacttgtggggaattttatgtagatgactctggagtttttgtttgttaccactgctgtcataattttaaagttatgaaattattaagcagc

SEQ ID NO: 4471 - DNA, 1018 bp, Zea mays
ataaaacacatccatccaataagggtaacaataaggaacagaataaaaaaaagcaaagacaggaaaaggaagatgcaacatacagtgggatccatgtcatcatcgtcagcagcagatgccttctgaggttttccactggcagccgcagcctacaacaacagaatgcacacatcaattttgagctttgacactaacatagtgaaaagcgtcacagtctagagctaaggaaactaacaatactccaggactcgctgatttagcacataacaagaattgcaataacaggaagaaacaacaaaaatgttcctcaatcctcaccttgttcttcttctcttcctccttgagcctccgctcctcttccagcttcttcctcttttcctctctcttcttcgcactgcacatatcaaacatggaacagccaactccctaatcagtaaacagaaataccaaggaaagccaacgggttcgcaagagcgaggaaggttcggatgtcccttacttcttcgagagctgcggctcctctccgccctcacccgccggcggaggattttgcccgtcgccgcccgttgagagccccgcgagtttctcctccagaccagatgccatgtcgcgggacactagggcttcgttgtgaagaggggagcggaaggagaacggagaagaaggtgagacgcggagaaggtggaggctcaagtggtggtagggtttaggacagctagtggcggcgcggaggaatggaaagagagaacccttcgtagccgccaagtcatctgatccacacgggccacggcatcgacatgggccgagtcttttggcctgtaataactaacaacactgctttgatcggtcactttggacaacgtgggctcagtccaccacggccctgttaatgattttctggagtctggacggaagccgtagccgatagggaagtattcgtgttcgtgtccgactccagtggacaaggcatggcggggagaggcggcggcggcaaaggcgccgcagggaggatgatgtc

SEQ ID NO: 4472 - DNA, 1029 bp, Zea mays
atccggtagacccgacctgcagagtgccagaggtacaggccgcaggttgaggagggaggaggcaaggcgaagctgctcgccgtcggcgccacgtcccgggcggcggcgaagtttcgtggtggaatcagcggggcgcccatcggccggcgaggccccggctgcccggccggccagccagtcggagtcgggccgggtggtctccgtcgcagggtacgtttccctgtctgaatctctctgtctgtcttcttctccgagacgcaggaaaccatttcgtcgagataattttagagcttttttttgttttgttttgccccaaccgtcaatctttgtgtagagtggtgtgatacgtaatgctcgaggagagttgttgagacgtcctagggatgttgggggtaatttcttgaggtttagaactaggaggaaactgaaagtcgccaacttgactatgaagtttgagtttccaggttgcctatgaattacatccattaggtggctccattttattttgtaggaatgaccagagattttccttcggagcaatccaatcggctcagctgagcaaaacctgcgattcgaattcctactgaaaactaactagataacccttttggattgttggtgttcttaaacaaaacgaagatgaaagatagtagtacattgcagctggggtaataacaagtgctggataaacccatgaattgtcctcgttgaattccttaaattctcaacaaaatgttataggattctacagaagcacataggtcgaatttcattcatgtctcaaacaaaagggcaaatatttttcattacgttgtgcgctatgctaactgaaatgttcaggtcttgtaggaaactaatagcaaatacagtaccctctgcacatgacagatggaagttagatgaatcaacatttacctcgtcttgaaagtaatgacactgattttttttacctatcaggctatcgactttagatcttgaacatgggacccaaatcactgccctggagcacaatatgaagaaaactagctt

SEQ ID NO: 4473 - DNA, 1015 bp, Zea mays
gtcgacctgcagagaagagttagatagcatgctcactgagaaatgcatgaacttgacagaacacttgcctttggtaaatctgaaattgcatcaccaagaagcaaggcttttttcagggatggtttttgtgtctcgtcatatgcaaccatacattgctgcaacaaattcagttggtcagcgtattttacacattccacatgatttcatagtagtgatttgtgattgcactcaccgaaaaggcattaggggctcctccacgtactacaacatcataggtgggcagaggatacttagggagcacctaaattgtcaaatacacgtacacctggttagccagcagccaacagtgcaatatgaatctagcgaagcatataaaacagcaaggtacagaacagaccatggaagaaagagcaccccagaggaacacacgcatcctgaactgtggcagaccatagcaaccagccaccatcattccaagccgcgcttggtacttcatagcaacaaggcagctcaaagcatattttcctaggtaaccatccgcaaatttgagtatgtccaccacattttccatgagaacatacttgggcttcaagtacgccacaatatccatgaaagtcaccatttgtttgtttttctcatctttgagtggctcatcacggtttctgtaccgattaaacccactgataccttggcatggtgggcctccacaaatgacatcaacatcaccctttgaaagaataaaataggcagatatcaccaaataaaaaaggggagctaaacaaatagcgagcaaaatcacaacgaactaaatactcacaggcagtgggagaatctttcttttgtgcccttcttgtacaaattctctaattttctgcgggcagtcactggtttgcaaaacaaggattagatgcaaataggtatacaaggcaacaagcagacgatataccatacactaacctcaagttatcaatcggttcccatgtatcctcctcagggccgtatccttcccactgga

SEQ ID NO: 4474 - DNA, 1004 bp, Zea mays
aaagagagaccactgtgacatctataggaaacgtcagcttggcacaaaatcagcaaaaatgggcttacctcaactgcccacgggggatccacagacaaggacatgtccgccaattggtttaggtcaatgttgcgaggaagaaacatcactactcttgaagctatcatggttccgagtttaaaaagagagtacctaaagagttcaacattgagtatagtcgatcaacaaaagattaaaatgcaccataggtccattaaattttttaaggaggtgtcatctaggtccatcaactgtcaaactgtatttttgagtcctaaattttttaaatggttcaagggcgggcttggtgcggcggtagagcctaccgtctataaccgaaaggtcccgggttcgagccccagcctctgcatattatgcgggtaagacttgacgcttaaagatacccttccccagacgaccccgcacagtgcgggaagcctacgacactgggtatgccctttttattttttaagtggttcacctgaaatccatacctcttcattatgtttgttttttgtagaaatccccctctatttcttttttccttcacacgcttacccatttccatcttctggccagagtcttccgggcaccaactagcctgctctgagccttcgattggttgttccattaatcttcattgatccggagccatacaagatagcatcccatcgtcgatcagatctttttctggaacaggtaaatccattcaatttaatccgtccataatgtacaccaccggcaagcaaggaagcagcaagggcgcagcagcaggtggtgagggcatgctcacgctcgtgaaccacaagcagtggctgcgtgcgctcagctcgctctgggcggcggcactcgtgggagccagcataagcacaacgtaacatcctgcgacgacgatggcaaaggcgaagagagagtagcattgcagtcacgtgcgcgcatgattggctttggctggcgccctgatc

SEQ ID NO: 4475 - DNA, 924 bp, Zea mays
gtttcctttgtttggccaatgcaaataaaaacggcctagtagccggactctttccttattttaaaattcaccttccaaaaagaatcaaacctgcacctgctgagctataataggatgagcataccattttcttgggctccaaactattatattgtatgtggtacaggtatattgtttaagctagacagttagatcttcctaaaattcaactatacatattttctcttttttgattaatatccatatcatatggtgtgcttggttcagctatctaaactagattcaccgccagaaatttgaatctctaccaaacaaatagagaataaatttctaaataatatatatatttctatagttcaattaaaaattttcttctacctaaatttttcagatttctgctatcaatttattaagctatcatgctcttacagaatctataattgacagttattttaactaaatatattttagctacaaccgtcaccgtgcaacagctgccacagcttatagctaaaattaggtttttaggaatctacagctactctataataatagatagatttgggacagatggagtaatctttgttaacaattcgacaacagtaaggtcacatatcagaatcacctgacgttgcattatagatttatttcttgacggagttcacaatttatgaccaagccataatgttgcctacatacatacattgatacatataagcaactttccggagctgacaaatcctaaccttcatattggtcgccgacgccgtggcttcagaactgatcgactgaaaaccgtgaacctgaatacatcgcagctacattactggtaagaactaccatctaccaagcacctatatatatagtgtcttttatttacagaacatagcaacaacactctactgccactgtgtaaacgaagca

SEQ ID NO: 4476 - DNA, 923 bp, Zea mays
attcctcagaggaaagggtttcgccctggatgtcgtcgtattcacggccttgccactcacaaggacgttttgtttgctctccgatgattatttattactcatgaggtgacttttgcgatggcaccttgatagttatactattcatatgactccgttttcagtccctggccgaccttccctgcccaccttggctgttagttaattattttggatcaaaattcttatgctctgatcaaatcttataagaggagcgatgtctgcagcaacgctctctaaattcattatctatattcatcttttatagcctcctttaaattttttttctttatatctcctctcattccaacaacgttctttatatctcgttctctatacataatacctaaattaaatatatattttactttaaatttttgtacattttttatactatcaaatgcatattttagttttgataaatatgttgttttaaatattaaaatagatagaggagagaaaaacacagaaactctctatttataaaaaatatatattaaactctcaaatatattgtgcatattaaaatttcttctgtaagtaatttccccttataatatattgaagcggcaagtcttttgccacttcattttaaaaaaaaagagaaactctatatatataggagagaaaaactttatataaaaatcttagaggatgttgtcgtaaacataaaggatgacaatctaatctaaaatttaggatagaggaggctttagaagaccaactggagagagtctaaatgtgtaaaactacaaaaggtaaaggcgtagactgcaaaacctcaaccagtgaataaaataaaatattacatgaaatctttaccggccatgcaggaagaggaggacaaaagagggcagcttcggcaagatcttgagatgtgtaagact

SEQ ID NO: 4477 - DNA, 989 bp, Zea mays
gcgtggcggatctccggctggaacgagagccgcatcgtacagccctgcatcgactccatcgtcgagaagatcctcctgccaccgtccaaggtcacgtggtcctacacgtacacgaggccagggtacaacagcacgaggaaaccccaccagtccgtccccaaggactggtggacggaggacatctccgacctggacatcgaggtcttccactccgtcatctccaccgtgcgcgcgtcgcggctgctcccaccgccgctcatcggcgaggcgctgcacgtctacgcgtgcaagcacctcgtcgacccgctccacgttgccagcgacgcaggactgaccgccaacggcgtcctccaccagccgccgcagagctcagacgacggcgaggagaagctggtggccatgcagcgccgcgtgctcgagtccatcgtcaccatggtcccgggcgagccggggtcggtcaccggccgcttcctactaaggctgctgcgggtggccaactacgtcagcgcgtcgtcgtccacgcgcgcgcagctgatccggcaggccggctcccagctcgacgaggccagggcggcggacctgctcatcccgctgccatcggacccgcacgcgtacgacgtcggcacggcggaggccgtgctcgagcacttcctggcccagttccagcggcccgcgccgaccgacgagcggcgtcggatgagcgccgccatggagaaggtcgccaggatcttcgacgagtacctgcggaccatcgcgctggaccgcagcttccctgtcggcaagttcgttgacctcgtcgaatgcttgccggacatcgcccgcagtgaccacgacggcctctactacgccatcgacatctatctcaaggtcagaaagctccaagatcggaacatctgtcatggatttgagttgatggatatattacgatggcgagcaggagcacccggagctgagcaaggcggataagaagcggttgtgccggctgatag

SEQ ID NO: 4478 - DNA, 912 bp, Zea mays
tgcaggcttgcatggtgccatgtttgcctgacattggtgaactcattaggagacacgacgcagagatcagtgtgtattctctctctctctctctctctaggagtagccgacaatagatagtaggatggggatggcgccggtgaaatctcaccggtgcatgctggtttgcttcaggtaaacaccggagtttacagctagagtgtactactagcagtccacttcacatatctgcaagctagagcttaaagattgaaagcttacatctgcaagcaaagcttggggacgaacaacaaacaacgactcaggcacgcacgcggtatataagcaagagccgaaaacggtccgcgcaacgcaagcgcagcggcggctctcgcgggccacgcgtcacggcgacggcggccagtcgaagccggcgaagctctcgccgaagccgccaccgccgtagaacctcacctcgaggttctccaggccctgcgcgtcgtcccagatagcctcgtcgtcgtcgctgccgacggcgtagtagtagtcgtcgtcgtcgtccacgaacaacccccacgagacgacgtcgtcgtcgtagtcctcgtcctcgtccgagtagtagtcggagcactcctcccagtagctgttctcgtagcagtcgtcgacgacgcgcgggcccaggacgcgcagccccgggtggcgctcccgcaggaaccggtcgtccacggcccagcagccgcgcaggtccaggaacttgagctcgctgcactgctccaggatctccagcaccgcctccgtcgccaccagcatgtaccccatctccaggtgccgcagcctcggcatgctgcgcgcgatggcgtgcgcctcgtcgtgctggcacaccttgtccgccaggtcgatcgggtgcatcacccgccggagccccaccaggga

SEQ ID NO: 4479 - DNA, 894 bp, Zea mays
agttgctatgataaaggccggccagtatatggcagctgcaatgaccaaacgtgtatcactatcaccaccaaatcagaacacagcactactacacacaacacagtgacaatacgcactatcaaaataatgcttgatgcaatatgctgccagtgttttgcacctagcagacactagtgtggtggcacactgacagctgtgcctttaaagtagtggcgaataggactgtgtgatgtcgtagatgagatgggggggggacctggaattgatcggtagaaggcgtcagccacatgtgttttgttggaaattatgtaggcggcctgccctgtgtacgccagtagaaggcatggaaacacaatcaaggtgaaagcgatctgcaaacagatcttcactttagcagctacataaatacacatatggctactcgataccgaaggcattttacctgaattgccagcacaggaaagtgacagagatcagcaaacaatgcttcagttcctgcacagggggaaaaaatgtttttttcatgctacaattgatatactagaggcgatgaaacataagcaagcttccctatttcttaacccccacccccatcccgcgaaaaaaaaggcaaagtgatccgactctgacccgtgatgctaagcatgattcctcccagagacgtccagacgtcagaattctttctccgtcggaaaaaacggtatatatacatcgggttgtatgcttttagcacagagctatcatacttgtgtatgtttatagccccgacgcttccaatcaggatgaaccagaggaggactattggcgcgaagagccatcccactttgtctgttccgtagtgctgcatgctaaacaatccgattaagatgaccacagcgacgagcacaacgacat

SEQ ID NO: 4480 - DNA, 931 bp, Zea mays
gcatttgctgtggtgaacaagggtgtgcgaccagccataccccacgactgcctccctgcccttggggagatcatgaccaggtgctgggacgcaaaccctgaggtccgtcccccattcactgagatcgtgaggatgctggaacaggtggagatggaggttctgaccaccgtccgaaaggctcggttccgctgctgcatcgcccaaccgatgacgctggactgagtcatccacaaaatccaggaaaataacctggagtgccgtttactcctatgtatttataatatatattattagagttgtgcttcagaagaagcaggaagctgactcctcagtctgccttctgtctttgacatgtcaccgtagagtacaccagagtggttgtaatagaggtagctttatgcttgaccaaatacccttcgccgttgtaaaagtgcctgttcttgctggtcgctgtttgcgtgtttatcatcatgcggcaacatgtgggagtcttgatgcttcatggtatatataatatgttttattaagtaactagcgtggatttgctgctgccttgtagtctgttgaaattcagtgctaacagaatcatctttgcattggttagcatcagtttccctcttttttggggtgagcaaatctgaagcagatcatgattactattgatgttgcttctgttttccaaagccactgcatgcgtaacaattgcaaatgttttcaggtttgttgctgcaacggctttaactgaaggtgttacagggttctccatttttttattcataatatgcaatagaaggattcggatggtcatgcatgagttctttgaagcaatgtggcagaactgtacatgttgaaagcaacaagacgaagatacactagagaaaggatctctgaaattacacaaggatggagacagtgcagagtatcacattca

SEQ ID NO: 4481 - DNA, 966 bp, Zea mays
tcttgcatgcctgcagcctctgaaggcagcgcaatgcctgcattgttgtatgcataacttattgcttacaggattgagaatccaatcttaaagttgaggttgttgatcactaagagctctatgttttagtatttccctctttattctcttcattgtatattatcttttcttcaaactgaggttggtgatctttacttgtgaaatagtgtaagatgcaaatttaaaaacttgaatcaccaacatgcgaatagaaagaagtgcaggcatttctgactgtctagtgcagaagcagacatgatcagcaactactcccgatgttccaaattatagttcactttagttttgtcctacgtcaaacctctaattttgaccatgtttttagaaaaatacattagcatctacaagatcaatcaaatgtactaccaagatatatttctttttttctcgaacgcgcaagagaaatgcgcatcattatattaagaaaagagaaataagaggtccttagaggaccggtacatatttcatgaagaatttgacgaaaataatttgatattctagatgttgatgtatttttctataaaattggtcaaagttagacaagtttgaattaggacaaaggcgcaaagctaaaataaactataatttgagatgaagtactgtctaatatgatccaaatgtagcacgctgcttacatgttatcttttaccaaaacagcaaagactccacccgacagttatgtttaaagattcacagagttcttattcagctcctgacaaaggctcaaaattcatattatttcaacttctctaaatatataatgataaccagtaggtattctatgccactcatccaatttgcaaggtcatgtaatgtacaagaaggcacatagtatgaacatgacacaatcaagtatacacttacttgcacgcagagtaccgcaactgtatctctgcaaattttgcttca

SEQ ID NO: 4482 - DNA, 949 bp, Zea mays
atgagagctacctgaccaacgggtacctggacacggtgctcgactgggtgcccgggatgcggggcatccgtctgcgagacatgcccagcttcatccgcacgacggacccggacgagttcatggtccacttcgacagcggggaggcccagaacgcgcgccgcgcgcaggggatcatcgtcaacacgttcgacgcgctggagcaggacgtcgtgggcgcgctgcgcggcgtcttccctcgcgtctacaccatcggcccgcttctcacgttcgccagagccatggtccgtcccgacgcgtccgcgatctgcgggaacctctggaaggaggacctgagctgcctcgggtggctggatgcccaggggcccggctcggtcgtgtacgtcaacttcggcagcatcacggtcatgacgccggctcagctcgccgagttcgcgtgggggctggcgaactgcggcaggccgttcctgtgggtcatcaggccggacctcgtcacgggcgagaaggctatgctgccggaggagttctacgctgagacgagagagagagggctcttcctcagctggtgcccgcaggaacaggtcctgtcgcatccgtccaccgggctgttcctgacgcactctgggtggaactctacgctggagagcatacgcgccggcgtgccgatgatctgctggccgttcttcgcagagcagacgaccaactgccgatatgcctgcgcgaactggggcattggactggagatcgacaacaatgtcacgagggacgaggtggcacggctcatagaagaagccatggacggcgagaaaggcaaagacatgaaggcgaaggcaacagtgtggaaggagaaggccgtggcagcaacagaaagcggcgggacctcgagcgtcagcattgatcgtttggtcgagttcctgcttgaaggaaacgttcctacagctgcaggcatgca

SEQ ID NO: 4483 - DNA, 936 bp, Zea mays
cagcttgcatgcctgcagacacaacaaaatagttttctttgagcgggctaacatctaagtatggatgcattggtggaaaagtataccaggaccagtacaacaaattgaaactttcatctttgtttatcatattttgaactttccaaagcaaggaactgtgaattgattggccttggcatttctaagcattaatttctcatataaactagttgctatgaagtaaagcaaaattcccactctataactgctgcacattcacttatgcccaagatatcttacatctacagcaacgacgtttgccacacagccacagtactgcacagaacttaccataaaattggatgaagatgttagggatgataaatgggatgccgatcgacatggcatacacaagagacttcagaatccaacatccagaatgccacggattacgagcttcatggagcttgcgagttccaaatgttgtggcaaacatcacccagaaaaatatcttaacattctgtaaggaagtgaacccaaggaaacacagcacggtccacaatgtcaaatgtttagtagctctggattctggaactagtgcatctactatcctgaatccttgaccatgcccttttagcgttttagacaagttgttccaacagattttaggattttagttcaaatttgtacaacatactagcaactggatccagaaaaccccattccaaacgggcccatagtttggttaaggactccgaaacacggttgtaattgaaaacattctaggcttctagctgcatgcctcgtatatacagtgaacgggcccatcagttacatgagctgaaacgaacacacaccgtgcttgttagatgaaggatacgaagcagcccaagcttactcgaagcactcctccggactggaagcacttggagtcccctgctccgcagaccggcacat

SEQ ID NO: 4484 - DNA, 937 bp, Zea mays
cggagataaattttctaggaaggctctcccatccgaacctagtgaagctcttgggctactgttgggaggacaaggaacttcttctcgtgtacgaattcatggccaaagggagcttggaaaaccacctattcaggagtgagttcttacggataaagctccatgcacgtttcacttaacaagttttggaaatcaccttgcttatgcgctccacatattttttgcctatgcaatacattttgtagtagtagggatgtaggatccatgtggtcgcatagttttccagaggttcaaatctgaaactgcatacacgtaaatacatttcattacacttgaatctcatggggcatatacttgactgaaaaaaaaacactgatattgtggagccaatcaattgcatttcccttcaggaggatgtgcccccctgtcctgggagctgaggctgaagatagccattggtgcagctcgaggactcgcgttcttgcatgcatcggaaaaacaagtaatctaccgtgatttcaaggcgtctaacatccttttagacgcggtaagttcgatgatatgcaatgtacctttagtatatcaattcgctactgaggtcaaatgttgacagtgtttttttgtgtgtggggaggcagaactataacgcaaagctctctgatttcggccttgctaagctggggccaactggtagcaactcgcacatcacaaccagggtgatggggacatatgggtatgcagctccagagtacgtagccaccggtacgtgtcctcatttctcccacgtaacaagctggtatgatcatacccttcttccttataatgaactgtcaacgcttcctccacgcgctagtcgtttcgaagcagaaacatacaccgccgcgacgcagactcggttgtctgtttgtccgccacaatcagtataacgcggttgttctcg

SEQ ID NO: 4485 - DNA, 897 bp, Zea mays
tggctaggtcaatgaggtttagctttcttgacccagaacttagttcccttcgatggaacagtcatctgctatactgcctcacagtcacagacagactaaccggcccctgtatctggcacagaaggccttcggctccggttgtcggttggcccccggtcagatccttcaggagaaaccttgctcatcatcatcatggaagctcctccaaacaacccaccgagccacagaacagcgaagctagcaggaaggagaagcctgcctgcaagaagaaccctctcgtaaaaatcaacatggacgggatccccatcggaaggaaagtagaccttgcagcctacgacagctacgagaggctatcgctgggcgtcaaagagcttttccacggttttcttcaaggtgcgaaatcagccaaccagttagaacgaaacagttacttgggttcatttttagaatttttagagctttcgagctgtggtgggcctgaagttatagggtctgtttggttcgctgtttattttgtcacgtttacctaactttagtttttcaaattcgaacgactaacctttgacaaagaaccaaacagtccattagtcttctttcctttgacaccgtgtttctcctacgttgcagctcaaaaggatatgtctcctactgctggaaatatattctctcaattgttggatggatctggcgaatataccctggtctacgaagacaacgaaggagacaggatgctggtaggggacgtgccgtggaagtaagcttcctctgtcatttacggtccaaccgcaccctaccaacagaaaaacttctctaaaactgaatcgtcaaatattgctaacactaacttgaagtacaagcctactttgttgcaccatctgaagccttcctttgtatgtg

SEQ ID NO: 4486 - DNA, 931 bp, Zea mays
gatccttagtccatggcgtagcagcactccttgaacgcctcgaggttttgctggaagacgggcacgaatgcgtcgacgctgccatcgccgatgtaggacggcacgaggaacagcatcccctccgtggggaagtaggacggcatgaagtaggtcgggctgccggtgccgaagtccagctcgtagaacgggaaggtgagccagctgtccacctccacgttggggcacagcacgtccttgcagacggcgctgggcgccagcccctccctctccgcggcgccggacgtcgcgaagtcgatgaacgacctgaagtagctgccgtcgacgcgcgccacctcgtcgtggatcacctgcgccgcgtgcttcagcggccgccccagcaggtccgccaccgtggcggtcgggaacgcccagaggaccaggttgccgaagtactcggcggggaggccgaggcggtggcgcccgtccacggacagccggatctgcgaggtctcgtcggggctcagcccgcgggcgcgcgtcatggcgcgccacaggtgggccaggacggtctcgaaccggctgaacgggcggccgcggccttccgatgccttggcgcggagccgcgcgatgaagtccttggtgaaatgcgccttctggatcacgatgctctccgccgccgccgctgccgcgccctcgccgccgtggccgtgctgcttctcggtctcggcgggcgccggcaggtaccactccctgctgcggtggtcgaagtcgacgcggggcgaagggcgcggcttgaagagccccgcctggcggggcacggggggcaggcccgtcgggaggcccctggtggcgcgcccccaggccacgaggaagttgctggtggcgtggccgtcggccacgacgtggttggacgtgaacccgacggcgagtgagccgcaccggaaccgggtca

SEQ ID NO: 4487 - DNA, 895 bp, Zea mays
atcttagcaaatccttaaaaaaaatggagccagcagaagattgctaatattaggacccagcttgtagttgacaaggagatacgtccatctggaaattgctagggactcgcgagaccttgctcatagtgaagaatggctgagaaggaactgcactgtcttggtttggcctctctggactgtgccattgctaggctgcgacctagagtgttatgtatatgagaaggtggtgccaatactaccttctgccacttgcacgcccgctgccaaaagaaaaaactccaagttgaggatcatatctttacctggcaggaggataagcgggaagctgcccttgatttttatgaaaacctgctcgggtcgactgaagcaaggaacttcacctttgatcttttgactctccagattcagcagcacgacctcgcttccggcttccttagatgagactttctcagaagacgaggtatgggcaacaattagagatatgcccttagacaaggccccaggattcgatggattcactggttgtttttacaattcttgttggcatatcatcaaagaggatgtgttcttgtctctctcagctattcagaatgtccatgttttagattttgtctgctcatctgctgaatgctgtttttatcactcttcttccaaaaaaggtgggtgttattcaattgaaggaattttggccaatcagccttatacatagttttgccaaattgggtactatggtcatggccagttacttggcacccttgctgcccagcatggtgtccattaaccagagtgatttttcttcttgtccagcagatggctagttgtttatacaggatgaaataaccccacattctcctcaagcttgatttttcgaaggccttaaactcggtttcttggt

SEQ ID NO: 4488 - DNA, 985 bp, Zea mays
atagatgcatacgattctggaatacgaccacaaatacacacttgagttgtgtggacactggcagccaggtagtcttcaatctgttaatacccgcaacccttgtttatctctcttctcatcattacaaaagttgcaatcattgagctgtgtggacactggcagccaggtagctctcaatgtgtcaaaaccttcaatcctcgtttatctctcttctcatcattacaaaaattgcaatcattttctgaagagtatatcacagtggtccatttgtaaatataagaaatagaagaaatgttctaaactccttagcatcgaggacttgaggtttaaaatgccaagttatttttaaccaatatatgttagaagccgaagttccactgaaatatccaaatagaggaaaaccacaacaacaccttttagtcccaagcaagttagggtaggctagagctgaaacccacaacacgaagcaccaagggaaagaaagcgaaaatgaaaaaaaaattgaggcctggtttcccatataaactggattaattctatttcttattaattgaaaggcagggctcctgtcattgcgttaaaaagatgcatcaacaatagaaacagaaagggaattaaccaaaaagaagaatagaactccaagacatatttgctttcactgtggattctgcttgagatgttctcataccactgtgacactgtgtaggcaggcaaattttcgtataaaatcgggggaggggtaggctcgaacatcttgtttggtttttcaaatgctaatgatgccaaatgacttgacaggtctgcaatcttgcgtggtcaaagaatgtgaatgagcttgttagcacccacgggtactcccagaaccagataattgtttggagatatccaacaatgtcgaaggtatggtggtgcgagattattgttctgagaccatgctatacttgcctgtgttaactccattccccttgtgtatctgcaggcatgc

SEQ ID NO: 4489 - DNA, 950 bp, Zea mays
agtcaaactcaaggtaacttagagcaactccaacaaaggtgctaaactgggccttatcttaaattaaagggttgaggactaaaaatagcttccaacaataatcaaatttatataggactccaacataaaggtcctaaatatacaacctcgtacagaggtcctattctagtatctcaactaccaaaccgttcaggaaatcctcatctcccttcagtgatagggcttctgcgcccctgatccgcagccgccatatgtcggggccacggcatctctgcccacagacatgagccgccggcgcatttcccgtgctccccacctctccgctcatcttggtgactcgccaccgcgcaccgatgcccgcacgtctcgtctctccgtccacggccgtcactcatcggtgaacaaggctgccctccagagtttgtgcgcttcctcccggccacgttcgtccctcgttggcgcacagggctgccatctcgtcggcgcgccctgctcccacctgccggcaagcccatctcttccgtcgtcaaactccatcgcatggatcaaagaaagccggaacagccacgaaaggagtcgtgaagctcctcgctaaacactgccatagatgcaattcgacaagaatctagaggtatgttgttcaacagctttagctatccgtttgaaaagagaggaactcattagaaaacggcgtcggaacatcttctcaggatatgttgggtgctcagcaaaatagtcaaggtataatttcataccgtgttcatctctattttgattgtaaaccttgtgtccaaaaactgaacctcgatgcttctttcgctgcttatgcttcctcttccgatattcacccatcatgagaagcatgaggtggtcaagttcatcatctaattcttcatcttcgagatggatcatagatctcctagttgcatacatgtttctgcaggcatgca

SEQ ID NO: 4490 - DNA, 995 bp, Zea mays
tgtcagcatatcaaatgattgtaggtgatgattacacccagtccgaatgtgtcattaaaaatatataattgtacagcaccagttggttgagttaagtaccgttgttacatctatctccagttctccacaccacctcacacaggtcacagctgtatcatcttcttcttcctctctctctctctctctaccaacccaaagtcacaaattagcttctttccccgcccctacatgctacatgtcagatttggtcaagctaccattcactgagattttatctcatctatacaaatcaaaaatttaaattagacacaaaaggatgcatctgaagaacttctttccctctctgttattttctgtttctttcttcttttgaaaattaaccgtttttatggacatcaactaatgcagtctatgtatgtataccaaccgtgaaaaagtaaaaagagaagagacaaaaaaaaaagaaaccccgtgatattttacatcgttgagtgagacctgccatgggtgacgggtcggctcgagccgaggccgagaccgaagccgaagccgaagccgagctcgcgtgtgtggaacgggctcgggtcgtcggactcggagcgcgaacgcgaacgcgacaggtcggagccgccgtgccgggagctgttgtgtccggcggcggccacgacggactcctcgcacagggtgacggcccactccagctccgccaccacctcggacatgatcggcctcgcgcgcccccgtggtcggacgcactccgaggcgatcttggcgacgcgcgccaccgcctccacctcgtgcccgcgcggcggcggcacgcgctcgtccaggatctttgtgacgctgcccgcctcgaccgccggcacggcgaactcgaccacgttccggggggacccgctgccgtccatggttcgtccgatggatggccttgcggccggtgaccagctccagcagcaccacgccgaagctgtacacgtcgatgcgctccgtcagtt

SEQ ID NO: 4491 - DNA, 1041 bp, Zea mays
cttgcatgcctgcagccgcggcaggtggccatctggttccagaaccggcgcgcgcggtggaagacgaagcagctggagaaggactacgacgcgctgaggcgccagctcgacgccgtcaaggccgacaacgacgccctcctctcccacaacaagaagctccaagccgaggtctgtaccgaccgtatcagtacgtacgtacgtacgtacaattcgatcatcaactgcatcacatctcatctctctgcgcgtctgatccgtcctagctcgccggcggcggctactcgcggccgtcccggatcggatctaggcaactgcgtgcctgaattgtgaatttgtgatccgcatcgcgatgctgatctgggcgcgcgccggtcggtccatggctggcttcccagctcaatgattgggggggctgacggttcagcttggccgcacagctcactcgtagctcagctgggatccatgtgggtttcagtgcacgcaacagccagaaaaaaaggttgttggatgcgtcgtcctccctgccctggggcgctgctgcctttgcctcattgtctgcgcgcctaaacgtactagctaccccgcctggccctgcctgcctttgtggaatcttgctgctggagcaactgcaaaggccaaaggcagaattgcagaaagagagaggatttttcgaaaggtcagcagcagaatatgcaggcagagttgcgtggagtgttgagcgaggaagatgctgcggctagctgctggtgctggcgcagtcaatggcttcatgatggccgttccggtcccggccggcccgcatctctcatctccgtgccagtagcgatcactgattacgcgatcatctcctctccggatacttggcatatcaacagaacattttggttgggcgggccagaacatttgtacactgatatatactaacagccagcgattaatcaatcgatcgcttctgatgcatgcagatactggcactgaagggcagggaggcagcaggggggtcgtcggagctgatcaacctgaacaaggagacggaggcgt

SEQ ID NO: 4492 - DNA, 991 bp, Zea mays
gcatgcctgcagcgaggcgaggtgggagcggaagcaccgcgtccaagaccatgagcctcgtcggaggtgtgagtgcccacgacgagccgaggacttcgatgggagcgagtgagccacttcacggtgagcgacggccactcgagcgggtgggagatgacgaggtcgtaaagcacagccgcattcctcttccagttccggtactccatctccgccgccgtaggtggggtgcccgccggtgtggacgatccgccgtccatggttactttgatttgatgatttgcacgagaaccggaggcggcatgctgcttgtctcccgccacgccaacagggatttggacgaagcggcgggtgggtaggtaaggagagagcttttaacgcggactagttgggtctcaagacataaaaggcccaaacacatgctagtaactactagagcaagcccgcccattttcggctcatgagcccacgaagtagaggcttggcttgagcttatcaagcactctctcgaactcgcgtccgtttgcagcaccctccgccgtcgagccgccgcgatgatgcagtcgcacctgccctccccggcgaggctggggctcacaacctcgtcgccgtcgctcccgcccaatccggtccccttgaatcccacatcctcgccttcacatggtagcctgccctcgagtgcagccgccggcaccagcgctgccccaaccctaatcacctcgccgtcgctgctaccgctcctgccgccgcttccgcgcgcgcaatcgctgctccagcttatatcgtcgctcgccaccaacctcttcgagctctcgcccaaccgcgccgcgtggatcttatcgtaccgggggtcgctccccaccttcctcccatcggcgtcctcctccgcgccgccgctcccaacatcgatctcctctaccaaggacgcgctctctcttctcaccaccctgcaggtggacttctagaggatgccagagcacacagaatagactct

SEQ ID NO: 4493 - DNA, 921 bp, Zea mays
tgcatgcctgcagcacaaaatgaacaatgcaggcactactaaaaaatcgatgaaaacccccaactacaaatgtttgcacctgagccagctgcgacgttgcgtcgttgcctgtcatcgaaaaagaaatactagccaatatacatgtgcgaggtgaatcacaagttcataacacatgaccgcgagaaccgcacatggcatgcaagctaaaaaactgttcggtttcacctgtttaggattctgaccgcagcaagcacacggagatggttctcgcgaatcccctacgcaactaaggtcgcaatcatgaatcatggtacacatgaccgcgaatcgaccaccacaaaccagcgcatgcaacaggaactaccaatcgcggcttgttacctacagaagcatcaacgaatctaccgaggacgaggaatccaaacctaaacatcaagaccaacatgcaacccttcctgaggtaaatctaccagacgcgaaggctgccgagaacctcgatctaccgcaacggatcacgccagatcggatcaaggccagatcgcaagaggggagaccttctcggggtcaccgcccttgtcggggtggttcttgatagcagccttgcggtaggccttcttgagatcgtcctgggacgccgacttgggcaccccgaggatctcgtagtacttggtgttgtcgctcttcttcggcgcgcgcccgaacatcttgcctttgcctccggcggtgccgccgccgctcgccgatgtggggtacgacctcgccgccgccgccgccgccgccgctcctgcgggggagtggggtggggaggagcagtagcggaggggaagggaggcggcggtcaaagctggtggcccagcggagttagaagcgaagagggtttgccactggcgatacgcgttggctaatgtagtccggcctgta

SEQ ID NO: 4494 - DNA, 909 bp, Zea mays
gcttgcatgcctgcagaagggccatcctttggcacagcaccagctggaaaatgtatgtgaatatcacggctctccaataagttgatatcagaagcaggtgacaaattgaggtcagcagctcttgctctcacctgtaaaaaatcaaggtcgtattgtagttacaaaataacaatgaattattcgatttgagatgtcccaacatgcaaaactaatcaattaaccttgtgatatttaatataaatagtattttgcaaagaaaatacagttaaaattccaaggttacaacaacagggatgcaagtgggtaagcaatggttaacaacacagaggtgctaacaggtggcaatgccatgttactatgctagtttattttagcaagttttgggtcgcccgcaaaatataaaccaacacagtggcaagttggcaacttgcaacctctatccaccagagtttaaataaacatagaatagaagcatgaatttgtcaacacagataagttttgtcaaacgatttcaatgatgttgtgtttcctatagccagccagctctctcctgtatttattatggataggtgtaggactttatggatagggaataacgaggagatcttgtttggttatatttctataaacccaagatctccggactatatatacatctattccctgtaccttgatcaatcaatctacaattccaagcaatcctgtttactttcaaatgcggataaatgacgggacaagaagatccatacccatgtcaaagctaactgtgctgactccttaataacatcaccaagctgcccagtcaaatgcaagtcacccttgcccaccatggctgtagcctccacaaactgaacttccccaccaaccgaagtccagacaaggccaactgatactcctgggcttgctaca

SEQ ID NO: 4495 - DNA, 927 bp, Zea mays
accgaagacataattagacatgacagtcgctagtataatgatgaaaatcataaagatatgtaacctagatttgcaaaaaaaaagttggtaactcctacatgacatctcaacctaacagctgaatctcttaacattaagctggcttacattggggcatgatatgtaacctagatttgaaaaggttggtaactcctacatgacatctcaacctaacagctgaatctcttaacattaagctggcttacattggggcatttttaacattaagctggcctacattgggggatctcaatctgtttaccactaacctcaggtacgttgttcatcacatcggctgagatataactcaaatgaaatgtgctaaattacctctttggcatagaagtgaacgagaatatttagatcatgggaaaactgaactgccaaactaagacatcatagttatttgatccaatatttttcaaaatgcccccctggtttggattgcaagattaatcacgatctaaacttttgcaggaagtccctaaaactttccttattaaaaaaaccataattcatctttcccattttgttatgctaacatgggaaactaaacaatctagtactagaagtgtggtacatacagagatttgaacacagaaactgacgattaatttttgaaaggaatatttaatgatagtgttccagtttgaaataaaaacaagaacaattcagcaaagggaaacatcagagctgggctcagtagttcacctggccatgaagagtgaatcgtggtaggctctgctaatcatctttttgtatgccaggtttaactgttttgcagcaaattccattgcgtcaacgactgatttgtcagatagagcaggtgggtcctggttgatgatcttaaattctgaaagctctactccacggttctttgaaatatgt

SEQ ID NO: 4496 - DNA, 1048 bp, Zea mays
tacactgctatcgcgctgctacgcgccttggatttgtttttggagacgatggcctgagagggcgcaggtggcctggtctcaccatccttcgacgacgccagggtagagttgaaggaccacgacaggagctggtgcatctccacgttgttgccggtggaagcagcgaagccgacggccaccatctggggcaagcttttcctcatgtcgacgttggcgctgacacggtacggtgccccgctcatccagagggtgacggacagcgtctccgttgtgttgtcgaaggcgacgtcggctgccagggtctcgccggacttgatgctcttgtcgggcgagatggaatcggtagagacgatggagttgacgtcgatgccgacgtggttgccatccgcatcctccaactcgtcgttctcgaacgtgtcgaactcgaccgccacggcgcggtcgtcgcccgtggcgttcctgttggtgctgtcgttgaagaggcccaggttcctgccgaagctgctggggggcacccgtccggggtggtgcgcgaggaagaacgccatcccgtcgccgctcggggaccccggttgtgctcgcttgatccggaaggtgaaggaggtggtgaagctggcgagctcgccggtggcgccgttccagaggggtatcggctgcgtgtacaccagccgcccgacgcttttgttgttgtggttgtccatgccgttcttggtcagctcgatcgcgtcctcggtgctgtggaagtaggcgtcgccggagcaggccagctccgcgttctgggcggtgcaggtggaatcggggtctgagaagttgaaacggaaagagagcgaggcggcgagggggacgtggacggaggacagcacgtagcagaggcagcacagcgtgggtagaaggccgccagagctcattaccgccattgttgcagcttgttaggtactactagggagagctgctaggtttggtcggagaataattgaacagggacacgcagagattatccgtatcttcgcagcacggcagagagaaggccatcagtccgcatgctgac

SEQ ID NO: 4497 - DNA, 991 bp, Zea mays
gaaacattcatacaacagttgaggtcacagatcgagcgtttagtcagtatgtacacggtctggtagttaacgtggaaatggagacaatatgcatggtgacttgacgagacaagggtgaaactccggaatcccaacgaccgtggctcttcatccgtcgaccatcggcgcggccttggggagcggctgccccttgatgaaggacgagaagagagcgaagccgcggcccggctggtcgatcggtaccatgtgcccggacccgcgcaccgtcgcgaacaccacgcccttgtactcgatcacgtacccggcgacctgccatgagaacatgtcattatcgccgtcgtcgcgggctctcagccatcgcattttctagagttgcgttcattcaggtatatatatatatatatatgggccgggcaaaggcatgcgactgcattacctcctggtccttggcgtcgatggaccaggggcgccagtcctccacgacgccgaggccgagcttctccatggaccgcttcgtcgcgatcacgggaaccatggcgtccaggtcgccactgcatgcaggtgacagcattacattctttgttatgttagctaaccagataccaacggcgcatgcatgttgaggggattattatatttatttatatccaccgacctgaagacccacacgcggacgccggcggcggcgacggccttgacgtagggcagcatcgatttcgacggcgagtcaccgaacttgagcaggttgtagaacgtgcccctgtgccatgcatgcatcatatccaccacaggatttattagtttcttcttcgtgtcagctatggaagcacgtacgcgcgcgacggcctactagtagagccatctatatatacctgcatctagtccatttgtacttgagccctgtgttggcacggatggtcttcatcacctctggctggttcaggtacgcctccacgtagtattgagcgcaaggatcagccaagtcgtgcag

SEQ ID NO: 4498 - DNA, 974 bp, Zea mays
agaactccctatacctgaacacatggacatataccatctcacccatgagatcgaggcttcagacatgtctgcactacaagctgttgtctgttgtgatgaagaaagaatgaagttggaaaaggaagcggagattttggctgcacaggtcaccgcttggacttcctcacacagttgttatcttacacctttctctggccctgtctattttctgctgtgctgctcttgcaaattataacttgatgctggagaatgtcctataacatagtaacatgtattatgattgctcacatgtttaggatgacggtggtggtgatgctttggatcgtgtatatgagcgtctagaagctattgatgcatcaactgctgaaaagcgtgctgctgagatattatatggtttaggttttaacaagcaaatgcaagctaagaaaactcgagatttttctggtggttggcgtatgaggattgctttggctagagcactcttcatgaatccaacaatccttttgcttgatgagcctacgaatcatcttggtaagactattacattttaaaataaatgaagactaccaaagtagaaaatcagggtcaatgtggatagaaatgtcatattttcctggtagtttttgtgaactagaaatctaccaaatactccaattttttatgtgcacaccaatctgaatcttctatgtatatcatattcatatgtgtatatggatggcactggtaaacactagattgctaatataagtaactgagttcgtacaaagataagacatcatgtcaattgcggtaccttttttttctaatgtatcacatacacaacatggtgccagtgctacatatcctgttgagcataaatggcttgaaccatccaattttgtttcctcatggcattcatatgttttacctgtagtctgtagaacaattaaaaacttgttcctgaggtcccaaggacctgcaggcatgcaagactg

SEQ ID NO: 4499 - DNA, 879 bp, Zea mays
aagatattacctatttacagcgtcggaaaccatgtggtagaactgttgggtcagttgggtcacagaaaagacattgcagaagaagtgtcacaccacctccaagttcacgaagagtgtctctcctaggatctagatcgcttgctgaaaatcctatcccatcagtgtcatcccatgactcgtgtttaccccataagaggcttgagacagctgaaaatagggacccatgtgctggggggcacataagtagctctgtgactccctgcacttctttgaaaaaccttgcatcaccgagttgcaaatcctcacaacctttgagtactaatttgaatactgatgctactccaagaaatttagacagaatggtaggcatacaaacacaagcacttgccaggagctccagttcgagtattttgcattctcaaggccagaacagtgaaaaagtgtctgctagtttgccaaaagaggcagtgacaaatcctgcgtctcctagtcccaagcaaattggtgctcaacatccaagtgacaatcctcttgttacgaaggcaggaccttctaagagtgtgtgcacacctgagagtgaaaagttgtgcagcagagacatcaatttaactgcaacaagtactacagttcctgtcttgcaagctcctgttgtggagcctgcattgctaagctcaacatctgtgttcactgaaaggccctttgaggtttatcctgacacaagaactgctgctcctggcatgcaggaacttagtgtgaagcctgtgttgctgaccccaatacctgtgcgtcatgaaccttctacggaggtatattataacactacaagatcaagcccaaatcctagatcggttttttgtaacaaaaataatgcaatttggc

SEQ ID NO: 4500 - DNA, 996 bp, Zea mays
cttgcatgcctgcagcccacgcctcccgataaattcgcaacccagtcccccccgtcgctctcattcctctcggccacaaacactgcgcgctccgcagacgcccaccaagcttccgctattcgccaaaaggtccccttctgccctccgccctatctatccatggaaaggcggcacggcttcttcgcggcgctgcgggaggaggtggcgcgcgggctgtcgccggcgcgggcgcgccgcaagccggacgccacggacctggccgccgcgctcagcttcaccggagtggcaggcgccggcgagatgctggcgccgctcatggaggggcccgatccggagcccagcgacgacggggacggcagcggccgccgaggtgccgcgcgcgggaggaaggaaggctggggccactgggtgcgcgtgcagttcgcgcgggccccgtcctcggcggtcgcgctgcgcagcgacatcaggatgctcctcggcgttatggctgcgccgctcgcgccggtccgcgtctgcgccgccgagccactcccgcacctcagcgtcaaggacactcccatcgtaagcgcttctctcgtctcgtcacgctgctgctgctgtgtttttcttcctttccccccctgcccacttgtttgctccacgttcctttgcaatcaactgttcgacgaaatgccggtgccaaggttttcatgggtgtatgtatccgagtttccttgaattcgtgggccctgtagactgtaaaaagttcgttactagtgttacagtgcggtaaaagagttcgttactagtgactacaatgtctgcatgtctggtcaccaggatctttgactgctctttaggactggtatatatgactgattgtttttttcaccgctgttgcctggtagtatgtgttaattcactgtttgctgttatatgccagatttttaataaatttatgatttttttttgggtgtgatgtgcttgtccacaggaaacctcgtccgcgcagtacat

SEQ ID NO: 4501 - DNA, 965 bp, Zea mays
agaagtcagtgatcgatgtgttgcactcataccttgaaccattcttcaaaactactacaaacctttgtaattgcaagctaccaactcttgggctcgtcttcttcttcatggaccatgtcttcgagttgatcaatctgtgtcatggcagcagccaccaagaatggctcaagaacattgccggtgacatgtccaagacaactcaaaagttcacatctgaagcttacaacatcttcaccttcacagccgcaattcttgatccaaggatcaagggagagctcatccctgaaactctgaactccacgagcaacttggaagatgtaagaaaccattttgtccgggactacagcagcaccttccaagctgttggaaatggtcatggcgctcaggacaccacagaggatgctggtgcgttcgcctttgctgaagagattattcgcaaaaggcgccgggtgagcatgaccactgctgatgatgagctctcgcagtatctcgcagagccccccgcaccgatttccactgatgcccttgagtggtggagggggcattcctcccgctatccacgtctctccctgatggcccgagactttttggcaattcaggggacctcattggatcctgaagaactgttcacaagtaaaggggacaacatccacaagcagcagtactgcctccctcttagtagcatgcaggctatagtatgcataaagtcatggatgcaaagtgggtaccagttcaattttcagtcgactatcatagattttgagagattggtcgaatcagctactgctcctgatgatatcgatagttctggccttcacagctaaatgcatattcagcaaatcaaggatcccagaatagttctttggtttctgttttttcttcttttttctaggtgctcatgtaaatagtccttagaacttgtgaatgcgacttctattgctgtcccctgcaaaatcccagggtca

SEQ ID NO: 4502 - DNA, 952 bp, Zea mays
cacgtcactccctcccccagacgcgtctggggatagcaactcccatgactacaatgggattaactcctctgctccctgtttgtttccggatggttccaatggcgaggatatgttttaccttgagcaagaacctgggcacctgggcgaccatgaaggtgctgctccggtagcagatagcagattcggtgttattgtgcaggagcagggtgttattgtgcatgagcagggtgaggccgtgggtactctcccaaatgggaacaatggaattggcaatgagatgaatgtggagtgtaaaatggtggtgccgtgcagcaacgagcatcgaatggcgaatgctgtcctagatgtgtttgaggaatgcctgagggaggcaaagagtaatggggttatcaatggtggcaatgtggacgggagtggtgaggaaagcgagctctccaagcggtggagagcgcagaggatggatgagcttgatgtcttaagccggaggctgaggttgctggttgagtatgctgcggcggctgggcagtgaagcagagattttggtggttttggtgatgttcctgccacccttttccccttttgtatagaagctaggttcctgtgctatgctttggaatgtattcctcagctggacccttgcctttagaaagcttactatatttaactatgtacccttgagtttaataactcgagcagcataataatctataattttaacgctgttatttgcatgggttcctgctgtttgatatagatgatagccttgttaatgtagcttcaggctttcaaatttcctctttttcaattagaagctgttgtacttgtaacttgtaagctgtgagagagtaatattatgtttccttgttaaccgcttgtaatgcttctcttatagcttcactacaacgtctacattcagcctgcaatacccatgatttatttgcaagcgcttcct

SEQ ID NO: 4503 - DNA, 896 bp, Zea mays
agcagtgagaactgcatgcaagaggcacaaagcagcagcagcagcagttcattcaggttagtcatcagaggtgacatcgctctggaactggaagacaagcagcaggaagacagagtcacatagagatcaatggcagcgcaaggtgctggagcatcagcttctcccctgtccggcttccacgtggcgctgctcctcctcctcactatcttggcttccatccttgcaagtaatctctctctctctctctctctctctctctcgccttctgtgtgtgcatagatgagcttgcagcggcatggttaatcaatcccagctgaacttttacatgctgctcgttctctgaatgagtgtcgtgtcgcgtcgctcggagaagtaaaggaactgttgaaaatttggtccgtgcaagtgcaatcatcaacggcggcttctctttaattaattcccttgctcaggtcagatcaggtcaggtcaggtccatgcgtgtgttcttgttcaattagcagctcaacattctgttggcgccacaatccagtcagtcagaggctttcatatataagtgacgctggtcagtatacgggcttctgtgggtacatgactactgactacatgcctgttcatcgtcttccatgtatcatgtatgtatgcacctgcactgcacggccatggtagttgcacttactctgcacccattcatgttaccactgcatctcatctctcgtctgcactcaaccactcactcacccactgataatccatgttgcttgcaaaccatccaagccaagctagtgctacctctgcatgctagagcagctaggagacgacgtagacatctttggttccctcctcaagtcgctttgctccgtttccaagaagactaactaaccaacggggtatcg

SEQ ID NO: 4504 - DNA, 981 bp, Zea mays
cctgggcggccacccagacgtcgttgcgcttggcgttggcggcggcgtcgttgatccgcttggccactggcgagtggtcagctgccgagctattgcgcctgctctcgtcgtcggcgccgccattggtcgcctcgacgtggagaccgacccggcgagtcactgccgcggccatctcgaacggtgagccacgcctagttctagttcgtgttgtgttggttggtgcatgcggcctgccgaccgagggttatatagggcggtaaagcagaaaagttggaagacggagaggagctgaggcgacgactgaagaagagtctggtccgttattcggggcatgttgagtttgtgatctaaattctaaagaaagcgactaacttggcaagtaaagcggaggtctgtcgctgggagatcgacaccttatagtaaatctactgcgatctataatcatcggaaaaatagttatattgttgctgaccaacgcctctgatttttctccttcgaccgaaggggtcttctctgtgtttgatgtactttgtaaccgagcatcatatcgggaggagtacagactacagagtaccagctgagcttttctttctttctttcttcagcaatcagcacggtcaaaatacagcagaagagaagccgccattgccgtgtacttttccgttcttcggatcaagctagtagtgcactccagcagagagccacaggttctgaccgatcaaattcagcgggccaaccaaaagtcaccgtaccgtctcgattaaagaaatgcttcttgggtcgcgtgtctcaattttttaaatggaatatgacatcttttacaaaaacgtgcacgctacccaatgcaagagaccatgttgttcgacatgcctccagctccaggtgagaacgagattgtcacttgcgcagggggaagggatcagcaagttcgtggacgttactgtgctcagtctgatctgtggatgctgttgtgctgcccag

SEQ ID NO: 4505 - DNA, 949 bp, Zea mays
attttgtgcagttggttgctgaggtactgaattcagagtagcatgctgtgcagtataaacaccctgatacaagaaaaggtgagacaataatacggaacatacacatactagttgagaccaaaaccaacattatctgctcagaaaacaacaaaagaactaatgtctactagcaaacaggaaacatataatcaataagactcgttcctgttaatactaaagcagaaatactgacagtgagaaataaataatttcaaagatgaaacatcagatctatggccttggggttattcacttactgacacattaacagaatcccttatgggatttagagattctaaacgtttcttcagctcctccaatcttgcatattgggaagcagcactctcctggacctagttaaacaaaagataaaagatcttaagcacatatggtgaaatgatggacatatattcataaaaggaaaattagaagcatactagatggtttaggtcatcacataatttctgcttagcatcctcttcgtctttaacaacttgtgcagcaacttcccaagtctagaataccagacacgtagtaaaaaatagcagaaaacataacttattgttagcgacactagaataaaagagaaacacaagtatttacaaagaaaaaatagggaaacagtagaggtctgatcatctacacgagacattactccctccgtctgaaataagactatatacttctagcatttgaaaattgtcctacaaaataagtacacttttagatcatggaaaggcagcttcagtaagctttactactctctccatttccaaagtgtgcctccccaaagagctcggtggtcttggaatttgtgatctccaaaaccttggctaggcgcttcagttgagatggttgtgactgaagaaaacagatcctaatcaaacaaatttttatgtgccagtccaac

SEQ ID NO: 4506 - DNA, 880 bp, Zea mays
aacaaggtgaacaagaggatctccttacaggcccaggtattgcacgcttgacaacacgaaaaatgttagcttgcccttggttagtgccttgaggaaatcctgttgtgtaggtatcgatgtcacgtaatgagcgacacaggatgctgagaggctgcataatttagcatgagtataagaacatggtgcgtatgcagatgggtactatgctctgcaagtcatatttcgttgcagaaacatgttgacccaaattgactctatagttccgatagtcttgccttggagtctccaatgcctttcagtctgcatcgacaacaagcatatagtactggttagagctaactagcaaagtacttgtacgttgctacggtttccatttataattatagagcataaaacacaaaaaacagctggttaggtgggtgtgaatgtgggtttggagctaacaaccatgttttgaatctccatctgtgcacaattttagcttttttaccatttaaatgtggaggagcacgacgacggtggaaaccgtggaaaccagtgctttatatagtatagaaattgcttgtttcatgcctaagattctaagcaaacattggactccatcacttatcagttattacaccaaaatgatcaaagcagtgaatttacctgcgaaggcgctcaatcgattcattgttactcaggtcacagacgacggagtagctgtgaaaagtatgaccccatgttatttgtagtcaaccaagaatattttaaatataacatataaaaatatttaaaataggataaatgcagcttatcaatcttttgttgctgtatttttcctaggctcaaatttagtggaaccaatctgcttcaaaacaaagcacatacgcagggatgc

SEQ ID NO: 4507 - DNA, 1047 bp, Zea mays
acggcgtggacgagtcctacacgctggagatcctccccacgggcggggccacggtcaccgcggtcaccgcgtggggcgccatgcgcgggctggagacgttctcgcagctgtcgtggcgtgccggcggccggggacggcgccgggacctgctgctagtggccgccggcgtgcacgtccacgaccgtcccctgtacccgcaccgtgggctgatgctcgacaccgggaggacctacttccccgtggccgacatcctgcggaccatcgacgccatggcggccaacaagatgaacgtgttccactggcacatcacggactcgcagtcgttccccatcgtgctgccctccgagccgttgctcgccgagaagggcgcctacggagaggatatgctctacaccgtcgaggacgtcaagcgcatcgtcgagttcgccatgagccgcggcgtccgcgtcgtgccggagatagactcgccgggtaagccgtgcccgtgagttctgcccattctgttttcctgcttgcttcgtcgggaacgccgtcgacgggccagtttctcgtgttatggttccattggattctggtttttacggcccaatagtttaacctgtcgcatcacccactttttttaggccacacggcttcgtgggccggcgcgtacccggaggccgtgtcctgtgcgggcaagttctggctgcccgacggcgactggaaccaccgtctcgccgccgagccgggcgccggccagctgaacccgctggcgcccaagacgtacgaagtcatcaccaacgtggtcaacgacctgacctccctcttcccggacggcttctaccacgccggcgccgacgaggtcaccccgggttgctggcaggccgaccccatggtccagtccgacctggagcacggcgccacgctgagccagctcctggagcggtacgtcagcgcggtgcacccgctggtggtgtccaagaaccgcacggccgtgtactgggaggacgtgctgctggacgcggccgtgaacgtgagcgcgtcggcgatcccgccggccaccaccat

SEQ ID NO: 4508 - DNA, 1007 bp, Zea mays
agcttgcatgcctgcagcgtgttctgaaagtgactaccacttgctgacctgaagcacgtacgtcgtcggccaagtgaccaagtccaccggcgggggcagtaagtatagtcgggcgggcagatctgttgctttgctcttgttcgttgactgcatggcaaagtgggagtagaacggaattggttggaatcactcgagcggtttattattatacgtatacgtgaaccattcaccttgccttccgttaatcaatagacaaacaaaaacgcaggctctactaattgcagtgctaagcaaacgctgggttcccgactgtgagggtgtatatgtacctttccaggttaccgtacgtaagaataagatccttgcgcgcggccgccacatgccagccacaccacactcctttaattttcaccattcctgacgcgttttcttcgtcgttcatgctgactggagcgagagactttatttggtactgcggatcattcattccatgacagctactaccttgctcgtgccacttcgttgtccaatcttgccacgtcggagaatgcgatgcaaaagcaggaaaacatgcggctctgacgtgttgaccgacctgacctgacggctcttttgtttcttgcgttccgcatcgtgcatcgacgaacgaacgtgtcgatgccgtccgtctgtggtccatctgagacctgacatcgtagctgatgtggtttgaacgatgagctggcctggcgttgaacgtgatacacggtcgacctgtcgctagctctagccctgtactgtaccggaggcggcgctgcgagttgggttgacctcctctgtcgctgcctcagactcagacagagccaccatctattctattattacgtgtcgtcggtatattagcctctgcctccacatccctgctctgaatctgaagaataatcaaatactagtagctaatgaaattatcgatttgttctagaagcttctaatgaaaggatcgctagcgagtttaactgcaggcatgc

SEQ ID NO: 4509 - DNA, 998 bp, Zea mays
agcttgcatgcctgcagcacggcgtggctaccgatgtagcccgccccgcccgtgaccagcacggtcctccccgcactcgcgccgggcagcgtcttctccaccgccatggcagcctagcgcgcgcagcttccctcccgcaaccgcaagctgctacctacctccccgcccgcccgccggcaccggcctccgcctcctcgaccagagcgcgagccaagggaggagggaggagaggaggccctcttccccgcgggcgcgcggatctggccggggcctggaggaagcaggcggggaacgtggggagtggaagcgaagacgatggaatggagggaggggtggcgacgcgtgcgggggcgaccgagtttatgcgcggctggagttgcgttgcgtgcagctggggcggcgccgcggcgggccccgcgcagcagcgtgtccggccggaggacaggttgtcggtggtgccgtgcggcctggtggccgggcaccactcgcgggtcgcgctcagcgtcgctggaaatggaatacccgcttcgcgctcgcaccggatcttttgcttcggggcggagctccgaaccgcattctgccgtgtgcagctacaacggcatgggcgccaacgcaacgtatggtgtcattattatatgtaatgtatgtatagggattggtgtgacttcccagccagccatggagttgatttgattttaatttaggaagatgctaaagcacgttccaccagtgctgcaagacgcggcttaacttcgacttcaactcaacagatggctacgcctacgcgcggaacgtcggtgtgagtcaaaagatttgatagccagcgccacctacatacaagcccccacatgtacactttttacttcaaccactctgtcccagacccagagtgtcacccttctgtgctgtgctataccggccgctatgccaaccaaaaacaagagctatgctgccacctgccatgcatctccccaatcggtgtcacctgcgtgctgctg

SEQ ID NO: 4510 - DNA, 971 bp, Zea mays
aaacttattaggacaaacagcaacaggaggagaaattaacaacctgcacttcacgaaattgtttcaatgatttctccagttggaactccaatccggccttttcgctggccatggattctaattgtgtttgcttgtggtactggaagaaggatccatacagaatcaaattagctctcaatgttaagagtgtgaaggacacaaaagaaacggacaggttgattgcataccagcaagtcagttagctcccggtatctcttctcaagctcaacatgctcctgataaaaaaaacaagaaacattcacaaaaaataagtgctccttaggaattttaataacctaaatctatatgacttggttacaggccaatctcattcgcggattggtttggctggtaaccaggaaactcttggtcaggaagccattgatgcctacatccgtctgttcaataggctcatgtcacaagttcacattgcggccatggcagtacttttcggctggacaactcctgaagatggagaagcacctcgagatgtgaatattcacatgggagtaattccccctggagatgtaatatgatctgtgcccttaggtcgtttcttctgcctatatatttaaaatggatatgtctaaaattttaatatgggacttaacaagaagtctcgtcgggattcggttagaagtatggtgggagacactctgcctgattttgtatgtcttcaggagactaaaggaagcgctacctaaaaggatgatcatgtccacactgggagcagactttgatgagtttttggttctactggctagttgcactcggggtggtattcttctagcttggaagggatgtacttgtaaagctattgacactagaattgatgagttttcggtttcagtccagtttgaccaagttgatggaaacccgtggtggttcaccggagtgtatggcccacagtctgatgttttgaagatccaatt

SEQ ID NO: 4511 - DNA, 1009 bp, Zea mays
agccgcaccaacagccctcctttcatcttcatcgttgccgtcatctcgtacgccggcggcgcctccatgttagccaccggcgccaccacgtccaacctaaacctccggagcacggccgcggcgaccgtcttcatctgcacgtacgccatctccttcccgaggcacacccgcggcccagcgtggaacaccgggaaccgcgcggcgtcgaccggcacgaactcgccgccctcgcctagccaccgctccggcacgaactccaagcagtccttgccccacagcttctccatccggcccatcgcgtacgccgagtagttggcgtaccaaccggctcgcaacgccgcgccgctcggcagcacgtcgtcgcgcaccgcgacccggccgttgaacggcaccggcgggtacagccgcatcgcctcggtgatcgcggcgtgcaggtagtgcatccccttcacgtcgccgccgtcaccgcagcacgacgcggcctcctcgtgggcgcgccgctcgcaccgcgggttcgcggcgaggagccagaagaaccaggtcagcgccgacgacgtcgtgtccttcccggcgagtacgaaggtgacgaccacgtcccgcaggaaccggagcttggccgctggcgtggggaacatggcgccgagctcgctgtcgctgccgccgccgtcgtccatggccgccatgaaccgcgacagcaggtctgcggccccgtcgtcgaggctgttcctccgacgcgacaccttggattcgacgacggacatggcgtagtcgtcgattacatggacggcctctcgtagccggcgcgacttgccaacgtcgagcagcttggtgagccgccgcacgaacgtggccggcgtgagcgcgcgccggaaggagatctcgacggccgcgtcgaacgccgcgaagagcgcatcctgcctcctggcgtcgtcgtcctcgtcggcgtccaggtcctccacgccgaacgcgacgtggcagatggtgcggaacccgaaccggcgcagcgcgt

SEQ ID NO: 4512 - DNA, 981 bp, Zea mays
cttgcatgcctgcagcttttgctgcatggctgttaaacaagaaaccagatggctggagacttttaagaatctctgttggacatgattcacgaatttctgcacataaattgcaggtggatcctgttttttgttcatttaattaatcttatgaaccaaatttgcacatattttaatcctttattattggatatcaaaatcctgtttcaactagtgaattagtgatagttccatagtttggccttctcccacacggttacaacaagcatctataactgtgacaatatttcagtacttgtatgtttgctttgttgcagctttcttctcctgttgataattaatggaagtgctagtgtttgtttcttggtggcaagttcttgtaaatatgatttttttttggcagaatcccttcttacatgaaggcacatacatgcttaaattgaatttatggtttcatgttggcgaagtatgagttaattacccacttttcctcattatcttaggcatttgtgttgacctggttcaggaccagagttctcatgtccaaccttgtcaggtgcaattaaataaaaaaaaattgaagcaggctcctatttcagcatcttctgcctaatggaacatgtagatgtctgtgcgcttggtggtggtggtggtgtgtgtgtctgtgtgttgggggtgcggtggagtataagtgcacctttgcactcaaatagacacatcacgcctcaaggcaagagttgtcttatttgcagtaatagattttttttgtctcgaaccacgcagagaactgcccgtcatttcattaagaaagaaaagagatagcctctaggagattaggctccccaggggtgtacagaaccaggacacactttacagacttataccatgcacgaccacgacctccagggggcagcattcatgactaaatcctgtagcgctcgccccccgtgagacaccacaaatgcccatctgcaggcatgcaag

SEQ ID NO: 4513 - DNA, 1000 bp, Zea mays
ttttatttaattcggcagtgtacttgtttgacccctcccacacacacatgacacatcctaatcagccatcgtcatttggtggtggcggtgggctggtggccctcatgacctggattattcactcactcctgctgctacctgcttttgtttagtcttcctagccattttattaatgtataaaatgttagtggatgcatgttcttgctgcctttcttttattttctcttcttgccgttaggaagcttttctctcttcattgattaattaccattggttgattgcctgattgctttgttcacttgttctatggactgtgtggtacccgtcttgggtaccttccaagccaagaaatcaagaaactgaaggaaaaaaaaaaggtataagggaaactacaagagattgttggtcactggtcagtgggtaattgaattaacgctgtaaaattcactatagtttctgtctacaatatatcccaccaaatactccaatcgacaccactcctgtggaaagtaaggtaaaagaagaagaaaaaaagaattacagctgtataatatatacggtcgttttctgtttacggatttaccccccctctcggtctcactctcacatccctcaccacacgtccacacaagcgaagtttacaagccccgacgcggcgagccggcggcgactgtctccctctccttctgtctctctcccaccgccggcagagccagagtacgcatggatctctagtagtgcggcggcggcggggcgaagcagccgctgtcgtcgcagcgcacgggcgggcggtggaggaaggcgaggcactggtctgcggggcgctggtcggggcgggcggcgatgcagttctggcggtcgtcgacgtggcggacgtcgaggcagcggcttggctcggagcagaagtagttgtacgagtaggtgaagttgcggagcgcgggcagcgcgcagacgccctcggggacgtggccccacagctcgttgcgcgccacgtggagct

SEQ ID NO: 4514 - DNA, 882 bp, Zea mays
atgactcatttgatgagatgtataatgggaaagcttcaccatttgcttcatttgtggactactaccatcaaaagtagttgctcatttttaattttgtcaattcaaggatggatccactgagttatgcttgctcactaatttctccgttctcaactatatgtaggtatggtattgttattcaacatccagggcaacctttgttgctgttaaagcaaagtcacaatgcacacaacttacttttttcaaaaatgaagtaccaaggtactgtagtctcgatgtagtagcattctttccttttttctgttgcataatttgagatggtaattgtgttactttggctctgcttttacatggtattccatccaatttatggcagatggttcaactggcaatcctctgctcgtagaaaaagagcaaattcatgcccgagttccacctgaactactcatccatattgatgtcacaactgatattctcaaatcattttacttgctcccttctgtaatgcatcgggttcagtctttaatgttaaccagccagcttcgcagcaacattagttacattcaacgcataccaagttctctggtctgttctctcatggtattacatattgttttatttgttaaggatagtaatgcatataatgacttctcttcatgctagattttggaagctataacaactttaaggtgctgcgagtccttttctctggagcggttagagttattaggagactcagtactgaaatatgtaataggatgtgatctgttcctaagatacccaatgaaacatgaaggccatctctctgatatgagatccaaggcggtatgcaatgcgacactgcataaacatggaatatggcaatccctgcaggcatgcaag

SEQ ID NO: 4515 - DNA, 894 bp, Zea mays
cttgcatgcctgcagagagcaaacagatggacatgaatccacagagcaaacttcttatttggaccgcaataccatctccaaaacagatactgttgtttgtatcgtggtccaaacaaataagtatgaaactgaagagagtatcagattgaaagatgaaaagtaggagggaatagaatcaaccgttggttctcaggcacaagtttgagtcacactgcccatattgtttcaaaggaccagtcaagatgtatgtcgaaactaacttatcaaatggcaaccataactcactgaaattagcacaagaaatttgcacaaccatcagcagcgtacaaatccaccttgcatatgtgaaaccaaaatttcgaacttaagctgctaccccaatatcaggatctgagaaaaaaaaacctaaatggagccaaattacaatgcttagggccattttggattggcaaggactagttagttcaagtaaaaaaataatcgcttaaagtttacaactaaagtttaatttaggggtgtttagatccccctgctgaaagtttatggacacctattagtggattgctcagttaatggactagttattagttgagggctggactaaaagtttaatccacccattactctacatgcttgttcgaactaggattgttttctagctactagttagtccaagtgatccaaacaggtccttagttgaagcaggcatgtagtacaaatagagcagtgcacctattgcagctaccaaatcacagcacaagtacttttcatctatctgattcacatgaaaacaaatcacgggaatgtatttccaacattgttcatcaggtgattccatactgaaatcgaattaaggttaataacggtattgtttgtttccaagttactaaaacc

SEQ ID NO: 4516 - DNA, 885 bp, Zea mays
aagcgctagctagccttcgctggttcgagttggcttatgcgagagcggacagcgggaggaggaagaggagaagaagcgggggtggagacgacacacacagcgcaccgatcatatgcgtgtgtgggatatggtcctcctgttgatggccgcatccgcatatggggacggggttcttttatagatgcacatagctatgcctgtttcggcatttccctgcctacttattaactgcctctctgtttctttttttttttgcaaaataaaaaaaaataaaaaaagagatagaatagatcttcctttgggaaaaagatggtgcggcactgtgttcagttggggaagatgacgccgagtgggcggcacatgaacatgcgtccgtctacagctgacgcgctctcataaatacttgcccaaaatctatactagtcctttttgtatctatctatctatctatctagctagtagctagctgctaagcgatatatacgcgcgccactgttacgtgctacacgtgtccagagctagctatagattctgttaacacaaagaatgttcaaaattcttttgtttctctaaagcctaaactagaacagctagcctgctcatcgtccatgtcacatgaatgaagaactatatagatcggcaatgataagtactattatattttacgaaaaaaaaagatcttgacagagtagtagtatgtatcagcagctagcgtgtatgcactccgaagttcgcgagtacagaatacaaaggggcacgagatttttcacgggaaaaaggtttccacagctttctctggctgcgatctgtggggggctctgcgagcagctttgttcgcctttggcaccgcagcgggcagaagagggggcgtaaagattaattgac

SEQ ID NO: 4517 - DNA, 1017 bp, Zea mays
attttttcagatatttgtcagcctgtacacattgctgactgttcattatcctgagtgtgttctgactgtagagctgtagtgcaattaatatagactgatctttcatgtgacttctgatcgttcgtcactccatcaggctcacatggtatatagtgaacatgcatgatgcactagctaatcctaaaaaaagttaactgcttttcatgccttattcgttactactcgtatgctaaagcaatgagcggcagaactgcactatttttatccattattcgcagaaagatactaactgtagcttgcttcctccccacattttcttgacaggtatctgatagctctgcacaccacagactaccaacaacctatgctcttcctcaatacccttgccgtcagtgtgcttgtggtcgcgaaactaccgaatatgcacaaggtccggattttcggaataaatgccgagaactgagcaacgtcatccttcgccagacatttaccctatatgcgcttttcagaacggttttgtgtgttcccccccccttctagtgcctttagttgggctcatcagagcaccagtgttgaaaaagttgttagcaggatgggccttggtcgctgtatagagagatgctcggaggcgtgctgtacatctgatgtgcacggattctgtacactcttaatgttgctatatatacggtttgttgcaagcatctgtcggttgctatatgtacagtgtggttcttgcagagcgatgtgtttcctcggctaccgtaatgccaagatagcagcagtacagcactggctggtgcctgtggacaggcgatgatggattgaggggcaagattattacaaacagttttgcacggaccgtccgatacacatttcttggcgggaaaaactgtttgcttgcctgacatttggcatgaaccgaccgtacgaagatgaactatcagatgaagtcaacggaggtccgtccatccgcctccatggtaaaagtcatcactaaaccagttaccatcagatggc

SEQ ID NO: 4518 - DNA, 957 bp, Zea mays
atcaagttgatggacattaaaaatgtctttcatagagtgagagtcatatgccaaaacgtaggatctgtaggcttctttggcagactggttcagaaagtaattctcaccaacaatattctcctgttcatcagctcgagttaactatatatatgaaaaaaggggggactcgtataattcagttatcttgaaaggggtacttacaagctgcgattgcaaatttggcacattcttctgattgaactcatattccgtcagggtaaccttggccgcctacagacaaccaataaatgtgtgatttctcttaattcacgagagggggggagtagcaggtcaaggaaacagggcacaagtattatattatctttttcacacataccttcaggtaaattagaaacttcagttcttctggtagtaagaacagcaatgcacttcctttgcctttctcaccacgtgcggtacgaccaactctgtgaatgtaatcctgaaagtgaaattgcaaataataattatagcaagcactgtgtagaaaatttcacaggctctgtttagaatcaccaacctttggttcatctggagggtcatattgcaagatataatcctaaagaagaaaccagatgcttatgttagccgtgaacaagaattaagtttagcgttaaaaaataagaagtcaaaatctcaccacgtcaggaatatcaagtccacgggcagccacattagtgcacaataagatgcccttttctgccttgcaaaagctaaagaatgtagtagttcgcttctgttgcttctgttttccatggatatcagaacactctatcccaaggaaattcagaagttcagcgtggaactttactgaattacatgatgagaagaacaccattatcttcttattccgcttctttcttaggaaagcatacagaaccaagaaccttttatcgctagaaatgacacaataaccct

SEQ ID NO: 4519 - DNA, 851 bp, Zea mays
cttgctcgcctgcaggaggcgacgtgcgggttcgacgagggcatggtgatcggcgtgggcgggttcgggaaggtgtacaagggcacgctgagggacgagacgcaggtggccgtgaagcgcggcaaccggcggtcgcagcaggggctgaacgagttccgcacggagatcgagctgctctcccggctgcggcaccgccacctggtgtcgctcatcggctactgcgacgagcgcggcgagatgatcctggtgtacgagtacatggccaggggcacgctccggagccacctctacgactccgagctgcctcccctctcgtggaagcagaggctcgacgtgtgcatcggcgccgccaggggcctgcactacctccacaccggctcggccaaggcgatcatccaccgtgacgtcaagtccgccaacatcctcctcgacgacagcttcatggccaaggtcgccgactttgggctgtccaagaccgggccggagctggacaagacgcacgtcagcaccgccgtcaagggcagcttcgggtacctcgacccggagtacttccggcggcagatgctgacggacaagtccgacgtctactccttcggcgtcgtcctgctggaggtgctctgcgcccgtccagtcatcgacccgacgctgccccgggagatggtcaacctggcagagtgggccacgcagcggctcaaaaacggcgagctcgacagcatcgtcgaccagcggatcgctgggtcgatacggccggagtcgctcaagaagttcgtcgacaccgcggagaagtgcctcgcggagtacggcgtggagcggcccgcaataggggacgtgctctggtgcctcgagttcgc

SEQ ID NO: 4520 - DNA, 1058 bp, Zea mays
tggatctgatacgaggtatactatctcagtcaggttatatgaaatgaatctataaggctgttagttattgttagagttttactgtcactcatgatataacagtgcatcaattgaatgaccatgtgtttggtaaattatttctgctgtagcctttgtttccgttagctgttttggttcttctcattgatattcttggaagactactcagtaacaatcatttgtgtgtttatcactgcaatagaacatagcacatgcactgagtatagtatgcatttctggcagacaagccgattactttgcaggaaggtctgctccagttcatcaagcatcccaggaaattggtgtatatggaagagttgatgctgataaccacaacatgtccattcttgggactactccatatggaagacagcaagcagcctcattgttggaaggagctccgaggacaaacattgacagcctctatggacaaagatcatcaagtgctggttttggtgcaggtcttcctcctggacgtgattatgcctcagggaaaggcctgctccatccatcttcggatcctgattaccgagatagcatcttaccccatgtacatccaggtgtatcaatgattgatgaccgtagaattgatcggatcggttctcgtcgtgaattggatctaagagatgaagagcgccgaagggacctaatactggaaagagagaaagagcttgagtgggaacgtgaacgtgagttacgggattttcgagaccgtgaaagagaaagagaacgtgaaagggaaagggaccttgaaagactactaagagaacgtgaaagagaaagggagcgcgaacatgaaagagagcgtgaaagagaacgccttcgtgagcgccgggagaaggagagagagcgggaaaggaagcgcggagctgatccaaggcgggagcacactccatctagaggtcctggtgaccggcgacactcttcttctcttagatctgagaagcctgtgcggcgaatctcccctcgacgtgatgctgggcataggtggacttccagtctcttctgcaggcatcgca

SEQ ID NO: 4521 - DNA, 1017 bp, Zea mays
agcttgcatgcctgcagttaccaaataacaatccagggccaaaccgcacgtgctaccgttcgcggttgcagttgcagccgtgggcagacgagtaatttcgtcccgccacgctgcgctgctgcttcgtcgtaggcgccgcgtcggtcggattcggacgctcgcgagccgtgggtggtgactgggcgagtagtaggtgcagggtcaggtgtcaccgttgcccgggcccggccgcccgtaggttatacggtcgctttccgatcacgtcgccggagccggaggcggggcgggcggcccacacacggtgccgatgtggggggttggcctgccgccgcgtggacctgctgtcggtgcggctcctcgggccaccgacgggtgggctcggcagcaggaataggaatcggcttggcttgctttcttttggcgggaactgggtgggtgacaccgttccgttgggcccaagtggcgtgggcccgcctccttatagggtagtttcatccccatcccgtcgtcatcggtgacaaaagttgtaataaataatccttcgtcgccgtccacaccccaccgtagaatagaacagtcgatgtattcctgcatgcaagcaaataagagctttttaccgcggacgccggaagcggcatgacgaggaagcaattggagaatgcactctcggtcgccagcggccaggcccccgtcgcgccgcttcgattgatttgggaactaggcctgttgccatatacggccatcgcccgcacactacctgatcgacatctcatcatcgtcagccatcatgcagctaggcagctagctacctaccagccttgtctaatttatcaccgaggagatacagatggggccactcacagggcagcgaagctgccgcctttccatcatacgacgcgacaaccagaacggaaatctctggcatggaaaatactgcgctgtactactctacgtaccgatcgaagctagaacctttttggggggactgtcacgaaattccccccggtgattcgtgct

SEQ ID NO: 4522 - DNA, 909 bp, Zea mays
ataaattcatttgtatgttagctctcaacaaaagaaacagacactatttgtatgccataaaatggccatatggattgcatacctcgtctatgtcttgcaatggaataatcacctaaaaagtgcagggcttagatacggaactcaatggtatcatatagggatagaatatgaaaatttggcctgaaagtttttgtcactattttaattcgatactgctaaccattgattgtggcagtgaccttatttgtgccagttacctgctagaagaacaacttaacttttacagattttctgaggaatatgaaatgatattatggtgtgccctcatcattttgggattcgaagagggctggagagaggcctaatgcacatttcatcttcaattactgtatatcaaacggctacattaagttccaggaaccattttcagaatatttgcttacattcaattgtttggagaatacgttagagtggaagcacagatgccattgggagatgtacatacggccatggagcaagaaacacctgtccagagcacaggagtaactttggtgaacaatctgcaaggataagagataaattagatatatcaataaattataagttctggtcagcatgcgatactgcacgcctacatatggcattataatttgttgaggaaagtacttcatcatgaggaagtttatatatgatttgcagagggccaatgccttcaatcatcgcttgacgttgcttattcagtatcatctttctcggggactcagctccattgcattcttcaaaggagctggaaaacatgattgaattgggatgatgtttacattcagaaatgctggcgttgtttttcccaaaacaaggttacctatcagaatctggaaatgctttagttgaactaagacgcaggcagat

SEQ ID NO: 4523 - DNA, 1021 bp, Zea mays
aggtcgcacgacgggtcaccgctccggacagccttctggcgcatctccaccaccttcttgtgcgagttggagtggatggacggcacgaaggtggggctcgccgcgggacggtactccgggaacaggcggccggacttgtagcgcacgccacaggcgttgcagagggtcttgggccccagcggccccgcgcgccactgcggcgtcttctcgatctggcagtgcgtgcacctcctgacggcgcagccctgcggctccgtgcgctcgccgccttcctcgtagtcggcgtcgccgtcgttgtcgtcggaagaggcgggcgcgggcggcgccggcggcttcttggccttcttctttttcttcatgggcggcgccgggtgcgggctggactcagcgatgctctcggggtccgagtgggacggcccggacgagtacatgggcgtcggcacgaggatggtgggcgcctccgccccggcgcgcgtgaacgcggacgggcgggagcgcttgctccgcgcgcgcgccggtatgacgagcacgggtggcggcgacacgggcgccgaccacgcatggccttcgccgctcccgctcccgctgccggagaaagactccgaggacgaggacgccgaggacgactccgacgacgcggagcagccgccgccaccgccgttggcgttgttgaagctgccgtgctccagcaccgagatggggctggagctgcggaacagcagcgcgtcccccatcttgtccggcggcagcagcgcgccggccgccagcgcggagctcttgatgatgggcgccgcgccggggaacgccggctcgtgcgggatggatgcgtcgtcgaagagccccgacagccactccagctgcgccatgtccatgtccatgtcaatgtcgtcgcactgcaaccaaagggaatcggaatcgttagctgccacgtcaggaggacagaatcatgcgacgcgccgctcgcccgctccccagcaccgacgccgacgacgacaccgacaccgacactgccagctttgca

SEQ ID NO: 4524 - DNA, 1023 bp, Zea mays
agaaagaaatttggttaataagtgctcatcaattgataatatatataaaaagcacattctttgttacttcttcaactagataaatgaagcctaaatgtttgccaatgtaacaagtaacaagaattagtgtaaagcaaatgcattctagatttcatgtctagcggtccatgtatatttgataaagagacaagctcacagaaaaatatacaagggtaactaaatatgttgctttatccagataataccatacatgcagaaattttttacagcatgggacctcaatttaaatacagaaacatagcagtgaatctcagtcgacgtaaatggcaagttgcaaagtgactaagtgagccagtgatttgatcagacatttgctagcatctagcgccacaactaaagttgcgacaatgactcggataaggcatgaaaatataaagcctatggggtgtaatcaattaatcatgctcatatccatcgaactgcacaaaaccaacggtccaacgccactgcctaactcagctatctgacacctcccagtttgtcacacgatgtaatgaggaaattaagaaaatttcaatgcgagaacaaatgatttagacattagactaattccccaagagaaagaacacttctgctcacaaacaaacccacaaggacacaacgcagtccaaaagcagatgaaactcggaagagtaactaaattcaggaacatgcacagacccaatctacagctggaactaattcctacaattccaccaatgtgaacccttagaatcgcaacaatgcagaatgcacacatccctctctcaggagggtaacttgccaacactcagttagtcaagctccaaccaaagcccaaaactctgcctcaaaaatcaagcaaacgcaagcatgccaagcatcacacctccaccagtcaacaggggagataacaaacatggagagggaaaggtgtgtaaccttgccgcctccaagtcagccggctggcctgaaaccctaggcaaccaagcaccagcgccacca

SEQ ID NO: 4525 - DNA, 948 bp, Zea mays
aacccctacagggagcagaaccccggcggcggcaagttcatgtgctcctactgcggccacgtctccaagcgccccgtgctcgaccttaattcgaccgggaaggcctcctccaggtggccctgcgctcaagattgtggagactggctcgacctgcgctgctctgccagccccagtacctccttctgggggttctcatggcacctactgttgtcgttttttacaacaacagtgaggtggctcttgaggaagacattcagatttacatcgtcaggtgacggtgagggcttgggcccagatggtaagaggttggcaaaggcaggggataatggaggaaaagctgaggagagcagggtcgagaaggcgaggaggaaggcagaggagaagaggctggcaaggctggagagggaaatgctggaggaggaagaaaggaagcagcgggaagagatgacaaagctggtggaggaacgcaggagactgagggatgagaaagctgcggcagaggagcggtccaaaagcgctacccctgttggggagaaggatgctaggaaggaggcagagaggcggcgccaggagaggaggaagaaagaggacaaggggccaagcaagagtaattcagattgtgaggacattgatagacggttgggccgagaaggcgacatgaagcgggccttcgatagaaagattgagtctgacagacgtgagggttacaagcctcattactttgaagctaacaatcgtagtaataagacagtggagagcagggcaaagtactttggccgtatgacgggtggtttcttatcttcgtcaagagggtttggtggtggttccttctttggcagaagtatccaggcccctgcccctcaagttaacaaggttagtagacccatagttcctgcaactgaccagggcaatgcagccaaaagggatgtccaacatgcatccacacaa

SEQ ID NO: 4526 - DNA, 1005 bp, Zea mays
gctccatgctcgagaagcagtgggagctccccttcgaggacgacatcatttccactgacgacgagcaggacgacagggttagcaaggccacggtggtggcggcgcggtcgggcgtctcggcgcggcagcggcggatgagcggccggcggcggggagctggtcggaagagcgttgccatcagcccggagctgatgcagagccggaaccgcatctacctcaggggcaccgtcagcaaggacctcctcacgcacaagcaggtcatccagctctccaggaagatcaaggacggcatctggcttcagcaccaaagatcaaagtaacgtttcaatccaagatgcatgcccatcaattgcacaacttcagataattagcatttgaaagctgacatcgtatctcccaaaaccattcaaaatgctctataggctgaaatgtattaaacaaaagtccatgtagtataactgtgatcaaaattgcacgctgaagattgtgggcgcctaatgaaattacattccctatctgattctgattccccgctgcccccaattttgagttcaggctgaaggagaaactggggaacgagccatcatacaagcagctggcacagtcactgcggatatcagctcctgaactgcgcgcaaggatgcgcgagtcgtttctcgcgagggagatgctgacaatgagcaacatccgtctggtcatatccattgcccacaagtatgataacctcggtgtcgacttggcagaccttattcaggtgatggcatgagatgtgtcgaccgattgaaatgtatctgggtattccagctgtttaatttgtttgttttacactgcaaattactcattactttacctcaaacgttgaaatggaatgtgttcatccacgttgcagggtggtctgatagggctactccgagggatcgaaaaatttgatgcatcgaggggattcaggatttccacctatgtgtattggtggattcgtcaggttatttgagcagattttcttgt

SEQ ID NO: 4527 - DNA, 984 bp, Zea mays
ttatatgacaataattctatcactgagttctgtgtaatagtaccctattaccattcttctgtagggctatgacgatatacttcagaggacagacattccagcaaaaagggttgcttcactaattaggttccgtgagaaaaggaaggaaagaaattttgataagaaaatacgttatgctgttcgcaaagaagtggcactcaggtttgtagctcgtcttgattcttgagcaatcatcaactttatttctattttctattgaaagtggtgtggtgcactagtatatatctacaatcatcagtggacattgattgtatctaatggtgaaattacttttgtgcctattggagcataatgtatttttgatgagtagtttcagctatcagaactcagaagggcaggtttggtgcattggttagagttgtttcactaagtcaccaagtcgcgagttcgaagcagcctctctgcgtttgcaggggaaggcttgcctcggtttatgccttctctagaccccactcatgtgggagcctcaaccactgggtctgcgctgccctagtatagctagcagcatgtcatgcttctgctgcttaattgaataaatgatcattattggagcatagcaattggtttcatcagatatggaacaaaattctggtcatccttttttaaaaataactgtcataaccaagaaatgtgccattatttttttttcagtcactgaaagttcagcttgaccagcttatatctgagccaaggaacctgaatttgtcccagctactgactttacttgcttggtcaatgtctttgtttcgtacatatagtcagttaaggaaacctgaaatggttttttcatgacgatagcaataatgtgattgtataggatcataggatagcctggggcctaggatgcagagggagactgcctctgaactgcttgaaacataggaacataacattgttctacgtcaaaacatgaaaccaactagc

SEQ ID NO: 4528 - DNA, 938 bp, Zea mays
actcgagctgtttcagaacagggcagtaagaagagttcaaccatttgaagtcatcaacattttccacatgcattgttgcatccccaggtggattcagcaaaaaccacatgttcatggccccaaagttcagtttgtcagtaacaaggtgaaacacatgtttttcaggctcctgaaaatttatagaaagaaaatcaaaagtgctatataatgggtcattcaatggtagacataatgaagagattacacttccagtttcaagatggggattacactaaccttcgcattcatgatggttgagttgaccacaactgatgctgccaaaacattgtctgagaaaagagcataatggtaaagatcaggattttccaagttctcgctattggggaactttcttttctctggagagagaaggtaataatcaattgttaagcgcatagaaagacaatggatgccatttgggattgtcttagctgcaagctggctaaggaaggtgctctgcttcttcaagctccggacctgctcatctgctgactgaagcattgctctcaaacgctgggtaatttccttgcaatcatacaacagatcccttgcttttgataaaacttggcccattgctttgattctatctgaagcactgcaaattaaagaagagatgaatcaatagagaaagagaaatcagtaacactgaaaatttgggcctagacagttcgagcaggcaccacctcttcggaagttcggcatcagcagtagcttccccaagggagcgctggctttccttgagtcttgctagcagctcctgatagagatcaagtttgcccctagatttggcaagaacagaatatattctggccatgatcatttgatctcgcatcagacgaacccttgaatctgccttctcattttcattttcacgtctccagatgctatattttcccagc

SEQ ID NO: 4529 - DNA, 984 bp, Zea mays
aatccccaagagcaggatgatgaaatatagttgtgttccgagtttgattagttcttatattcctctcacgctctactgcctcaagcagctcctgactgagacatcagtaaaactagaatgagcaagaaagtaactacttaatagcctaggaggatcaaaatggtaaggaccctatttgcacagccaagaacttgcctggtaggatccttcatagtaataggctgccaacacattgggcactgtgaacttctctggcacctataaaaatcccaacaagcattagcatgaataaaattgagcaataaccaaatatagtagtacaggtctactaaacattcggcatggatatgactagcaacattgatagacagaaataaggagagcactacaacaacaactgatatgataattaaaagtccaagcattttgactacaactgttcataacgccagcaaggaaaatgcttgttgagcatatgatgttatcactaaattttttcagtactcagtaccaagacagtacagttcaataatataccatcccatgtccagaaagctgcacacgatagagaagtcaaacaccaattcagggacaaaattttcatgtgcaaaacccatactgaagcctttccagtcacaatcagatgttacagtctaaggtgacagatatggttaactaaacaacacaaatacctaaggtattcgatgttctaaaatgtgtgcttagtgataaccataactcatgcacccagatgaattgctgatggaactaggtactgttcatgtgaaaggtgggaataatataaaaaattgtaaaaattgtaacatgtaggatggatatattagagctagaaacataccattcaagaatgcattggagatggaactcatgtttgcagccagtcaactagaaaggcaaaaacaataattggttacagaaataacctttatatgcaaaatatctcaactaacaaaatggcaactt

SEQ ID NO: 4530 - DNA, 1034 bp, Zea mays
atctccactgaggtttaactgtgtcctggagactcggcctcaatggcttgtcctcgctctcgatgcctccaccaatctcatcctcaacaccggacggcggtcacggcgcacgcgagcagggttgctcacgaatcgcaggatcgcgggcagacggcggaccgaaagaagaatgtcgcacgtggccatgtctcggccgcgccccgctcctccgtcacagcctcatagtcacaggctcccagcctcccgcgtccggagtccggatccggacacgcgctcgaggccacccgcgctgtcccgcctccggcagcgatggcggccgccgcgcgccccgcgtccgcccacctcctcctcctcgccccgctcccttctcctccccgcctttcgcatctcatccacacccgcagactctacgcactcgcccccgcccgccgccctgcggccgcgcgcgcgcgccgcgaaccctctcctccctccgcgccctccccttctgccccggctgactcgctcgattgcgtcggaactggctcggatgtcgagtgcttcgtcgacgccggcgccgaagacgccgctcccctccttcccgcgctctccgcaggcgcgtcaaaggacgatgggaagagcgagggcgacgcggcggtctcggcttcccctgctgggagggagctctgggagtgggcatctctggtgtcgcccttcttcttctggggcacggctatggtggccatgaagggggtcataccccgcacgggtcccttcttcgtcgccgcgatacgcctgctccccgcgggcgcactgctagttgccttcgccgccgcgcgcggcaggaagcagccctccggctgggaggcctggctcgccatcgctgcgttcggactcatcgacgcggcctgcttccaggtgcataatcatggccatgttgagtgttgacagctcaagacgtgagcttttaatgtgatgtctgtgcctctgtgcttcttggaatcaaaaggcggtgccttttcttgcttgctttcgcagggctttctcgcggaggg

SEQ ID NO: 4531 - DNA, 962 bp, Zea mays
ttgttttatatgaagatcctcttttggcatactcttttccaatttcaaactttgcttggatctcaagagctcatcgatttctgctttggtctgatcactgattgcgccacgtgagttcccgctttgttgcatacattcttggaggactgtgacaatcatgtcaccaagctttttataatcacccagtgtcaaaatatctgctaaatctatcagtgttggcgcaactttgtctataacctgcacaaagggaaaaaaaataagtgactaaagctaaagaaaatacagctaacagatagcgtcaattgaattggaattgaataacaaaagaaaatatgtatgcattttagcacaatgctatttgaggaaaccattgcatgattactccttaaacattcaaacatccaattagggagtacaaatttgagcaagcaaaatgtatttcacaagatcttaccttatgacaagtacttgcatcctgcactaaccagatcagacaatcaactgccatgtattgccaatcatctgaagagcgagcaatgttacataaagcatcaatagtaccaggaatgttggcagcatcacctcggccaactttgctctggcagattgttcttagcaaaccaacaccagcaggcgagttctcattcacaagtccaccccacattccaggtaacttgactagaaaatcaggcttgcaaatatcatggaggaattcaggcttaaatgcaaagcagttaatgagttgcaatgaccagcactgtagttgacttgcccattcctcagctttgcgggattccatttccacaccacccatgccacgagtaagaaggccacaatggtagtcaagtcttcgatccacaaactggtaaaagtgagtgtacacaatctcaagggagcttgaagcaagttgagtggcaagttcaagtacttccccattatcggcaactgcaggcatgcaagat

SEQ ID NO: 4532 - DNA, 1006 bp, Zea mays
tcgtccgcgtacgcgaacaccgcctcgcggtcaaccgctgtgagcaggtccttctcgcagaagcgcgcgttgtggagggcccccctggcgttcaggctcagggtcttcctggccacctgcgtcacgcagttcttcacggcgctcctcacgttctcctcgaggtgccgcaggtcgatggcctggcacagcgcgatcaggaacgtggacgtcatgagcttcaggatgtcgatggcctcggcggtcttcctggaggagatgaggcccagggagttcacgtcctggttgtgctgctccgcgctctggacgtggttggtcacggggttgcccaggaactggagctcggagcagtaggaggccatggcgatctcggcgcccttgaagccgtagtccaagctcgggttacgcccaccggacaggttggagggaaggccgttgttgtagtagtcgttcaccagctccgagaactgcgcgaacatgagcttgccgatagcggcgagcgcgagcctggtgttgtccatggacacgccgatgggggtgccctggaagttgccgccgtggagcgccttgccacgggacacatcgatgagcgggttgtcgttgacggagttgatctcgcgctcgatcgacttggtggcgaagcggatgacctcgatctgtgggccgagccactgcggggaggtgcggagcgcgtacctgtcctgcttcggcttcatcagcgggtcgagctcgcccagcttcttggccagcttcatgtacgagctgccttccaagatgtgctccatgatagcggcggcctcgatctgccccgggtggtgcttcagcttgtgggtcaggtggtcggtgtactcgggcttgccgttcatgacctcgcagaacaccgcggagatgacctcggcgaggacggcgagaacgttggcctcgaagagcaccatcgacgcgagccccgagcccacggccgtgccgttgaccatggcgaggccctccttgggctgcaggcatgcaagct

SEQ ID NO: 4533 - DNA, 964 bp, Zea mays
cttgcatgcctgcagggtacggctgttgaaaggatgccacaggttatgtacagaagaccgcacaccaggttgacgccaggaacccatgtgcgcaaaatgtcatgccttgcaccgcaccaggatagatttcatacccatccatatgtcccaacacagagaagcaggagcagagccaccggaagaaccagccagatgatgtatgattggaagcctcccttctgcattggtgctctcacgtgtggctcgagacaactctcctgcttgacatccttgttgccttcctcagaagtcttccgcaacctcagaacagatttggcttctggagaagtcatttcagcaccttcagttcaacaatatatttaactagtttagcaaaaacagaagtcatcacaagagacacaatatacaaaagttccaaagcatattaccatattcagggatgttcttttgctcatcatcatggatattaccaggtagatcatcagcacttccagcgaggtttgtactcgcatcctcttcaatctgacataacataaaaaaggtcagatggtatcatttactaaaatagatcacccagggccaggatcaatgaagatttaagaagaaaacactgcaaaatagtagcagtacactaacagaactagtatctatggaatatcctagataccgatcatcactagcataaaaaacagatgtaaatttagcttctgggtaacaaaaagaacaatcacctccgctttttctgctttgtgctgacttcctggttcgtctataatgcagcttgatgaatcatcagtactaggacgctggcctttgttaaggcctgactgtagccgcagcctttgcatagcagttccctgttgagtgaatgaactctctgagcttgatcttggagcagggtgatggcttctaataacaatccctgttgactcagcctcatccccatcagaagccacatccttct

SEQ ID NO: 4534 - DNA, 961 bp, Zea mays
accaacaacttcaacgagagcaacaagctcggggagggcggattcggcaccgtctactggggccgcacctccaagggcgtcgaggtgcatgcatgcactacatatctgttcatggtcttgtcagtttaattacatgtcgtaagctcgtgattaagattcgtgacaaatgtgtgcggtacggtgttcagatcgcggtgaaacgactgaaggcgatgacggccaaggcggagatggagttcgccatcgaggtggagatcctcggccgcgtccggcacaagaaccttctcagcctccgcggcttctacgccggcggcgacgagcgcctcatcgtctatgactacatgcccaaccacagcctgctcacgcatctccacacccagcgcggcgccccctcctcccagcagcatcagcccctcgactgggcacgccgcgttgccatagccatcggtgccgccgagggcctcgcgtgagtcatcatgcatgcgcgcgcacacacaccgacaccgtgcaagtgcaatcaaagactttccttaagaatccgtgtcttcgttcatttcagctacctgcaccacgaggccaacccgcacatcatacaccgggacatcaaggcgagcaacgtgctgctggacgcggagttcgtccccaaggtcgccgacttcgggttcgccaagctcatacccgacggcgtgtcgcacctgacgacgcgggtgaagggcacgctgggctacctggcgccggagtacgccatgtgggggaaggtctccgagagctgcgacgtctacagcttcggcgtgctcctcctggagctcgtcagcgcgcgccgcccgctcgagaagctccccggcggcgtcaagcgcgagatcgtgcagtgggcggcgccgctggtggaccgccgcaagtgggagcgccttgcggacccgcgccttgccggacgcttcgacttgctgcaggcatgcaagat

SEQ ID NO: 4535 - DNA, 763 bp, Zea mays
tgtagtggcggtaggagggagagagagaggagaggagaggcgtgcagcagccagcagaagcagcattggcgattgatgagtggtgcgagtgcatgcgagtatggaggaaaagctacaaaaattgcgcgtgtgggtgcagcctttgcatgcgcggcctccggccggcctccctgcctgccgcttttgggggtgagcctgatgagctctgacacgagcgtgcgcgcttgtcttgcacggaccgctcgatctcccccccgcaggaacgcagcgggggaagcagggcgcgcgcggtctcccacgggaccaaagcctcctgcgtcatccttgctgcctgccatgccatgtcagctactgctacctatgaccaattttttttttcacttggtcgtctaacctatctatgaccatctcatcttgtctttgttttgtccccttttgtagtttgtcctaacatatatagaggccctaccttgcaacatatatagcggtaggaaaatatatttattggaaatgtgccttgaaacgaaattcctgtctcaaaatatatatgatcattgtaaatatgtatgacattactactcaccagggagatagttattggaagaaattaaagattaagttgaggcgattcgatcagaaatgggattgcttgcagtgctcttgattatttcaagcatgtaattatatatgctatgggtgaaggtttgtagagccagccagtgtcacactaggcgtggtagctggctaattaggtagcaagctc

SEQ ID NO: 4536 - DNA, 1055 bp, Zea mays
cttgcatgcctgcaggtaccgctactaactctgcctgctcgtacataagccctgtttggcacagctgctgcttgttgaaaaagcaggttatctgagaaactggtaaaaagcagcttctgcttgttgactgcttttagttcattctgataagcggctgaattgataagctgctgcagaagctgtcggtttggtagaacttctgcttaaatttatgaagaagctgaaaataagttgtgccaaacagagccatagccttgacggtgtgggtgtggctaagtaggtaaaagccttgcctttgaccctttgtgagcagggcctggcgtacctccccggcggcgtgtgcaggtcgagcatggggcggcaagcgtcgtacgagcaggcggtggcgtggaaggtggtgggcgacgacggcgcgccgcagtgcctggcgctcatgttcgtcaactggaccttcatctgatgctcctccgctcttgacgttcacagcctcgatgcctcactcggcagcgtcagatcggttgccgcctttatcctatcctatccgactacgtattactagttgctttccgttgcacctgtgtgctacaactgctcgagacaatgcccccctgctgtctgtttatggcctaagtctactgtggtggatcgggagttggagaacaatgcccctgctgtctgtttatgtgtgagacttaaccctattactactgctgttatcattgaatctttgtgatcttttgtgtcattgtgtgacctgcaaaggttaatcctaaccacggaaaatttaacattttagcatcatttaggactgatttagtgaccagcggatttagatgagatccctagggtttgaataggaagaggtttctccccagagatcccaccaccaaatcctggtcacaatcatccgttagcgtgagtgacacctggacctgcaactccgatctgacgaggtggacggattccaggcctgtcaagtcaacgctggcgagctagtaataattacactgatcaatggcgctggccggcggccagcgccgcagaggaacagcggc

SEQ ID NO: 4537 - DNA, 973 bp, Zea mays
cagcttgcatgcctgcaggcattctctaaattcaagccatctcgtttcgttgtggaaggtccgttgtttgttaggccagtaggttagccaaatccagcctcggatttgccagttcatagtctgtcctaacgctgcaccacataccttccaccagacactgtctccatactcgtcacgtgcgaaaatgacaccgccctgctttgtgaaggggcggtacgcatttgagtacctgtcacggaaccaggccttcggttggagcagagaaatctttgaaggttttgaggaataaacctccctcccgttgacgccgtcatgaagaaaccagttcaaggttgcagtgttcccatgcacagactgctcgaatttccagggcttcatggctagtgtaaggctttcagttactgacgccttcaggccaaatgcgtttgggggttcaaatgaaccctcaaagcccttctcgatgccgaattcgtgtgtggggttgtcgttggacttgccgacagaaacagagagcacatcagattgttgcgtaggtgtgatttgcagcatcacacgagatgggaagtgcttctcttcggagccatatccacgctccgccataagggtctcggagaccaaagagtccacatcacacctgtgatagctgccaaaagtgagtggtttttttcccccccttttatgttgttttattattagatagtccatgtatatggacaaatgtttttttcaataaagttgatttatatagttaatcatagtatgaatttctaggaaagagaatataaacctgaatccagttcatgttatagaaacacctggttcttacatgttaaaagaactgaccttacgttgtccaccttcacctcgacatcgatccagttatcccttcttgtcgttctataggccagctgaatgacacactcgacttgttgataaatgagtgagaagaggagacgctcatcctgtggtgtct

SEQ ID NO: 4538 - DNA, 981 bp, Zea mays
atgcttgtactgacacttgcggcagcaagcattcatgcactggacatctctccccagggccagggccaggacgccctgccttcccttggccttttcctggccgccctaggcctgggtggcgtgtggccatgcgtgcccacgtttggggccgaccagttcgacgacaccgacggagcggagaaggcgcagaaggagcggtactacaactggtactacttcgccgtcaatggcggctccctcgcgagcacgctcctcgtgtacgttcaggacagctggggctggggctgggggttcgggatacctgcgctgttttcggtggttggaatagctgggtttcttgccagcaccaagctttacaggtaccagaaaccgggagggagcgcactcaccagggtttgccaggttgtggttgccgccgtccggaaggcccatgtggacgtgccgagcgacagctctctcctgtatgaagtgccaggcaaggaggcggcggcggtcgtagggagcaggaagctggtgcacactcaagggctaaggtatggtacttgtagtggttttgagagcttcctaatttttattttgtctactgaatgggaaaacaaaacaaaatgaccgcatttagtaggttctttgatcgggctgccaccttttcctccgtcgacgaagcatcgtctgctgctgctgctgtgcctagtccatggaagctgtgcacggtgacgcaggtggaggagctgaaggtcctggcgaggatgttgcctgtgctgctagctggcgtagtcttcaacatggctgaagccttcttcccgcttttcgtcgaacaaggagaagtcatggacaagaacatacgtgggttctcagttcctccagcctctctgacgaccttcaactgcctctgcatcctcatcctgctggccccctgttacagcagggttgtcaagccagtgctgagcatggccactggtggcctcaaaggaggcggcctgt

SEQ ID NO: 4539 - DNA, 1017 bp, Zea mays
aactgaagttttgctctagttatcagaactctggcggaacagcatcctcagataagaacatgctccaaagtccaaactgggagcactcaaaatcataaactcatccttcagaaaatcaatttttttcagtatgactcttgccccgtaagcgaaattttctacggaagcttcgattttgaatcttacggtgatgcgggagggggaaaaggaagtggtggggacggttgctcacctggcgctgggcacgcggcagggcatctcatcctcgaactcgacggggaggccgaggaagccgtggaagcggtcgaaggtgacgtgggcgacgtggcggacgtcggtgggccagccgatctccatctcctcgagcgccaccgccgcgtcctcctctctcgccggccacccggctccggcggccccgcgctccacccggcacgccaccacggagcgccgcacggccgcgagcagcagctccagaaccgccgcccgccgccgccgctcctcctccccgccacctctgccgccggcggccctcttcgccccgccgccacccttgcaccccgcgctggaaaccaccaccacccccgtcattcccggttcacgactcctccggccgcctcacgcagcaaccgaggaaccaaacgggcatgaacctcgaccccttttttctctgtaagctccgtgagtgcccttcccagctgcttctctctcctcgtcggaaactctctgccgtcacacggacccgagtttactcccccctcggcccctctccttgtggagtccttcccctctctcggtggagttctgggagaaaaccgaagcgaaagcaacgggctttccctcactcctattctgcttcttgaagacagcagcagagctccgtcagcgaggtggagcaattaatgaagaggcggacagaacaagtggactgaaacgcgaatagttttgaacggagagggggcgcgacgcaaaactggccagaccggattcaaactctgacgacccgaccgtggcctttcc

SEQ ID NO: 4540 - DNA, 926 bp, Zea mays
gagccacaagaggaggaggaggagggcgccggggcattagaagcggccaaggacaacaagcgggtacatggtgcacgaccccaggggcagaccaagaatgcagccccctgtttcactcgaggtaacgcaacgctaccacaatatccttttacctggccattgtccgctggtatagcccccgaggctgaatctgctatgcccacatcctgtttgatagaacgccaggaccagcggcatcatcggttgggagctgttcttttccaaggcaggaagggcagggcgcagcggccggcctcgcttgatttcggctgccctggtgttgccagatcctcgacgcattctccggggttcccggccaccggtgtcgcggtggtgaacaaggggatgggcgtatcgtatccgtcacacagtaggccggacgtgctgtctagtccggggacgccgagctgcaatcggcgtgggatggcaggcgttggctaccagcagggtcctcgttcagaaagagtgatcccgccttggaccggccatacaagccattctgggagcggcatggtgttaccttacagcactgggactgggaggacgctgccatcgaaatgggaggatgcagagaggtggatcttcagccccaaccccaaccccaacaatgcactcgggaggtcggtcccgcaactctggcggccaaaatccaaaagtgggcctcttggacctcccggtagattttgtggggcgtactcttgtgtttcgtcgtcggctcagtttcttgacaacggtagagttggaaatctcactgtgaatgcacattacatggctgggatgttgctacctgagcatatttgcgggggtgttatggactgggaaagggatgcaagtggagcatcgggtgaggatagtagcaatggccagggaggctgcaggcatgcaag

SEQ ID NO: 4541 - DNA, 1005 bp, Zea mays
aggaatcgtttagctcatcttcagggatcgtgtgtctgttggtctgcggctactccgttcctaggagtggttgaggacgatacttttttttaataaatagatagataaaccagctactttaatcttgtactctgcgagatttctttattccctcgtctccttgtatacggtatatttttttgtaacaatcattaatggtatatgcttgttaatttgttctttaatagggacttaatatattgctttagctgaacctcatataaattgtgtgattaatagtaccttctcagcctttgtaggtatttatctgagggaagaagaaactatacaattcatcatgtcaggagggtcgtctgaatcttccccgttatctggacaaaatagccttagttctctatcaatttccaaggacaatgaactatcttcagagtctggctgcttgtccattgttgtactaggcgcttctggagaccttgctaagaagaaaactttcccagcgctctttcaccttttccagcaggtaagttaatatcactagcggttttgtacttaatatataaagccttcaaacagagaattacaaacaaatgcatagtttgatccatctcttctttggttataccatgagtgcgcagtataacaaaaaaaatgtagaacatcatagtataatgtatttgcatttctaaattataatatgttcatgtaagtgtcttaggttggcgcatgtacaaacttgtgaatcttactcgctgccttgtttatatctacagggatttctgcaatctggagaagtccatatatttgggtacgcaagatcaaatctttctgatgatggattaagagaacgcattcgtgggtaagatctattttccttgaattggtacaagaattcatgtacagaatcgttacctctgtataatgtgccccttcctgttaactcatatttttgatacgatggaaagattccatgattctttctctatttgaatatataaatggtctatt

SEQ ID NO: 4542 - DNA, 924 bp, Zea mays
tggggcgagcccagaaaaattccactacaactcttctgtgtaatccaagaacagcccacaaaaggactccagccaccctagctgaattggcagctgcccacctctctgagtgccgagcgagaagcctcccctccactccgtatctgttctccttcacgctggtgcggtggtacctcccggcctcaccatcgaccctctgcccctcacccctcgagacctcacctcctcttccacaggcctcactgcttgggctagctgacgctatggctaggcagtgggcagtgggcacactgcacagatccacctgcaccaacaccattgcttgcttgcttctgctattcctgcatctgcaactgttccagcatccactgccgccacagtaacttggttcacaaccgagaaccaaacacccaagtcgaatcgacagggaacacagaaaagcatgtttgccgcatcacacaagtaagagggctactatctcaggattttcaatattttttcattatttgccaaatgctgatgcaagacaacctgctgtgttccaatcctgtcccaggttccgctttcacggtcctccttttaacacaaatcagttctatttgcattgccacttattgtagaggataggaagcttgttggacatttgtaattctgatgttggtaagttttggaacctgtctagagacacatgatttacctaatgcaaaggacaagttgctgactgcaccattgggaaaaaaacttctggtaagtgtccctgcttgaagggtaggactggtgcagtcgtgagagaaatcttgcctcagttcctagatccctgtatgtacaaagctccggcactgggtatgcacccttttttaagtggccctgcttagtttagacttaataactgcttaaagttgcatgtagcattatgattttctg

SEQ ID NO: 4543 - DNA, 934 bp, Zea mays
gaaagccttccagcatctcccaaagttgaaggtaatcaaccagaacgccaacagtgagggcccctttgatatcctcaatccatctcttattctgaagagcctcttgaactgtccttttttggatattctgtttggaatagcagcgaacagcattgggtccatatcccctagtctatgcccatgcagccacttgtcggtccaaaaaagggtagatgatccattaccgacctcagatatcagcaccatattgaagaaatcccgggttttgctaggaacctgagtgggaagcgatgaccaaggaaaatctgggtcagttttttttaagccatagccaacgcatacgtaatgcccaacataattcctttagattggaaatgcccaatccaccaagatgtagaggtctacacacccttgcccaggtgacgagacaatgccctcctttagcgtatttactacctctccaaagaaaacctctgcggatcttatcaatggccttgagagtacattgtggaacatcaattgccattgccagcataccagtgaggacatattggacttgcactctccttcaagctctagtcatcaaatctgccttccaacctggaagttggtctgctatcctgtgtcctgtccacaattggttgagcttgctcctttgaaattttacggagagaaagagacaggcccaaatatcggcaaggaaaggaagaaaactcgcaaggcaacaaatcctgggccacagccacatcatctttagagcattggataggaaacacactagatttctggttaatgttatgcagtcttgaagctggtccaaataaacttagaatttccaaggtagcagcaatatcagttcttgagggatgcaagaagagagccacatcgtcggcataaatagagatctggttgtacttatgtctgtttgatagca

SEQ ID NO: 4544 - DNA, 1029 bp, Zea mays
aaatccatgaaaggaccagtgcatgagcagtatgacaacatgaagcatcattgtgacttatgacacataaggttttgatcccagcaaaatgcatactaacaacagccagcactagagctctgttttgtgccagcgagcaagtaaaattgtagtggccgaagttaatgacagtccaccaggagaaatcatggaatgtatattaccgttacactgccattttcatctctagcttctggtgaggatcatagccaaccagcttgaagtctgacgccatgaaagaatctatatcctttttcgaaggatttatctttaaaatctgcacataagacccacatacaacttagaagatgcatgggcacagaaagtaaacacacacacacacacacacacacacacaaaaaaaaacatcaaagcatcaagttcatatatgcagatttcatatttttcgtaaaaatggttggctcactggaaatggtttaggcatcttctgaatctgttcctccagagctcgaacgtgatttctatagacatgagcatcccctataacatggacaaaatctcctggagaaagatcttgcaacattaagacacaaagggttagagttggaaaaaaaaagactactagcttttattagttggatacaagaaacatcaaaagatagaaagggacaacaaaaaagatggcataaaaacatccttgcagctaatcaaatgttcataacttgttacaaaaatatctagaatatagccccaagacttgtgtatgtggtacgacaaacagcatggaagatttgttgctcacataacaagaaaatcaaagtgcagaataaatggttccaaatgaaactagtctaaactagaacacaaatacagtacatgtacaaccaagaaggtttctattaaggtgcacaataaacgttgcactgagtagaaatattacagtgatgcatataagaacctaccacaaacttgagcaatcatatatgtcaaaagagaatatgatgcgatgttgaatggaacaccaagccc

SEQ ID NO: 4545 - DNA, 1014 bp, Zea mays
ctgctcacctcctcccgtcctctccactttctctctctctctgttgctgttgctggcgaggagggagactacagtcaggcgtcagcatgtgccgccgcacgtgtggcggcaggcaagcagaggcgagacgagaggcggatccccggccgacccgaacccggggcggcgacaaggccctgcggtcgccgtcctccgcgatctccatcgggtcaaaaagatggcttcggccctctcccatcgaccccccatgttggatttgatggatgtgccgcaacaacagcacagcgcacagcacagaggcgggcttttgcaccccccgtcctaccacagatcatgccagagctccctaccactagctagctagctccatggatggatccatccatgcatgccacggaccggcagggcggcaggcgccggcggcaacccatcgcgtatccgggggctgctgtgctgggtgaagaatgggcaccgccatgtcctacgaatccatcgaaatctctcctacagtccccgtaatcacatccacacagtcctcccatccccccccccccttcgcagtcgcagctagcacacacaagacaagacacacaacgcaacgaggatacgacaaaaggaataaataatgacaccagctttgatggagtgtttagcagcagcagtatacaactagctagctagtcactcagtaaacttgagtgtcagtaaaagagtaaaaagtgaaagctggggtggggtggggatgcgggaacagagcaggagcagaggtgtgcacgagtgggcagaggacagaggaggggggatccagtggaatcagaccagcccggccgtgagggtagggccaaggatttatttatgtgctgccgccaacactcacatgcacccagtaggtgaggtcaggaaggaggagccactcactcattcttggggtcttggccagccagccagcaggggcaggaggggcctggcctgggtcactcacttctctctctccctgccctgctgctgcaggca

SEQ ID NO: 4546 - DNA, 970 bp, Zea mays
tggaagaaaacgccgaaggccgggtgggttaccaaactctatctaggattattgtgtttctttctctctctctctctctcttttgccaacaccagttccatgatcatgtttcagtgagtgctgaaacatgactaaggcatgactaaattcccaaaaaaaaaaacttttatttttttgacaaaaaggttgcggtctatgatcttctgaggaaatggatggacaactgctaccgtggcgtaccggtcggtgggatagggtcagttccctcagccccctccctcctgttctgtctgtgtatagtatactaaaccaatcctagagagtagagaagctaaatgctatatctttcatcagttcaggaagcatagggaggagctacagagggtacttccagcagttccagatattccccgtgaccaacgaagagaaacctgtcctagcaaaccagttctcggtagctccctccgtctccattcacggtttctttcttctgcacgcctgcactcgctcaaactgccagcagcttctgaactgacagcagccattgttttttctcacaccctaggcatttgtttcgcgcccgaacgggaacaagtactccacggtgctgtcggcgccaaccgctgaccttctcaagtgagcaccggaactcttgaccactgtatgcacctgatcagtaggcaggacgtgtgatggaaaactgaattcgcaggggagtcggcaaagccggcattggatcttgggactggaggttgaaggaggacaggtgcacttaccacgccctgttcccaaggtcatggacggtatatgatggtgagttagcggcagcacttggactttttaacaaaggctccttccaagattatataatccagcttacggattatataataacctatgttgtttgtttgtctcttaacttaatttaagctggatcatgtcggttcgatgaaggcattttggaaatcac

SEQ ID NO: 4547 - DNA, 1059 bp, Zea mays
ccgccggcagctgccgagtcgttcttagaaatctcctgctcttgctcgccagcttcatcagcagcaggcgcaggactctcgggcggtgctggctcttgttcgacggccgcagcggaaggtgcacgtgccggctcttgctcgccgcctgcgcccacggatgcggggagcacggccgtttccctgacgaattcgggcttggacagcgtgctcggtttggatcttgtgtattcgtcaacgaacagcatgaactcgtcaggcatcatggcgccgctccacttcgctagcaactgccccgtgatggggtcaatgacgagcagggccggcagctgatcctcctcgagcctgtagaacgcagccactttctcgcactcgtccgggagcgagtagctgcccctgctcatgccccccttttcaagggagaacacaaagctgtcctggatcacccccctgaccgtctcgtccgcccaaaggtcccggttctgcatctgcgacgggagttcaccggcgccgctgcatgtctgcaagttgaccagcaggaaccggtcctccctcgccgcgtgcaccttggcgccgtggaagtacccaacgtacctcagctcgtacggaggcgggtagtaggtatcaacttcttcgtcctcgccgtagcccgtgttgtcgtagtcttcgtcattgtatgcaccatgttcctcccagtcggtggtgcttccgtcgccgtaccccgtattgtcgtaatgttcgtcgtcgttgtattcaccatgttcgtgttcctgccagttgctgctgccgtcgccgtagcccgtattgttgtcgtagtattcgccattgtattcaccatcttcctgccactgccagtcggcggtgctgccgtcgtctctggcaccgtcgggctctgttccccacccggtggctcctatttcgccttctctggcagactctgcttctccccatccggtggctactatgtcgcctggctctgctccccacccggtggcttctgtttcgccttctcttacaccatcgggatctgctcctccccacccggggctacgcaggcagcaa

SEQ ID NO: 4548 - DNA, 896 bp, Zea mays
gatttgcgaagaaatcccatcccattcgttttcgaaacgttgtgcatcttttcgctccccgggtctggggtttggagtttcgctgcgcattacgtttcagctagattttcctggtagacaagcgaagcgcgcgcgggaacattcggatgggcatattcctggacatccttcccaatatgggagctctttactagtgtatgcaacttttggcgccgctgtaaattttagtggcatgagtacctacctacccactgagttcgcgctaacgtctgtgagttcttgggggtgtacaagggcgggaaacgggtgaaatgcgcttgcatttctatgtaatgctaatgtgctgcgcgttcagcttcgtgatgcgattagtgcacgaattcagctgttctttgctgatttgtgtcttctccttggtgacgtgcaggcatttggtgtgggaggacggttcctgcggccacgcctcatgctatgccggatctgatgctcctgaagctgggtgtgagccgggcaccagtgtgtgcacgcttgttgggaaggttatggcctcacaaattcatgttattggtgaagggtaagcaggaattttgttttgcttgttacgatgttcatagctaataagtgcttcggcgttgttggagaagttcaaactttgctgatgtatgtatgtatgtatgctgtgcttgtattcttcagtaccattggccgtgctgctttcactggaaatcatcaatggattgtccatgatcctgccactgccagtgatcacaatctcagaccggaggtgcaattccttctcccttcccttgtgaactgatataaatgtagcccaatttaagttttctgtggtccattttgctgtcaccttatttaaagtctggtgccaagggatttat

SEQ ID NO: 4549 - DNA, 863 bp, Zea mays
tccctgcagctctcggagagacgcgaggggtgcaggcgcaaaactacgcgtgtggtgtgagaagcggtaactcgaggccgcgccgatggagggatcccacgattcaccgtggagtgttgagagagacagagacgtccggctccggccgcgaccgcgagcttatcgcgctggatgcgacgtgaggaatcggcaacgcagcgcgcgcccaccgcaccccaggcgccgcgtggtttgggggcgtggtctctctctctctctctcctcccatcctgcggtccagctcgcagattccattcgccccgctcgccgccaccacccgtctatacatatgccagggcgggcgcacctccggaatccagatcccctcacagtcatcctcaacccaccccacccaccgcctccgcctctctctctctctttcgtttgttcgtctcggcttccggtcgccgattcttctctgcgcaaaagattcctggtggtggtgcccgtaccttgctccacgcctcgctcgcgtcgcgtgcatggggctggacgtcggcggcatcgggatgggcctggatctgggtctggacctcgggctgttcgccgcgcggagcgccggagggatggcggccgcggccaagggtgcgccggcggagatcgagtcctgcatcaggagcctcgaggaggagcgccggaagatcgaggtgttcaggcgcgagctcccgctctgcgtgcgtctcctcgccgatggtgagaagtggtctcctgctgtcctttcatgtacttcttcctatcctacgtatatacgcgcgcgcgcgcgttgttgtggtctctcttctcggcccctggttcgctgacgcggtggtgcgtgcgtgcgtcgc

SEQ ID NO: 4550 - DNA, 540 bp, Zea mays
aaatcatcagttatattgggcctgtctctcacggtaccacttatggtggcttgcctctcatttgctgttcccatatggatacgcaatggttacagtttctggattcctggaagggagtttgcaaatcgtgaaaatgttagtcaagctccaggagagaaagaggtttgttgttcagttctttataagattgcaactaccaacttggaattttctggtcacatgcataagtgtaacgttgatctattcaatctctttgtttagtcagaaggagataccgagatactgaattgcgagtttgcgacccagtctaatgttgaaaactggatttacctgaatatgtcaatttcatgtcaatcttttccatatgtgctcgtcatatttgcatggccatgtcatgtttttagcacatcaaataaactgcctaatttgtagcacagattttactaagattattgtagataatttagaaccgaactatccaatattggcaattaagaaaagacttattagtgttgcttaccgttttctttttctggtttc

SEQ ID NO: 4551 - DNA, 955 bp, Zea mays
atcctcttcatgcatggcttcgtcaagctccaccgcaccaaaaaggtaaatctggcacagcgaacaaaccaaaacctccattagaccccgtttacgtcttccctccgccgctgtgctcgtaacgcacacggagctgtgtttctgcgagggggcgcttcggccaggccaagatcatggagcgcctggtggggcaagtggacctgctgccgccgcggcgttccacgctgcaccgcgcgtcgctgccttccgcggccgccatcaccgcggcgcaggctagggacgacgtcgaggcgatcgggtgggccgagtgccccatcggccgcgtcgccgcgttcgccgcgccgagtgccgacgcgccggagcccgtggagcgcgtgcctcagcctgccgacttcgtcctcaccgggcgccgcccgcggtccaagcggacgcgcggctctgcgtacgggccaagtgacgtcgccgccgcgtccaagaagctgaaggctggcgcgcctcagaaacatgcgaacgtgatcgtcaaggaggaggagaatgatcacgagctggtgtcaccgcctcctccgccaccgccacaggatgtggcgctgcctccaccgcgcaagcttcaacctacgttggcgaggatccccgcgcctccagccatgggcacgcccatggtgctgcctcatccttcgcatcagctgttctggggcgtccctttgccctcacggccaaccgctcagccgtgccctgcaacgccaccgccgggatggagcgtacctacgccgccgccgtcttacccagcgccattctgtggcgcgccagtaatgctgccgccactgccacggcatgtggcctggcgatcaccacctcccctcctgctgaaacggccaccaccgcatttgcaggggaagccgctgcccgcgctgcttccaagtccaacaccaccacctcctgatccaccggtcatgca

SEQ ID NO: 4552 - DNA, 1034 bp, Zea mays
ttggttggccgttgtagttcgacgtcggtgcgtagaggctcccccagactgtctgtgaacatgtccgtctgttgctgctgggacatgtcacacagcggcacaacaacctgaggaactgtcgctggtactcctcaacagagccggttcggtggagttcctttagatcggccatgccattagtgcgtaggggaggcccaaaccacgtgtggacaaattcagagaagcgtgtccacgtgagaacaccaccagtgtcgcgttcgagggtgtagaaccattttgctgtgacgccctcgtgcagggacgcctgccacaccttatcatattcccatgtcctcatgcctctgaaataggtgtcacatttgctgagccatggcaagggatcggactcaccatcataatgtgggaagttgatcttgggtcttgggggcgtcatcctccagacgttcccggtggcatgaagtctgttgttgatgccgctaccacccatattggcatcacggttcacggccttggtgacaagcgcctgcgcgtcgggggtggacaacctcgttctgggccgatgccgtggtgtcctgtggtgcggctgttgtaatccccactgaactgtcctccaaccttgctatgcgctggtcatgtgagtccatctgggaattcacaatggtgagctgggctaagattctgtccagcttagctgagtcgcacaaggtgctaggatcattagtggcgccagacataatggtcgatgtgtcgtctgtctccgataccaaattgatatggtgtggcctctttggggatctcagaggggagtggaggagtatatgtgattgaagaagggaacatagtgggtatgggggtcggctgggaaggttcccagggtcaccggagttggactgggagtcagccacgattgccagaggagccacccagcaggtatgacttctttgataattcccctagtacatcctaccgccctctttatagatcagaggagcttgatattctcaactaactaatatgcaatctaaagagataag

SEQ ID NO: 4553 - DNA, 975 bp, Zea mays
gccctcctccaagtacacaaaagtcttgtctttttcattgtaattagctatcggcacaattgcccgaatacggaatccacaaccacacctctttgactggcatggctctcgctttagaacccgcgccttcttaccctcggaattattggctgaggatgcagcactcccactacttgaagtgggctctccagcacggtggcatgcataatctttcacctcagccatgaagggcttataccgtatatacttctgccttatacaaagtacaaccttgtgcttggcagccaattgctgtaacctccaaggcacatctcgagcaggcacatccaatgtctcagtatatacaaacctgcggcgccgcttcccacgtttaggtgatgaggtagcgggatcaggttggctagcaggcgcagctttacaaacggggcatgcagcgacacatgcacggataaatgattctggaataccgtagattttggcccccacagtccaagactgcttgatgcggtcgacggtgtccttgaacgcgaggtgccggagcaggtcggggtcggcgtgcgcctccgagactatgtccctccacatgccgacgtgggagacgcgctgcgcggtgttggacttgaagtgaaggtgccggccgtcggccgaagcggcgagcttgtcctggatgcgcttccacgcggtgaggtaggcagtgtcctcgttccgatccttccagaccgcccgccaggaggcgagcacggagagcgacgtggcgccgcggacctcgtcggaagatgcggagcggcctgctcggatgcagcgtaccatgagcccgtaggaggcggcgctgaaggtgtagaactgcgacgagacgtgcgggaccgggtcgatagacggcagcaacgcgaagggggcggaggcgcccaccaggctagggttctgaccggggatttgaatcagcgcctcgtcgtcggtgtcggcgtggaggaggta

SEQ ID NO: 4554 - DNA, 998 bp, Zea mays
tgcatgcctgcaggacctcttgtgtcggcatcggcgcagcaaagagccaaaaaggagaggtgtgctgctacacggctgacggcttattaagcatggatgactgcctgcctgcctgccttgagaatccatataatgcaacggaacggaagcgcagagtggatcactcactacaggcgcgtacgtgctcatgtgagcaacagagcgtcacaggtttcctgtgatcgatcccatttggtcttagtctggtctggtctggtctctgtttgtttacactgtctcgtcactgatcctgggcgtgtctgcatactcaccggcacgacctttatcgatccgtcatggacaccggacgacggcgcgcaaagaaggacgacgctgccgcggcgctggtggcgctggggtcttcggtgttcgtgcacgcggacaccgtcgacgtggccctgatggtgctcggtctggtcggcgcgataggcgacggcatggccacgccgctgcggctgctcgtcgccagccgcatcgccaacgacctcggcagcggccccgaccacctccaccacttcacctccaggatcaacgcggtaggcccgccgtcgttcactactgttccaatccgccaaaatctctcttcgtcttggcttgtatcagtaatgcatgctgggctatccggaccttgaaaagaaagcttccagtccggcatctcatgtcaatttcatccctgacgtgaacgaatgaactcatgtgttgatcctcttccagaacgtgatcaggatcatcctcatagcgtgcgcctcctgggtaatggcgttcctaggtatggtccatggccacagctcggattctgaacaatagatgcaacgatgtctgtaccatgcatgtgtgtccatcagttgttcatttgctgtgtctgacacgaacgtgcgtgcgtgcagagggctactgctgggcacggacggcggagcggcaggcgtcgcggatgcgggcgcggtacctgcaggcatgca

SEQ ID NO: 4555 - DNA, 982 bp, Zea mays
accacgggcgagggaacaggagcgggagcttgccgcccgccgtctagcaccgccggtgacctccgcacatatacatcgtgtccttctccctctatcgcccgcgcgctgggatggttgcggtacgagtagtcgacggcgagcaggtgctgctcgtggcgatgatggtagtaacggtcacaggcgccgaggccatcgcagtagtaaccgccctttgctgacgacgatggcaaagcagctggcacgtgcaggtggaccacgaaatgcttcgcctcgccggcgtacaggacgccgcccacggagacctcgcaggaggttccgccgcagctgacgctgctgtcgtagccaccggcgtcgacgcggtcgatgcgcaccccgttcagctcgtcggccttgaggacgacgcgcgtctcgacggcagcgatggtgctgagcccgccgaggcacacggcgagggcgccggcgacatcgccgatgctgtcgtcgtcgacgaaggagtaggtgccgtgagactcttgggccatgtggagcaggacctcgggatcgtgcgccgcgccgaggccgaaggcgtggacggggtacctgccgagagcgcgtcggatcacctctcggcgccgctcgctcagcgcggacacggtcgtgccctcgccgtcggtgaggaggatgatgaaccctaggcggtcccggccgtctcccacccgctcgtccaggatgttcaccgcctcctcgaaggccgggacaagggcagtgccgctgccggcgcgggcctcgagccgatccacgcttcttattgcgtttctcctgccgtcggcggtcatgtatagcaagccggagctaagttctctaacgggtcggtcgctgaacgctacgatggagaggcggtctccatcttcgagtttgtcaaccatgaacttggcggccgtcctcagcaggtccagcctcgacgttgtcgtcctcctctccggtggcactgcaggcatgcaag

SEQ ID NO: 4556 - DNA, 1023 bp, Zea mays
tcaggacccctgcctttgcctatacaaatagaaagattagcatagcattcttgtctggctttcaatcaaatgaatcttatcagttgtgttctgctattctagctttcaatgttgtgatgtgttgactgtcgagtatttatttagcagcgatatcagttacgttctattgatttagcttcaaatctagtcccagctcacaagtctgtagtacaaaataaaatcgtgtataaaaaattgtataatcagattcgggattaaaacttcttcacttgagtaccaatggtatttagatttgggaaaatatattatgtggcaatggtaaaatctggattaccacaatttgccagtgttggaccaattgttctttgcatacctgggttctctagggatgtgtttttccctatatatgttccaattttgccttgaggtatcaagggaaaaacggccttctgggcgatagaattttcaagatacattggtttgctggtgactacttttagaaggttatacccatagcatatatacatatctggaaatggatctatcttgtcccacgtttgccctgagtctaaataccattagctacattcacttgataatcaccatatttttggtctgttgataaatagcagacactacgttgatggcatttgtgtaatattttttttttgtgtttcttaagatggaaatcatttgttgtgtttgggttttagttctgttgaaatgtttattgcccattagttctcttctctcgctttcagtatttctatgggaggtatgcttgtttatggtttcactccattgccttccaagtgaaatgacagctgttcttcatgcagcttgtaacaaagggcatcatggaccggtccactgtgtccggtttgcacctggtggtgaatcatacgcatcgggttcagaagatggcaccattaggatctggcagcttagcccagttaatgctgatgacgacgaggcggccaatgcaaatggcaaggcaaatgctgcaggtcgaactctaaagga

SEQ ID NO: 4557 - DNA, 860 bp, Zea mays
aggcttctcgactagcaagggcatatgaacgtcgctctcaggtcattgatagtgctcaacagccccagcagactggcagggcccccagaccatctggtcggccaccggtgctcacacacatgaccgacaatgctgccaagaatacaccccagcagccaccaacacaatcaccagtcccgttcaagcgcctcacccccgccgagatggcggaacgacgtaaacaagggctatgttacaattgtgacgagccctatgtacgaggccaccgctgtcccaggctattctatctggaggtcacagactttgctgatgatgagatcaagggtgacacagatgatgaccaggaagagcaggacccagtggtttccctacatgcaataactgggattagaagggaggacaccatgcagctgcgggtagtcctcaacggtcaggagctgctggccctacttgacacgggttcaacacataacttcatcaactgcaaggcagcacaacagtgtggggttactttggaacccacaccaggtcgccatgtcaaggtggcaaatggagacccagttttctgccagggagtaactcgtcgcgcagccattgacatcaacaaggagaagttcaccattgaggcatatgcaattcccttggatacatttgagatcattctagggacagcattcctgagaacattgggaccagtattatgggatctccaggacctttgcatggccttctggcatgaaggtcggcgcatactgtggaagggtttggggtccgtccgaacagacaccactacaccaaccacatgtagcatcagcactgaacccaagcacatgatggatcacttgctgcaggcatgcaaa

SEQ ID NO: 4558 - DNA, 912 bp, Zea mays
cgaaagccaacaaattatatctggtgtttactgcaaccaagtgacgaatatcattcagtttctcaaaaaggggcgtacccagtgacgtaggcttcccgcactgtgcgggggtctaggaaagggtatctttaagcaccaagccttacccgcataatatgcagaggctagggctcgaacccgggaccttccggttacagacggtaggctctaccgctgcaccaggcccgcccttttgctgataatttatatgtatcgattgccgtctttcttatgcatctatggatctaaccttcaatgtgccttacctttcatgctgccctaatttccatggtttgttcatagaaataagaagcaccaactaacatagttcagtaagttctattaaactagccaatttcccttttagtttataagaccaggagaggtaaatgttgtggaaagaatgacaattatacttaccatctaggatactgtggtagcgaagaaggttcgtgataatggaaccaggatgaagagaatttgcagttatgttgacattatcttcctgttagacaaaatattgtatcatagatagagagaaatagttatagaacaccttaaaaaactggaaactgaatggtaactgtaaagagaacatataatcagcaaaatctgaaacattataatttttgtgattggatgatgagtgttccttgaatttgttacaccaagattagcaataaatgcactcaaacttccatgtccaagttggaacaactcactgtcactgcccaatgatctttatttaccaaaagctacaatttttaaaattcagatgcaaacatctttaaaaaataatgcaagtgatgttggtcacaaacagttgcaatgcataccaaggaccctgacatgcttgccgaacaatccagagct

SEQ ID NO: 4559 - DNA, 897 bp, Zea mays
tagcggttttgactgaattggctttggtttacacaaattagatactggttaccattatgggttgatttgggttgggccagaggtttagacaatgatgaaccgccatccgctgcaagaacttagttatttgtgtagcaacagcagtcttcttagtggcagcggcagcagcagtttggcatagtgttcctgtgtagcagtccaaaggttgaagatgaccaaggatgggttagccagtttgatttattctaaacagagagagccaaccctcttccaaggatgcggtttttgactctggaacgagtaaacccattgcaaaccgttaccctgatttgatctgtggattggtttgtggggtgaaccggtttgacccacccagtgaacagggttaatttttgtactcagtaaacccattgcaaaccgttaccctgatttgatctgtggattggtttgtgggtgaactggttttgacccaaccagtaaacagggctaatttctgtactcaattgtggttttgttgatttctataagctataactgaatatgtatttcccctatcacttgaattgaaataaaagaagagcttaaacaccaacttacccagggtggcaatcgctgaccttccacttccaatgtcccgcggcaacatcaagtgcaagcacatctccactgcctgtaccaagcacaatcaatgagctcccagccttcctcttcttctgctaaggaaaaaaaatgtaagcaggtgacaagggtgcatcccaacataacaagctggcggtggtcgggcggattcgctcaccttactggaaagttgtacccacttcatgcaggtgtaatcgagggcgaggtggccgcgcttcgactcagcgaccgcgaccgctgcctctgcagggagcgatc

SEQ ID NO: 4560 - DNA, 957 bp, Zea mays
atgaactgtactttgcaaggtccaacggctctgaataagagttgctgatgccaacatgttgttctacttgtggcacctcttgattgttttggtttgaagtagctgaagcagtgttatccttgtctgctttccgcacttcttcaacttgtggtacctctggattattttggtttgaagtagctaaagcagtgttatcctcatctgctgtcacttcttctgaagcagcagcaacagaaatgggatgatccaacattcctacctcaagctctgcactatcaccagattcaaagtcaccaccttcagctcctgaacttgttgtcagttgggacttttctcctgaagactctccttctgaatgtgatgacccagaaacagaaccaagatcaagcttctcctcattttttctgcatccatttgagtaattgccttcatcaactactacagattttgcatctgcgctctcaagatcttcaatgtcctcatcatccacatcactgtcactgtcactatcactttcatcttcttctactttgttctttcctaacctgcataatcaaaataattcagacgcctcataacacaaactagaatagcaaacattaagacgttatgaagggatatatttgattcagttagctacctaaaaacaaaacagacttgcacagaactttcattacccccaaccccaaccatcacataacttaaatttgctgcttagggcttaccagaacaactatcagaattgacatgttgatttgagaaaatcaaacatgaaatgcctcttacatgcctacattacttgcccgaatttgtaggtattagagagaggacgagagtttcatggagatggaacaagaatatgaccatgttctaatatgctaatacttagaacaatattaaatggttatatagttcacatagcacatatgatcacaacaacatggaactgtcaagtgt

SEQ ID NO: 4561 - DNA, 873 bp, Zea mays
aggccgacggcacgatcacaagtccgggaccagggcagggcaggcacacgccacttccttcgtccgttcccgtgctgacggacgacgcgcgcgcgccacgtacaggcgcctgctactgctactgtgtctgtgcgcgcacatgcatcacccaccgcacgagctttggccgcctcacgtcgcgcaggaggccgtgcgttcatcttcgttaacgctaagctaactgtgtgggtcgtcatgaaccgaggcgcgcaggcatcatgcgcccacgtttctgcgcgcacacgcgcagcgcagcgcagggtgccatcattactgcggccggaggtacgtactacgtgggtgggcggcggtggcccggccggtggtggcatggcatgccgctgtgtccgtgtgctaagcttcctccctcccttggacgattcgattccgcagggccaccaacgtctctgatgagtgtctactacatactcctaaactctgcaaaacgtccccgtcctggcggtccaaatatttccattcccgccgctgcattgcccgctgcctgtctggcgtctgaggcaacaggggatgacacgcatggatcgcaggtcgcggccgcagtcgatcgaccgacggatcgactcagcaaaccagaaacaggtcaggcaaggcagctacgcgcgcacggcgagggcggaaggctggcaacaggcagcagcccggtccaagaaacaaagccctttcacatcggcgtgcacgccgccgatccactgttggagcgccctgcatctatccgtctcaggacgcaggcgtcgcggccggctgctttctcgctctcgggttgccttgcctcccagtcccagacccacctgctttgcccttcctcgttgcctt

SEQ ID NO: 4562 - DNA, 1007 bp, Zea mays
ctcatcagtaatgaatgtgcatgagaaaaataagcttttggatctgatatagacctagatgcctatcatagtttttttatatatgataccagaaagcacctgaataacaaaatctgaaggaggttgtccaggaccagaaagctttggtcggatcccagaataaccaggttccaaagacccatccttgagatttggaaaatacttccttaccacagggtaaaatacagaacagcggttgggatttactgagtaatcaaacctgatgaagataagactctaaagttacaaacctcatgataattactaaaatactctagattccataaatcacgctgatagtaagaatagctagaagcatggtacagcactgaattgcattttcttgggaaaacaaagttcagttatgtgacatccagatatctataacatatcttatcatcaacacaactaacttactaagttgctacagattctatcataaacaaaataagactagcatcgggatgccagttaaaaaaaagatggtatctagaataacttattacatcctttggtcatgaaccaagaagttaaatgttccaaaacacaacatgaaaatttcagccccagaaaaaaggaagggaaacactgttcgattgagaggggtctcttgtttaaaaaagcgacatattttgatgtttaaaaaacagtggcatattttgataactgaatgtacacatgtttgcaatggcttacttgttcagaaaacatgacacatggtccttcgcaccatcagatatccattcaacatctggaccaaatctaactaggccattcaaatctaaagtgacatgaactcctatgccaccatcctctggtagaggatatattaaccgactgaaaggactcttggtttgagagagggtgaagtaacacccacgcgcatagtgaggagtgggcacaaatgcctggtcaaggccatgaaattgtttggcaagtagaactgcactcagacctgcaggcatgca

SEQ ID NO: 4563 - DNA, 906 bp, Zea mays
agacaacagatcgatcgtccaatggcgatcggcgggtcggaggccggcgggggaggcgcggggagcatgaggagcgtgctggtgacgggcggcgcggggttcatcggcacgcacacggtgctgcgcctgctggagcagggctacatcgtcaccgtcgtcgacaacttccacaactccgtccccgaggcgctcgaccgcgtccgcctcatcgccggccccgcgctctccacccgcctcgacttcatccgcgtaagtaccgaagccgcggtgcgggtccgttcagcatgagcctttgtttgcctttgccccgcgccacgctgattgaattggtctctcgatcgcgctgtgctgcatgcccgtcgcgtggggtttttcagggggacctgaggaacaccgatgacttggagaaggtgttcgctgccaggaggtacggtgctagatcgatccatccatgaagctgcacgcgctttcaaaatcgacctctctcctctgaagccctttcagtgcttcaatttctgtcttccttcaaatgacgtgagtctgactctcacgccacacatgcgctgctgtcctccatttccaggtacgacgccgtcatccacttcgctgggctgaaggccgtgggggagagcgtcgcgcacccggagatgtactacgagaacaacctcatcggcaccatcaacctctacaagagcatgaaggagcacggctgcaagaaggtactattaatgctggatcgcctccgataatcctgcctgcgcgcgagcgttgcatcgccacggcgcgcggtggccgccacgatctgactgacactgacgccgcgagcgcgcgtgtgcagctggttttctcgtcatccgccaccgtgtacggctggccggaggtgatcccatgcgtcgaggactccaa

SEQ ID NO: 4564 - DNA, 883 bp, Zea mays
atcttgcatgcctgcagaatgaattgcacagcaggtagttaggaacttatgatgacaagtagaacagctcacatcttaattatgggaaagtatagatgcatgtattgactgaaaagtgcttgaaatggaaacaaagaagattagatacataattaacggttcttagaccttccgtaagatatagtatattgcactttccatattctcgtcaaaatccagtatgacatttttattcaaaccttggtataatcaaaccaaactaattgcatgttgtcattggtgaatcaagatgcaacaaaaatgaaggtggcataccaatacagccttggagcgccgtgctcgagcacctccccacctgagaatatccagtagaatccaatgatccaccacagaaatgatatcaacgtgttcatcgtctcgcaacgacctgtatagctgtgagagtaatccaaatatcgaagaacagttaaaaaagtcaacacacacccacaagcgagcacggtttcagagtccattgcataaaccctaatcctaatcccagcacatcacagaacataagatgctgaggtttagatcgtgtcccacctgctcctcccttccgccctttcgtcatcttcgctgtcggcgtccgagctgtctgtcccagcgccggcagactcgacgtcagacgccgatctccgcgcgcgccgcgtctcgcggcgggtgtcggcgcagacgagcccgacgtggaccaggcactgggcggcgtacccgacgacccacaggcggagcggcttgacggggctctcctcggcagaggacgagagcacggcggcggcggccgcggcgaaggcgacgttccaggcgatgtcgagcgcgaggacggggcgggagtgcgcccagt

SEQ ID NO: 4565 - DNA, 1015 bp, Zea mays
tacagaagaataatcggtggacttcgttatctcttacacataaggtcttatctcacattcggtgtaggcttcttgagccggttcatggagtgtccaaagaccgaccatcaagctgcactaaaacatctcctacgctatgtcacggtgacagcagattacggactacagtacaagtggggagaagggagtctaaagctagtcgagtactcggacaatgacttggccggggacgtcgacgatcgtctcagcactactggtgccattttcttccacgggaggagcccggtctcatggcagtcacaaaggcagaaggctgtggctaaatcatcctgtgaggcgaagtacatggcgagcgttgtagcagctgcttaggtgatgtggctacatagtttgttggaagaaagaggtgctaggttttcctgctcagccaacgacgattcggatggacaacatggcggcaatcgctctcgcgaagaatccagtccatcatgaacgcagtaagcacattgacatcaagttcaatttcaccagagagtgtgtggagtgtggcgacatcgagctagagcagatcaggattgcttatcaactggctgatgcactcaccaaggcacttgggaagaagcagctccagaagatccgtagattgataggagttatgtaaatcacatgatcaggagagtagaagtagggggagattgttagatacttccactctctgctcgtttgtcttggcgggagttttttttttcggtctattgagtcaataagggcgcgagccgaggcctgtcctgagccacgccatacgacgcgacgcgatcgccgcagcgcaacgtgcggagtgcgcccggcttgactagagtgtgggtggcgtgagaacgtgggatccggatcacgccgcgagtctgaataaaagaaaaaaaaaccaaaaggcggcagaccacccgttttggtctgtccaaagaaattcgagtgtgttctctgctatagtgctattaatcttcttgcgagcgataga

SEQ ID NO: 4566 - DNA, 954 bp, Zea mays
gttgacctgcagcacgggaaacagtaccggggtactgtagcgccctcggccatccatgacagcacctttgtgccaatctcaaagctttcatgtacaatgtgaagaaataaaaaactggcccattaattttttcaagatcatagtaccttgcctgtttctgatcctagttatcttgtattttgttttgcattttttgctaacctggtgtccacaacatgaaattgtatttcgatacataacttatgaaatatagactgttatacacgtggcgttaaaggctgaagaccaataaatttccaggatttccccttagctgtgtccgatctttaattaaatgctttgcttaaccttagagtgctaatttgtttcatcatctactttgaccaaaaactagagatgaaaatgaggaactttacatcttttattgctaacccgcacaccctatctactcatcaagtttactgtcatggtgctttgcttgtcacgtgtgagctgtaagcatccttggttttgttctctgtattcgtggttaaataaatgcatgcatccagtggctggcattgtcagtaatatcatgaaaggtgcgctattttgtaggcttcagctggtggatttatggtagcatttgctggtaggaagtatgcagctagatcaatcccgatattcgtatccaacacctcagttacagtgtccagcttcaccctggtacgaatcgataaacgcactaccatgtccgccatacctaaacacgtagcagacgagttccgaatcttactgctacttgacgacggacgattcttccgcaggtgctcgagttcaacaaaggcagacttgaaaacctgcactggaagaaggacggctgcggtgcctgctccggcaaatcaaacttcgtctgccttggcaaacagacatgcgccatccggacgcagagctgcaagagccaagggcctgtcg

SEQ ID NO: 4567 - DNA, 957 bp, Zea mays
tggcggcgcgctcccctcgcctcgtttgttcttcctcccgtctccctcactaatcgctactgacttttctcttgcctgatccagatctcccttcgcagccgccgaggaaccccttcacagcgcggaagatggcgtaagtctcccaaccgatatcttttccatgctcgtttcaggaatcttgggtctggttagcgaaattttagttccggattggtatgacgctagaatcgttctgcttgatgcgtgttttccgtaattgttacgggtaggggtaccaatatactaatagctcggtagattagttgcgctactattgggatgaaatgattatcctgctactatgctgtcttccctgggtcaaacttggtaaaggcatgttcatcactatttgtgctctggaatctaagtgcattcgtaacacattgttggatcaaaagtgtgcaattcaagcttccaatgttttcatgctaaatgtcctgctgaccaaaccgaactgaggttttgatggttaattgtgttgttagttaggtgtatttttctgtggtttgcgttatctatgtacttaattgagagatgaatgtttctgtctcaattgattgttgttattaatttatcatcatcatcagcatatcaaagactgtaaaaacgaacctcactttatatgcttttaagttctgctggcttcttacctatgtcctgttgcttattaagcactagagcctcccaattactgagtacttactagtattgaaatgtttcatctgtgtgctgtatatgttgatactcatctagcctttgcaaaattgtttgttatagttattgctttttgctcctgcattgtcaattcaccaaattctggtttggcagtgaacaggaggccccagtcgcggttgaggcaccaaccccagttcttggggagcctatggacttgatgactgctctgcaggcatgcaagct

SEQ ID NO: 4568 - DNA, 946 bp, Zea mays
actgcacgatacgagcatggctgccttgacgcgtccgtctgtctacctctctctcccagctgggacttgcgatcagatgacattgacagcagccgagtactaactcgcattgcattgcatatgcattcattcatggtcgcgcgcgtcgcccacgtttgcatttatacatgatgatgactgtctgcctggcgccagcatcagcaatacaaaacttccatgatccatccatccatgatccatccattcatggcggactaacagtacttgtcgcacgcacgccggctgccatgcgccagctgagcttgctcattccattccgtgcccggccgacaccgacagtatttgccgctgtagcttttcctccaggaagtaaacgtgtcgacgatgcagcagttgttcaagtaagtgttcagaatggcgatggaatggaactgaagaaagctgcatcgatcagatcaccgacaccaagcaagctgcaagctgcctcttccttggctcttggtgggtccccatcttcagagaagaagcatcaccttccatccatccatccatccattgactaggccgtgcagtggtggcttttacagctagcttggccttttcacccgtctttcgtcggttgccgtcgtcagaggtcagacttcgctctcgagaaaggtattggcaaaccaaaccaaacaaaaaaaaaaacttggcttttgagtcactcaaccgtaccccaacagaaatccatgcgtgatgtgaatgcatgaacgaacacgcggaaaggtgtaaatggacgggaagaaaagaaaactgccaatgtccttgtgttgatcggttggagaggcagcagcaccaaccgtatctatcgagtgaccaacccaatggcaatggtatggttctggttcgctgacatgtcactggccctcgatcgagctagcacggctgcaggcatgcaagactg

SEQ ID NO: 4569 - DNA, 997 bp, Zea mays
cacccggccatcctatagagtggacctgcagcctgacatcttcatggaaataaccactgtgccggatcaaaatcttcagtgactcctccagatacctagtgtcagtcaaggaaatttggaaaggtgaaactgtgactagagcagcttagcatttcttaaactctccagcagcttactcatcctcatatttaaactttactctacgaacagtgcaaaacagtgttttcgatgaccatatggatgaactgctggagacgccctaaaggatacggagcataggcactcttcgtgtgtagtgcgaaaaaaccaatagcctgtgttgcagcagctttctcatctaatactccagtcctcacactgatatttctaactcttggttcatcattaacatcgtcatcagatgaaacaccgccaaatccattttcaatgctatcggcatcatcaatgtccacagcagaaccatcatccaagttgcaggaagaaaatacgagagggacaacatgaggaagatactgaaacgtgaaacaactcactttggtaaatgcaaaacatcaatcagaaattaaataaacttttaaagacccttgttacctgtgtaaaactatcacccaaaatttcagcaacgttactaaagaaaccatgagtgtactctctgagttcactgtaatccaatccaaaaccctgcgagtatgaagaacataaaggttgcactcaacgctgtaaaagtaactctgtaactgaggttaatgaaaccacaacttacagaaatagaagcctcaataaaaggaggcaatattgcttcaattcttgctctgccaactgccattgctactatcccaacaacttcagtagccctagcacgtgcacacagatcttcgtcattaattagcaccataaaacctttcatcatctcaaggactttttcggcatatggggtaaaagcctgctccgcagcagcagccactgaaccaattgcagactgcaggcatgcaagctg

SEQ ID NO: 4570 - DNA, 923 bp, Zea mays
ttgttgcaatgaagcatattcaacctaacataaccagaacattcacagtcaacaggataaacaaaccagctcataacctaatgtgcaaaacacaaggtgaaaagaatgtacctcaagcacagccaccttgtgctccaattccagcactcttgatgagctttgatcagcagctctctggatgacatcagaacaattaagatcagcattagagtatcatcgattatattaggaaagtatatgttacaaattacttcctctggtcacaattatgtgatgtcttagggttttatgaagttaattgctccaaactttgattgcaacttactttttatgagttgagtttggaatttgaaaatgataggagtagatatgcattgaaaagtagtttcatagccgtataacttcagtatgtgttgtaaatatactacaacaacaaaatagtgggcaaagttgtgtttttagatcatatccataaccaaagtgtcagttatttgtgaatggagggagtagttagtagttaccaacattaaagctgagatctgcatgcaatatatgaagcagaatgtgtataaaaaaatatatagtttggagcatcgatgttggtcagttacatcacttctattgagattattttcttattgtatttatgtatatattttgaatctgaacctctgaaatttaaatgagtaaaatatgtactaaaagtttaaatagcaatggtggaccaagacaccaagtgttgaattagttcatgctcagtctttttttttctctcgaatgagttcatgctcacaggcacagctgctttttaagaacaaccataccagaagtttacaaataaagcatacaaaaataaaacaaatccttataaaaataataaaacaaatagtccctgaacaggacagactgcaggcatgcaagct

SEQ ID NO: 4571 - DNA, 865 bp, Zea mays
ctccatctcagcagcttgtcccattgctgtggaactagaacttcactgaaccttgctcacttttggacctcgttggaggttggcagtcccctgctagttttttttttcttgaaaagcacaggagaactgcgccccattatattaagcagagagaggatagcaagggtctagagaagaccccgggtacaaggcactccttacggagaccagaaacaggcatacacaaaaatgtccataaaagacatcaaaaaataaaaaaccccaaccactgtccctaaacattaccactaggagcagccaaaaagaataaaccgttggctcttgcaacttgccatttctccctttcctcattagcagactccaggagaagagtgagattaggagaaactcctttgaacatcacttcgttcctatgcttccagatcatccatgctcccaggataatgagagagtccaatcctttcctcactacaatagctgaaactctttcccaccattgcagaaaattagtgtcaccatgctgaggcgctaagctgtgaaggccaaactttcttaaaatggtgtgccggaagactctagagaaaacacaggagaccagcagatgattgatggtctcaggttcttggtcacaaagagggcatctagctggatgactcatgcctctatttgcaagtctgtcagcagtccaacacctgtccaccagccacaaaaagaacctacatttaggaggggcccaggattgtccagacctttttatagtgttcaaaggagcatgatccaacatagaagccataataagcagcacttgcagagtaatggccatggccatcaggagcagtagaaaagatgtgcttgtcctcaatgt

SEQ ID NO: 4572 - DNA, 985 bp, Zea mays
gaggtcgcgcgccagccgcgccttgcgctccggctccagcttgttctccacctcgaagctccgctccagcgcgcgcacctgctcggcgctcaggcgccgcttcttctccccgccgccgccgccgccgccgaacgccatcatctcctcgtccacgtccacgtccacgtccgcctccatcccgagcacgccgtagccgtcatctgggaacacgcacgcacaaggactcagatcttcattccgcacgcattcccgccacgacatcacccacccccagagaaggccagaacaatggattcctgcaaaggggaataaaacagatgaggctggaagttaccttcctgatgattgggcatcgcagacagggagggagtagcgccggcgccgcgtggccgcttcatgtcgagagttggatcaagtggaattcggagggcaccgcgggagggactatctttacagcgagagcagggtcaatgagcgcctccattgctgcctccctgctgctcgtctctgttccctgccgtggcgcatggccaacaccaccgaccgtgcaacctcttgggccgatacagttctctacaactgcaaactccccgaccccgagtggtttcctcgcgatccaagaaagcgctgggactggaagacgactgagagtgtggaggagtgaggcctctgtctccgaccgtctcccactctcccctctctctgttttctttttttcctttttcctttctgggtttgctctcagcatgcagttcccacaatactgtgtgctgtcctctgtgcgttaataaagggcgtggcgtactggcgtgagcgagggagacaggggggcgaaagggagggagctcgggttaggttaggtcacgccacgccggtagtgtggtcaagaggcaaccacggttaaccatccatgcagccactatgtatgttgatcgcatgagagaataatactactaatagttaccactgttgcctgaaaatgctc

SEQ ID NO: 4573 - DNA, 1005 bp, Zea mays
tgtcccggcgaattcatgctggtaaacagcgtgttgagggcagtaactgcacgtcagaaagtgaagactcattacatccgagtttggcgggccactgaataaattccagacttccagttactatgattactacacttggaatggaaagttggaccatggtataagatgtggacaaacgataatgaatcacaaacacacatagacaaacgttatgaatcgcaaacagacataatgatgtcacagatccatgtgaaaaataaattgtgtttgatgacttgagaaatttggatctgtacttcgaagccataaataagctcagaagctgggtaaggggttcgtgctagtagagttaatacttctttccttaaagcagaagtaagcaatgcaatctgcaatccagaacacatgctagtatgccataatcctcactttctccagctaaattatagctagaacagcaggagtaaacgccaagcaaaatacacaatgatttggctcaacaactacgaagcagcaggtgaaaaatgcaatatttcccacagagcatgcatgtccttgctcctcgaaaattagcagccaaagactgaaatagatcaacagaagtgactggagttggaagtcatcagctgtccaaaagacgccactacaaggaagtaacttgttttgaccaccccacccaacagcacgagattcagatgatgggatggaacttgcagagcagaatgagtctccacagaatcccaaaccgaggagcggcgatgcagatggtggactcgacacaagcattcaaagaaaggacaaccagggcagcaaccaaactgaacccagacacccgaggccgccgcaaagcgaaatccggagctgctgacccagccaaatccagggcgaccatagaaggaagcagcgcagcaaccaagaaacatgagaaggagaaagagaaggcagaaatgcgatcagaaacaaggcaagattctcagtgtatcgcctaccatcattcgcgtcggt

SEQ ID NO: 4574 - DNA, 998 bp, Zea mays
accatccccgatcctctatagtcgatctgcagactttggattcttctattatatttgtttttttcttatatttatttttctgtttcatgtgcaacattgatgcataaaaaatgttcctttagttgatgttctttaactggcataatgattagttcaccatttatttagggcctgtttgatacaagggctaattgctagctagctcaaaattagctctagtgcattcaaacaggagagctaatagatgggctaatgttttagccacatcttcaactagttgttagccaactagctagccaaccacaggtaatttgggctattttttagccccagctagtaactagccatgtgtatccaaactgacccttagtgctgtgaaaaatatggttgcatggtctgagaagtacagtttcttttttgtcaacctcagttcaagtgtggtcaaggttttgttcgcttgtggccgctggttgtgtttaaggttttgttggcgagtcctttttgtaacttctttgcccctataggggttgtacgtgtcatctagactcctttcttcttaatattttttttctcgaaagcgcattagaactgcacatcattatattaagaaaaaaatatggggccctagagggccagtacagtacaacagccggcctccttacggcagccagacacagacataaacatatttatccatgagtaaacacgtaaactacgaccagcagcaaactaagcactcccaggcttaaggccaaaaccttctaatgtctactgccccagccaggccccacaaatgagcatcttcatgaatatgttgtaggacaatgttgatgtttggggaggcaccatcagacacacaagcattcctgtgtttccgtagccaccatgccactaggatcacaatggagttaaagccctttttctggattttaggcaccttgctttcagcctccctccagcattcctggaaaacaacgtcagcagtcccaggagataga

SEQ ID NO: 4575 - DNA, 994 bp, Zea mays
tccctgcagatccggccgccgtggccctcctgggcggcgatctcgaatgcggtcttcccggccgcgtcgcgcaccgtggccgtgccggccactccgtgcgacaggaggaggcgcgcgaccgcctcgtcgccgcgcctcgccgcggtgtgtagggcggtggcaccgtccgttccgcacctcgcgtcggccctcgcgcccgccgcgagaagcgccttcactgcgtctcgccgccccgcctcggccgctagccgtagaggagtcttgccgtccctccccaccgcgtcgatagatgtaaaagaagacgaaaaggacgcggacgaggacgaggcgggagaggcaggggcgggcttgccaagaagcagcttcaggacgtcgtcgtggccggcggcggcggccacgtggatggcgtcggagccggcgggcgtcgcgccgttggcgaggaggagctcggcgatgaggcactcgccggaggcggcggcggcctcgaggggcgtccggccgcggctcggtttgtcagcgtcggcgccgtactcgagcagcacctggacgatgtcggcgcggcccaggccgacggcgaggtctagcagcgtgcggccatactcgtccgcggcgtccgcggcacgccactcaggctcgctgcggtcgagcacctccctgagcgcctcgaccgcgccggcctcgacgaggcgcgcggccacggacgcgcccacgaagctcgcccggatgccgctgtccacgaacacatgcttcctcctcgccgagaaccactctgggttgaccgagtccagcgccgtcaccggttccttcatcgcggcgcccggcacgaccacgctgtgcagcaggaacgcgtcctcgccacggctccctcctctttcctgacccgctgggcctatctggaggcgcggaggccaggtacagcacctccacggtgaccgccgcgagcggcgccaggatccccgtgtgcgggcgaaccgcgaagcgcccgcgcaccgcc

SEQ ID NO: 4576 - DNA, 897 bp, Zea mays
aggaaaacgtgatgaattggtgtacattttcctttctgagttttgaaatggattagcagtgaagaacacaagctaatcaagactggtgggctggttgtccttgaacaataagcgcttgttcggttagctctcaatccatgtggattgagtgagtttaaatcccaagtaagttaaattcattctcaatttttttcaatctcgttcaatccataggtaacagattaactgaacaaggcctaaagaggctaggggcccgtaggtgttctgcaaatgtatctgtctgaaacttcaactgatacaaagtagcggtagtcgttggcacttgtctagtagttactactgttgaaagtgttgttgactaatcattctctttcatggagctttgacaaggaaaaagtacatcaatggctgttcagtcagcttgaagaaggttcagaggtgcatgttgctgctgcgcttgtatagttgcaggttgtgtgaataacttggctctgccaatcttcccaacacttataaaatcttaccgatgaactaagttgatggcatatgccgtatgtaaggaccacagaccgatctagtattaagtgttgagggatcggtacgttgccacagtttttcactttaggtttttgacctgatgatagggttaaagctgttgcctgtttccattgaaaccatcttgggacttgagacccttatctggagacaaaattactgccttttttcagtgtagttgctgccactgcttcagcactatccatatgcgccaactcccaagcacgtacttgatgctttgtcttgtgtacgcagaatcagattgggcatctccacagcagcatccaggccagcaacaaacatgtaccaccccttctgcaggtggactctatcgaatggccg

SEQ ID NO: 4577 - DNA, 1028 bp, Zea mays
tgagtagagacggtaacagtggccaggccctgttcttcctgctcttccagcacgctgggatgctgatgccttgcttatccattggacatcataacttgacatcccagtagcatgatcataattcttaaccttttcttttccagtatcaactacatattttatgcctggaattgttagagaggtttcggcaacattagttgccaccacaactaatctttccccctctgggacatcttcaaacacttgaagctgttgtgaagctgataactttgcataaagtggcaagacacgaagtctaccatgtgaaacaggcttatgttctgtgcatttactaaaacaacgaagtgaagtgctggtcttttcttcacatttagcatcacttaattcctcgacactttccagcacatttggtattcccgacaaagctccaaatgatgccttcaacgcagatgagctctcagcatctttcaaaaatgctaatactggaacatcctcttctgtagtttcaatagtaacagactcttcgtcatcggtttcagtatccatttcgctctccgtttcgttgtcagaagaatcaatatttgtctcaacattcataccatcgtcatcatacataccatcgtcatcatacgaggaaaacatgtcatatcggtgctcgggttcatctctgtcaatatcatatgcttcaaaaatttccttttcatctacttttgggcatggaccattgtcttcaccatcagttttcccaggattcttagcagtttgcaccttggatgctcttcgcagtttcttacacaagtactccacttcccgttgtccagtgacaaatacgaggattccacctggtggaagcctcttgtggattgacataacctttttataagctagccctaaataatcatcatgtgtcctctttgagaagtgaactgatactggaaactgccgcacaggtaccttaacagctggtgggatcacgccaaacaaccttctatttgaaataaagtcctttaactgcaggcatgcaagct

SEQ ID NO: 4578 - DNA, 884 bp, Zea mays
atacgcgctcaaagttttttagtggatccccaatgtcatatcaacagtgttatggtcctgatggcacaactgtgtctagtagtatattgacaaacatgggcagtaatgcttcaatgctcatggttgcacaaagaaatgctcaagtgggtaaagaacacattctatatgcccctgacatgaggttcagactgcaaaacccttactgtgacaggagagttgggagtaacacccaaagtagtgttgtgagctctggttttatctcgtcgatctcagcatcaatggaaagacatccatggatgaccaacagtcaacagttagaacaaggaaacactggagaaccatcagattccagaaatgttctcttgaaatctcttgcataccgtcaccctttagtgcatgacaacacaaacatgactttgttgcatggcaaaggccaggtgccaggttttgttaatggtcatgggggttttgattttctcccagaaggtactatggtattcaagggtaacctgtatggcagcacagcaaatcaaattttagaccaaagatgcagttctacttctgagatgtcagggcacagaccaactatttcatacaaaatgccccaatctacccaatgtgttaggaaaacagagtctccaaagagagagacatgcgaaacttctgctgctctgtcatctggctctgatattcaggtttctggtggcctgaaaacagtcatttcccaagagaataatatgagtagctcagatcttattagcccaaaaaaacccaatgaagtgcatgcccctactggtgcaattgttaaagctgtcaagaatatggatagccgcaggctcccagacatatctaacgagagatcacccccattccttatggatcct

SEQ ID NO: 4579 - DNA, 899 bp, Zea mays
gagcgtacccacatataggatcacagtcaaccaaactataattccttaaaaacgtacctagatgtgacctactgaacgcaaaagatgaaaaaaaaaaatacctggaagtcggagagaaggctgtggcgatcatccaccccatgagattgtaggaagaagtgaggatgatcttgagcccgcaagtcttcacagcaagagaggcctccgccgagtttggataccacacgagagaaaaaaaaaacataaaaatccatcgaccaacaagaatccaggagtagcagaagcattccgtggctgcacgcatacacttttctctcctcctccacttgagggaagacccagaaaacgcaaggttgaacgactacactactgcccagactcgtcatcagactcgccgtcctcgcggtcgtcctccccgtcctcctgctgctgatgatggtgatgctggtgcccgtgcgggtgctgcatctggccactgccgccggcagcggcacccacctggtggtagaactggctgatcgactgcgcggcgagcacgccgatgtgaccgtcctgcgagaggccgagctcgagccccggcatggccgcggcgtgtccagcgaacatgggcgcaaagccgatgtggccgccggcggcgccgcctcccggcagctccaggcccgcggggacccccatccgctgcatgatgccgccgataccggtgccgtcgcccgcgcccgcggaattcaggaaggagggcgaggagaagccggcggacggcgcccacatgtggtgcgggtggtggtggtgcggcctggcgagcccggaggtaggcgacgggagcgagggcgcgacggaggcgagcgcggacgccggtatggtgcccgtgccggtggcggcgacgatggccggctcggcct

SEQ ID NO: 4580 - DNA, 999 bp, Zea mays
tgcatgcctgcagacggggccctgctgccactgtgatctcgtgagctaacctgtgtgactgtgcgtttcttccttcctcctaccctcccctcccgtcctcacctcagactagctcggaatcctccgtcgccgagcaaaggttccaccaaaagaccaaaccccaagtcctcgcaggatttgattctctgaccgattcagggacaccttcctcagagcaatacttaccagcgtgggcgtggctaccaaccgcatagtttccatgagcagatgcaaaccagtcggcggcgagagcccagcagcagacggacctgacccgcggcggccgatgtcggagacgccgtgttccgtgcagcccggggtcctccctctcctcgggaagccatacttcacatgcattctctgcaagtctcatgtcaaccagccgttccaagtggtactgctgctactcatgctctctgcttgcatctgctgaaacacttgtctcctgctcccgctcgctgctggggggcgcaggctaaagccgtgcatttcgtagtgtaatgatcgaagtcctttggtgcctggctctggctggctgcatctgcatgcaggtggtccccaagtcgctggcgccgttcctcccggggacgacggtgccggcgacggtgacgtggcacgggcggtcctgggagatgcggttcacgggggggcggcagatccagcgcctggaggccgggtggcggggcttcgcgctggacaacggactgaagctcggcgacgggtgcgtcttcgaggtggtggacggcagggcggagcgcgtggtgttcagggtgcaggtgctccgcgccgacatccccgcggagatccgggagcgggccggcgggtacactccgtccagccccatcctcatcgactagctagctcattgctcacctcatctcatcagctgctggtctgtatccccccgtgcggccgtctgccactgtcactgcgccggcctgaaactgaactgattcagct

SEQ ID NO: 4581 - DNA, 1041 bp, Zea mays
acattgaccttaggggctcgaacaacaattctctgaggaggaggtgtggaataccatcaaacagctccctccggacaaagccccgggacctgatgggttcacaggccgtttctataaggcttgctggtcaatcatcaaaaaagaaattatggctgctatcttgactgtttggaacaaggattttcggaatttcagatatctcaacacagccttcatcactctgttacctaagaaagaggatgccatccttgccaaggactttcggcctattagcttgatccatagcttcgcaaagttaatcacgaaggtcatggcaaacagacttagtggttatatggacaagttgatttctaagaaccaaagtgcgtttatcaagggcagattcatccaagacaatttcatgttagttcagcagactgcaagattgctgcacgctcaaaaacagcccagagttcttctcaagctggacatttccaaggccttcgattcggtatcttggtccttccttcttgaagtgttggaaaaagttggattcggccccatatggagagatgtgattagtgggctgcttatgacctcttctacccaaattatgcttaatggaatgcctggggaatacattcaacacaagaggggcctgcggcagggggactcattgtcccctcttcttttcatcatcgttatggatgttctcaatggcctaattgtcaaagctgctgatgagggcatgctccaacccctctcaacacgctccattcagcaccgaatatcgctctatgctgatgatgtggtgatattcttgagaccgactgctagtgatctgtacttggtaaccaggatattggagctgtttggggacgcctcggggctaaaaaccaatgttcagaaaagcagtatggcccccattcactgctctccggttgacatggaaatagtaactcagatttttccttgcaaagttgaaatgttccctcttaaatatctcgggctacctctttctctcaggaagttaagcaaggagcagctgcaggcatgcaagct

SEQ ID NO: 4582 - DNA, 912 bp, Zea mays
agaagtgcagaactccagcaccaacggctgctcacctgcaccccctgctgtcctgctccattcaacggcgcctgcgcccctctgcctgcttggctgctcgcctgctccagtccagatatcagcggctactccagcaccattgacttgatgagctcgtcatctcaaggttcctcctgctccccccccccccctctcccggatggttgctgtcgtaatcctaagccagtgatgactgatgagtagtgacttgtacttatgtctctgtttgcaaactgctattttgtttatgtagctgtttgttctaatttatataatgtatataggtatatttatatatgtatatacctatataagtgtaactacaagtctaaaaggtctaggacgactaggggtcaactagtcgccttggtcgtcgcctaatcgcaattagtcacctagtcaatcctggggagcaaccaggcgacttgcaatcattggattggatgccactgtagagcatctgatttgatcctactattggtgactggattttaaaagatggaaattgagggtccatggatctacaaaacacaaatcttgcagtaccaaagtaataatgcagataacacacaacattcaaatagcagcaaatgcaaatttacatgtttactgtcagaaatatatgaggtttcctatcagcaaagatcaagtaacacacaaacatcatcaagtcaatagcaatgaacagaagacgttaaataaagcggtaagaagataaactaagattagctaactggaaccagcaagattttgaaatatgagacttacagacagcaatgcaccagcctgttcaacaataatttgcctagtagagtgcatattttcagctagcaatgatgcattatgaagcccaagcacagaagctgattcagg

SEQ ID NO: 4583 - DNA, 1001 bp, Zea mays
tctgctcgagcccctccagtgtgtggtgcccgcctctgctccaggcctccaccggagtccaccctccagcgcacggccgtcctccactgatccactccgcctcctccattaaacttcttcagagtgaattagtttagggtctgttctgaacttcagaaatcagaaattcagagttcagacttcggcgtccagagaacttcagagctcagacttcttctgagttcacagtttagactttcagagtctgttgttctgctacagctataatatattgttgtcctgctacaactatagtgtactgttgtattgcagtactgctacagctatatatattgatatatatttatacatatgatcttgatataggtggacgactataggacgactaggagtcgactaggctcgatttatcgagcaaatcgatgactaatcgcgattagtcgccttattggtgcttaggtgactagggtcgactcgccgactttaaaaccttggtctccataccatatcccacatgtatccattatgggatacaggagcgggtgacctgatgtatccatgcagctcatcataccatatccaagaaaaaccaatatgcactgatatcctgatagaaaatatcaaacccaccatagtgcccacttaatctggatttgccacaacaatcctgcatccataggtattctaatcatttactaattgctatatttcatagcaggaaaaccacaagctgaagtgtttctcagtgctctactgatgaatcattaaaagtaactttgagaaagtagcataattgtaagatttaaatcaaatgaaactacttcatgtttgctattgcatacttggaaaaaagatataaacccttgattatgcccccacccaactatccacagtattataaattaccaacacggtcacttggaagtaaaagaaacaaaacaagacaacacactatctaatcaagcatagtaccccagtgaacaacaagactgcaggcatgc

SEQ ID NO: 4584 - DNA, 1096 bp, Zea mays
cttgcatgcctgcagaggacctcggagaccagccccaccgcaactttcatgatgctcaggcccagcctctcgtggtagcatttcttcaggtctggggtgagctgcgccaggacggaccagccaaagagaaaggaggtaggcagtcagcgtctgctcgttctgctgcatcgactggatgaacagaacactcgactcgaggatcttttacaggctactaataaaagaaagaagagcaggtaaaaacctaccagtgtccaaacgaaatgcgccatctggaaggcgttctggaagagcgtgaggtggatgaggaagaggacccaaccagggcggttaaaccagaagaacctgtcacttggctccaccacaggcgcccccttgatgaccgtcgccttgtcctgtatctccttggccatctccatgatgacaacctccagcttggccccaactagcaggagtatctgaaacaacgacgacggcgacgcctttgcttatactatactgtagtagtacattaattccaaggcggtttcagctggatctgttttggaatgaccaattggctctttgtctgtgccaacagggacggacaggcagatagagggagttgctctaagaaaactaaagagacgaagacgatggcgtcaacacttacaacgagcgggacgaaagagatccagacaagcgtgccgaatcctgcgcacataattaatgatggtggttattacaagaccaataataactcaataaagactgtgttttcttttaccaacaagaacagctatctaggattgtaaggatggtaagtacccttgatatcgatcaagagagtgaagatggcgacgaaccacagcgggagactgcgtacacagaaagccagccagatgtcagggccccaacgtcataacaatgcaaaagagaaaagactacgcgaatcaggcagttcttttcttcttcttcttctttggccggccttttctctaaaaaacgacttggaagggacgcacagacctgatgccaacgacgactttgaagtcgtcctccaaggaccgcttgatgtactgctggaagttgaacttggtgctgggcgacagatggt

SEQ ID NO: 4585 - DNA, 871 bp, Zea mays
tgggcatgctgagggacgccatgcaccgaggctattacacacttgatgcgttcaggtaccagcctcactatggagaaggtgctaatgatccatctggtaggcgctttctgaccctatccaaggcaccctgtgtaaaggatctctatttcaccagtccaactgtacagtttcaggaacaactacgagaggcactcgacaaattgagatccatgattgttgatatgaatgagttggtcatgttcttgatgagctaccctcgcctgtatcgccagccatacagcatgcacatccttctgtgtaactgcatgtttggtcgccagatggaagcacaacttgtcattagtttccttttgcacacaaaacctcatagttctgaagaattggaggtcctgccagttgttggtccactcggagtcggtaagagtacactaatcgctcatgtttgcaagtatgaaagagtccgtgattatttctcagaaatcttgtggctgcatgactctgattttacggatgatgagctaactttcagacagggaggtgcaatgaaacgtcagattcttttgtcaaacttgaagaaaggcaagagattgctagttgttattgaactatatggcaatctctgtgaagatggatggaacaggttttaccgtgcttccagacggagctttcttagcggtagtaaaatcatcgtgactagttgttcagacaagattgtaaagttcggaacaacaccagctctaactctgaagcacctgtcccctgaggtttactggtatttcttcaagacacttacatttggaagcacggatcccgagatgcaccctaggtttgcacagctggtcatggagatagctagactgcaggcagcaag

SEQ ID NO: 4586 - DNA, 891 bp, Zea mays
tacagcgccgacatcatctcgtcccggctgccgtgcagcgacctcacgccgaacgtgttctgtcgaccatcgccggacagcatgaattggatggattttgatatggccacagcccacaacagagacagctagagctatagccttttgttttgtttttttaccgtgaagaaatcggtgctgcgcatggcccagaagaagatgacggtcatgacggcgaggtaggtgccgtagacgacgccggtgacaaagatctcgttcagcttccagctgtctggatgcggagacggcctcaccctgtccttagagatggtcatgatcgtgcctgcattgcaagcaacaagttcgttgcatgcttcagcttgccaatgctgccggtattaagatacatgttgagtttttatttcaagcccaccgtcgttgaggatggcaatgaccaggatcatgaacggtgagaaatcgaacttccagatcagcgcgatcagcatgaacccgagctgcacattcccatcgtcatcaacagaggctgtggttttttttttcacagacaaaaccaaacaggggacaagaagatgatcttaccacaatacggactgtgatcgacactgcgtagatctgacaagagaagagagtttcagacgagcggaacgtttgcactagtgcggttgtcagatggatacgtgcttacggtgtagttcttcatcctctggaagatggagcggctcgtgagcacggcgctgatgatgacgctgagcccgggttcggtgagcacgatgtcggaggcgctcctggccgcgtccgtagcgtcggcgacggcgatcccgatgtccgccttcttcagcgccggcgcgtcgttcacgccgtccccggtcatcccgcagatgtgcttcctct

SEQ ID NO: 4587 - DNA, 923 bp, Zea mays
agcttgcatgcctgcagcagtacgcggccgcgccagaatctgtcccgccagtgccaacccacacagtggtctactggatgtttggcaactcgtcctgtgcagaagctcggagctccaatgcctctggctgcctcagtgacgagagtgagtgccacgatgagcctccgcgagggtatagatgccagtgtggccaaggctatgttgggaacccctacatgccgaacggttgccaaggtacgcatcttccggttcaggttcaacttgtaccatgtgattactttgcactaattagtaataacttgtttttactcatggtaatagatgttaatgagtgcacacagacagatccaccgccatgctttgggcaatgcataaatacaataggatcatatgattgcatctgcccatctggcacctcgggcaaccccagagtaaaagatgggtgtagtccaagcaaattgaaattatcaggtaacaataaaaaaatcatgatatctcttgtttatattctaaggaactaagcctagcttagtttgccatgagggtggatgtacaccaatatcgcccaaactcaagttctcatcgagacgaattcgggtgcctatttcttcttaattaagtcacctagttcctcctacattggtcgattattttaccaacactcttgtagtgtagcgatggactttcctttcttattttttattaatataatgaggggtacatctcctagcgtttccataaaagaaaaggttcgtcgaagtaaataatctgaattccattttttcacaaattacccaggattgatcattgcaatcggacttggaagtggtattgccattctgctgtttgttttcgccattgtcgtcataaggagaaaggtcaaggctcggaaagctagaataacgaaagagtttttcttcaag

SEQ ID NO: 4588 - DNA, 951 bp, Zea mays
cctgaacatctgaacacctccacagtccacacaaggaccacgagttaagggaccatggattccagttcttctttctttcttactatacgaaagacgggtttcaagttcgtcttccttagttcctcgccataacgtgtggaggtgtgcatacactgacctgtccatctgagttttgatgatgatgctggctttgatccagtatagctgacattatgtggtgggcagctaccgtgttcgtcatggttgctgtcccacaggtctctccgtctctgtctgtggcctctgacgagtgatcatagtaggccgttccagcgctttaaattctccctgcctctcctcgtctcgcttcacttcagtaatcagtgctcgctagcccaccacgccctgaacctagcccggacaccagccagaacaggccatgtccatgggctccccggtgcagctcaggcggctgaagcctctgtaccagttcgtggtgaacaacatcctggccatcgtggccgtgccgctcgccaccgcggtcctgctcaaggcgtcgtcgctcgggcccgaggagatcctggcgctccggccggcgcacctgttcctggccgcgttcctgcctgccgcggccacggtgctgtacctgatgctccggccgcgcacggtgtacctggtggactacgcgtgcttccgcaccagccccaactgccgcgtcccgttcgcgacgttcctggagcactcccgcgtgtggccgggcttcgacgagcgcagcgtccggttcatgacgcgcctgctggagcggtcggggctcggggaggagacgtgcctgccgtacgcgcagcactacatcccgccgtcgcgcgacctggagtcctcccgcgccgaggccgagctcgtcatcttctcggccatcgacgacctgctcgccaagaccggggtctccccgcgggacatcgacatcctggtggt

SEQ ID NO: 4589 - DNA, 1015 bp, Zea mays
tgcatgcctgcagcacggtcaaaggaaagaaaatctagatatataacagaactggagcggaaggttcaaactcttcagacagaggctactactctttcagcgcagctcacactattccaggttcctttcatccttctgtttgtctcatgtatttctgaactgtgtttagttcatttattttggtgtgaaaataacacggtgcatagtgacactttatttattatatactgtgcaacgagctgtactctatagtccatacttgtaacttgtatgagctaaactccaattgctttacaaatgaacagttaaaacaatattttatttggactggtgcacatgcaatgagatctataacacattctaggatagtttatgtgatcatgttgagttttgattaatgccacatgtagtgattagggtgaactgttccttggggttgttttgtgtagttttctcaacgattggagatctgaatagtaatacttggtaggtggcagtaaaaaaaactgtgttctcagtttagcagcactgtagttttggcaactatactatccccattgatccaattcattgcaataagctccttgttacttggttaaccttatgctagcaacttcaaattttaagcagaaaaccctgtattttcagcagatcttgtctggttcaattttctgaatctacgagcaatgtgtccttgtcttttgtgttaagagtaaattgcatggccggttcctaaagtattatgtgattttcgtctaggttcccaaactataaaattccgtatttggctccctaatgtattcatgccttattcggttgcacaattatcgagggggattgaatccctctctattcaatttcgaatagcaagggatttaatcccttcaattcacctctaaccgaacaagccctcaagtgatctcatgttggtcggaccaacttggtccaaacttgacacaatgatgcccatgaactgatgtggccatccacacggctggtaaattcatgtgcgaca

SEQ ID NO: 4590 - DNA, 912 bp, Zea mays
cccagctcatctctcccaatctctagatttttcttcacggagcttatccccttccccgcgcgctcgagctcctcctgcgtcgcgcgctccgcccggcgtccggcgctcgaactgcggcgtccctgctcggagctccctggtgccgagcctatctcccagtccatggccgtgcccagcttctatgctttgtgcgcgcgccatgcttctctgccggccggaactccctggtcgccgtccctctgctcgttcatcttccctgtgcccagccatggcgtccggtcgcgtcttcttccctggcgtccgcgtgctgtgaagccccacgacgctcatctctctctgcttgtcttctccctgctcttgctcgcgtccagccatggcgcacccgcttcctggctcgcctacacgcgcgtcagctcccctctgctcgtcgcgcgcctactccctagagctcgcccctgcgcgcttctctgcgctccgcgcgtcccatctctctggtgcctcgcccagccgtacctccaactcggattcaatccagttcgcctatctccctgtgctcggctcctggttggagctctctgacgccgcgcctgtccaagctcccatggccggtgcttggtcccaactcgctgcgtactgtttgccgcactccctggcgctcgccctgatgcctcgctcggccgcctctggtccccagcagcggagctgcttcttccccagccggcgctcctccagtcgcctgctctgttttatttttttcctgccgagttcctccacagcatctcccatggccgctgcattgcgccccttgtgcttgcgcagctgaacgtcgtgccaggtactgcgtagtgtttcgtccggcgtcgagcttagctcggtctttgtttctctgcaggcatgctaacaagcgggggg

SEQ ID NO: 4591 - DNA, 913 bp, Zea mays
atagtttcaataatcaactgaactagaaagtattcctgataaaatttctcacatatgtttttgtggtcacttttaagcaaatcagaagacatgtattgatttttttttctttatttggtgtcttttagaactatgctacaggtaaaaagttttttgcaatgaaaagatcttacctccttgacccaatgatgatactgatctttgattgttgtcttcctccatgcattcaggtcaaaaatattcataccatatgcccaagcacactctgaagggtcaaagttttttgcaatgaggggatgagaaaagttgaaataattcctgaacctcttagacatcacccgactgtctccacctatgcaagtctcaacagcaccattaaccttcccagctagatcgatatcccaaagtggtgataggtcatgctggacaacaacatcatcatcaagaaatacgaccttgttgaggcttgggaacaactgcatccacagattgcagattaaatcagtgtaactttcagcaaaaaaaaaaggatgcaggtcaacaaatataaccacattttgaacaagtttgtaccatatacaattatatatagactacatgcagagaaagctccagatatctcaagaagagggcagcatcacttactccttgatcccagcaggaccagcaaactagaacaggttcacagtgaatagttctacagagcaaaagtctaaaatgctttcaattcttttgcagttttcattgtttcaaaccatccttctatctatataagcacgatacttgtttcacccaacaaaaatggtactaggaaagtaagagatgagaataatagtcaagaaaattctaatacctcaggcaagtatattcgaatatgattgagtacattagtgtatgttggacttcctgcctg

SEQ ID NO: 4592 - DNA, 887 bp, Zea mays
agcttgcatgcctgcagcaccttcacggccaccatggtgccgtcgcgtagcgtgccgcggtacacccgcccgtagctgcccgtcccaacgagccggtcctcgctgaactcctcggtggcctcgaccagctccctgtacgtgatccgggggaacttgtacttcatcactggcgacgagccgccgccgcggcggccactgaacatgtcctcccgcattgccgcgacccgctcgcggatcttgcggacgctgacagtgcagaggatcgtcagcgcgaacgccagagccgccgagcagacacacaagatgactacgaacttccgggactggtaccacgagcggtggcgacctccgcaacgcctgagcacaggaccagagaggcgacggttgccgaggtaggagagacagctgaaattcacgaaagggccggtggtggggacgccgccgctgaagtcgttgtatgacagattgagatatttcagcctgtcgcaattggccaggctaatggggatctcaccactgaggttgttgttcgcgacattgaggctttccaggttcttcagctggctgagtgtcgaagggaggttgccggcaagcgagttgtgtgagaggtcgagcactgtcaactcaatgcagtttccgatgttggccaagatctcaccgttgaagttattccaggacaggtcgatctcttgcacatgctgcatgctgctgaggccagccggcagcatgcccccaagctgattgcgcgacaggttcagtgtcttcatggtgatgccggcgatctcctctgatatcaccccagtcaagctgttgcaggagagatcgatgaccagcagagcggtgcaccggccgaggcttgaaggtatggcgccagacagctcgtttct

SEQ ID NO: 4593 - DNA, 955 bp, Zea mays
taaagaggctatgattatgctcacaccgtcagatagcaagaactttagacggtttcctcccgttgatatttgtcccggaggactaataaggaaaggcaaattctatcggtgacagtaaccatgcagattagtggagcagttggaacgagccgtagcgttttacacagcctgctgctgtaggttccgtagtgcttgctccaagcgtcctctctttgggaaaaccagttcacagagacacacgagtagacgacgatgtcatatataagagcgcagctgaagtacgtaaagtaacaccgtcgtcgatcatgcaacggcaacggcaacacggcatatgtatgtgaagaacaggcaggaacgaaaatgcaagttgtattggtagctgatgtcccggcggtgaagtggcgctcaaggcttgtcgtacgtgtgaccagaccagctcttgtgagagttttgtctttgactcgatgtggcttacgtacagctagctgcgccacaaattaaagagcccaccagttgctgcccggtacaattagttaattaattcattaaccgaaggtttgcccagttcagaggcgtataaaagctgcacactttcagctaggctgggaatgagacgaattcttactgtgctaagtcgattttaacacggacacgtacgtcgggcgtcaatcaggatacggacctttcggaaaacaaagcagccagattgatcccgacaggaagccaccaaagtgtatggtcagaactggtttaaaataagaagggggtttcggtcagatatatacagtactggctacaacaagttcagaagctaatgggggaagtccaagaaataattaattacctgacgaaaccccctgctagatgcgccacgagaacacatcagcgtatctcactgtccgagaaggagggcacacggcacagcacgagctctcgcgctctgcaggcatgcaag

SEQ ID NO: 4594 - DNA, 928 bp, Zea mays
cgaaagcactcagtgacctgcacaaactccatcaagggtgaaatatttagtgcttcctatgatcctatccatttcctagttacttatattattattcactcatgtgatgcagtgaccttgttcatgaaactgtctctcgagcatgccgagagcagcatcgacaaattcaggtaattttattccaaggatgaacgttaaaggacctctgttctctgcatcacacattttgtctatgttttctctaatgggattttctgaactgagtaaatttctctacatgacagcactcgaattgagctatttttatgagctgttctgacaatatgccagtttttgtttcacattaaccaaggctcttctagtaaaaacacctgtacatgtgtgtggatccaaattccaaagttccaagcatatgaacatgtctttgttacctttctgccttggagaattgtaggtagtaattcttttctaactcggtaactttacaatttacaatttcttgatccgtgttaactggaaggcacatagtgaaagggcctctagcgtaatggttaaggcttcgagtagcaccttcaggtctcgggttcgatctcccttgggggcgaatttctggcttggttaaacaaatcctctcgccgtgccccgccagctcctgggttacgtcttgcgcgccaccctgcggctgggttgttgcagagtgggcagtgacggctcgctagtgatggtgggctagtgtgattttctcggctggaaccatgttttggtctcttataataccgggaggatggtctttccctcccggccgagtttttttaactggaaggcacatatgatcatgtgcgagaaaacacacttcattgaaagacccctccaattaaaattgatagatcattacccatttgtacctgcgatcctctaataattgttt

SEQ ID NO: 4595 - DNA, 954 bp, Zea mays
tttgcatgcctgcagagtttgttgccttttcttttgactgtcaaacccatttgcatcttggtgcttttatcaagtggtattgtatttgtatctctattttgtggtttgatgatttctcttttaccttttgaacatagtgcatagtaacatttatttgttcatacacatgaaatgtttcttgtttgttacgtaacaccattttttttgttttaccatactctgtagatgcttatggacgtcatattccattattctagtattccacaaatatttgtctgattttgttttcacatgttatgaatcatatgcaggccttggagaaagctgttgcagatgcatttccaaatgcatcaaagaaaatacagagcatcatcaagaatgtgagtaatcaaacaattttttttaccatgtcctctcccaattaggattttttaaggaataaggagtaaacacacttcacatttggatgttctttcagattgcaaattaccaaggacctgagaggtatgttctgaaatcagggttggaggtagaaagctcaaaaagtcatgtatctgaaggagtaaggtattattgttttcttgtttaagtccaagctctggtccttctctcttttggatctcgcagaagttggttttcattatgttgcttctgcaactttggacaattatatgcctacatatttgtaattctaccataacgctttaacaaacatctattgctgtgtctaacagatccatcagtaagaaaattgaggaatcggctccaagcctgacgattgatgatcctgatatatgtgagaggattgacattgtgggctccctagttgctccaactgatggaaaactcagtaatgacagtgaaggtaaggctggaacttccagtgacagtggaagcgatagcgatagtgacagcagtaacagtggaagtgatagtgggagccaaagcagaagt

SEQ ID NO: 4596 - DNA, 896 bp, Zea mays
catgcttgcatgcctgcaggcttttggccagatggtcaaggagccagttagactggatgatgtcacattgctgaacgcactcgttgcttctgccaaggcaggcaaagcgaaggtcgggaggctgtgtcacagtttagttgtggtgaacggggctggaattaattgttatatgggatcctctctgattagtatgtatgccaagtgtggattggttgaggatgcccgcaaggtatttcacggaatgcatgagagaaacgtcgtttgctggacatcaatgatttctgggtacacacagttgggtaagtttaaaaaggctgtcgatcttttcagggatatgcaaattactggaatgaaggctgatgatgggacgattgctactgttgtgtcttcatgtgcccaaatgggagcacttgacttgggacgatatgttcatgcttactgtgatgttcatggtttagggaaggagctttctgttaagaattcactgattgatatgtactcgaaatgtggggatataactaaggctcatgagatattctgtggattgaccaagagagatgtgttttcttggacggcaatgataatgggctttactgttaatggcttatgtaatgaagcacttgatttgtttgctcagatggaaggagagggtaaggttatgccaaatgaggtcacttttttgggtgtccttacttcttgtagccatggagggttagtggaacaagggttccatcacttccagcgtatgtccatggtctacaatcttgcaccgaggattgaacactatggatgcatggttgatctcttgggacgtgcaaagctattgacagaggcagaacaatttattaacgggatgcctattgccccagatgttgtagtatggcggtctttattgt

SEQ ID NO: 4597 - DNA, 859 bp, Zea mays
cttctgttttgtctgagttcagccacttctggagccagaaccctcgtagggatagatcctttcaaaacatctctctcagtgtattaaccaaattttagacatttagaagcaaaattatataaatgataggaactcaccatcccttgtacacaatgtgaaaccatctatcaaatagtttgtttgtgtcgaatgattaatcacgattaatcacccttacggttcctaccacttgtttaggtactctgattcggtcagagtgattagaagtgtccgatcaatttatcacagttaatcgtcgacttatcgcaaatcgtgataatgcgaccatgtgccctgaccaactagacttcaaataggcagatatgctggggtagctctgtttgggccaagaccattagtgtttctcttttatacctctcccactcttttccttgcctcctcagtcctcactcctcaccccgcagcctccagatgtcagatgcagttgctgtgtgtgcaactgcatctcttcccctcctccatccttcctcggtctatgtcagtaccacaccaaaaagaggaacagattggagcacaagaggttaaataagttggtctatgtcagttactacgaaaatatatcaaacaggtttcaaaaaattaaaaaggttggttgcaaaggacagaagagcaaccctctcatgctagatgaatttcagtgggaaaatgaatgggttgatgagaattgtgatgaattgacttggggtgggatgaagctattggtgcatctgacaatctatggaaccataacttgcctatggcttctgctgctcgtgcagcagcctccgtcagccagacgtatagcaggaagcgcccaagg

SEQ ID NO: 4598 - DNA, 1005 bp, Zea mays
aagcatattcagcaccttcaattgttctaacatctcgttcacatgatgggtttcatgtttttgatgatttccgcgaagcttatggatggctgcgccataacacagatgcagatgacaaggtataactttgttcttataattacactatctgtgttatttctgacagcaatatgatatttattttggtaggttgcatcttggtgggactatggttatcagacaactgcaatggcaaacagaactgttattgtggacaataatacatggaataacacacacattgcaacagttgggactgcaatggcatctccagaaaaagtagcatgggagatcttcaattctttagatgtcaaatatgtgcttgttatctttggaggttattacatttttggcttctagaagcaaacaattaccttaagcaagtgctgtcattcacctaaaactgatgattctttttcagggcttattggctacccaagtgatgatattaataagttcctctggatggttcgaatcggaggtggtgtattccctcaaataaaggaagcagattaccttgtaagttactaagttgtggacttacctcttggaattccttgccaatcaaaaggaatgtgatctgcatttattaattaagggagagttctggacaatactactgtccttcaatgagtgacattttggttttgtcttaagtaaaagcattttatgtttgaccaagtttatatagaagattatcaatatttatagcaccaaatagatttactatgaaaatatatttcatgatgaatctaatgattttatgactggcgtcatggtgccagggccagcgtggctgaacgtcaagccactgtggcgggtgctgcacaaggcttcggtttgctccggtttcttgagattagttgttggcttttgttaggggatttggttgttgcatcttaggtcaagtctgttaggctttggggtacaagtacgtggagtattcatttgaaaagaattaagcaa

SEQ ID NO: 4599 - DNA, 942 bp, Zea mays
agagcgatcacagggttcacatcaaaacacagatcccaattatagaaggatgaataatgaattcacacaatacatggagtctatttacgttccatgtcttagtttggcactggatcccttaatggtgaactataattaagtaagatcttggacagcttcttcacttcctgaacagatctactaccaggtatgaggtatggagcagatcgcgacaggttgaacagacagtggagctagttaaataagcctgagatggcagctccatgtatagttgcaggaagctaagcctacttaattggattcatagctgaggcaagctcgaaagatcgagctgagctgaattggagtgcagtgggaccaaaactagaagccaccgacgctgcactggagccaccgacactgacagtgtcagcgcgcagcggaagcacacggagcgggagcatcatcacagctcgccgagctccgttgcatcagacgcaacggcgatcgggcgggggatctaaccagcttcgaacttcgcgcgcaaacgagagaggcgtagggagacggacgaggagaagcgaagaagccgaagtgccgaacctgttgcagtcggtgcggagaggagcaacgcggccgcgagcagcgcggcggcacagcacgcgacggatctgccgcccaccgccattcttccttgccacccgccgcctaaccgacacacgcggtctcccaccgacagatagatacagagccgcgcccgccctcccgtccgtccgtctacccgacgatcttgctccgtagtgcggcgactacggttgcggccgaggggaggaatggggggcggtggggaggagggcggagatctggggaggtggggagtgggacttaaagcatgtgcggcaggcagcggccgcgtctccctcccctcctcttccccgtattttactgcaggcatgcaaactg

SEQ ID NO: 4600 - DNA, 1046 bp, Zea mays
gcctcgtcgaccagggcggcctcagggcggagggcatcttcagggtggccgccgacggcgcccaggagcagtacgccagggaccagctcaacaactcgggcgtcgtgccagacggcgtggacgtgcactgcatcgcaggcctcatcaaggtacggtaccgccattgcatttgttgcattgcgtatctgatgatctgacaacgcacgcacgcacgcacggcacgacgtgcaagcaggcgtggttccgtgagctccctggcgggctgctggacgcgctgccggcggatgaggtgacgcggtgccagacggaggaggactgcgcgcggctctgcggcgccaggctgccggcgcccagggcggcgctgctggactgggcggtgaacctgatggcggacgtggcgcgggaggagaaggctaacaagatgggcacgcgcaacgtggccatggtgttcgcgcccaacatgacgcgcgccgacgacccgctcacggcgctcgcgcacgccgtgcagctcatgaacttcctcaacatgctcgtcgagagggcgctcaagcacgagcaccaccggctggcctcgtcttcttcctcctcctctgcacgagcaccgactcggccacattcagagtcagagatgcgcagtagccatgacgatgccgaccgatcgccggatctgattaagtagcaatgcaaggtcgttgtactgaaatttagtgtaggagtagagagtgttttgatttaatcttcgtgtgtttgttgattgattgattgattaattccagcaaattaaaccagcagtgtgtgtttaattcatgtgcccatgctctgttcctctcctctagctatcaaatggccttgtgttcctcctcatcccttgttaacctgtgccctcctcatgctccacgcttctagccggggcactctgacggtgctagtgccattgttgaacgcgtacatgcgagtgccgccgtcgtcgacgagcgccgccggatagacccgggccatgatgcacaccctgccgcctccaccgaagctctccaccgcagagcgat

SEQ ID NO: 4601 - DNA, 958 bp, Zea mays
catcttgcatgcctgcagtttctttggtagacataggtgggcatgaaggtggttagttctttaagatttaagatgctaatctttatgttgagttatactgtgattaaaatgaagataaacatatagtagtgtggtctgtggtgtcaggatttgttttcataaaaattctttctgcatgcttaggtctgtttgttaaggtatatgctagtgtaaaagatggtgctctcagacatatccatgattcaaaattaaattagtggttgtgacgaagaattttgagctgggaaggcagtgtccacaggcaattgcttagagccctgccctgctgtgtatccttaaaattgacatgaatttaggacccttgtgatttatacatctatgccaaattgccaagtgctacttttctctatgtggaaggagatacatgcatggaaagttttgcgcgagccttgagtgtatcacagactatcacagctgagagggatatctgaaggatatatcatgattcatgattaagttaatgtgaagatctgactaaaattgtgcttgcagtaaacaaaacagttctggttgggaaccacagatctcttaggaacattgtattctgatctgactaaaattgtgcttgaaatgaacaaaacagttattggcaacctcagatgcttagatatattaggaacaaatgtattccgatctgactaaaaccgtgcttgcagtgagcaaaacagttcttgttgggaacctcagatctcttaggaacaaatgtgatctgatctgactaatattgtgcttgtagtgataaaaaagctcttgttgggaacatcagatatcttaatttttttgaaaaacgcaggagagctgcgcatatttatagataagatagaagaaagggtcttacaagagaggtacaggttagggacacctgcacccacacacacgcactatcaactgaaacaaa

SEQ ID NO: 4602 - DNA, 1022 bp, Zea mays
aatctagttttcaagactggtggcataggttaggaacgacagttcaaaagacacaaaagaaaggattcaattcagctgtgatcctagtggcctggtggttgtggaaacacaaaaactcttgtgtctttgatggggctactctggacatctctaggattactcaagacattagggacgatgccaagacgtggtgtctagctggggctgcatggctgaaaggtttgtggccttaactcagggggagttcaggcctggtcgtcttttatatagtcatctgtgtaacagccccttagcaaactttgtaaccacctttatttggtggtcattgtccatgtctattttggaccttttcttcttcttaatataatgatgcgtaactctcctacgcgttcgagaaaaaatgcttttactatgtatctagccatagtgtatatctatgtcatagcaaaagctatgcatctaaaaaagccaaaaacgtcttataatttggaatggagggagtatttcattttcaagttacgtgttcggtgttcctagcaaatttgcatgtctgatgtcaaatgcatatttacaaatggtactgtgcatcatggtttttaaagcggtaaggcggtccaaggcgttggaccaccgcctggacgcctaggcgaggtaagcgggcaaggcgactaggcgttagacctccgcctggacgcctaggcgttgcctaggcgacgccttaagaacagtgctgtgcatggattttgtatttgtaaattcatgtttttactgatttacaccaaatatacatgtacataagaaatttagaaatccatgggaggtgaacttgaaatttgatcttaggcatgttttttttcttaatggcatggtgtctcaaacactattgtctcaatctgcctattcagtcttataagtttattatgcacctctcaacttactacatgtgttagtattggcatttgctgtatgtgtatgatgaccttatgctgcaggacgactatagaggatccgcgggaaccgga

SEQ ID NO: 4603 - DNA, 917 bp, Zea mays
ccaggaatgccatgacacgcaactggtgacagcaaccgatggtggatggatggacatgccgtcgacctttccgctaattaccaacctgtcctctaagcaactggtgacagcgagcaatccagaacggatagagtataccacttcacttgctttgttttagcacgtagtagtatttttttcccctatatctcgttgtgtatgtatgatgatgacgagtggatctttagctggtgtctggctggctggttgcggcacagcgaatggatgtcgtgcaggatcggagccaccggacccctttgtttatcgttgctgctatgctcattgctccgcattgtttagtacgcgtcggcacgaagcttgccgcggcgcgacacgcgcaaaaggtaaattaatctcgcggcgaggcaaaatcgctttgcccggagccccccccccgacgggcgacggcgccgggagggaggacggacgtgaactgctgctcctcccggtggctggctggcatggcaggcgcgacgccattacttggtcttgtacacatcatgtccgtagtcgagctgtcgatcttacttgcaataccatgctgggcctacggtgcggtgtggtgcagctaagcttaggggatcgttagtggattctcgagtgctgcgtatcacggcgaacaacatgtgatgcgatcagaccagagtttcgtacgtcgtgtggtgtcagtacatggaggatggaatcacggaaatggctgtactatatatcctcagaatctgcgttttttgttacaccattgtcttatgtatacagcggccgggcctacggggttcactttgcgctctgttgaaaaattctgcctcgaccacaactccagatgcagactggccattagcgtgcgtgctggattcttctgatcagcacatcgagagcat

SEQ ID NO: 4604 - DNA, 932 bp, Zea mays
tgctgtcttcagctgaacggcagtgtggttttaatttgtttctatttgatacttaatcctttgctttgccaaggctgatgcagtgatgcttaactcacatgatagttatatatttattgtctgtgatgttgagctctcgtttgccatgtatagctcagtatagatttttttagtggctagacaagcagtattttttttttgcgtacaaaccgattggggaattagggcctgatcttagttatatgcgtctgtgtttggcttgttttcccaactaaaatggaatttcatatgaaatgcctatgtattgtgtgccagatttatatttgggttataaaaaagctaaaagataaaacagttaaaaattcccttctttatttgctaataattgtgaaagttgttcggaattctatggtgaacaattcttattccttgatgccaatttcaggtagcagcatctatgcgaaaggatgcagatgccaaaattccgagctatccaaatctctcatctaagcttatatgcatactccgtagtgtcactatgcttgtaagaaatgcttccttcaatacagtatgaaaaataactgctgttgagctagttctcttttgtgcaaacgattttgattaatgtatctatcaacaaaaattgacaggctgatcctgacacagatgaggtttacgctcgaatgactctccagcccgttagcaatgtaggtcacacttccctatcatcaattatatcagctgtattataggatgtacctgtaccaccttgaatttggaattggtactgttaggtgacgcattgtgacaaggagacgttgctggcaacagagcttgcactgaaacaaaccagaccacagacagagttcttttgtaaaacactgactgcaagtgatacaagcactcatggaggtttctctgtgccacggcgt

SEQ ID NO: 4605 - DNA, 899 bp, Zea mays
agcttgcatgcctgcagctgacatttcgcagcgaactcgtggatactccgtttcgcattcatgtgctttgaagtacattgcagcggcgctgcacaaatttccccccttgtttttctcgccacttgcgttcaaacgttggaatcgatggatctgatctgcctgcgtgtgatttgttcattccagcggccgtagaaacaaaacaacacaaacgatctacgatccactctcattctcgtctcgtactcgttcaccgtgacctacctaaacgcgtcgccgccagaaaaactaaaagcaacccccaacccacgcggcgcggcgccgcccgacaccaccgctccggtccccggcgacggcacgatgcggcggcagcctttctcgcggcacgccggcttcttctcctgcctccagcgggtgggccccgaaccgttttcccctcctcctcttctcttctctcatcgcagacaaagccgccgccctccctcggccctgacgccggtagctctcttcgtctgcgctcctccaggtggaagaccggctggcgtcggagtcggagcagcaacatcaggagcagaaggagagcccgccgccgccagctacagcaaaggcaacggcaacgacgcgccaaaccgaggcgtcgccattctcggacaccatgaccgcctccccactcctcttcctcgacccagcagcacccgcaccagcgcccggcagcagcagcggcccggcgctggacttcctcaccgccgccacccaggagggcaagcacatccaacaggaagacgacgacaacgatggcggcggcgacggcgatgaggaggacatcgcgcggctcatggagctgctcggcctgtcatccggcggcggtggcagcagccgccgcgacgacgacggaggcgggt

SEQ ID NO: 4606 - DNA, 930 bp, Zea mays
gcatgcctgcagctcctccttaaagcttttcgctgccgccgcacggcgctcggtcgccgggtggtaaccgtggacaaggaacggaggcggaggtggaggcggaggcggcggtgaggagatggaagatgacctgtacgggctgctccgcttggccttggcgtagtactcctcctcgctggcatcggccagcgtctccccggacaaggacgacgccggggacagcctcttgggtgacggcgtggagctcggcgacgcgggtcggcgcgcgtcgagcttcccggaccgcgaccgccacgggatcggcgaagcgagcacggtctcgtcgagggcgcagccggccgccaagtcctgagagctccgacgccgccgcgcacgcggcgtctcgacagcccccgcgctggcgtcctgtgcgggctgcgctttcagcgtccggacgggcagagacagcggcgcctgcgcgtccgcggcctgcccgatccgatccccgccgcctccagtggacacgacgacaacgggctcaacgggccggtgcggcgctctccacgagcgcgccctgccacccccgccaccgccgggagggctgtccggcaccagcacgtcgttttcgtcttcgtcatcgaacggcgggatcgagtccctgaacatccgccacgcgtacctcgcgtcggccttggcaggttctggccccgtggcagcgtgcttctctgctgcgactgcgacggccccggcgcgtccatcgtcggcgctgttcttgcggctgaagaggccgtacgagacggcgatgccgacgaacagcaggtgcagcagctcccacactttggcgaggaactcctggccgggtcccccggccccgacgtccggcgcctgcgtggggaggagcggcagcagcgcgacgcagagcgcgagcacggccgccttgaacgggaagct

SEQ ID NO: 4607 - DNA, 879 bp, Zea mays
atggtaagtcatcagaaggggccggctcttcggaagacgacgacatggatccgagcggccgcgagaacgagccgccggagatcgacccgcgcgcggaggacaaggagctcaagtaccagctcctgaagaagtacagcgggtacctgagcagcctgaggcaggagttctccaagaagaagaagaaagggaagctgccgaaggaggccaggcagaagctcctccactggtgggagctgcactacaagtggccgtacccttcggtgagagactaatctcccgtgcggccgtgccttaacacaatgctgacagatcgattaccgtactcatacagcacgcgcgtgccttgtgcccttggctcgctgtgcttgtgtttgtctgaacatgcaggagacggagaagatcgcgctggcagaggcgactggcctggaccagaagcagatcaacaactggttcatcaaccagcggaagcggcactggaagccgtcggaggacatgccattcgtcatgatggaaggcttccacccgcagaccgcggccgcgctgtacctggacggcggcgcgttcatggccgacggcatgacgacgtatcgcctcggttcatgaaccgccgtggacaatccaaaaccaccgggcgaccgtgtcggagtgtttctgcgtaccaggaagatgcgatgcgagggacgttgttaattatgggggggttttgctgccggtttccgcgctgatcgccaccaaccaaggcggccggtgcggtcagtgatctagtggcgctcgatctaagttgtctgtggcttctgtaatgttgttgttgatttcggcttgtaatctagctaggtattgtttcgaacttgagttgaaagtctgtgcaagtatcctgca

SEQ ID NO: 4608 - DNA, 1031 bp, Zea mays
tcatgttggttgaagggccaatcagagggttggtagccatggaaaacctagcacgtagcttctgtgacaagcacggctgaacagagcaggacaagataacattgtttagagacgcatttgagaagtgaacggatgggctattgccatgtttcttcagatagaaggcggcaaaaggcagccatcatgctgttgaccttcttgcggttgcggagaactctaatctacctgaccatatttcgtgcctgcctttgctttgcatccctcgtcctcagttgatagggtcccgtctcccgaacttgtcttgtcgttcgacccttttcatctcctcatattgtgttcatgtttcgttcatggatgagacgaacaatgctccacatcccacgaaaggcatatttccatgaaagtcgtgacttccgatgatgccaaaaatcctccggaaaatgcatgaaaggctgtaaagtttgatgcaatactatggaaatacatgaaagaaagacccatatgctcttcaaattcaagcgtaggcgacaaacaggccgttggagggacgggaaatacatacaataatataaacgtacatgagcataatattttattcctcccgacaccaccgcaagcactggacgtccgcaggccgttcgttccagctcggccggcgagaccacatcgtgatcgggcacgtcacgtaagcttttcgaaaaggaaacagaaacgcttgtcctcaccggcgtcacgtcggcgaccatgtcgtgcgccaggactccggagagagacgacaacggggccggaataatctccgtgcttcccccattggttccttccggggggcatcagtcagatgagatggcgacaaacagacagacaggcaatcaagtcactcggcgcagctcaatcagccgcaatttgattccttgcaggaacgatcacacaacaactcctgcaattattccatttggttgtagtgacgtttaaagccacggatcacgacggatgaggacaaggagacgcaaaagctgctgcaggcatgcaag

SEQ ID NO: 4609 - DNA, 990 bp, Zea mays
tcttgcatgcctgcagcgcgccgtggaccgcgcgtcggcgctgctccgcgcgcgctgcggcggcggcgcggcggtggtggagtacacgagccacgcgtgcacccgcagcatcccgggccactacgtcatctactgggagctgctggccaccaccaaggccagcaagcagggggcggcgcaggccgtggggggcgacgtgctggagcgctgctgcctggagatggaggaggcgctcaactcggtgtaccggcagagccgcgtggcggacggatccatcgggccgctggagatccgggtggtccggtcgggcacgttcgaggagctcatggactacgccatctcccgcggcgcgtccatcaaccagtacaaggtgccccgctgcgtctccttcccgcccatcgtggagctgctcgactcccgcgtcgtgtcgcgccacttcagcccggcgccgccgcactgggcgccagctgctcgcccgtcgtccgactagaccgcggtgcagcgtcacgttcgccgcttgattggtcgcacctagtagtagtagcagcagcagcattagcgtttgttttttttttctggtcgtgtcaggcggggcagtgatgatgcttgtgttaattattaggccagtcgctctgagctagaggagtgtgtcgatgtaatgtgggtgtgggtgtgggtgggtggacactctgcaagttgttgctgggtgttgttgatcactggtagtgcagtgcttagtgagtggtgccgttgctagtacaagtactagagttgtatcccaacaaggaaatgtgagtattgacgtgcctggatggtggtatggtatcgctgtgtttgtcgcgttttcactgctagtggtagaattggaactcgtcagggatgatttgctgcaaataatgataaaatccagagttgcagcatgagtatcgtagaccggaaagccaagccctcgagcggagcatcaatagtcaaaaaggtagcctgctacgt

SEQ ID NO: 4610 - DNA, 913 bp, Zea mays
agcacgtccatgccggccatctcctcgatggccgtcatgcgcttggtgatggcgccctgctccgacagcctgtgcgacccgatggccatggtcaccgacagcacggtgggcatggcgatggggatcccgccgatgagcagcacgagcaggttgtcgatgccctcgcggtactgccggtgctggatcgggtacatgacgatgatctcgaccagcatcccgactgcgatggagcagatgcagaagttcccgatcgccgtcagcacctgcacgcacgacgacagtgaggaccggaaaacgtcatgcatggactgcgatcactgcactgcactggggagtggtgtatatatcgtgtgtgtatatataaatatacatgaccttctggaagtggccgacgttgttggtgctgtcgacgaggtgggcggcctttccgaagaaggtgtggacgccggtggcgatcacgacggcctcgatctcgccctgcttgcaggtggagccggagtagatgctgtcgccgggcatcttgttaacggggagcgactcgcccgtgagcgctgactggtcgatcttgagcgggtcgccctccagcagcctcgcgtccgcggggatgatgtcgccgagcttgatgctgatgatgtcgcccggcaccaggatcgccgcttcctgctccgaccacttgccgtccctcagcacctgcatgcacgcgccgatcgatccaccgtttcggtcagcacaacgcgcgtatgcgacgcaacagaaacgccggatcgcaggaccgtgccttggtctgcggggcgaggctggccatgagggcggcggcggcgttgccagcattgttctcctcgataaagctgattgtggagttgatgaagagcagcgtgacgatcccgacgaagtcctgccagtccggcggtct

SEQ ID NO: 4611 - DNA, 928 bp, Zea mays
gccaacgcgtagctatgaagtgggtgccacttgggctacaccaaacaattcatcagaaattagattcaacatccagtatttcagagaaacagttagatcaatgcattcatttgattcctgtcagattaagacatctcaaaattcagcagcaaatcgagaaatgcatcatcaaacacaaaagaaagatggtttttaatattttaagacagatggaggagcttaactgatgatattctagtgacgtcaggggtctcatgctggtccaaagtagccttttcttcaggcgttaggagaagctcgatctctaggcaaacaaaaaattagtggtagtgtagaacacaaagaagtagagcggatgccttctcagagagtggaccgagaagtagtaaggagtgcatttgtgtgagaacatcgaacaatacctctccggaggtcctgttcttgctgcgccgacgcctcgagcctgtaggacggcgaggaagatgggaaacgcaaggccctcctttgctccgggccgtcgtcctcgtagtcgctcccggagccgtcgtctggctcctcccagaagacgtcgccgtcagaagcggcggcgcgcggcggagggatcaggcccgcgcacagcagccccgggagcgagcggcagagaggcggtggagggcggggagcggcggcgcggtggggaggagcaaatggcacggcggatggagtgctgggtggtgacgcggtggccgcccacacgagcatctcgaggcagccggcgtccggcgaccaaagccccggttttcccgtcgagttctgggcaccggcggcggattttggtcgggtagcgcggcgtcactgctgcttgcgtctgatagaaatgacggagacagacgacgactccgctggccgaggagaatatgggccggctcaaaatgatgtgctaggcaga

SEQ ID NO: 4612 - DNA, 876 bp, Zea mays
cacaaaagatagtcttaataatattacaaaagataaatataacctttttgctgagtgagaaggcagttaacaatatttgaagctgaactcaggccacttaacttcgattaaatgggtggttccagctacagttttaaactccaagttgtgcatagcaaattgcttccggtactccacaatcaacaaatcaagtttatgttcagccatttttacatttacatgaccttctgcaacctataaaacatgcaagtgtcaagcctcagaacaggtaagcaaaacaagtccagttcgttttgagggaagggtttacctctgggaactgatccacagatgcaatgaacaggtttagcatatctccttgatcagccgcatctttgttaagacaagacagaagtttcacagcactattaagtatggtggatgatgaagctgtatttattagccttcttagcaaagaggagtgcacagatttatgtggagacgagacaatgccaatatcctcaagaacaagcttctgtagctgcttcccagatgtgaggatagactggataacgccaacaaactgtaaagcaaacattaggcaatgaggcaccaataagagaatacagcagtcagctattggtataaatatcaagtgaccagaatgatatgtagcgaggatacacaaaatggcgaaaaaatcagtttgcactttacaatcaactacaacaaaaagaaagaatacacatttcacctctttagctgtagctttgcaatgaaaaatcctagttattcctctttgaatgtcaggcgaccttcccagcaatgccaaaactgacgaaaggacagtacacaaatcactaagcactgaagctgtgcaggatctatcccctccat

SEQ ID NO: 4613 - DNA, 870 bp, Zea mays
aacattatttaggcatgcaatgctgggaaaccaaactcgcaaggacatatagaaccaaccaacgactccagactcacctggtaaaattatttaggcatgtcttgaatatccaagaagtattatggtagctataatcatattcgtcctttgggaatccaacagaaaatcccttctttaccacttgtatgatatctgcataacttgcattagtacccttcggattggtaccaaaggaaatctcggccaagtatccacaaaaaggttcaagagatccgactgtgcaagccccatactgtacatatatataaacaaaggaactgctcccactcaggcaagtaacgggcttgtaccccaagttattcgtaatcctaactgctctcgaacaattaacaaagcatgcccacaaagaggcatcatcagtgggcaaatcgatatgggtatgtttaccacttctccagaacaatccctcagaagtgtaaggaaactgatcccaacgaggaagagggcagctgctgtgcatatccaaattggcgtccacaacccagaaggaacgattggtatagttgatgctggtgacaaaatatgtccccgtgttgatgcgaattgtagccttgccgttgctacagaccagctcgtatgcttttacaccgcactcttctgggtcgcctggcctacggaaaggtttggatatgttgccaagatcaccacaggagaaatgaggacacggaccttggccaccagcatctacagtcacagaaataaataaataaaaaataaatacaagtaaagcttgccagatagtggaaggatgaagatcaccacaggagaaatgaggacactgaccttggcctccagcatctgcggcaccat

SEQ ID NO: 4614 - DNA, 958 bp, Zea mays
caagaatttcattagattgacttccatcttaggccatgttcgttttttccaaatccatgtggattgaggggggaataaatccacagctagtcaaaatctacctcaatccaccccaatactcctcaatccacatggtttaagtacaaaacgagtaaggccttattgtttgtaccaactaaaataaagttattcgcagttttacggctgtactattgggtgcacctgtacagggaggaattgcaataaatttctgcatagtccactccaatttcatattctgttatgtgtgaactgatgtctaacatccatgttgctgggttttgtcccttgtttattttaggaacgcctggtatggcctgttacaaagtaattttcagtattttcttctctctgcatctttcaaatataaacgtctatcttaggcaatcttacctcaaaatactttatcatgttgctagagagtggacctaccgaaccactgtatatgagctggccacctcttttcataagcagaagctgaaatggaacaaatttaatttaaaacttaggatggtaattccatagtgcctatacgtacttgtataaaagaaagaccagtttatcatgtagttctttgattgtcttctactttaacttacaactgcattttacaacttcattcatacttctgtacatttgtccaatttgactgctgtttaagtttgtcgagaatcatgtttgttttaattgtgtaattaccttgacaccactccagcattggactatcatgtttctcaattgcttgttgtgtctatgttttgtccacttatatggctataccatctaaacttgttcatacctcatcaaaagattcaaaaatctcaatgcttggttgatgaattgtgcagacaacagttcgtccagtgtcaaccgtctttcgtactgttctcatgacaatagctgcaggcatgcaagcttg

SEQ ID NO: 4615 - DNA, 911 bp, Zea mays
actttgtgccgctccagcagcctcctgacgctggcggcggcgccccctcccagcgtcacagcattgccattctgcgccgtagccttgttggtgccaccgccggctccgtccgagaactggtcctcgtcccatgcggtggttcgtcctggcgggaggagtccggcgcgcgcgtggcggcagaggagggagtagagcgcgaaggtgccgccctcgccgtggtcgtcggcgcggaggacgacacagacgtacttgaggagcgggacgagcgtgagcgtccagaagacgaaggagagcacgccgaggatctcctcgttgctctccgtgtgctggatgtcctccgcgaacgccgccttgtacacgtacagcggcgatgtgctgaggtcgccgtacaccacgccgagactctggtaagccaggctcagcgtcatccgccacggcacccccttccgtcctccccgcttctcctcctgcggacacagcgcagccacacaaacaaaagaaaccagcgcatttcaggaccgggactctccaaggtcgcaagaaaacccccggacatggggcattccgagattcaggagccagggtgacgacgagagaacaggagccgcccggcaagattggaccttttcaaacagcagacaactccggccaccgtacctcgtcatcgggaggagtgcccgccggcggcgcctcggggtccatgacaggggggctcttcatcgcggcctccactgcccgctaactccggtctgctcttgtaaccgaagagaagaagagagacaactagtgggggagttgggattaagtgacggtgacggcgttgctcagcggcatcaccaccaggttattggtttctcgggcgttaggaattcgagcaggaggcgtgaaggggatgtgattcggtgcgacat

SEQ ID NO: 4616 - DNA, 907 bp, Zea mays
attagatgacgacaggagactcaatagtaagggaatggcaccagcctcggcaatgcagatacgattgtttgcattccgctttgccaggagccggagctccgcagcagctgatctctgttcctcaggatctgcggagcataacttggagagaagagcgtcgatgttagcacgttcgctcgaagagcacgaagatgtaggtttgtcaggctgcgtcgagcgcttcggtggatcgatcccgttggcctcgcaccactgtgcaataaggcttctaagaacatagtttggtgtcagtgttgtgtttggcatcctctgttgagtatttggacaagtctggtgcccagaagctagccatttctcgatgaatgcccgctcatatgtctggaaaaaaaacacaaaccaaaaaaaaagatcttatattatgaattgaagttcgcttgtacttgagcacggaaaatagaatcagatgtatgcacctggccagtagcaacaataacggggtctttcatcagctcaagagaaattggacaccggaactcatcagggatgtttctgggtcttggctccccattgggatccattagcttggtagtcatcggcgggcccatttcagggttctgagtttgcacaaagtccttgatcttcttcagtagcatcgacattttttcaatgtgttctccaggatcattaccgccaccggatgccaccatctcatgcaaagcaagcgattcttgtgtgagatcggtgatggtcgtcaggtgcagcttttctgacaatcttccaaggatatccaattcagcacttgggtcgtggctcttgttatacagtgaaagtaattcattgtagaactcatcatcaggcatgtcaacccgttctttggctcttttgagctgtacatgcactaactcaa

SEQ ID NO: 4617 - DNA, 971 bp, Zea mays
agtgaaaacgtctcaccctcgcccgtttgctgaacaagtggtgctgaactagggtacagatagatttaaagatcctcttttttttttccgctgtaacgactgcgtgcttccgcttcctgctgctattcttcccatttgctgatgaagcagcagaacccaatgctttttacaaactttgggcgattagatacttcagggtgctgtacaataagtatttcctttggcctgcaccatttctgctgtcattgtcaccatttcagcttttagaaattaataataagagcctactgcatctgtatgtgcacctaattcacccatagggatgattcggatgaacaatgatccgttgattcatgtgtgcagcgataatttctttcagtttgtcgttcatgatatgtatttgttattacctacagtgctcaaggtttctgtcaaaggaaacaatggcaatgattcttctgttactgttcggttgtatggaccaaatacagacttggtgattgatcggaaaagggaattgcaggtgagaatctgagtggtatttatatgctttccatagaagcagttttttttttggcctttgggagtggtacaagattgtgtgttacctatagtattccacaatgactctaggcttcttgcattaccccttgtgttagtcatatttttctagtggcacgttttcaattcttctagacacataatagtaatgcttttgtattagcatctgttctaccaaatgcattgccttttgtttcatatctgtaccttttccctgatgaatggatttcatttcgttctatggaaaatgctaacatagaatgataattttaagggtccctagactgtacacgtagtataatgtacccataaaattaaatctcatttcgattctaaaatatttcctaatgcatacatctactaccgtcatggttaggcgataccgtatctctcagctgcaggcatgcaaa

SEQ ID NO: 4618 - DNA, 843 bp, Zea mays
aaaactaaattcgggatcaaaacctaaccccacatcaaatccaacctctaatcctttaattcccatgatccacaacctccaaaagcctataattacagggaggaacaaggatctcatccatacctagggtttccccaagaaatcttcaagaggagatggggaagaacatctccctgatcctctcttcctcttcaattcaacgtgcccctccttttctcgatccttgctgcgtagggggagatcttgggggaggaagcaatggaggatggctgccatagggggagggggcgtccagccaagggggagaaaaagggggtggcggccaagaggggggtgaagggaaaaaaaggggtggccacctagggttttttgtgggagaaagaaacgacgcctcagatgacttctatctttgcatccaatggcccacaaccctttacctcatccacgcaccagagattaacttttggtcaacattttttttgggatattacactttgtctgatagctttgtcagctatctctctttcaccactaagccaaacttcggagtaaaactttcctcctaggacaatggcttcggtagagggctcctttacatcatcagctgaaactgcaaagtttggttgaattacaacttttgcgtgatcgcagacaaccttttcaagtaatggcatcgccccttgggcccctacgcaagcacataagtccccttggcccgtaaggacttcgtcaaaagcatcgatctcaccttcaatccacttaacagcccctttggcatcacctcggacaagttttcatcacttgagaaagcttcaatgttagtaaacatgcccttcagcttct

SEQ ID NO: 4619 - DNA, 1050 bp, Zea mays
tgcatgcctgcagtcaatcattacctacacatcgcgcatgaaaacacttatacatagagaaacagacaagattgacatacgtgctgatgcagaattactgaggtattacatgccttgtcttcagttttattattactgtgttcaggaatagacattaaaaggagttctgtatatttttggtttgtcacacctagtgctgattgtgcagaagaattcttcttgatggtctagttatgtgctcatgtgtgagatcagagatcatattatatacatgaattggttgagttttagttgggaaattaatatactgtttaggcatttgaatgtatatgtcactttgttggaagtagatatgatattaatattaacatgaagcttgtaattgaaaaggtctcgtaatgtgtgttgatttttgtcaatcggtgcgttctgaattgagttgctgcacatactagctgactaagctgagctgcttataattttcgggttagatgttgaccagatgtacattctttcctaggtataaatatgaaaatgagcaggttattgatgctgcttcaactgatgcaagctcacccttaccgtatcaggtgtatggcaatgggaagattggatctcagttgccaactcgaggaacatatgatcagctattagaaagacaggtagttgcatatgaagtgttctttttgttctggtgcgtatgaggtgttatgatgtcgtactagcacaagggttatttttctttttaaagttcacacttctttctatgaatgaaaccatcacatctacatttttatattatttcacatcatgtgtttgatccccaaaatcagaaatttcatgttctcttagaactaatattattttgacctgctttattttaatttatctaaaatattcaacattgctgctattggatttacttttttaaaagcaaaattattcaaatgttagtagtagtagtactaaaatactgaattcctggaaggagaaaacataattgaaacctgcaaatactgaattcctggaaggagaaaacataattgaaat

SEQ ID NO: 4620 - DNA, 972 bp, Zea mays
agggagacggtgtcggggagctggaacgacacgttgttcatgctcgcgccgaaccgggtgttgttggggccctggcagaacgggccggggcggcagttgaagagcccgaaccccacggtggtgaacacctcctgggtcaccgggccgggcaccttcaccggcactgggctccggagcctgttcgagaaggcggtcgccgtgttcgtgtcgttgaacgccggcaggaacgggagcatcggctgcggccctgcgcggccgaggtagccggaggacctagaggaccggcctactgggccgctgaaggtgccggcaccggcaccggctccagcccctgccccggaggtggtggggcagccgggggcgttcttgtactggaagatggcggtggcggtggtgttgtcgaagggaacgccctgggccgaagcgtaggcgcgcgcggcgaggtagtatcgtcccggggctgcgtgggccgtgacgaggacgtcggtggtctggccggggccgaggaggacgacgtcagtctcgaagggcttggtgtacatggcgtccgcggcgaccacggtcatcctgtggccggcgaggctgacgaagagctcggtgttcatggccgcgttgatgatgcgcagcaggctcgtctcgccggcgaccacggggatgatgctcgtctctgcattgttgggttgggtgacacatgcatgcatgaacaacgcgaaagaattggttgtgagctggggaggggtggaggtctggaggaggagaaaagcatgcatcatcgctggtcagagtgggtgacatctttcgcattgcatgctgcaaattggttagaatgtttcttccttacaatcttttattatttgtggtgtattaattcacatctgaagattgtctcttcgtatcgtcagtttgtagtaggacagaatataagagagcaaccaaccaccaggggaagcaacttagctgcaggcatgcaag

SEQ ID NO: 4621 - DNA, 959 bp, Zea mays
agcttgcatgcctgcagcttccctcgctcacttgccgttggcaagccccgctccaagcatctccgcgcctgcttctgccgaatcgcagagcccctctcccgcttcccccctctcccctcttctctcatcattgattcgattttcctcgcccctggagcttcaaattcaagtgaaggagccagttaaggcttgccaaaactagcggcggcatcggcaatgctctagttggcctttccttccctcccagctcgagcagcgcagcgcggccctctttatctctctcggcagtggaggcagcgtcacccttcgcctaaatcaccaccaccagctctggagcgctgcgtcgccgctcctctaccatttcctggtagattggaccggaacggactaacggagtggagttctgctattggtgagaggaaaccctagcttggtctctcttgcctcaattcggcggtggttttgattcagtagctattggtttttcgctctcattcataacccaaatttctacctccgcctcagatcattgtgagttcatccccactccaatccatctgtccatggtccgtatgagctcatcttcctcggcgtctggggtcaatctgacagaggtgagtgcgcttgcagttccttgtccaaagatttttctgccgatttcaatgctgtatttttcgcttgcacttcttttttttttggcaaatgtagatccatcaaggtaaaatttactccgcgcacggaattttggctagtggtgtctcagtcacacaaatataatctgtgcatgctgcggacgcttgtaatgcacccactgcttgaatgttctttgcttcctatggagaatggccatacaagagtggatgttactatctttgtctcagcctctcaggctcagttctactgagttacttattctcctgcgtggaaatatctctcacttgcctatcttttacttatgt

SEQ ID NO: 4622 - DNA, 888 bp, Zea mays
agcagttggatcttgggaacgtgccatgcattgcatcgttttccctctctcttcactggattcagcgaacacagcggtacgtacgtgtgggcgcgccatggcccaaagaagaagagatgaatgtggcgacgacagagttttctcgcgcgcactctgtaatcgtcgctcatggcatgcgagagggaatttacgggtggcgtttgtatatatatatggttgcaggacggcgtgcaggtacgggggcaagaacatcgccttccacgtgaacgagggctccactagcttctggctctccctgctggtggagttcgaggacggcgacggcgacatcggatccatgcagctcaaacaggtaacaacaacaacgacacgtcgatgcaaagctttgctagctcttttttttttcccttcacggttcacatgcaccactcgaccacgacaccgcacaacacaccacgccatggatgcgtacgtgaacgtgagagcgtcattattgcggcgcagtgcaagggctttttccctcggctcggccggtgatacggtgatacgaatgtgggaaggtgctggcgtttctttccatagggacatgcgggtgtttgtgggcatgtgatgagtgggatcccccccgctttttctacacatgcatgcggctagggacacgggcgatggttttctggacgcagcagcatatgggccgtaactaggcttttgtctgttccccttttgtgcctgtcccgtcgcgtccattggccattgctggtgggaatgtgtgttcttctatgtatatatgatatgatagtatgatactatctcacacagaacaacaccacgggtggctagcaagtgtaggagggagctagactatcttgatgctgtctgcaggcataa

SEQ ID NO: 4623 - DNA, 923 bp, Zea mays
ccctgcgaccgccgctgtccttctccacgccgtcgcggccacccttcgccgcgcccgacgactaccaccgctttccaacgccggctgcggccacgtcccccgccgccacctcaggcggcgttggcgcgggggctgctcctcctgatactgtcgaggaggggctggtcatacggactccggtgagacgatacttctgctccactaggacctccggatttgttctcccttctcgggtctacactggtcataagtagaaacgcgtgaaattctgaccaatttcattgctatctggaagtcttcctgaagcttaaatgctcacagttatgctgtcagacaggtgggaactgcaattgttatgcaactaggatccttatcataaaacaatttatctcacacagtcgtcccttcagcaagattaagaaacaaaggggaagttttatatcagaaacagaaatgatttatgtaatgtagatgtgcccacaaagagatctggtatataaatgcaattctggtcaacagatgctactacatattccccttaatcattgccataatagcttacatgctgtgtggctgtaggtaggatttggcttgcttgtaggacttgattgtaccaccatttaggtgtgctcatgcgctataaacttctatctattgcattgccaaatgaaagataacttgaattgtttcttatattgtagatgttaaatacctttaccttttttttccggccagtttgtgtctatgcaagcataggttatcttatatatactgaatgcttggtggcattactgttgttcctgttgttgaaatgtgcaagattgtaacgtatcagtgcaaatcatgcttgattgttttgtcggatagttcacatgggacttctgtgccacttattttaggttaaaactgcaggcatgcaagat

SEQ ID NO: 4624 - DNA, 904 bp, Zea mays
gcagtatccccatcactcacacacaggtcacagagcaacatcgccacccatgctcctcggtcctcactaatgccgtggcaagctgatgttgcctatctcctggaacggcgaccgcttcgagagcacgctgctgggtgagcgcttcacgcggcagatgaggacgtgcttcttgatctcctccttgccggattcctgggaccgcgggtgctgaggctttgctctcgggtactccatcttgcacgcatctgaccattgcttttggttaggaatagcagctggggctggtaagtgggctttgaaagtgtgtagcttgctttcaagctctgaaatctttctatgcagctcttccacacgctgttcggacgcttgtgcccggtttttccactccagtacctgccacatgttgaaaactttcgattagattgactatctcattgactgaccctggcaaaatggataatacgggcacacatctttgataatttgatattaaaaagttcagtaccagaagcattcagggttcagtacttcaatgccagtaattctgaagttcttttcgacaaatagtgtagttcagcagaattcttgagtaagaattatggtagaaaatgcagtaaaaatttcagataaacttccgttaagtacttaagtgttgtcatcgattcaccacaggtccacagccttcacaatgcagcatcttggttaccatgagtctaatagacaccaaaataccccattcaaaattgatctacgctcagtacttcagtgcatttacgtttggcacgaataaattcaattatgaaggtataagcatagctgcttagaacctctacttacttgggaattcaaggagcgtagactgatgtcagaagccatagcccgatgctgccatgcatctctggaa

SEQ ID NO: 4625 - DNA, 1012 bp, Zea mays
tttatcataacaaactccggaagtggccatactgttcctggggctaggtatgtggatgactggatgttagtattttcatagaaagatcatgaccctgcgagttccagctctacagtacggaaacttacggataggggatagtagcctaaaccgatctacccaccgctacatacaggttttgagctttttttccatgacctcacagtttaaaaatgtcatcgaagctctgatcctaggagagagtttaactctggtttcttgtcttaaagtgcccctgcctgcgcatcagaaatacactgaagcatttcaaatgttctatgtaggtataaagagtaccgtctccaggactacagctcctggtttgtcaaacaggcatgtcatgtcacgtccctttgttcgaaagacttctatgttttctgccgtagtacaatacaatagatttgctcattccaccgcgagatctcttccaccgcgctaccataactctcttcattttatttgtgtgtatttttttttcaagtacagctcgatgacacggagaaatgggctcgcctgaaaagctgcctggtgaagatagatgactgcaatagcctgtcgagaagatacaaggtgactcctgtcctgtcctgtccttcacatgattcacttggttcaactctgctggagctgctccctttttgcagccgttgctttcgttgagatcttaattaccagcccccaacttcgcgtgcagaccgcgagagaatacaagctcgcggacctcactcccatggagtcgggttgctgccgcccgccagcagagtactgcgcctggatgcccatctcaaccttttcttttcattagtggtcagcgtagtctctcaggcacgggcatcatcacaagattgctctggttttttcaggtgcgggttcccagctctgaacgcgtcctatttcgatctgagctatcacccggcgagcgccaacgccgactgcaaactgtacaggaacgcgcgctctgtccggtgctacg

SEQ ID NO: 4626 - DNA, 1000 bp, Zea mays
ctttaactatagagacaaaatattgtagaatattataaaaggtaacatcagccggataaaagtcacaacaaacatggtgcgaaactggcagtgggcgaggcagcacgttttttaaaaaaaaacaatagcggcgctgctgcgctggcagaggaatcgagcggtcatgaaacggccagggccagccatacacgaacgtgatgtgacgaacaaatccatagctgcacgcggtgctttcgaatcccgggaccagagatgcagtttagctcaaacagtccttctcaacgcaacaccatatcagtcaggacaaacgacagcgctcgacgaaacctgagcgccgctggaccgaaagcgctaaaaatacgagcggcatcatcataaacatcacacacacacaggtctcatagccgaccagtttcgatgctgccgtgcggtcgatattcgctcgttgttctctgccaaaccccgaatcaaataattttatacacagcaattggagaggcagcctcgtctgatcacaagaacggtggcatcctctgtgaagtgggcacaggcggctggtatccgttctcggggcgactctgcggcatccgctccccagcaggccttctggtaaagcttccatgcgcatggttctgcatgggattgaaggtgccccattcagcaggggtccaagggaacagatcatatccctcccggccccatgtgtacgctcggtcgatgccctcggcatcagaaacgctcctgttcacggctccaggagcgggaaacccgtggccaaggggccctgcaatctcagctgaggaagtcgctgcgatgaaagacgtaatcgtcaaggctctgggcctaacccttctggtggtaggagggaacgggctgccctgcacagatgagtgctggtacatatggcccggtgcaccatggccatggcctctagtctctgccacgacggctggaactgaccctaatggtgccaccagattgcttccgctgcgaggggtca

SEQ ID NO: 4627 - DNA, 985 bp, Zea mays
gcctgcagcgagcctgagcatgtgcctaggatcgccgggctctggatgtcaacaaagagattagaatttccaaaggaatgacaaccaaatgaacctataaatttttttatggcaacgagggggttcataagattttggtaagaaaaggattatatagtccccccacccacgcacacactttgattgtcttggaggcttcgatccggccgtcaaagtcaaaatcttgtgacggcaccacgtggcacgtgccctgttgccacgtgtggagatccgggaagttggggaggttgacccttgacgtaaaatcaaggaatctggagcgcacggtttgggcctggggatcagctcgcagggggaggagttctgggttctcgttgtgggccgcgtggtgatcccggacagtttgctagcgggccaacaaatgcgatgtcgctgatggaatttgtggtcacgctgctccgcccattacgctccgttttttagagccttgtgcatttatacagaaatactaatagacaaattatttttagttgtgttgttagaccgtgtttagagctaatagttaagtgctaaaaattaaaggtagagatcccgacctccaactaattggtagctaacaattagtttattagctctgtttagctaaacagggccttagaatgttaaaaaaaacaaaatcgaagaagcacaggtcagaatgtcatcagttgggtctgttggtttatttctccacaaggatgctctggagcagcttcgagtgcttcttggatactattgcaagctcaatttctctcttcgacgctagcagggaagctcatgcaagttcagatgcaagtgctctgtcattcattgcaagttcagtggttatccagtaaagtctggctccaaattctcattgctaaggacacgggtgctcgagctgataagcatggacattcagatgcatgcagaagtaattaattgtcttactctgtgctttggcatg

SEQ ID NO: 4628 - DNA, 974 bp, Zea mays
tagttatattcagcactaggagtactatatatactatatgcattttttttgttacttgcttgtccacatacacaatgatccttgcatactttgctttctaggcggcctccattatattgcatatatcatcatcatcatcctcatgtgtgggtgcacattatattatttctatctccttatgcaacgatgtgtatgtatgtatgtatgtatgatcaattgatctgtccctagctcccgtgacgatatacaaacatttacacggcgagttttggatggatcgatgtgctgtgcaattgcaacaagcacgatctcggatgcatggggatgcatgcagacagagaagctaggccgaatgaaagcaagattgcatacatggatccaagatgcgatttttatccttgttgtttggtgccgcctgtcctagttgcgccaaggcgagcgtatgtatagcatgtagaactgtgtcaggcagatgcaggcaggcaggcatatgatgcttttatttgcaggcacaggcatgcacaccaccacacccggccggcaccggccagtggagttgcctatgtgatgagaaattttggagctttccttgcggcttcggtatggtccagcttttatcatgccaacgactaacattccctgtcttgctgctcttactgagatgtataggtaggtaggtaacttctccaaataaaatacacattatgttaattatattgctccatcatgattcatgagctagctgatatgattatatgagaccactatattctatactattcctcctcccacatgcatgtacctaaccctcacttccactaatttcaggaaagcagtaatatagtaaacaaagatttgagaattaattaattaattgaatataagctagcctctgttgacctttggaaggtttgtatatagtagtatattacttttgccttgtgcttgtgctaagcaaggagaaggcagcaggt

SEQ ID NO: 4629 - DNA, 1091 bp, Zea mays
cgtgcgctcctcctccggccaccacgccttccagcaggagcttcctggtgtcggcgagcgcgcggttgttgacgaacagcctgacgtcatggcagccttgaggaaacctccccccctgcggcgggggcgcagcctcctcttcgtgctcggcacggtcggcgtcggcgtcgcgacggccgtcttctcctccgtcgctttcctgctgcttgttccctgaaaccaggtgacgatgagtcgatcacgacatgcaattcgtcagatcagtatgaaacggatgaggatcagaataataagaagcggggagagtatccagctaggagatttgcctaattcgatggagacatgctccggtggtacggcgacgacgaccggagcagcaggggcactccgctgttccggttccaggacgaccgtcgtcgtcggggcatgctggacggcgacgatgcccttggcctcttcctcttcctgctgctcgctgcatacgctctcgcatcgatgctgctggggctggggctctcggtgcgcggcgagatgcgggcagattcctccgcgggaaaggtgctcgtgctctccacctgctgcaagcaacgtgtagaagcggcagcatacaggtggtgatcctttccttcgtcgccaagcatcagcagggcggcgctgtcctcgaacacggcctcgtcgaaccagaacagcgcgtccggttgctgcccttcgacggtatccgcggcggcgtactcttcgtcatcggtggccgtggcttccgcgcggcggcggcggtggtcgcagcggcggccatcataccaaccactactgtgcacgcggacgcggccatacacacagaaacaaggcaaagtgtgagcgtggcgactggcgaccacacgtacgtacggtacgcatgcatgtcgaagatctgtgaagagtggcacgcggtagttaccttgcccggtcctcggcggcggccctgtggtggtgcaggcgggcgaagagcttggcgaggaggacgagcaggaggtagccgacgagcaggaggaggttgagcgacgcgagggcgcggaagaggagcggcggcggcgccggcggcatcactgcgtcat

SEQ ID NO: 4630 - DNA, 943 bp, Zea mays
agggcagcaatcactgtcctataggttaccacatcaggtttcactccatggtctctcatttcattgaagatgatcatagccttatctagcattccacagtttgcatatgccttgatcagcacattaaaagtataaatgacaggtgcaataccgtcacctagcatcaaatcgaagagatctgtcatatcaactaaacatcctttagtagcgtacccgttgagcataatggtgtaggagaaaacattaggattttggcccttcattgccattgtgtcaaaaacatctctagcttccttgatttttccatacttgcaaagggaacccatcaacgtgttcaaattaacaacatctagtaagatgttgtgtcttctcatttctttaaataccctaactgcctccttccactgtcctgtggaggagtatccatatatcaagttattataggtccagttatttggcagaacacctttattgaccatttgtcgaaggaaagcctctgccttgtccattgctcttgccttacacagggcatggaccacagagttataagtcactaaatcaggtggaatgccccgctgtaccatttctttgaatagatcacaagctttatttacgtcaccctccttaaaaaagccgtcgattactgtactgtacgagcaaacatcgggcacacagcccaactcaggcgttctgtggagaaggatgtccaaagcctcgtctgtccgcttcgcttcacaaaagcccttgagaaggtggttagcgatgatgatatcgacgcgcaagcctgtcctgaggagctggccgaagaacgccagcgctagctctgggcggtgcgcgcgggtgcagcagtccatgaggatggcgtaggtgtgggatgtgggggacagcacccgcggtccttgagcccgagacgccgcgcggttgaagagcgaaacgaagaggg

SEQ ID NO: 4631 - DNA, 1006 bp, Zea mays
cagcttgcatgcctgcagaaaagataacccgtacataaatttcaaaggagtgaaagaagcattttgagatacaatagagatagattatataagatgattgcatgcctactataccatacatttaaccaggaattttatactatttcagttctatttattaccagtaagatcaagtctggattagttgaggcttcaatcgttgctaacaaatttggcaaataagaatgatcatattcatacttagagaaaattatatcctaagtctccgtaaatacaacgttgctacacgaaaggtatcaatgtattattctggaagtgcctcaacaagcttcaagctattcttgaaaaggacctcagaactaaaaaaatatgttatcctacaaaatagctatacatataaaaagagagggtcagatattcttgtattcaattacaaaaggttttgttaagcatagtcattagctgaatgaattatccaaaataatgattgactagtaccagcagagctctttgttttcgagatggcagattggttagaaacctcgaacagcattggaaacacactattgaaaaatcctggatctctgaatgccgtaatcacctgaaaagttatgaagaaaaagaaaaccctaggtaaatggaaccaattctaaaattctgtaacgtttctaaaaggctatatcattacaaaccttgcactcagaaaatggcaaaataagttgaacaccctcaagaaaaaactaataaatctttagcatgatgctaaaaggtacatttctacagcagttacaattcgttttattaaggaaaattttggtccagtaaagaaaatgctggccaacaaaacataacactacagcatctgctagtgaaaatgaaagtaaatgagatttgaagaaaaatactttgtgtaaacacaagaaagctgcttcacggtacaattttgatttcctactgcatgcagcacaaacagaatttagtataacacttggcaagctggagtctt

SEQ ID NO: 4632 - DNA, 941 bp, Zea mays
acgggatataagcaatgaataccgcgtttaataatgactataagaatagaacgagagactataagaatagaacgagagactataagaatagaacgagggaaccggttgcaaaccttgccaatcagagcaggtccaataacagaattcacattgttcacagcctgagagaaaaaggataagttaaacaagtaaagaatgaatttagcaaaatgctacaatattcatgtttgcagcattgtacaggtaccaagatttacaattgcaactcatgttctggaatataaattgtatttctgctgatttgttctatggaaatttgggcatgtttggttatgggccaatgtgagccaagtcaaatgtttggccagcagcaggacttggctgctgtttggttgcatatcaagctgatttggccaggccaccactgtttcccacaggtgaggtggcagacacacattggttgcatgcagttcaaaattcttggattataaaacttcaaataataccatcagtcaaaggtatgtctgatttgcgattagctttcttgatggtattccttgtaattttatccaacagggctttcaatgaggagaaaattattgatatgacaatcgtggcaagacttggcatggttgccatccaatgtcatttattctgaacctgtccaaattgtcttggccttgaccaaagtttggcacaactactaggggacacaaaccaaacagagccttggcaaaggttcgattgatttattacaaaaactgaagtttatcaaatcatgaatgaccttaaatacccattgacatacttgcttaattccttgtaaaacattattttaaaaaggcaggtatgcaggccattgatttcagctaccaattatgaataattttgggaaagataatgcctaagaatccgtttggctggtattttgccggccgttg

SEQ ID NO: 4633 - DNA, 935 bp, Zea mays
cagccccgggttcttgcagataagtgtaaggaacaatacagatcatgctgaggtgaatccagaagccctcgactctattccttggttttgtggtacaacagatgcaagatcattcttcactatcttgaggaatgactgcaatctgcttaataagaagatagtaatttctcctcaagttcacggaaaccacggtagacattctccgtttggttctgtggaaggtttaatcgcctcacctcagtcatgtacctgaagttgcaatacaatgtaagagaatggtctggtgatgtatgaagtggtagcatggttcacgtaacaaaataaaagcaggtcaagtagtggaataatgcaataattttttttaagaatttaacagccaagtagtgaaataatgcaatggttttttaagaatttaacagcgtccaaacaattgataaaaatacatttgtatgaaatagtccagataaaagagaatcgtaaacataggtgtcattaatgtatagacttacctgttcgccaaactaattattttatctcgagcaccttgattcgcagtccctgtttggttcaatgagaatgttccatcaagaaagaatgaagccccagcacttgtggtgcctagcctgtgtgcaatgacagatatcccccactcacggaggattgctagaactgatcgcagaaggcgcaacttcagatttagtgagggtatgattgcaccgttcgataacaggtgatcatacacagaaagtacaggtccaggaagacctttacaggcaccaagaagagctcttgcaacatcatcatcaccaactaattcttctcctgaacttaatctatcctgtagataagagcaggataatgagtaccacagtggaatgctctcacaggtagtctcaagtatgcatgtacggaaagtacagaaaatacacattacc

SEQ ID NO: 4634 - DNA, 959 bp, Zea mays
acggcaaggcgaaggcaaagcaagcagggctcgcgcgcgcgggcgcgctactctgctcgactagtgctctgctcttgcctcttggaaagacgagaagggagaagaggcagagcatgggacgggcgagagagcgagcggaatgcagcgcagacggggcgggcggggcacggtacctgagcctcctctgcttcatgaagctaggcccctgcttgaggaactcggtggtctcgccgaagagcggccaccccattgtgcccggcggcaggccccggcggcggctgtaccgcagctcgttccaccgcagcagcaggctgctcgccagcaccacgccgagcacggccagcaggagcaacagcagcgccatctccttgtgtctctctttctctctcgtgcgtgtgctgcttccaacaggacgagcgaggagggagaggagaggggaagagtggtggtggtggtgctccaactcccaactccgagcacggcagagcaaggaggaggggtgtgctttggttgctgttgtactgggtgccgagcatccctttatataggccacaggcacacacacacaggtcaccttggcgagaccaagagctttttttttctcagtttattatttgtcactcggtgcctttccatttttcttttccttcaattttctcaaactctaatacagaggaggagctagggtccacattccaaggcggagcggattgaggcttgaccgtggggtcacgacaagcgtcaaagctccttatgtgtgccgtgccgtgcgtgtgtgtgtgaaatgtgagaatcatggtgcttcctaggctgctgctgctacggagatggaatcacgcaagaagagatgaacggcaaagaaagaaagaaagaaagaaaaatggagccacagcggcggcagcagcggccgcagtccgatgacctctagctatctatccatccatccatccagtccagct

SEQ ID NO: 4635 - DNA, 965 bp, Zea mays
acggagacggagccggcggcgaggcagctgctcggggcagcgcggtggtggtgcagctcagccgccggcggcggcggcgggtggttggtgttggtgccgccgccaccggccggactgtttgacagaagagagagagcacgctgaaggtccgggacgccgtccgggctggagacggccgcacaggcttcaacgcctgcgcctgaaaagatgcatctttttttcgatatcatctctgaatgtcatcatgttcgtcggaaaatggcgcatttttattaccttgatgatcaagggtctttggactgattcctttgaacgccgtgaccgtgaacccatcgaaatcctcctgatgggcaacatgcggcatgaagtcattccacacctgctgctgctgctgctgacctgacaaaggcagcagcccatcagcagcagctctcgccggcttcaaccaaggagctcctctcgtctccgcgaatttgaagcctcctcctcctgctgcacctgggctatcccacgaagaactcgcacagcttctcatctgaccgtagggaccttcacaagatgacgaggcaagaacccagtgcttatcactactaccatagaacatcgccgacagcctcgatgagccgaaagggagcgcttcgggctggggcttccgcctgcgcgcgttgtggtcgttgagtcgcctgcggcagctcttcttcttctggtcgaactcggccagtccatggaacctgcaaaggaactgcactttgaacatggcacgacgtttttccttcctacaatctcgcagaaggaaacggacagagaggcgagggcgaggtttagataacaagctaaagaactcaccggctgcactgctggcagaagcgccgctccaggccagcgacgaccaccttgggcgccttggaatggggctcgcagactctgtgcttgcgatggtagtctttagcagaggacagatcggt

SEQ ID NO: 4636 - DNA, 899 bp, Zea mays
tactcttgcaacgcagatgataccttatccgctttatcgagctcttcaagttcctcctgcactcaatcgcactgacgcatcagtgtttgaaaactgagaacatcactacttaggtaagggtggaaaactacaacagcttagatagtaattacatctttgccacttgtgcatagttattatgtactccctccgtcccaggatataaggcgtaaccacctctggttcaaagaccaagaaatgcatttaattgtctctataccactgcatcgatatacgtatgcatagagagagcacgccttatattgtgggacaagaataaaaagtggttacgtcttatatcttgggacggagggagtattaacaaaaggaaaaaaaactttgacagatctgacgataatgtccagaacgcagaggaaatgtagtctacagcactgatattgataaatttattatgtggttagttggtaatgtgtagctttgcttatttgcgtatatgttgtgggccagggcataagctgaagattcagaaacaaaaatgacaattgaagatgctctttatatgtacacaaagatgctacaggatgggccatgtggacagtaaatcgataatccaatctctacctgaatggaaatgataacggccaaaaacaatgcagacgaatcatcacaatttggccaaaaaagtgaagcttatgataagttgtctatatcacattcacaagtaaaacttgtggaaaatgttattttctggaaggtctgatgatctatctgtcggatccaggctgttgattaataaaaaacagagggagcaggaatgaccatgctgcattactacatgcttggaaggtacagtatgtccatcacttgatggtatctgctggtatttctgcttcagaaag

SEQ ID NO: 4637 - DNA, 1012 bp, Zea mays
  unsure (1)..(1012): unsure at all n locations
acgctgtccttgcagtcaaaagactgctgctgtgctgtctgccgcagtccttgcagtcaagaactgctgttgctgctgtcctacagcagagatgctgtgcggactgtcctccacacgaagaccacatgacttattccatcacactttgtattggtaagcatactgtttatggtaagggccagttcatctgctaaatgataataaaatgagcatttaaacctaaaagatagtgtgatttgtatcacaaacaaaagtatctgactacacccattacatgaatttttatctaaatccgactgcaccgaccatctaataagtcagtatttaatatttgattgggtttatttaatattattcagcactacttatttaccatggttatatggaatgggctaactgatcttgaagctccaatcagtactactagtcgccaactttgttcctgttacattaaaaccgccttttctcatagtttgtttagataaggttggtttagtgtgtgatacttctttgatcacctttttctgttttgtgattgaattttgaatattatgttcagtgccaaaggatgtttgattggatatcagtatgtttccctttagtcatgagcatccttagcttgcatggcaacatttgtgatgttggaatgctatggttggtggtttttcatggagtcaatactcaataatggtaattttttttttcaaatgcaacaaacaatgaaacaacactacacctgaactattgtcgcaagctgtggctgtaccaatagtaaacagtatatttttaatagtntgcatcaagtaagttgggtaagatcatttaattctgattgagttatatgtagtagacactgttatgaagggttgaactcatatatccaattgggtcacgctgctgcataagcaaataataaccacaatctctccagtctccactatctttttcttctagctttccctgtggtacagctgccatcacttggacaatcatgctgcaggcatgcaagctg

SEQ ID NO: 4638 - DNA, 876 bp, Zea mays
gcgatggctctggtgtgactgctccagtggcgctgcggcacaactgctctagcggcgcggcggcgccggcacaggagggagaagtggagaagcgagcagagggagagagcggagagagagaaagagactctggtggctgggagagggagtcggctgggaaatggagagagagagagagaagctggtggctgggaaatggagactcgcctcgccttacactttaccgcttaaaagttaaaagggggatctgtcgccttacctcaccttaccgctttaataattatgctagtacctacagaatgcaaactaggtctgcccatgcaaatgggcatgggttgtgtttgtgcgagagggactctatcaaccatcatgtaatacaatgcagctagatagcacaacaacagcaatgattgtgatttgtgatagcatattcaattattcatcgcaagtgaacgagtagtgtgctcccctagtgaacgagtagtgtgctcccctagacgctgaagggttttggtatcagcatgtataattagcattgaaaacctaaaccgttcccagttcggagctctacatacatacgaaatgaaagtaggcacgacaagaaaatacattacagccttctaataacaaaaagtaattaatccatgtgaccatgtaccttcttctccccgaggaagtttctgatctcaatggcggagttggcgttggtgatggaggcgttgatgggaaagtgagcgtagacgaaccgcatcttgtagcggaaacccttggtgacgcctgcgatgaggttctggacgtgggagatggcggtgcggatggcggccatggttcggcgggtgccaaaccaggcgtcgaccttgagcttgcgaccgccgt

SEQ ID NO: 4639 - DNA, 1012 bp, Zea mays
agcttgcatgttcccaatcccttcgggcaattctaaactgttgaccagcaagcatgtcagtcggcgtagcagaacaacgctccgtggcaaccttttgacccttgtccacctcagatccaaggtctgcaagttctgaaggtctcctatctgttcagggagcgcagctattcttcttgaactgagtcggagatacctcagctgacgtagcctgcctatgtgcctaaggtaactgtattccagcaccaccctgttttctagatctagaaccctcaagaacaggaagttggaaagagcaggcatgtcctcagcgtgcccaaagattgtgagggatcgaacattagaaacgaccatattctctggcactacaataccatcccgagcatggtagttgatggatagccgacgagccttatctcgtcgcgccatcctgtgatccccgtcaccacacaaggttacaaagttttcttcggatgatttggatacgatgagatcaagaaccatgtcatggacacggcaagcgtcggcgcggccatcacactgaatgccaacaggctggatcatgctcctgttgataagttcgttgaaatagcattctcctatctcctccatgtcttgtccaccttctgcggtgataaagccttcagcgacccacctccttatcaaccggtccctcttgatctcatagtcttcaggaaacacgcctagatacaacaagcatgtcttcaagtggtaggggagatcgttgtagctaatcagaagaatcttcttcatctcttccacgtctgtaccttgaatctcaagtgctgaaccaatggacttgagcgtcttctcccattcctcttttgtgatacccttagtggccaataggctagcgactgtaacgattgccagtggtaggccaccacatctcttcagtattttgtcggaagcttctttcagatggagaggacatctaccttcggaaccaaaaatcctacttaaaaataagctctcagagtgagctgcatcgaga

SEQ ID NO: 4640 - DNA, 1015 bp, Zea mays
tgcgtggtaagctaattatatgaaagatgaatgtggacattgcagaatgataataatttgaacttggtcataagttcgttttaaatttttattttccaaacttgtcacttgtaatttaaggtatgcttctgaagtaataaactgacttctgatatagcaattggttgcaaaatgaaagaatatcaattataatctatcatatcaaggcaaatgtggaaacaaatagcacaagtgttttgttcgggaaaattaatcaagagataagagttctgatttctcaatactgattatgcactcacattcttctccactagtgttcacttgaaccaaaactttcaaaggctgccttcccaaactgttgacagctcgatctaggtggttagcaatctgaaagttgtggagtctatgttttaatacagaaatccacaattgcaggtaacagatacaagaacctgactaaataataacttaacaagcattaagctattagtctccatcttttgtacatacattagataaataatagaaggaacagtacttgttgccgattgcttaccttttcattgtctacgccctcaaccatatcaagatttggaacagcagctgaaaaaagagagagagacaaggcttaactggcattctggcagtacaaacgtgagacaatgtcaagaaaagcaccatgaaagaattgtgttgataatcttattcttatcattttcgacttttcgtatactgtacactgcttagtaactatattactactaattgtcatgatggtgctaagcaagaacaactttccataactaactcttcattacaaggtgacgtaagtggcaaacactaaataaaaataacatttagaacttcaatttctaactactcgtgaacaaaccagctttccttttctttttgaaggatgcttatagttttgttgatgcaggttaacttactctttaactccgtatacaattgaaaaaaatatatgcacacctaacagtggtttcactttgttgct

SEQ ID NO: 4641 - DNA, 887 bp, Zea mays
cagcttgcatgcctgcagcatatggaagaagatagctgggcaagattaggttggagctgggttcatactgctgaaagtatgcgggtatcgacaaggagatgaacagggtaaatccaactattatcatgttcctggagcttgctgcttgggtgtatcgcaatgtggacaaaccaagcgcgacaattagcgcccaggtgaagcacagaacagaggcggccaaggcaagaggtatagaggctaggagagctccgattttacctacagcaaaggaagctcagctttaggaagtccacacttcataaaaaaaatgatgggacataattgcagtatagaagccgcatcataccaaagaaggagaagatgactaacacggctgccccaagctgcaaagccctcctgctgcccattttggttgtttcgagggtgtgtatgttctctgttaacgttgtcgatcctgtacctgtaccccacactccagcaataaacgttgaaaccccttcaagcccaatcgctctgctgacaactccacgtgttggtgggcttagatttaccagcagtgacgccgcatggtacgatgaaagctgcatatgcacaaccatgtcaaggcacgctagccatcaagtatccaaagcatttttttacacttgcagatgagtgtctgttctgctgagagaaactactcaccgaatcaactgaagcaaccagagaaactattatcatgatgatacccgtcttgaaatggaacgttggagggccccattggaacggatagggaaccctcacccaggcagcagttttccacgcagtagaaacatcggtacggcagcgcctcatggtctctaaatgccttctgcatgaatccaacaatatgtttgaactgggtatgt

SEQ ID NO: 4642 - DNA, 1065 bp, Zea mays
gaacctgtacataaaaaatactacatccgttctcgaatatttatcgcccgctagtttattttttactaaaacatgacaaataaaaaacagaggaagtattagacattagtagggttcctcgacaatgctgactacctaaatgtgccgccatatttggccttccagacttgcaacagaattgaaggtaatgcctggttcccctgtcaggtgcgtctcacttaagcgtgtttgattcttgggactaaaagtatatagaacatattaaatgatttaaggctaaaataattcttaacattctgtcatcattagtgtaactaaaataaacgaggggcaaaatatgcttgagagaagactaaagcagtttagtctgttttagtcctaccgtttagcaattaccgtttagcaattcagagactaaattagactaaaatagaaggactaatctttagtccttcaaaccaaacggagcttattcccagacctcagctgtcctaaatcaaaccatactaaattttaccaaagttgtatagaaaagtagtgacatttaccgcattcaggaggcagagtatctctaattgggaattgttcaaacatgtggatacacttcaattcattattttttctcgcaaaacagaaagtaaacttttacttcattaattcaatcaaaaccttttgttcctctattctatagcacaaatgggttgtagtttccatgccacatagctatcaacaaatattaacagtatatctatcaacaaagtgttctaggtctccactaaaatacaaataagagtgtacaacatcacaacatgtcaacatgtcaacatgtcgaaataagggactctctaaataaaaaatatgaactcctggcatccttcgttcatgcaaagaggaacttacgagtatcattactacagctctggccccgaagcaaagaagttgacaagcccccggcacgcttggacagatacctcacatgcctgaaacatctctccatccaagttccaaacactttcgtcatgtgatgagataaaggtaaacgcttgtgtctgcaggcaatgcaag

SEQ ID NO: 4643 - DNA, 1074 bp, Zea mays
atcttgcatgcctgcagcgcgggcttccagtgccagtggtcctccctgtggtggtcgcggtggtgcacctcgccggagtccatgatgtcggccagcagctgctccgcggacgaccgccggcgcctcccggaccccggtagcgcgtaacccgtggccgccgccgttcttctcaatcagctcgtgcagctgcctcttggtgatcctgatggtcacctcggagtcgtggtgatcctctctcctctcgtcgcggtgatgatgatggcggtggtggtggtcgccctccgacgacaacggcgacgatgacgccgcctcctcccactcgccgtcgtcggcccacgactccgctgcgcgctgcgacgccgtgcagttgcccatggacggtactgctatatatctgcttgaagaaggcctgtggactggactgactttgcggcactaggctgctttgagacggataagtaatgtttaagcagatgggtttcggggagtatttatagggtggggggcgagaggggtggctgctgaagtggggaaggaaggaggcggccgtcagctgcgactgcgagactgcacgtgccgttccgatccttctctgccgttcttcttgtccatgatgtcacgtgggaggcgaggcgggttccagatcccgacgtggcgtgcaggtcatgccccaggtcagaggagctcatcctcgccgggactccgacgaggcagtcgatatgacagatgcctcgcggagacgcgttcccaacaagcactacccgacgtcgggcgaggtggcgtgcgatgcgagtgtgactgggcctctccgtcgacgcggctacggtactcacgactcaccgacacgcggcttgttgggggtggctggggttggtcgcgggcggttgggccggcctggtgtgaatgggctatcgaacgaatcttttgcggtatcaagggcctactgcctcgcgcttttcttttgttttattcttttcctcttgcgtaataaaaggaaccaagaaactccgtggagacttgtgtgggtgggtgggtgggttcagaagctgtatcgattaggatgagggtttcagt

SEQ ID NO: 4644 - DNA, 932 bp, Zea mays
gcatgcctgcagctgagacaatggtctggaccgttgcataaagataatctacgcctagcgcacaattaactgctccggctgatcaaaacctgtacatatgcaatccaataggagtaataaacctaccgatcaccagaccgtcattctgccatcagttgcttactgatcgtgtactatgccagatcagctgctttgttttggtctcctgccatcctcgtgcgtcgcgcgcgcggccttcctctacctttttttttcttcttttttttttcttttccttggaaatgtgaaacccggccggccttcgcagccccttcgtttccacaccactttactccttaaccctaggtcgcgccagccatggcaatcagctaactagagtgtccattcaaagcaaaaccacacggtactaatagtaatcaaccgcacgccccctcgcgcgcgcccacacagtccacgtacgtgatatacacagcagcagcagcagcagcagctagacggccatctgatcaaccttctcgagctcttctcacatctcccgctcatttttaccacaagctagccaagagggctcgctcgctagcttagctatatccggccgccgacattatactgacgatggcccacgccgccgcggcagcgctcgcccttctcgtcttcttctgcgcgcaagcgcgggacgcggccgtccatgtcgtcgacgcggcggcgacgctgtcgcaggggcagtcgctgggcgccaccgacaagctggtgtcggccggaggcaccttcgagctggccttcttcacgccgacggggggcgacccgtcgcggcggtacctgggcgtcatgtacgcgcagtccaccgagcagaccgtgccgtgggtggccaaccgcgacgcgcccgtcagcgcggcctccgcgtactcggcgaccgtcacggccgccgggga

SEQ ID NO: 4645 - DNA, 983 bp, Zea mays
agcttgcatgcctgcagtccaagcaagcagaaggtcaaaacacaagttcatgactgagtcgatttcaaacaccactgcaacaaatgaacatcttagacacttggctatggaccgtaggtctacaagagatgaatgcatgaatgccatatcaaatcaactaaaaggtagatgtaattactgattataccgtaccgtttgtggtattcagttttcatgatatatttcttttttccaatccacgtgtttggatacttgcatattcttcaacactgtatgtcgcagtgtgattgttagacaattagcagtggtttatgcagattctcaaattacaaaagcgcagtttgaagggttttgttgacctcttagatccgaatgaaatcattactgatgcttctaaaaaaatctaggtttagtttgatgtatatacatacactatatctctgttactgtgaacttaattcttttttcctaaaatttttcctggaatgcgcataatctcgaacttatgtgccttagtaaatcttaatttgatggcagatattgaatcccttgaagctgaaagtgacgcaaatggagataagagcctagagacggctcttatgtggtatgataagtttcttggttttcaagttgttggaggagaaggtaatggaaatcttagtgacatggttaattagtatgttaggttgatgcgatagcatgtgacacagtttttttttgtttttgttttttgcaaggggtgaaatttgtgttcaacaaaattgatgtgcaaaatcctgacaagaagtattctttttgcataaaacttgctggagaaagatacatctgtgagttacaagtttcttagctgagccatctgatacttgtagtagacgtcacatgattacatttgtgcatcgacgttgaagttccttttcttgtcgataacagtagtctggtgtgttccatctgtggacgatgctgaagaattggtgaaggatctt

SEQ ID NO: 4646 - DNA, 939 bp, Zea mays
cagcactggtagaggggggaagtttgtggatttgtcgatctcgtcaagagacgaaaaggtgacatcagaaatcaagtttggaaggggaatattgaaacttgactgccctctctttgttcgagctttacccttgtgatggggggcctccttgcaacaactacacctgggggttccagtctgggtcttgcagccgtcattagcgagtttgatcctggtgctacgacgaagcttattgtcagagacatccgaggtaactcttttacctgtgttactaacttcagtcgtctggggggcactgaagatggggggttgaggggagtgaacattccttttcctcaagtgaattggccttctggtatagaacttggtgactatccgattgtgcatggttatcatcgtttcagctgccgaactcggatcagtagcatggttctgaaaagtgaggaggtgatcatttccaaacaaggtaggcatttcataagttgtctcgacacgggggagaatatcgatagtgagcttgggagcttgatccgggcctgtgttcagataattgattttgaacttaaactcattcataaggcactgtaaactactatgcagttcaggaatggccgcactcagccaggtaacctcaacgtttgggacaatgttgctattatgaaagcttgtgatgggagtcagcacggtgttttctcggtggtgttgattgagctgcacctcttgggtaccttggttgactaactgagcttgctctgcaacagagttgggctgcatctctcgagtgggttgagctggcatctgtgctgtgattgtgttcaagcccgggaggtttacctgcatatctagtccattggcaggactgtaacgctcttctgcattactgctagcttccgagatgattgaggaggcgcctgaagtgctattgttgttgccagcgtg

SEQ ID NO: 4647 - DNA, 992 bp, Zea mays
cgagctccacctgccgccgcgcctgggcttgctcggcccgcgccatctccaggcccaggcccagctcgtcggcagcggtcacgacggttcccagctcccgcagagcttgcgctctgccggcctccgcctcctgtgctctcttctggtactccgtgacctcttcccgcaccttgtcgagctcatcctggacatgcttgcgtttctgcgccacgcatcatatgcatgctgcatgcatcaagaaactagtgtctggtctgaacttgtgaagaagggttcagattgcacgatacctctctccaatcaacaacccctacagctccgaatttgctgacggcgcccttgacggaatcgacgatgggcgccgcagcgtcgatgccagccttgggatcgatggcctcgttgaagcggccggcgatctctgacgcttcgtagctgctgcccgccggctctcgcgtttcatccagctggtgaacctgttgctgctgggcctgacaggattgggagccttggtcagaactggatggaacagccgccgggtccgaagacgcatcaggagcggtggaggaggggtggctggtcgtccctggggcgttagcttcctccatcccgcagccgcagcataggtgtgtgatgcagaggaagtgtctgacgaccaatgtgcatcaaacagagacgtatcaggaattcagcagccacggatgatgctgttgagtaattaattaattaaaaccgagcatttgttcgaaaatccaaatccccaaatcaatgaactgagaaggaatgcggtgcggtgatatagatggcagcaattcccaccgacaacgacatatacctggatggccctctgtgttcctcgcaggaagtccgtcgataagtgggagggaggaaaggataggagacaaacagagagatggattggagaagaagagaggaggggggagaatgtggtggggagagaaggtcgcgcgccagccgcggagccttcttccctt

SEQ ID NO: 4648 - DNA, 944 bp, Zea mays
ttcctcctcgcgtcctcggacagccccttgggtggcactcgtgggcagggcaaccaccacttctcctcctgccgcaccgacggccggccacaagacgatgacgaggatgaggacgggaatggccccccgctatcctcgaccataacccccctgtccacgtaccagaactccgtccccttgaacccgtcaatcatggcgaggagcatggcgtcgagtttcttgagcgcggggaggttcatgtagaggtcggtgcgcgggcgcgggaccatgacctcgaactggccgccgccttcggggagctcctggatggagggggtgagctcgacgatggagtcggagacggagagcaaccactccatctcccgcgtccacatcgccttcctcgccttcgcgagcggctccagcctccacagctcgccgaacacggtggctggacagggaaaccatcagaaatccgggcaatgcgggtggagtagcacggcggcggttgggcgcgagcgtaccggagaggttggtgatggcgttggagatggcgagcgcggtgcagacgcccttgccgctgccggacatgtcctcgccgagcaggagtttggcgaagcgctccttcatcatgtcgatctctggcgccacagaagcgcacgggcaaggataggaacttgctgtgaggggaaagaacaagaggagggttttggagtgagatccaagcaaaaggcggaggaggaggcccgcttaccggagaggtcggaggagggtggcttggagaggtagaaggcggcggccgatgccggggtgggcagcgacgaggaggaggacgcgaggcggcgggagacggtggcggaggcggaggcggaggcggaggaagaggaggcgaagcggcgggtggtgggcgcggagcagtcgctggaggtctcggactcgctgacatcggcgctggggctgtagct

SEQ ID NO: 4649 - DNA, 926 bp, Zea mays
gcctgacaaggtcctctggtagctcgccctgcctcgtccttcgtcttccggagggctgtctccttcgtcgccctctgtgctgtttagagcggggacgggaaccgccaccacctgtggaaggtctgcctcttccatggtagctgaagtggaactccgtgtgtcgttaagtaccggcactggcactgggtcctcgttgtagtcttctttggtagatgagcgtacctgcgctcagaaacaagtccgctgtatgaaatcgtctgccgtttttttttggttagcacgagcgtattttcgaccgcggatggttggttaagacagtgtgtacctcgacttctttgaggtccactccgttctcttcgaggaagttcatgaagttgtggaggttctctgcgctaggtttgtagtggccgctgtacgcccagatggacttcatccataacaaattaaagaattatccagacgcacagatggaaatgtacacttacacgacgtaatcaaagtaagtaacaaagattagattatattatatatatgctgcgcagctcaaaagtagacagtcagaatcagaatcagaaactgtagtttccaatatactgcgaaaagaaaaggttgtgcaaagatattctacgcatggatatcaatgttctggtctgtattctataatctgtcctttggaaacggattgacaaaacaaaacaaaaaaaaatagttattcctggtagcccgtggagcagaaaagaatggtttgtgtaggatcacgcgcagtgaacgaatcgattcttagggcacaaacagaacttgttggtcaaaggtgtaagaacagcacaagcaggaataccagcaaagtaaagcaacgccaaacaaagcaaaacaaacattccaacatgcagtggcagcttaaaagaataccttgatcactccacttt

SEQ ID NO: 4650 - DNA, 959 bp, Zea mays
  unsure (1)..(959): unsure at all n locations
aatgaggccaaagcttttctggtggttgcaccaccaacatctccgtggcgcaaaatgggatgccaatccaagtcccccagcctcatgaacagaacagcacgctgaaaaaaattgcagccgacaagaggccgcgatcagagtaccatctctctctctctctctctcagcattattattattagtgatctaaatgcgctacctcatctatcactaatcttaatccggctcgcctaaccacaccatgatcaacgaacagtgtcactgacacatcgcaaccaacaggaagccgcgatcagagtagagagtaccatatctccggccattagtggtctaaatgccctgcctcatccatcattaatcttaatccggcttgcctaatcgcccccacatgatcgatgaacagctgtaggagcagtacagtgtacacctctctgccccttaattttgttgaagtcggttctccgggtgacagtgacactgacagggagcttcttcctcgtccttgggaagtactgctagaatccgccgcactggcttgtaaatgattctacatttctacgaggagacaccctgaccaactctggcaaaattggtgctagtacctttgctgatttctttacgtaccgtaaaaacgcttggtcgccaagaacaaccataagatgactctattaacgggtaacatcaaaaggccattctcatgttgttacccggcagcctgaatcattgggccatgattggattagatcccagctcaccaccttcatcagatgccccacgatcagcttagctgttgctcgtgtctccccctcgtacttatcgccagtccgccctgcccaacccgntcctgggggggggggtgataaattgagtagaaaggaattaaagggaggcctcatcagcggagctgagctgccgagcctgactcagacacctcagcgcgtaatctgctattggccctc

SEQ ID NO: 4651 - DNA, 923 bp, Zea mays
gacgtgttttccagttgacgttcacggaagtcttgtgtcttttggatagactgatagtgataggcacgcataacagtaaacatattctgtgctccgtgctcatatgatcactttaaatctagtgtatacgtgagtaatctagctctgatatcatctcagccttgatagacagacagagagtaaatgaacacggaataagatcccgcataactacctagccacagacactgctgctcctggcgagtgggcgagtggcgaacaaggtttcccatcttttcgagcctgccatacatggattttttttaaaaaaaattgtatcgaaattgaagttggaagtgtatactgtcccagtcgcacaaagagtgttctttcgacttttgagaagtcgaatatttaatattaacaaaatatatacaagtaattattaatatttgtaaataatacttcatccatcctaaaataggtttgtttagcacttagtttttatgtttatattcaaatagatgatgacgaatttacaaatatatatcaaacatatgcattaagtatacattaagtctagtcaacagagagagtaagtattattataatatttgctaaatattttttcataataaacattttttagatacaaaggttgataatacgttttctataaatctagtcaaactaaacaaagtttgacctgaacataaccctaagtgacacttttttggtgtaacgctagctagagcaccaacagcttagcaatgcttgcagtgacatgtttttatttcatttcttttcttgtatccctgttcatcttcaccatttgcacttgttggatgataggcattcaatgatgcagatgtgccttgctagaacatcatgtactagtgctataactggctgcagggcgactatagaggcatcaccgggtaccg

SEQ ID NO: 4652 - DNA, 870 bp, Zea mays
ttggcgtaaggtaccaatgctcgctccgctgcaacgtttccgtttgtccttccttgggataccctgcgtctcagtgttgctgtggtgttggtgccgtagctattcggtggggaagtcatcggcgctgccgttcaggaagctctcgtcatcagacttcgacccgcgggagaaggtgtggacgcggttcccgccagaggggtccaagctcacgccgccgcatcactccgtggatttccggtggaaggactactgccccgcagtattcaggtgccatactattgctctgctgatggttctggattttggtcatttggagaagaacggcaatgttttatgcgcatggatacattgcctgactgctgtgtgatgccaggcacctgaggaagctgttcggggtggatcctgcggactacatgctcgccatctgcgggagcgacacgcttcgcgagctggcgtcaccaggcaagagtgggagctgcttcttcgttacacaggacgatagattcatgattaaaaccgtgaagaaggcagaaatgaaggtcattcgtagtgacaatttgattttttctagactaaatatcttagtttatgagctagtcacatgcatgttttgagttttcttcgaccactttgatcatctttaattctgtgcctgaacgatttctgcaaaatgaaatctgtcgatacaaaatagcttttgtgatacccatttttagccgacacctgctccttttttttttctgtctctagaagttagattcgttgtccatctttattatcccaaattcagcttgtttgtaggtaacagtattcattgttattagttggcgacataaacattacttattcgaatcttccccgcaggcagca

SEQ ID NO: 4653 - DNA, 970 bp, Zea mays
gtatttagcttcacttcagggacccacgcgggcacgaagctgaccagcaagttgacgaaacacagaacgtaggacctccacgtggcatctccacagcccagcacaatgttaccctccatcaccctggccatgaaatccaggtgcctgtcgaggacccgttgtcttttggatgtgtatattaaagtgtaagctggcgacgtttctccgactccccagacggttgcgcccgagaagagtagaacgtacgctagcgtgtatccttcaattatgctgcataccataccaccggaaccgagcttagcttctccacctgaaagcagcagggtgggcatgatctgctcgtagaggagacgaatcagattcaccccgccagcgtggcaaagcatagtcgctgcaagtgatgctatctgctctaccaaggatgacgcagctgatagcggcaaacactctgacctcaaacgggcaggtctgtcagaactgcggtcatttgctagcgcatgggctctctcaatgaccacctccaagatctcttcacaaacaaaggtgttgtttggaaataaccggcaggatctcatgtagagaaaccctggagctacagcaagcctgtgtgctttttcatcagaactctgccccagcagattcgcaactcctctgtttgctacggagcaggagcgcccatcaaccaaaggccccaggaaagacgagaagcagctcctgatcagttgtgccaccgcggtgttatctcgagtgaagggggactgcgaacaagtcaggatgataaaatcatgccaccgccgtgccttctgggaccacaatgcgcctataatttgcatagtgggccatgaactagatgtcgcacaaatttcaattccttgggaaatgatgccgtgtaggtggctgaattcctccatcttgactgttattgacaaactcattagcgctgctattggcaatggaagcattggcatcg

SEQ ID NO: 4654 - DNA, 1011 bp, Zea mays
gcagaacacacacgcaccatgcagttgcttgtaagatcgaaaatgatcctcatcactggcctagcctgagctagctaggaggacgaaccgatcgacgaacgcaagtgccagcagatagctagatatccgatccgtgcatgtacataccatgcagttggatcctctgggcttgactttcttgtcatggcaggtcgtcgcgtagatgttgtacgcgtcgatgttgccgagctggttgtaggcggcgtccttggtccccgagcagagcggcgagttgtcctcggcgttcttgcagcgctggccgatgagcgtgtgcgccgtgtccgacaggaacgcgtgctgccacaggtactcgtacagcgcgctctgctccgccgcgaactccaggatggcgttcccgatctgcatggcatgcatatacgcagcgcagagcgcgagcgcgcacacacgattatgtttatatactcgccccattattcgtgccggccggtgacgaagacagctacttagtagttaccgaccgcgattcccttgaggttgacggaggccatgtccttgggccgcgcgttcttggcggcgaggatggaggcggcgagctccgggacgtagtggccggcgtagctctcgccggcgatgaagaagtcgcggcccttgtactccgggaagcggtccagccacttgagcaggaactggagcgagtcgtccgcggtcatgttgtcgcccatcaccttgtacacgttcgtgttggcggcgtacgagaagcccacgcccacggggctctccaggtacagcacattcgccactgcatcatgatatcttaattttttgcacagcttcttacggggattatctttttttagcacgtgtacaattctcaatcatttatcattccgcaggtagacactaacctgtgttccaggcatatttgaaattgcagagagtcttgccgtccgtgtccacgcggaacggacctatctcctggaatgctccgattccaaacgaagagcagccagg

SEQ ID NO: 4655 - DNA, 963 bp, Zea mays
tccgcaggcatcaccgtcaggatggtcacgggcgacaacatcaacacggccaaggcgatcgcgcgggaatgcggcatcctgactgacggcggcgtcgccattgaaggccccgacttcagagtgaagactgaagaagagctgcaagaactgataccaaagatacaggtgggcagatagctaaactacttatagcttgcctacatttccggaactcatgcttatctacctggtgttttgatctaggtgatggcaagatcttcgccgcttgacaagcacaccctggtgaagcatctacgaactacgtttgacgaagttgtcgcggtgaccggcgatggcacgaacgatgcacccgcgctacacgaagccgacattgggcttgcgatgggcattgctggcactgaggtacgtacgtacactattcactccaattcattctcgtagacttattacactattaattcttctgatgtctgtttctaatgtttgtttgttttttttgtttgaaggtggccaaggagagtgccgacgtcattatcctcgacgacaacttctccaccatagtcactgtcgccaaatgggggcgatcggtgtacatcaacatccagaagttcgtgcagtttcagctgacagtcaacgtcgtcgctctcgttgtcaacttctcctcagcttgcttgataggtaagcttccaaagaactggtgaaagcaatctgtcgccatgcatgcttgcttgatctgctgctgctgctgcttgtgttgtggatccagggagcgctcccctgacagccgtgcagctgctgtgggtgaacatgatcatggacacgctgggagcgctggcgctggccacggagcctccgaacgacgagctgatgaagaggacccccgtggggaggaaagggaacttcatcagcaacgtcatgtggaggaacatcatggggcaggccctgtaccagttcctcgtcatc

SEQ ID NO: 4656 - DNA, 864 bp, Zea mays
ttccctgcagtgcttttgtaccgctggcagatcttgaggaatttactgagaagacaaagaatgatctgttagaccgagctccaaatatgaaagttaaaagaaaatatgttcaagtatttaatgatgctgtggagcagatctgcaaggcctacaatgagttgccaaaaacatctgaagctgcaaatggagcattgcctgatcagagtgaaaagccttcagagcaccttgtgaggtcacaggatgttggtgagattccaggattgggacaaatggaaggtgatagccctactgattactcgcatacttcagcgaaaaggccagggaccgaggaggatgtcaaagatgatggtcatgaaatatgtgatcattctttagcagtttatcaaaagaaaacatctttactagaggatcctaagcatcccatgacaaagaagtctgctgcatccaagtcttctcttgacatttacatggaacaggagcattcaccaacatctgtccgtgctgaaagggaggctgaagaggtgaaaattgaaaaagagagctgtcccctagatggttttattttggaacctaacttggaggtagtttgtgcccttgaagtgccaaagaaatctaaatccaacaagccgttgaggaatgctgaaaggaaggaaaacaaacgtgctggtattggtagccctattgaaaggattgttgctgaggctgcatctgatgttgtattaaacatgagtgctgacaaagagagcagagaatttaagaagtcaaaaatcatgacaaaacaatcactaactactgattcagagaaaatggattataataaaattgtgcatggcgggcctgacgagcaattgactggaaaatcat

SEQ ID NO: 4657 - DNA, 893 bp, Zea mays
tctcggcgctgatcgaccacgtcgcgcgcgtcgactggtccctcctcgaccgcgtccctggcgaccgcggcggctcgcagcaggtgcttccttctccttccttccttccttccttccccctccctccatccacgcgcaacacggccgtgttagttataattcgcttcgcttctactgttccatgtccaatcgtccatctaattcacaagttggaatcgcaatcccggttcggccttccaatgtctggtctgctagagtcagtaacactagttgcgctgtatgactgccatatatgctcatgctctacttgtcaatgttgtttgttatcggagattcctttatattccgagggccaacacatccctcggaattctactcccttcccttccccctttgggtttcaggatgaatcgcttgccatcatgtcatgtggttgtttgtttgagcctttaaggtaggttcttgcattgtgtactagctttaattgcggcccccaccatgttcctttctatgtgacgtttggatcgcttgttcttcaacacctaatgcattcaattctgcgatgggagtcgctgtatattttctggaaaaaaagctatgtcctgccacaaatttgacctgtttaatatcaattggaatcaaattcgttattgttgtatctctatgcttgaaatggttcgaaattaattttgtttggttctttagaaaaaaaagttgctttgactaatcaatcagtggtttgctgaattatgttttctctcccttgaactgtcgataaattgcttgttcttctgctccacatggttccgctcttcctgtacttgaacagagtagttcagaaggcaagtacttttggaatatttcctaaatttgacgtggtctgcactttagtt

SEQ ID NO: 4658 - DNA, 1028 bp, Zea mays
cttgcatgcctgcagcctgccaagtgccaagacgccgccggacgagatcgcagggaaaaaaaaaacccacgtgcattcctccgtcacgcgatcccatttccagttctgccggacgggacgcagccacgcgtccacgcccggcgccggaatctcgccaccggcggcgcggccggccgggccagatttcgacgtcgcaagaaagagaaaacggcctcgtccgtttattcttttgtccctcccacccttgctatcaaaatttccccgccgttagttcaatcaaaggaaagaaaagaagagaaaagaagagaagggaagataacagatgtacgacgcgaccccgttcgacccgtctgcgcctggtagggataggcagaggcaacaagttggtaggcgcggcacgtgccagcgcgatcttatctaccctcgcttcgtttctccatccatgtgccttgcgacggaaaggcaccgagaaaatttgggtaaaaaaaagaaaaagaaaagagaatgcccctaaaacaatacaaaagatgaaaagaaaagaaagcagggcgccggctgctcacggccattatggcccttattggacggctgggctcggtgcgtggcggcactgccagccgtccggttccagtccggtgcgctcttctgctgctgctgccgtggctcctcgtctaccgtttctctgcgaaactgctagagcgtttgccaattcccgccacctcctcttttccatttgtcttttcctttagtagaaaacgcgatcgacggtctggcgacgactcgcgcaattattgctggactcgcgcgggccgctactctactacacagcacacgatctactgtagccaactatagttgtagcagcagcacgtgtgtgagctcatcgccgccactcttcttcgccaccgcagctctgcactgtgcaccaccggagacaggttgtcgcccgaaataggcatcaacacgtagcgctcgctgtacactacacgggtttaattttaaccaaaaaaggaatacgaacacaacac

SEQ ID NO: 4659 - DNA, 995 bp, Zea mays
gagggctcaatgattccaccgcggagcctaagcacgaggtgaagcgtagactccttttggatgttatagtccgcaagggtgcggccatcctccagctgcttcccggcaaagatcagccgctgctggtccggcgggatccctatggaatggaacaaacacagcctcttagcgcctgcgctacatgctagtaatactattgctaccaaaagatgggctggcgcgctcgcgtaccttccttgtcctggatcttggccttgacattgtcgatggtgtcgctgctctcgacctcgagggtgatggtcttccctgtcagcgtcttcacgaagatctgcatcttgtcggacctgggctttctccgggctgctgtgattgctgcggcggcggcttctccctctccgaggaataggacggcggcggcgtggcgtgcggtgtttttatacgtggttgcggcagcggttttagggtttcgttgagtgatatgggccgttcaaaatcgggcagtgcgttttgctttgtgctcttcggcccattggatatggtggacagggacaggcggacagccattgatttgtattttagatttctattgatcctctctctctctcaaatgaaaatttgattttcactctctcgcggtaataaaaagtactgataataagaccatgatttcctacagttttttactataattttatacggttggatgcatagaactcgctagcgtcagcagcacgactgtgcgggggaaaccaaatccttaacgacacttggagcgcgccatctggtaattcttgaagcttaaacagagacgaagtcttggttttagcattaacctactcctccacctgaagtcttcgcggatcattgaagcgagtgaaaagggcacggaagtatcaacatcgccaacgcatattcatacgtacttttgaaatatcttatgcgattagttgtgcaatgggtgcaatttaatcgtctataacgacaatccaccgcac

SEQ ID NO: 4660 - DNA, 998 bp, Zea mays
acagaagcaagaaggaaacaatcaaacaattgttcatgtaaaataccaaaacaaaatatagaagacaacatcatcaagctaaacctcagcatgcacaaatagtgttttctttcttttcatttgggcatgtatatcaatataaggatcttcttgtattatcacaacagatatttagaaaggcttacggagaaaattatattaacatgatatataatttctacagcgaaaaggttgtgccaaagaaaacataataaatttgatgcagaatgggactcaagtactcaacccattacccatcgttttaagcatgtaacaactgtaaaaatcttcttcaacctctcaagacaggaaacaataaaataatgtccagtcttattgacttagatggaattcattatacatcgggaagtgtaataatataacgcatccagacacattttgggtcctatttggatgaagggtccgagtctccagttctccaaaatacttaagaaggacctaataataatcaagaaggccccaaggatctgcttagagaagatataatatatatacctaatgaggccctatgacactgcaccaaaaggaaaggatacagtaaaacttcgcaacttgatgtagagtcaaactacatgcacatgcatgttctcatataagccttgtggcataccttttccttggttttagaagcctgtctaagaatagcattcagttgctccacggagattattgccctctcatatgatttctgaacatcaagagaatacagctctaccaggcagtccatcagaaaataaatatgctttgtgtttctgtcattcacaagattggtactggcaaggtatgtattgtaggatttagttaaacagtgatccaaacagtcaggtaacagtgaagctacttctcggatcataaaaaatgccgacagagacaaactccgatcaccacttgcccacaagcgaaataaaatctgcaggtcgatatagaggatcgcgggt

SEQ ID NO: 4661 - DNA, 1660 bp, Zea mays
atcagcgtcggtatctgcccgttgttggcgaagtcgatcttgttcagcctcatgcagcacaggacatgctctggcaactcctcagccttatgtgcctgtaaccagtatcagaccatgggttaagctacagacactcggtcaaggggtcacttttcttttttttttcctttttttttctttttcttgaaacaaatcaagcggtcacttttcagccagcagccgaagaaaactgtgtgtacctggatagttagaccaagatcaagaacgccatgcttcagccgctcctggaatgtctcgagccctttccgtgatatgaagctgaaccgatggacatccagatcgatctcaaagtagtttgaaccctacattattatcaatgcaaaagacacgcattttttttatgtttgtcagagttggaaacacggttcactatttcagcacctgtttgtctataaataaactagcgaggaaattaatgcagtcgtcggttaccttgtagaatttgtgttgtgggcgagatagcacaggcttcatattgtaggtctgcacaagcttcctctctgctgtgctcagttgcaggtcctcagggttcgccaaaccagccaggattttcagcctctcggtgtagggcacaatgctgtctactgggaaccccttcaccttttccgtttcctcgttcatgagcctctgcatcactggtccgtcagaaagttttcctaatgaggtgctttgtctgtgtactcagataaatctacctttatgctgtcctgcaactgaggagaaatctccttgtcaaaactgtcagataacttgaaatacagaactaggcttatcccatcgccgtcgttatcgccaaacactgtagcagggtaggtgggcaactgcacaaacaagtaaaaacttgtcaggctagaagccagaaattaacaattaacagtcagtaattaaagagcggttgttaagaaccgtttatagcctactgaattacctgaatgttcacaatgaggagggtaggaaaggcttcgtgtgtcttgagagacggaagcgagaggtgctgcccaatgtgatgaatctttctcgtgtaggcgaacatgtctgctccaatgggggtgtaagggtagcagtctggggccgggtatttcctcttgtctctgcatgaatttcacagttcagtcaggcataatcatgtatacaatatcgtcagaattgtgttcacaatactgccactgtacgtacttgaagaagctctcccctcggaccttgaacgtcgatggctcaagaaccgaccagcaaccttccgacagcttctcgcccgtcgaacaacacggcaccgtgaaacctgcccttgggcggtacaagtaattcgcagaaccacttgggatagcgctccctgtaagcgaagtaataatccagccactgaacggcactgcaatggcgtagctcatatgttaacgctaaagcaactcactcgtttcggtcatctcgtcgccctcgtatgaccttgtcctgaacgagagcctgaccacgaccgttttcttcttctgctgctgctggtgcgggctggcaccagcgatcggcatcggctggaccttgttgctcggaatcgacgccgggaacggccgcggcgacattgcggcctgaagctcctacagtgcggcgg

SEQ ID NO: 4662 - DNA, 1015 bp, Zea mays
ttcctcctttcttttcagctcctgagggtcaaggaaaaaagggaagaaaataagatcagcatttaaagaagtgaaaatttaggtgaacgattataaacggaactggattattccaaacatatgaaacattgcagaagcaattttttattgtgagctggtcaacacaggtcactcttaggttcagtatattggaccaatatgtcacaaagtctctcatgtgaataaaacaacaaaaagaacaaatgagtagaaccgttggtctataagtgcttcaaatataagtcttatgctgggctatctggataagtagaaatgatttaacattcaacaaaaaaacctcatctcacttatttgcaggttctttttagaggcacccattggctaaggttttggagcaatctgcaaaggaaggatgaagataaagatctaataatagcaagttgcaggtgtttggagtcaatcgccatgcagatttttgcgagctatgggtggagcttttcaaatagactgtcgatatgatggatttgttttctttttactagttggttcacggtttacaaccattaccatgtaataggtgctttgttggctgtcctgttgcatgcgtcttttcgtggatggtactttgtttattgttggccctaacctcttacgaggggaaagccggaactttttccattatctaaaaaaaataagtggctgcatggaaatgccatgtcctccatgttactcattctttagaagttgcagcccaaaggtgaactttttttcttctcaaacgcgcaggagagctgcacatctttatagattagagaggaagaaagaaacaaagtcttacaagagaggaggccctgctagacaaggacttctcccatccacacataaagaaaaaagaagcttacatatcagataaaggaaacaacccaaccccattatgtttctctgctattcctaagctgcctaggtgtcgatgagctcctgctaggacccagcagctcagctcttgtaaggagct

SEQ ID NO: 4663 - DNA, 1034 bp, Zea mays
cgtgtcgggacactacgctgacggtgacggcagatcttggagctggcatcagacgtacgcgccgtggatcaatcgatatcgaccgatcgtggaatgcatttcaataaataagatctaaattattagacgaatctttttaagcgcttgaattgttgtattatatgcagttacgaaagcggagctgggggaggcctgcccaagcctgtcgttgtggccatccgtgcgctccgcagcttcgtcggcgtgggcgccgtggccgcttgcaaggtcgccgccgaggacgcagtcgactgcctcagtgaaggttcgttattaacatagtacactagtttgctgcgctctgctcagtgctcgtcgtcgtccaagtcaacacattccgatgcagttcttgttcgagtaatttcacgagctctctcccggccttcttctccgttgcagggggtgtttcgaggcatcaacctgggcgttcgtcagtacgtattatttccaaacattttactgccgtggggatctgtcgttagggttttttttttctccatttccatcgcatgccacagtatgctctaagttaactcgtcttatcttgaacatgtgtcgtcgtcaatgcatgcagctgaagaagatttgcagggagggtgcgtactggggtaacaatatatcctcctttggctatgcactctcgatcgctagcctgcactgcactgcactgcgcagatgtttgtttaatttgcttcacaaatgaaatcaaatataatagtataacgcaggggctgctgccggagcttttgagacccttgagtttggagcggagctgatgcgtggccgctctgactgggtatacacttgtgttttcgttttttatagatcgatagaaatatattgtttctggtattaactgattgattgatttcattcgattgagcgcagaagaacgcggtgattggaggtgccttggcaggtgcagctgtctcagtagcagacggctactacaacaggagccatggcggcaatgctggcacgccgcaggtgatcaa

SEQ ID NO: 4664 - DNA, 1040 bp, Zea mays
cttgcatgcctgcagccaaactgtggcgtgcatttggttggattcgtggatgtcagataggctcgaaaatgtatcgccaagtagcagattgagtgcctactttctgctacatttcaggctttctccacccaggcgacaaaaggctattcatgtctctctttcctctgcgagagaagagaagagagaggacaccaaccagtgtggatggtgggtattatctgaacttttatacatcagaacccacattagtacagtaaaaaatatccaaccggatatgcacggcgcaatcgagtagtagaaacaagctgaatggaaacggcttgctggcgagttacagaccgccctccctccggcacagacaagacaactcacacggatccacgcccatttggggcgacacgacacgcacaacaaacgaacaaatggccatcacacctctcacgtccacgaacgagagatgtaaaaacgtgcgagacctgagacggctggtgctgagacttggagcggtaaaagatctggaacttctcagccattctcttcccgtgctgatctctctggtcgtgtgtcactgtgaatcgcgatcgcgtgagaaatcccatgtctggaccgagagcgccggacggatcggagaggacggccgcactgcacgagcacgagcggtggctacgggctcatccccatcctggacgccctggacgccaccacgttgcgcgcgtgcgagtcgcacacctgcgtgctgaatttgcacccgtgccgcgccctccacccgcccgccgcgggcctggacccgtccgcgctgcggccgccgggggaccggctgccgctgccgctgccgccgcgcccgtcgatcttcttgatggccctgcgcatgctggagcactcgcgctccagatcctgcacccggctcgccatgctgtccatgtccagccgcagcacctggctgtcctgcgccagcgccgtcgcgcctcgccacgccgcagcctcgcgcggagcggcgccggcggagggcgccaggagcgtgcccgcgatggcgcgccgga

SEQ ID NO: 4665 - DNA, 910 bp, Zea mays
tgactcgtacaatttcttggtgaactggctggagcggttcccacaatacaagcatcgcgatttctacatcacaggagagagctacgcaggtgaattgctgtcaaaactggccaattcacgatggggattaaattttgcagttgttagcgtcacctagcagtcacatttacactcctggatcctaattcgtcgcactggctgtttcaggccactacgtgcctcagttgtctcagctagtctaccggaacaacaaaggcatcgagaagccgatcctaaacttcaaaggcttcatggtcagaactcagatctttatgaatctgtatcttttactgatgttctgcttgctcatttctgttgaaatgataggttggaaatgcggtaattgacgattaccacgacttcatcggcacattcgagtacttgtggacgcacgggctgatctctgacgaaacctacgagaagctgcggcttgcctgccagttcgacgtatctgagcatgcgtccaaggagtgcaacaaggtcttcgacatcgccgaggccgaggaaggcaatatcgatgcgtacagcatctacacgccgacttgcaagaagacttcactccacaagcgcaggctaatcagaggaagaacggtattacggtagtacacttgcttcgctaccaacacacgacatttctttgctctgaaactgtagcgcttactgtattgtccgcgcttctgaaagtatagtgcttgtgaagcataagagttcaagtacctcctcctgacaccacgcttggttcaaatgtagccctggttgcccagagggtacgatccctgcacggagaagtactccacgaagtactacaacttacctgaggtgcagagagctctgcatgccaatgtcaccggaataccgtatccctgggtaa

SEQ ID NO: 4666 - DNA, 742 bp, Zea mays
tttgcatgcctgcaggagctcgagcaccgaggcgcagtggaggtacctggtcctgggcagagcctgcttccatctcggcctgatggaagacgcggtggtgctcctccaaaccgcccgccgcctcgccaccgcggcgttccggcgcgagagcgtgtgctggtcggaggacagcttctcgccatcgaacccgctgacggccaacagcgccgcagcgtccgaggcggagtccgtgtcgcagctgctcgcgcacgtgaagctcctcctccggcggcgcgcggcggcggtggcggcgctggacgccgggctccccggcgaggcagtgcggcatttcaacaaggtgctggacacgcgccgcagcgtgctgccgcaccccttcgccacggcctgcctggtgggccgcgccgccgcgttccggtcggcggggcgccccgcggacgccatcgcggactgcaaccgcgcgctggcgctggacccggcctccatcccggcgctgcgagcgcgcgccgacctgctggagtcggtcggggcgctcccggactgcctccgggacctggaccacctcaagctcctgtacgacgccgcgctccggggcggcaagctgcggccgcagggcggcgtccagttcggggagatcgccggcgcgcaccgcacgctcacggcggcgcattcagctgctccgcggccggcgtcgcccgcccggcgaggggtgccgcgttaactactacgcccttctcggggtggc

SEQ ID NO: 4667 - DNA, 845 bp, Zea mays
catcgtatgcaatactcaaagatatgattgggcatcaaaataatacactgtgagataataatgaaaatggggaataaaaagtatcaaaagacttcaaaatttgaaagaactacagaaaaagtataaacaaggatcacatacactgctcttcgcactgggaacaagtatgcaatgaataatcaacatcagcagtgtcttcagcaccatcactagaatgttcgtggcaaaatttacatgagcagtttgcacaacaccaataatcagagggaagtacctgtgaaattggaaattcaatagattagagaatgctgtgctgaaaagttttattgagtcttatcagcacagaaaactgggagcactattatcgggcatttcaagtttttaagcatgtcctaatgcagtaacagctaacttttttaaaaaaggaaagatacataaattgaaatactgccatttgctgattcaaacaaaagaatcgttacagttaatgaaaaataattaagagtttaagacaacagccaatcatagtactcatgtgaaagtcataaatacattacctccagtcctagacaactcatgtgaaatgtcgaggggcatccatcacagcagatcaaattgcctccatcgccgcaaataccacatgtgtcatcattggggtcatcgccctcaatgctaactggaaagaaatcttgcctttcaacatcagactgcatattccatgcattaatgagacagtgcaaaaggtcaatgtctagcccatccacaagtatgtttctgtatggcttatttacttcagaaccagcatgagtcacaaattcaagcactgaaatgacctcgctacagca

SEQ ID NO: 4668 - DNA, 1051 bp, Zea mays
acggagactctcaagtcgtttgcagagtcgattggccttaaccgctacaacgccgacctcatattcgacatgggagttgagtacgccgagcaaaggaacatgaatgccgccctgagatgcgccaaggagttcatcgaggcaacgggcgggtcggtttcgaaaggatggaggctgctagcgttgattctttctgcgcagcagaggttctcggaagcggaagtcgcgacggacgctgccttagatgagactgcgaagctggatcaaggatctttgcttagggtaaaggccaagttgaaggttgctcagtcgtcgcccatggaagcagttgaagcgtaccgtgctcttctggctctcgttcaggcccaaaagaactccccgggcggatcttgcaagagcgctacagaggtatatatgtttttttttgtttcaagggcaaaaggaacttcaaattctgccatggttgaatttttaagggctagtttgacaactctatttttctaaggaattcctatttttatgaggtaaaatgaactaatttctcttagtcgtaaaatggagttgccaaactaggcataaatttgtcttgtgaagttttcccattaattcactcactcttcacttattactattcaggacgcggatggtagtgtctccgagtttgaaatctggcaaggtcttgctaatttgtactccagcctctcgtactggagagatgctgagatttgtttgaacaaggctagagccctcaagttgtattcagctgcaacactccatgcagaaggtgaggcacatttcattacgtacccttgccctttatgcatgcatatgttagtgaccatgcatgcatgcatttctctttaacatgggcatttacatatatgtttattatttacatatagatgatacttgtccatatatgcaggttacatgcataaggcgatagatcgaatcacgtaagcactggctgcttacgacaaaaagtctcgaccgagcttgagcatgtacagtcctaggaggccatcggcgcaatgctctccaaacaaggacacag

SEQ ID NO: 4669 - DNA, 967 bp, Zea mays
tttgcatgcctgcagatatttgatagcagctggataaaattttctccgtagcatgactgctccaagctcaaaatactcagtagcacttgcatcaccgcttctcacttgttcctagcaaataataaaaattgtcaaaatacaggtcaacatatgtaaattggtatataaatccaattgtgctgtcagaatcatcactacaggcacttctgccagaacgagtactgaacgtttgttagtatgaaacgataatacaaggcaactaactgtttgctcagacaagaaactagaagttgcaaaacctgactgcgacaattgtatgtatattagagtccagagatatttatgggaagaaaagcagggagaagacgtaccccctgctttaatttgtcttaagagagctactctttagagcatctccaacaaggtgtctcaaaacagtgccccaaaaactaaaatactacacagtgtttacaagtcgtccgactaatcgtgattagtcaggctggtcgcctggaagagggcgattaggaggacgacacgattaggatttcaagtcgtccaactagtcgtcgacctggacgattagtcgtccggttgaaagcgtcctggtcgtttcttgtcgtcacaattttggtactgggcttaactctaatttttggcccatctacagtagtacagtaccatatatgttgccctgcccctccggtagtaaaccagccaccagcagtaaaccctcccagccgccagcagtaaaccctcccagccgccagcagtaaaccctactcctctgtcctctctgccgacgtccagctccaggcctccagccaccggcgtccagtgctccattcaccggcggatgctcctgctccaagtgctccggcgtctgccaccggcgtcaagtgctccagcgtctatcaccgagtcaagaattcaagatgagctcgtcatctgaaggtagcaccgagct

SEQ ID NO: 4670 - DNA, 926 bp, Zea mays
cacaacatcttctacagcccttcggtatgttgatgccactcgccagagtgttctagattgattgttactcggtatttgccccttgggtgatgcacgagtgactagtctatttatttatcagcagaatatatccaacatattaatagtctggttgacttttgcacaatttgaatctgagaactgcgagaggaaattttcacacacctagcaacactgacccaatatgtggagtgacttacttcccacattcatttcacaactactgccagaatataaatgaatatgattttatacatatgacatacaagtactacggtagaaaggctgtgaattgttgtccgaaaaaaaggtaactcgtttgtgcaatccaagcgattatctaaagggtcaatgctgcatcactagatctttagatccattttcagatcagcaatataactatttgccttttgggttgtcgagtagcaacattcttcgtagatggacatccttatgtatactgtcaggaaacaattcattttctttgatttctcttagtttcttacatatgtgtggttcatgtaaccaataataataatggtgacacttcaaatgtttttacaggaaaaatgttttcctggagaggtgttgatactgccaccggcaatgttgtggtaaatactgattactgtggaccttttaaactttatgggacactgcaattaagatagctttattcgattcattggtgaaatgctgacatgaatcgaaataacagcattacgtctgtggagttagcttagcttacttgtatgtatgaaagtggattgttcattggatgatgatcagagaaacccacttgctccaaatttccctagtagcccttgaacatggtgtgccctcaggggcggatctgggcccagggctgggggctgcaggcatgcaag

SEQ ID NO: 4671 - DNA, 992 bp, Zea mays
gcaactgtgcaaacataagcatctcatgcatctactagttttgtagcaacaaggcatcgaatcaaacagaaagtcgtacgtgctagctctgggagtgagttaaataaatctgctggtaataaaaaaacgaggaagaagaagaagctggggatcgacgaataatgtgcagcagagggatatagatggcaacgaacgaagctgctcgctagctagcttaccgtggaggtccaccgccggcggcgtgcagcgctggaactggaaggcgggggaggagcaggagcagctggtgccggcgtcgctcccttcctcctcgccgtcgttgtcatcgaaggcgaaatccagaacggacacggggctgagctgttgctgcttgtcccccaccgtgctgggcgcacccgtcgtcgagtcgccgtcctctaccgccgccgtctccgcctgcgtacacgtacgtacggattatcatcttattatcggagcacatgtatggatcgtagctgctgcacgcacgcggtaagtacacgtaatgtacaatacaagaacgcaagactgttggttgcagaagaaggtgcatgcatgattgacacagtggccaatttgcttgtctttttttttttgcagcagtttaattttcactcaaaaagaaaagagcatataaaacaaaaggaagggacaagtggagaggaaaaaacaatggaagcctcacggggagggaaaaaaaacactcgcttcaggtcaggatgaagcgtgcgggcccggcgtttccagaagagcagagagcaggaaaatggggattcaggatcagcagcagcagcaggcaggcatactgtgacacccaaggtgctggtgcacagttcgtttttttcatatgaaataaataatcgtcggatccaatcatgcatgcgacgtggtagtgtgccagtagatgtggcttgttttattcggacattaattacattactactagtactctttatggagaggagatacagata

SEQ ID NO: 4672 - DNA, 1040 bp, Zea mays
aaaaaatactacagtaacacgcagagctccgacagctgaacgaaggctgtccctggctgccagtatcgcggcacgatgctggatccaggggtctccggcgtacgaacggcgagacgttgttggcggcgggagagagaagcgtgcaggggctgaaagccaagcgtgtgatggagagagcagaggcagaggcagagcagcgcgctgatctctccacgcgggatccgcgtcatcactagtcaaactccccacggcaacctgcgtgccgtcggaccgaccgatcttggggccggggcatcagcgtcgtcagccgagtccgctgcaatctcgcgcgcgcccatgccgccatgcggcccgctagctgtctcttcccgtcctcgctgcgctccgacagagctgactcacggcgcgtctctcttgaatcctcctctctctctctctctcccttcctctcccgcctgattttccagctcatttccgatttcttgacggtttcccccaagctctccgtacgtggtggcctaggccttgctataaaagaggagcagagtccgcttcctccaatcttggactccgcttcctcgaggaccttcacgaaaacagccgccctctactttccgttgccctttccctggttatataagtcgccgcgccggggctgagttccattccattccatctcatcgcaacgttacgcaaagcgtcctccacctcctgccttgccttgcctgcctgcctgcgtcgtagtttgcacaccgcaaccgtgttcttctctctctctctctctccctctcgtccctgagaaagcgccgccgctctacgttcccctcgcttgcgctcggtccggcaaaggcccgtccttccatggccatcgcctcccgtgcaacgaagcgcgcgctgtccaccttcgccgccgccaagctcccggaggaggcggtcgcggccgcggccgccggcgaggcgatcgccgcccgctcccaccaggcggtgccgctgccaccggcgcccgcgtcgtccgtgaggccgctgcaggcatgcaagat

SEQ ID NO: 4673 - DNA, 891 bp, Zea mays
catccctgcagttgtctacccaatcccaatcggcaatcgacacgggccaggtggcattccgcagcatggagagcttaacatgctcattcaactgggctagcagaggcatcaacgcaccattggcgagaacaaggtcgcggcacttcggagaatcgccagcaacattacccaaagcccacacagccttttaattgttttaaaacagagaaaatgcattactgtcacatcacacactcctaaatagcaaataaaaagcaagaaagccaaaagactgaataaatacctgctcacgaacatcatcactaccagacccaagaagcttcacaaatataggaacagccccatggtcaataacagcctttgtattttctgaagtgccagaagcaatatttgtgagagcccatgcggcttcaaactacaaaagaattataaagctcatgagaaattcattttcatccagcgacaacggggtcatggttactaaaaaatcgcttaagcaccttttaagcgccaaaacgctgctaagtgttagtgtgtttcacgaaaaagagtaaagcgtccgttttaagcgctagtttagacgtttaaacactatgggccgtgaaaagccacgctttaccgctttaaggaggtccagctccagcctagcccgtcaggcgtcatccgccatccacccgctgcctctgtgccactgcgcttatcatttgccacagcgccgtcgccgcctcccctgcgctgacatccgccgcggccatccatcgccgtcggtaagccctcatctgccgcctcccgcctgccctgctctcagctcaacgagctcgtccaagtctgtgcctccccagctcgccccccccccccccgcctcccatgctcggctgctctcatccacct

SEQ ID NO: 4674 - DNA, 1035 bp, Zea mays
agattaaaaggcattctctctttctttcctctctcaaacgcacaattgctcgtttgaggtcaagaattaattggttaaaggatgggcatgccaatactaaactcttccatatgcatgctagatatagaaaaagaaagaattttattcccaggctgctttctgccagtaacatatgtactgaccatggggagaaggccagcctagtggatgacttctacaacaaacttctgggcagcagggtggacagataaaaaactgtggatttggactacctagggttgccttctcatgatttggaggagctagattcacagtttactgaaaaaagaggtctgggattccattaagcagctaccatcagatagggcgcctggccctgatggattcacaggtagattttacaaggcgtgctggctgatcataaaagatgatgttatggcagtgttctctgcaatttggagcaggaagtttgctcactttaataaattgaatacagccttgataacccttattcctaagaaggaggggggctgatgaggtcaaggatttcaggcccatcagtttagttcacagtatggccaagctagtcacaaaaattcttgcaaacagattggctccaaagttgcaggatatggtctcacctcgacaaagtgcattcattcaagtcgattcattcaagataactttatgcttgtgcaacaaactgccagattgctccatcagaagcgaggggcaaggataatgctgaaactcaacatcactaaggcctttgactctatttcttggccttttcctcctggaagttctccagaagctaggatttgggcagatctggagagatattttaagtggccccttggcaacatcttccactcaagttctcttaaatggaagtctagggggagttatccatataagaaggggtttgagacaaggtgatccactatcacccatgctttttattttagtgatggatatgctgggatttttagtggccaaggctgaggaggaagggctgctgcaggcatgcaagct

SEQ ID NO: 4675 - DNA, 807 bp, Zea mays
agagtggccagagctgttacctttccttttccaatgcagccaaagtccacaagaagatcatagagaagtaagtttatcgtgatgaatggtgtattcccactaaggggatgaatatagacactattcatactgaaagagaataacattgtggtttcatattagatgaattacaggagtagatgttaaacataacaaaattgtatttgcaatgtcattttgttctatctgtagtaagtttctaaatttttaccacatcaatagctaaaattaatgtggattgtttggtattttgacatcatatcagcaacatatcgacttcactattgcttgttgtgcacgttactgcatttattttgaagtcttaaatacgaggatacagctaataatttgaagttaagggtcaaatggtctgagtcattttgtgtccatgtaaaaccctatctgtttcctttaaacaaacatttttaattctttttcctgctggtcaggaacacaaacaaatgttggaagtcatgctgttgatgcatagcgaaacctaatctgtcattataccattattcaatgtttgtttttagagaaaaatttacctcgctgttcacttcccctttttcaatgtttgttttagtgggtaactggggtaataagccatcatagctttgatcaaacaattaaaataaatgcaattttttaaaatcaaattaattccaatctggaaatgtttgaaatgtgtcgtaaccttgaccattgccgggaaaaatacatttttttcaaaaccccccttaaaattggaatatgggatgttagtaa

SEQ ID NO: 4676 - DNA, 1032 bp, Zea mays
atccacggcagaagctgccgcggttgctggtcgccgatcgcgggcgccgccggcgggccagagagcagggcggaggcgaggcggaggaggtccgggtagttggcgagcggctccaaggctcggagcgtgtcgaggtcggcctgcgtggggtagtacgcggcggcggcggcgggcttgaagagcgcggagaggtcgaggaggtcgaggcgcggcgcgtgggtgacggggtcgatgcccatgcggagcaggcgcttgcggatgtgcgtgttccagtagttcttgatctcgttgtccgtccgcccgggcagccgcgccgcgatcgctgaccacctaattaaccaccagtagccaatcacgccatcagaaaccgtactgcgcctagctactactccagtccagtagagcaaaaacagcgaagctacacaaagccaagccaagcgaagccagaatagctaggatgctactacttacttgttgccgaggatgctgtggagctggatgattgtctcctcctcgtcgaaggagaagcggccgcgcttgatgtccggcctcagatagttagtccaccgtagccggcagctcttcccgcaccgtgcgagccctgtgtgtcacgagaaggatcgatgtgtcacgagatgcatgaatatgtctacactatatgcgtaggattcatgggacgagagttccgtcggggtcaggtcagggcgcgcggcgctcaccggcattcttggggagggtgcgccagttgccctggccgtgcttcttgatgtaggcgacgagcttctcgtcctcctcgggcatccacggccctttcttcagcccgctcttctcgcagcacggcgcgcgccccatcggtaatgaatgacttggattaaccggtggctagctcaggcgcgcagagaactgctagctccctccaagaactacaaacgaaccggcaggtagaaggatagcccgtgtgtggaaaatgatgaagaagaagggcgggcgagcaagctagcaagagattgaaaaggtctggtttgtcacgct

SEQ ID NO: 4677 - DNA, 1018 bp, Zea mays
taaaaccttgtttagtttaggaaacactccattgataaaactagaccaatcctaaaaggaataggtggctttattatatcagtattaagaagaaaataagcactcaaattcacctctaggacttgaacctaagtgttgtgggcgttcacaccctcaaccagctaggctcagcttccttgtctctttcgtgggctctatgatattacttattccataatattgtgctcagtggttagcgttgagtcatggcacttggcacttaatttgaattggtgtggccacttcagtctcatgctgggtaatatattagcataacaaatcttaccatgaacttcagatgggcgtcagcgccatgctttcataggtttaggcttccgggaaagacctgaagcatatgacttccaagctgccctacatgatcatatgaagtatccttctgttcatcaaacatgttatgaatctcataatttgcaaaattacgtgtttttttcgtgtgtgattcctcaatgactagttctatatgtggaattctatttgatatggccatttgctattgatttttgattagcaatggtggtagtacatagtagaatgtagattgttgtctgggacctttcaacatctgattatttgatcctctacccatgccagatcttagtttatttggcaagtgtgttttaacgtgagttctatgaaatatttctaagtttttcgataaggaatccaattcatttcctgcgatcatcatttttgtgattatccttccaatatcttctttacatgatgcactggttttcctctatgattgtttttctcttacattagcaaagatatttaaacaagaagaaggccgctgaagagatgattcagcattatgagaagcaatcttcagtggattacagcctcaaagaaggggagacattggttcttcagcttaaaaatgtaagttttcatctaaatattttctggaagggaatgaaatcagagagcctgttgatgagagattgtcttctaagat

SEQ ID NO: 4678 - DNA, 895 bp, Zea mays
agcttgcatgcctgcagcattcatgcacaacaggcgcaacataatagatagggattgcacaacttttattcatgttggcaatcagcccagatgcctctccaaagcagtcaaggatcaacttggtacaaaccagatcatcatccagaggcttgacaaagagaactacatcaactgtgtacatggagagcctggacctaacatttgcagcccccaagctatgcagcagccccctagattccgcatgcttgaataagctgccaagcacatccatcacaatgataaaaagcataggggacaaaggatccccctgacgcaaacctcgccgatgccaaatatgatcacctgggaccccattgagaagaacttgcgtagaggaagaggccaataggttggagattaagttgcaccatttcagaccaaagccaagatgggacagcacctctaagagaaaagcccaagagactgaatcgaaatcttttgtaatgtcaagctttaaaaacaggctagagacctttcgccgatgaagggacttgatcgagtgctgaacaaacatatagttatcgtggatagaccttcccctcacaaaagcactctgatttgcagccactaaccttggcaggagaggagccaaccggttagccataatcttggtcaccaatttggcaaaactatgaatgagacttatgggtctgaaatcagccgctgttgtggcatcagtcttcttggggatgagggtaagataagctgagttcaacagccacaacccccgagaattaccttgatggagggcattgatagccgcaagcagatcgtccttaatgatatgccagcatgacttatagaatctcccggtaaaaccatccggacccggagctctatctgaaggtaggcagaa

SEQ ID NO: 4679 - DNA, 870 bp, Zea mays
atcttgcatgcctgcaggtccaccgtcatttccaaattcaatgaacctaaatatatgagcgaaaagcattatttcaacattctcaacaataaactggtgcatcaaaagaacgaagtaattgtgcgacaattgaaagagagaaacttaaaagcatcttggggattggagaacatagatgcacataactttggcactaaagatcattggtgaagacccaagagttgtaacagtcaaaaatgaaacccaaaagtgcacaggtcttgatgataaaaagattatgggtctaattaagtgtaagctgcatagaaatcttactacctcattaatggtatgcattttttttggcagacaaacataagaaaaatgagcaatataatagtaacaacagaatttctcttcaactcagccatgtatcagtttttggttagcaaaccataacttcagtatttgaaatatctgataagcagttagcagagtgatatgtttaaagggatacatcagttttacaataaaaaatggatcttcaccaaaagcacaagccaaatgtggcatacaagctagtactgctgagttgtttttaatgcattttctcccactaccatgtatcagtttttggttagcaaaccataacttcagtatttgaaatatctggttggacaccaaaaaacaacactagcagttagcagagtgatatgtttaaagggatacatcagttttacaataaaaaatggatcttcaccaaaagcacaagccaaaaggagagaatgcataacgcgttaatgataagaccataaccatgcaaccgaagctaaggattgtgtttttattggataggatgatatgaacagcggttgaagttatgagttgggc

SEQ ID NO: 4680 - DNA, 954 bp, Zea mays
actccccccggcgtgccccgggccgtcgagcccgtggcggtggcgccgcccgcgccagctaagccagcgccggtggaaagagtggagatcaacagcagcagcaatagcaagaggatggagatcaacagcagcagcaacagcaagaggatggagatcaacagcagcagcaagaggatggcaggaaccggttctgagtccggggggaagttcctagacttcgaattcttttagctagttttgagttaacgatacttgttgcagttccagacgaattgtaggtgtagttccatactggagtgctagcgtttggcatgtctgaccggtcccaagtctgttgcttgttgagagttgcggctcatcccatgtcactagacagtagacactagtagttacttagtcaaagagtaagccatgaagtttgagtagtcgaaggaacgatttgtcatcgtgtctgtttccattacaagttatatagccttatcagatttttcttttactacatgatcagcaacgaaatacaccatgtagtttgcctaagcattctgtactgtaccaaaatgtgaatgtcccataatatgaagtggaacagaggaagatacagagttaccgaccacctcaataaacatacgctatacgttagtatacggtgcactacacgaccaggttctctgctgcgccgatgaggcccatgccggcggcggggctccggtgccgcatgagcacgcgcagctgcgcccgctggcactcgaggttggacaccagatccacccgctcctcgcgcgggcgcgggcgcaggcgcaggcgcgcggccctggggaactccacgaaccccttgatccccctccggatgtgcgggttctcgccgccgccgccgggctctcgccggtgcggcttaccgtgctgcgggctctgttgcccgccgtgctggctcgccgacttgctgccgttggggct

SEQ ID NO: 4681 - DNA, 893 bp, Zea mays
  unsure (1)..(893): unsure at all n locations
cttaagtatgagaaggagctgatcagcacgtggcctggcccgccggcaaagtgaaatggtgttgccgcgattttttgttccggtagggaccaggatgcatcatttcttgtaaaattttacatcttgatgtgccttcgcatgaatacatatacgtggttgagagaactggggaatttccagaaattcgaggaaagaagtcacattgggcaaaaatgctttgtgatgctgttgttgagaaatagcgagattaatctcgagaaagcaagcaccaagcagacgtgtggatttgctatgcgcaggcgacgacttgaccatcaagcgcaacgccggtcaaagcgacggcagacagaccaatcgactctcatcgcgctcgcgttcgggtcgcgtacgacagcggcacagcaacgcctggatggctggagctggaccacaaaaagagaacaatgaagatgccaaatcgctggagctgtcgagcccccacggtcacggacaacgaatccctcgagtacgcatcagcagcagctggtgcttcgcagctccatccagttccacggagggcactcgagagatcaagtgaaatttcacccaagtggcgtttgtcgccttcacgcgcggctcaccttttccatggaatgtcggtcccacagcagctgtactcacatcaactcgaaaccaaattatagagacaagtcggtctttaatacaagggccgcactagcacccagggcaaaaatagcacatgccgggggggttcttatttcactttgagcttggcctcaaaatgttcagtgtctccacccacccttcatcatccacatgtactagcagctcggcttgtaaacggagcaggacccagggttactatagagagagggagggagcagtatncttag

SEQ ID NO: 4682 - DNA, 919 bp, Zea mays
tgcaacaacttgttgaatctacacatggcgttttgaatttctgtataagtacatcagcttacggaatttctgtataagtagaacagcagaaggctccagtttcctggtagatcgacggaacagttcatggtaaaaaaaaagagattttttttacgacagagaatagagatgttcctaactctgcttaccctaccatcgtcctatgcaacagcttacggaatggaaacgaagggacctgggaatgcgattatgcaatgccgagactgacagtttcaagttacctctttttttctctccttcccttcagtagatagacaatttggttggctggccttactccggtctgctccagggataagcagacggcagacaggggtggtgagcgagagcgagggcttcccttccttcctgcctgcttgtgtggtgcaggctgtgtcttatatatgctatgctacgggggagtagaaatttggcttttttttgcttcaccaacaggagatactagcaaagatggatgcctcgattgcattgtttgatttaccttccacaaggatagaataattcaattcctctttttatggttttccatagtatgaatacgctacgcctctccattggatcctctggagtctggactcgtgagctgttgtctgtgtcggcctgctgccactgctggcttgctgcaccgtcgttgcagttgcagtcgcagacgcagctgtcgcgccctctgctgcttccagcacagtacagggcccagtgggctcctttctggcattaaagagaattaacccaagcaggcgccagaaaattgcccaaaggttcttccgtgtaacttaacttttttcattttataatggaaaataaacgaaatttcaattctatatagcgacgagtacctgccggctctagacggagcagc

SEQ ID NO: 4683 - DNA, 974 bp, Zea mays
aggccatcgatttccagagctgcgtgaaggcgacgttcaaagacgagaatgaggtgggcgacgggacgttcagcaccacctacagagccgtcatgccctccggcacggtggtgtcggtgaagaagctcaagtccgtggaccgcgcggtcgtccagcagcggacgaaggtggtccgcgagctggagcgcctcgcccacatcgggcacgagaacctggtccggcccatcgggtacgtcctctacgacgacgtcgcgctgctgctgcaccagcacctggcgaacggcaccctgctccagctgctgcacgacaacggcgagaggcggaaggctgactggcccaggctgctgtccatcgccgtcgacgtcgcccaggggctggcgttcctccaccaggtggccaccgtccacctcgacgtctgctcggggaacgtgttcctcgactcgcgctacaacgcgctgctcggcgaggtcgagatctccaggctgctggacccgacgaagggcacggccagcatcagcgcggtcgccggctcgttcggctacattcctccaggtctgaactctgtccggcagcggcagtaggtagttcttggatgtcgtctccccgatcgaccatggcatgaacagtccgcaactggttcctttattacttgcagagtatgcgtacacgatgcgggtgacggtgccgggcaacgtgtacagcttcggggtggtgctgctggagatcctgacgtcgaagctgcccgccgtggacgaggcgttcggcgagggcgtggacctcgtgaagtgggtgcacgcggcgccggcgaggggcgagacgccggagcagatcatggacccgcggctgagcgccgtgtcgttcgcgtggcgccggcagatgctggccgtgctcagggtcgccatgctgtgcacggagcgcgcccccgcgaagcggccccggatgaagaaggtggggaaatgctgcaggcatgcaag

SEQ ID NO: 4684 - DNA, 948 bp, Zea mays
cttgcatgcctgcagttcatcctcaggggcatctcgtggcggtcccccctcctcctttgcaacggcaaccggcttatcagggtcaccgtcaagaatgacgcaatcatcgccatcatcgtcgcaacgagcatcaggcatggtgttcgtgttcttggcaccaaccgcaacctccttgtcacccacaacagtccctgtttcatccttcagggaatccaacagctccagcatcatcgctggataacccactccctcacaaaccgcgttgtcgtcgtagtcgtcttgggccagtattccctccgcccacgcaagggcggcgtcttccggtgactggcgcttgccagcggcgggcgtctgcgcgccgtcctcgtcggaactgatcacaacaggtacctccgccgcagaccccatctgccgcacaacgaactctcaggaaagtgcgggacgacaaggaaaaccccccggccgcagagccacaagaaaccccacagcggcgggcgatgaaccttccgtccttgaacggaacgcactaaccgatcaccatggaggacgccgagcgccccgcacggtgaaagcttgcaatccgggccaataaacaccggggtttcgcggccgggaatcgcggcggcggcgcgtggtggtctaggagaagaatcaaaagaatgcggctaaataaaagtcgcggtttttggaaatttcgctcgccggactctgcaacttcaacagcccaaacctttagtcgcaagtcgcaactcgactggccaacagaaaaccaccgtagtactatttgtagtaatagatcaaaacgaaaaagaaaggcaagtactagtataggtatagtagattgatttgaatgggaagaacagaagacgggcgtgagaaccgaacgcatacctaggggtctcttcgttttctccgtgacggtcgaggtcgaggccgagcaccggcagc

SEQ ID NO: 4685 - DNA, 584 bp, Zea mays
ctgcagcattagctcttggctgccctacctttgagtcatcagatgatggtattataagcccaggcatgtgcattggagttgggttcagttgaaacccaagaacaaatgggtctaaatagaatataactcctgcggcgctgacatcattggctgtatctagagcttgtttcacagaagaaagaccaagcacaaatcttatagaatagctgcacactagtatctttcctcttatcaaatctgcatctaggtgactcgaatcttggcactccccaagggacatttcattacaactggctgtattgttcttcagtgcatgtggtgcagcaactaaattatacatgcgatcaccatccgttccagctgtatttagaatcaatcaatacaagttacaattatatagaggtgactacatttgtacagaaaaagtacttcaaaggaacttacgagcaaggccaactccttgaatggtcaaattgttgccaagcacaacatagttactgtataccctgtcatgggcagaagctccaacagtaaatatccagggactgtaggaagacatgcttttaggggaaggaccagtattt

SEQ ID NO: 4686 - DNA, 570 bp, Zea mays
atctgcctcgagaccttctccgacagtgacccctccgcggtacgtgctcccgtgatgagatgagatgagatgagatgagatgaaccaccacctccttgcgcgtgcggcttcttgaacctcttcttcttcatcttcttgttccatcaccaggtgaccagctgcaagcacgagttccacctccagtgcatcctcgagtggtgaggactcgctctgtctgtctgactgttattgcttcctgctgttcctgtttctccgtgtttgttttcgtttccgcgcagttgttctatcgatccgtgctgaatgcgatgcgcggcagctagtctgaatccctcgcaagatctgctctgaatcacccgtttgcttggcttgatactacctctgactctctgagcatcgtgattgtattggatcctacaggtgccagaggagctcccagtgccccatgtgttggcaggcaatcagcatgaaggaccctacgaggtacaagttctgttctgctacaccaccgacgacgacgcatgcgtccgtcgtccgctgatatactaaatcgcattcctcaccttcctacgt

SEQ ID NO: 4687 - DNA, 585 bp, Zea mays
caccctgtgcaccatgtctctgtggactgtttatccaaacaatatgtgttttctttcccgtttgtgcagccaagtggttttgctcggtgacttgaactacaggatatccctggaggaggccgagacgaggtcgctggtgagagccaagagatggcccgtcttgttggaaaacgatcaggttttttcttcttctacttcttctttatgacgagatatatatactcagcttgtcatcctaatcttttttttctgaatgtttagtattaacgttgcggtgcctctctctctctctctctccgatcacacagctgctgttcgagttctccagggggcggcattttgaaggctggcaggaaggcctgatcaccttctcccctacctacaagtaccagcccaactccgaccagtaccactggtgcttcgacagtgcgggcagcgacaagaagcgtgctccagcatggtcagctcgcctttcttgttcgagaagatctttcgcaaaagaaagaaaggaaaaaaaaaacaagaaagaaggagaaaaaaagctcttcgatagataacaagcagcaaaagccatgtacactgaat

SEQ ID NO: 4688 - DNA, 476 bp, Zea mays
aaaaaaaaaggagagaggacttagagaggaaacgaactagagacaaacaaggctaggctaaagagcggactttggagccctagacagccttttctaacacacacacacacacacacacacacacacacaaaccgtacctgcgcatcaagatgcacggcacgtagtacctgcaactgcaagtaaggataaacagaaagctgcctttgaacgtcagtcactagctagctaggcgtgtatgcagatcgatcgatgagcagcccaggtgacggggggcacagagatgagtgagtggtttgatgggaagagggtcagtgaatgagtgagtgattgtgcaacttttgctttcactgtagggtgagagtttgatccctccctacggtgtgtgcgatgcatgctcggccggtgttccctccaccctttgcccacttctttttttttttttttgcccttttctccaattccattggtcttctctg

SEQ ID NO: 4689 - DNA, 500 bp, Zea mays
ctctggtatgtcctgcaagacataggatcttatttccccattgaatctgaaagatattaaagacagatgcaaatacaatatacagttataagctaaccaactgggataaaactggctgattccctaagacttgagtgaaaagagcttttggtgattaccactgaatggccagcacatgcagaaaacggaactgctccagctgattctgatggttccgcttgtgatttagcttccagctttgaccatgacaaagttttgaagtccaaaacctttaatcagaaaaggattcccgatgttaagatccatggcattgtcggtaagatgaaggtgctggctcagtacaacatctcaattcaagatggttgtgagaatgcctgcccataaatgcagctattaataaatacaacatcttgatgaacaatttacctgaatgtcgccaaggtaacggccattgtggtttccaccaaagacatacatcttctgctgaatcaccacagctc

SEQ ID NO: 4690 - DNA, 515 bp, Zea mays
cactctgcccaaaaggttccagagttgcagataccttggcgtcgcggcactatccagatcacggcgtcgtgaccgccgtatcctctgctcgtatggcgtcgccacagcagggaaggcgtcgccatggcgttggaggttggcaaggcgggcgcggcgtctctacgcgcgcggaagacgagtgggggagcagcgcgcgggaagcgggaaataagtcattgactgcgcgggaaatgagttagcgagcacgcgacgagcagcatcgcgcagcagcaccttggaattcggcgttgcccgcgctgctgcttccatccagctgctcctccgcctccatccggcggcccggcctgcatctctgagatccacccgccgacctgcatctccgagctccggcctgcgcttcttcctcccccgtgcgtcttcctctgcccgcccgcctgtaattcttcctcccctcgcgtttgcgcttcttcctcccctgcgcttcttcctttgcttgcctgcctgtgcttcttcct

SEQ ID NO: 4691 - DNA, 501 bp, Zea mays
ttctccgtggcccgatgcatcatcatgtacaggttcgtctcacctgctttgccttttgcggtggcaagcaaaatcgaatagttgtagcatccaccaaagacttggaaatggaaatggcttctctgatttttttctcccaggttgatagagagcattggcatcaccgttgccatttctcagtcttttttttaaattttttttgcttcctatggctacattcgctccgacagggcaaagacaaatagtagaaaataaactactatcttctactagaaaatccacgaaatgatagaaaagagtaacttcattggaacccatcgatattttatctcgcttaggctgtcctcacgagatcgtttaaaatagaagatttatactctagattacattatttaagtttaaaataggtgataggatattatagatgcgggagacagtcttatgttttaccagcaacgagggattggagtggacagggccggctctatattttccaaaggc

SEQ ID NO: 4692 - DNA, 483 bp, Zea mays
tgctgtagttgatctggcagccctgctgcgcgccgcagtagtcgccgaacctggacagcgccgtggacaggcactgcgcgcaggtcagcggcgcgaggtcccgcgtgcactgcgccagcccgtagatggacacgaacggcgtgtactgctccttgtcccgcccgagccccgcgctgcccgccgccgacgcctgcgccgtcgccttgcccatcaccttccccaccgccttctcgaacgccttcgggttgtccatggcctgcacgttcaccaggatcacgcccgcgtccgtgtccgcctgcccgaagaagttggcgttctcgtaccgcatgaagcagtagtcgtacctgcatgcatatgtatgtatgcaagctcgatgcttagcattagcagttgcatacttgcatgcatgtgtctacataattgcatacgtatctatacagccatgcagtgttgagcataccatatcctcgcgtcggaactgta

SEQ ID NO: 4693 - DNA, 490 bp, Zea mays
caaaacctgttgtgcttgaagctagcagaggagcttggtgtaatcattgcaaatccatgggtatcatggttcaaagctgctagtttgccagctcttgtttctctgctagcaacaccatatttgctgtacaaaatcttcccccctgaaacaaaggacacccctgatgccccagcactggctgaaaagaaactgaagctcatgggccctgtgactaaaaacgaatcggttatgattggcacaatgattcttgcagtctccttatgggtttttgggtaaggtttcccataactgaagaaaattatctcgtcctaccgattcacgattttaatacaatttgcagcttgtgagctattttgctctatgattctactttcaataagagatgtgcatggactttagcttgctgcttcctacgatctcattacatttatcacggcatcatcaaaataatctgtgaaagcagtttaattgtttggtagttgtgttgtta

SEQ ID NO: 4694 - DNA, 525 bp, Zea mays
aagcagatccatccctctatttctcaaatttctctacacaaacaaagctaccctcccacatcaaacttgtttactggacattggtctttcactttgttgtaaacttccagagtcaatacctcataagttttgagttatagagccccaaagtgaggcacatcacacaggaaccatattttcagtttactgaaactgaacccagaattccagactgtcaaggtagctttaagggtattttactacttattttgcatggtaccaagctaatcattgataagtaaacttgttcatcttactttgctctcaaacgtttctacacaaggtaggattcagaacctcatagaacaatttatataagacgtcaaagttgggccaataaatctgaaatccacacttgatggctgaacaaatttcagacacatctattgacagttcaatttttgggcagcctttcctcccctttttgtgtgggatcaaaccccactcacttaaataaagttgttctctaacatatggtcttcaatc

SEQ ID NO: 4695 - DNA, 508 bp, Zea mays
ctcctcttcgtcgccttcccaaccaccaggcacggcatcggataccccgtcgtcgccaatgccgtcgccgcagccaccgccacttcctcctaacaatagtttaatttaatttaatttcttcgaggctttaatgccttaatgtaactgcgttcgtatgtactattcatattttttttcatcaatcaaaacgacaacaacacacgttcacggagggagaacctaacgtggaagcaaagcaaatatacgttggcaattggcatgccactaccagctcagacctcagaggttgaagctcacacgtcacgtcacgtcacagatcaaatcactaaatcaggcaggctgtgttcggttgggcctgcaacggcccagaccaaatcgatctggccacgcagcctggcccgactgttttttttcttttcttttggaaccgaaccgacctcgcgctagggttactcgcgcacgacgcctacatctgtcaaccacaacccaagcgctcccccctccccgt

SEQ ID NO: 4696 - DNA, 455 bp, Zea mays
gcttctttttctttcaactcagaaaacgagctgatatattgtacaaccaaggaaaatccagaagacacaaaccatccatgtttggaagtcaaaggaaacggatcagcagacaaggagatgctacccccaagaactcgtgttttcagcagcctttgcttccctaaaaatttttgtggccatctcagtttgtccatgacgcagaccgcttcaaaacaggcttcaacattgccctatcctcttccagggagatcatgccgagatgtgaaggatcttccaacatcatcttggcgaccaaataccccgcgatggaccaggtctggaatttcctcgcctgcttgccaacataccgaccaagcttcccatcatagtactcaggccatccatccttcaacagcctcctttctgctaggtcaattgcccttcttgcgatttgtggccgtccagttttgatgcag

SEQ ID NO: 4697 - DNA, 489 bp, Zea mays
attccgatgctaatgttcaaagtgcagctcaccttcttgacaggcttgtcaaggtatattcatctggactgtactcatatgtctacaacttgtccttgtttctcttcttaattatccctgataatataactatatcaaccaggatatcgtaaccgagagtgaccagttcaggtatgccgtgtatgatttgccttttccttattagtggcttgcttgttttaatgtcaatgttgatttctgattggacccatatcttgcttttgctctttagcatagaagaattcataccgcttttgagagagcgcatgaatgtgctgaatccttatgtaagacaatttttggtggggtggataacagtgttagacagtgttcctgatattgacatgcttggtttccttcctgattttctcgatggtaatccctccctttttccaagtgcattaattttatacttctattgatcgctcaacaacctttctatcaccacca

SEQ ID NO: 4698 - DNA, 1085 bp, Zea mays
gttgaatgtgaaacaactgaaaaaagacaaatggagcaaagtcaaggcatagcactgaagaaccacaggtgtgggataccggtggtttgccatttttgcatggagttgaggtcaagtcaattttttatggaaggaagaatgtgaggaatcatcctaggtatgagctggagttgcgccatgagccatgttgcctactggctcaagcaactgaagggcaacaccacaagaagagaagctgcatcagaaaggataactcgatgaattgaatacagagacatgtcctcttcatattcctcctccggttccttctcccttggtctagagctatattccttctacccaattccgattcaccatccctcttccaagaggttgtgcaatctagtttgtacccaaactgttatgccatcaatgtgaggggtgcgccagcacataactcccaatctcagatcaaaatcacccaagccacgagccaatcgcaggttgaggttgtcaaaggagaaagcaaaagatgaaacgtactgttcttggcctgcagccatgctcctccacctgcttccgctctcctgccccgcgccgccgttccacctgcgcaggaccggcggctcgtcgcggacgccgcgggtccgggccggggatagggccaggacacgggggttccgggggacggacgtggagccggagacagctccgcgaaggcgccgcggccgcgatggcgacgatcctcaagcggctgggagcggtggagacaccggggcgctgctggcgtcggtcaggaggcttctgctctccgaggcgcctgcggcggcggagggagacagtgaggaggaggagcagggacagttccccaagcgttgggccatcgtcttcctctgcttctccgcatttctactctgcaacatggaccgcgtacgtgtcactgcttgtgtgctacgtacgaccccacgcttgcatggtagtgcccagtgcccacagggccacaaccgatcaagccagtaggatccatgctctagaatctggcactaacttgaatttgactgttctgagtgcttgccttgagtgagatggggtgttcaatgtcccat

SEQ ID NO: 4699 - DNA, 497 bp, Zea mays
ccgtgagcgcgtcgagccgcacgaggctcgcagggatcgggccggtgaggttgcaggaggctaggccgagcacggtgaggttgccgagcttgcctagcgcgtccgggatggcgcccgacaggcccgggttgtctcccaagcggagcacctggagcgccgagagcgcccccagcgacgccggaatctggcccgtgagctggttggagtagagcagcagtaactggaggttgggtagcccaccgagcgccgccgggacggggcccgtgagcgcgttcgacgacaggtcgatcgcttccagcgcgtcgagccgcgccagcgcgcgggacaccgtcccggccagcccggcgccggacaggttgaggcccacgaccctgagccccgacgcgtcgcacgccacgccggaccaggaacagaaccccgacgagccggcgccggagccagcactgtcgttccagcccgctaagaccccctggggatcgtcgacgaacgcgctcttc

SEQ ID NO: 4700 - DNA, 529 bp, Zea mays
acagtcccccaggccacatgacaatgtccacctcttgcatctttcctccctctccatagaaacccacggcgaatcttgtcaatagctttgagcgcccaagctggaagatccacagccatagcaagataaatgaccatccctgtgagaacatactggacgtggattttacgaccagatttagtcaataaatcagccttccaaccagcaagtttatttgcaatcttatcaatgatgggctgaatctgatctctagtgacctttttaatagctagcggtagacccaagtaccgacaaggaaaatcagccacctcgcaaggtagcaagttatgaagcacaacaaggtcttgatcgtcacatctaataggataaacgctgctcttctggacattagtacataagccggaagcctctccaaagaggtgaagaatatccaaagtaatattgatatccaaaacagtcggacgaagaaatatcaccacatcatcagcgtataacgaaatccggtgctgcaaaatccgtggggcgatag

SEQ ID NO: 4701 - DNA, 559 bp, Zea mays
aaagccaaatatagctcagtcggtggatatttattatttaataaatcatcagtcgaaaagttgagatatgcaatacctcaggatcagtagacagaagtcgccaatatatgtaagctctgtccctcaaatcaggattatctgtttcaactgttgcattattgagaacagcctacaggcaatagcttcaaattagcagtgaactggcgttgaacaaaagactcttgatcatgatatcgaggatgaaccaacatttagagacaacgaattaaagaaggaagcaactacttgcaacaacggtcaccattattaacagtgttctcaagacatcaacatgtcatcaatgcaaggctgagagcccatgataccaaataagtaaatgttcagacaccttgaaggcttgaaccaagtggaaagctgtcatgtactcaatgatctctaaaagtctaaacaaaattgcaaagataagtaaacatgtaagcatctgaaatatcaacctgaatcatctgttgtggcccctcagttggcttcttaagaaacaatttaacagtagcggttagca

SEQ ID NO: 4702 - DNA, 622 bp, Zea mays
accgtcttctgtaatcaagaaaagaatatgcaactgctaggcagccgccaatagttcagtacttcagtcctaatgcaatatgtactacagacaacgaaacatctgttgttgtttccttgatgaaaaaacggaagtttcgatatctggaatcttgactggcttgaaaaaaaaagggccagcgatcctatgtataatatggactcgtactgtgagtgacactgtaatttcgaaacaggagcaaaggccaaaaatgcttcttaaattatatcagtagctgagttgaaacagaacctttttttccccttcttttgcagattaaccaaaattacatcaacaaatattactagctacaggactagaaataagataagaagacagattgcaagcggcggcactaaaccccaacagaaacctccttcggtagtcactctttctaccccgaatcccctaacgaatcgaatcagcccgtactaccaagaaatcgaaacgaatgaacgcataaaacccatgtgcgcccataccagtttgctcgaagaaaatcggctactcaaatcaccgaatcaacaagatccaagctggggatcacaccaacagatctgccagtcctgcaggcatgcaagct

SEQ ID NO: 4703 - DNA, 490 bp, Zea mays
tgagactagtcggagatgacctgaatgataacaactggtttgtgaagtagtaaaacgggagggggaataatcaggcagtggaagcagcttcagttctctccttctttggggtcgcacgggggcataataataataagaagaagatgaaaactgggacgtaaaatgccgatgatgagctgacatggtcggccaaagctagcaatggtggaagcaggagagctgatgaagggaatgagctgagcatgcaagttaacttcgatgaggcatatgcaagcaagtggcccgcagcccgccacacaggcttgagctcctgtggtcgacataatgctacgtacacgtcgttgccttaaaaatatcatcatgaattggtggatgccggggcactgaatatgtccacagcccaccaagctatttttttggcaataatttgtccacaccgatctcacggcgtagagtttggaaggagaacacagcaggagaccgggagcat

SEQ ID NO: 4704 - DNA, 501 bp, Zea mays
tgcaaaaatgtgataagcaagctttggaggaggattgacaaagaaggtcatcaaatgatacccaatatatcttcttggtggcggaggaatgaaaattcctcattgagaggtccggctggtaggggtagcacccttgacctagaaaaaattgaagagcgagttgatggattggagtatggtactgtaactggagttcatatatagcggacatgcagcagacgttgaaaagtgtggttcagcacttcagctgtaggcatgagctatcaaacattgtgccatctattgtgtatatgcttctacctgttatggatattgatgctataagatgactaatctactccatccgactacatgatgcaggtccggatagaggctgagaccctccataacttgtttttcaacataatgaagatcgccttcccagattcagacttcagcgaagctaagaacgcaatgtcattttcgagtcccggaggatctgcgagtggtggcgctgctgct

SEQ ID NO: 4705 - DNA, 561 bp, Zea mays
gcggacccggcgaagcgcacctccagcccggggatctgcggcgccgcggcggcggtccagttgtagcagtactcgaacgggtccatggcgaccctgggcaggccggcgaggcgctcgctgagggcggcgaccacggccctgtacgccggggtggcgaggacggtgaggctggtcccggagtcgaggatcgcgccgccgccccgggcgacgtcccacacgtccgcggggatgtcgagcgcctccccggccacgtgcacggcgtcgaccgccacggcgtagaacgggctgatccggcggtcgagcagcagcggcgtccgcgctgcggcggcggaggagctgctggacgccgcggcgccgccctcgggccccggcggcccgaaggtgaggtagctggtggcgttgcgcggggccaggtggtcgacgaggcagtaggagaagcggcccccgaagcgcgcggcggcgcgggacgcgaaggagatgttgctgttgcccaggctgagcacgccgtccgaggactggaagctctggccgtcgtacgacgcggtgcagcccagcacgacg

SEQ ID NO: 4706 - DNA, 565 bp, Zea mays
aggcagatggctatcttaaacaccccagaatccaaggtgtagttgtctttggctatgctctggaacgcgtaggggacgtcaccgttggcgcagaggatgacggtcatgacgcacaggatggctacgacgatgttgaggaggaagtagtttaggacgaggaagaaggggctcgcaaggacgacggggacaacggagtggtagtactcattgatgaagaccacctcgtcgttcatgacctggaacattgcttcggccgagcagctggtttcgccattgttgtagaggcccttcaggagtaggtccctggagtcgtccacttcttgtttgctcaacgccggcaggtgctcaaaccttcggcgcagtagcttgaagagagcgaacgagaggcagatcctcttcaggcgctggatctgattttgggaggtgaagaacttgtcactgtcatcgagctcccagactttgccgacggtgacgatgctatcgttttctctgacccatttgacaacgccgccgtcgtcgtagcgtggtggggagccgctggcctgctcgtccagcttgtagccat

SEQ ID NO: 4707 - DNA, 482 bp, Zea mays
taacactgccaagtaatatacggaaaattcctcaaaacctgtccttgacaacatttagttgatgcccatattaagtggatagttttgggtttacgctctttcttggtgattgttggaactcactgacacgtggccaagtgggtgggtccaagcaacgggaaacggaaacactttgatgcttagcaacacaacggattagagaagcagtgtctttcagcctgtcccatcagagtacaatgtgggggatttataggtaaccagggggcagtcttaccctcgtaagtacagttatgcccctggttacctacgttatccccggaatattcccccctcaggggttattacaggtcattacaatgtggttaagtacaacctggactgacgcaccattaatactaccctgcgctggggcttacacatggggccagacgatccatgatggcgccgcgtgggcccgcttcagtaacatgtgcgggtagtga

SEQ ID NO: 4708 - DNA, 458 bp, Zea mays; identical to SEQ ID NO: 3601

SEQ ID NO: 4709 - DNA, 508 bp, Zea mays
tgagcagggacttctcagctttccttcgttgccgcacctgctccactttgtcaaccctgtccttggtcgccagcggctcaacccacacctccgtcgtcacataggtgtgcggatctgggaaagcaggcagccactccggcacgtgcttcatcccagtctccctcccagtcacagcgaagctggcagaaggctgcggctccacgcgctggatggggaacctaggcagcggccgcgcgaacggcacctcgtccttggaatggacaaacgccatgaggtccttgacgacgccagagccgacgaggcagtggcccgttgttgccgcgccagcgaaaccatacgtgtcggcgccgacctcctcgagcgcctggatgacgtctagctcattagcgtgcgcgcggccggcgaggttggcgtggaaggcggcagaccggcccaggtgggtgatatagcgcaggacggtgtcgacgaccgcgtccaccgcggagcggtgcgcgcaatcgaaccccgc

SEQ ID NO: 4710 - DNA, 539 bp, Zea mays
agtatttgatgtttctgttctttttttcccctctcgtctcctcctgattttgcctcccgcctccttcgcctggtccgccgtaccttcggcgttcgtcaggactgtgccgtgccgtgggttttcagattgttgtggatcttttcaatcaaccaacacatccttcgttttcggcgtttgttccgcaattccagccctccttgtttcggcatggatagctgtggtgcgttcagagggagacagacatttgtgcccttccattgtcagccgagttcgtggtttcacgtcttggcatacaacgggcccttctctgatctgttaaaaatcaaaattttcagtgcggacaggagttttgtagagattgccgttccactccagttttcttctcacgctagcaagagaaaactgaacattggattcctagtagctttctttctcggaagcagtttcgtttccctgagctgccaagagcccaagacctctctctctctctctgcaaagagacaaagttattgttagtcatcaccagatttttgggcctt

SEQ ID NO: 4711 - DNA, 539 bp, Zea mays
aactcaggatgttccaaggtctgtgatttgtaatgttcatggagttaaccccaaatttattgagattggcaaattgaaacatcagcagctatgccaaagagagcaagcattcttcaagggtgcatattatatcggaaagatggtatggagtaaaggttacacagagcttcttcagcttcttcataagcaccaaatggaattgtctggccttaaaatggagttgtatggcagtggggaagatgctgatgaagtaaaggcatcagctgagcgactgagcttagatattagagtctatccaggccgtgatcatggagattcaatatttcacgagtgagtatttaatagatgaacaataactttttatacattcttactagctgctagattgttttatgttcaggtataatttatgataagttctttgtaccatcactttataatctttgagtctcgactgaactgtgttattgattccattgtctgtcccagctacaaggtcttcataaacccaagtacaactgatgtggtatgcacaacaa

SEQ ID NO: 4712 - DNA, 500 bp, Zea mays
gatctcaatgtcaatatcaagtggtctgagcaacttctcggaggttttgggaacgacgcacttcttgtatcccagctttgaaatagcaatcactcgcttgtccattcttggcaccttcaaaaaaatggaaagaaatattactacaactggttaaaacaaactccatacgagcagaaaccccttcagggctcgttcggttaggagtggattaaagaggactcgaggggattaaatcccttattcaaaattgaagagagagatttgatccccttcaatcacctataacccacttgcaaacgatgtcctgagtatgcaacaaactccatcgagggaattattaaatgtggtcaggatgaagtagcaacagcgcaaacccactgttcaccagatccagatccagacgtttcatcgagggaattatatgttcacagcggctttaatccggctgcggcttctaaatattttgtcactatagattgcagctgcagcagtcggaacag

SEQ ID NO: 4713 - DNA, 596 bp, Zea mays
atcttgctgctgtcccgaacttacctgctgtctggggtaccatggctccggcctctgagcatatccagggtcccttggcccctgttgatgtactcgagaccgtggagcagctggtgcccaatgttgatgatgatgtgcatgctgattctattattccagctgtcaaccggccgctacttactttagaagaaagtggtcttcgcgctgctgtggttccagacactgtgcctgcccagggcacccctcaccctgttgacacgcctttgtccgttgagccgcaggacgttaccaattttagcgtagatggcacccctatccaccttcaagaccactcagacagcagattcaaagtaaagcctccctgtttcaaagtctactcgcgcagaaatgaagtccaggcagcggtggcccagatgacagatgttgagagggctgaaaaattacaagaattcatgcagattgttaccaagccagctacaaggctgttggctgcccccccgattaccaagcgaaagaagatgaagaccctgcccaatgacttcaatccaagaagaagcagaagggtggctaaactgccaccggagctgggcaatgaa

SEQ ID NO: 4714 - DNA, 471 bp, Zea mays
ccgagaggtttgtggccttaactcagggggagttcagacctggtcatttctatatattaaagcagggaacaaggctggccattcatagtgtccacgtcagtcttttgtttttcagccgtttgattggaaatccacgaacacgcaaccgcccactctaccggatcgttatcaagcctcacgaagcttctatatgacgcccgacccagggggggagaaaaatacgcgtgatcttcaagcctcccgggttgtccacgtaaaaaaagccgaccggcgttgtcgctagccccagcctgccaggccacgctccttgcccttctgcttggctcttcgaacaggtactggccctttcttctccacagcacgttcttggatctcctctgttctgtgatttccaaatcttagactccccctcaaacgccgctgcggtccagccacgacatcgtccatgtgctgccatttgctcctccgtta

SEQ ID NO: 4715 - DNA, 537 bp, Zea mays
aaattataatctcaatgtaaactaaaacccaaaatatattccagaattaaacttttaaaatgagttgtatccctagaatggtaatgctaatatataaaacaagaaccactagccacttgcatatttgctagagtctgtctcagtgttgaagtaaaacagaagtgtcattagcatatgactgtagcacgaacagttatcctataaaaatttagtcttactttctctagatgtatagaagcagcatgagcatcctatacaaattagatcttactttctctagatgtacagaaacagcatgagcagccatagcatcttacttgcttacaaccttacagtcatagtgttttcaagtcgtccgattatccaagtcggtttggatcaatcgcgattaatcacgattaattgcctaagtcggtcagccagaacgactagcaagtcgtccgacttgaaaacattgccatatacacccatacacttgatatgcacaatcaaacctaggtcgcatacacatgtagctttttttttgtcacatgacct

SEQ ID NO: 4716 - DNA, 554 bp, Zea mays
gacttgttcaacacgggtcaccagagcagaccacccggttgtactcttcatcaagtcccgccagaatgcatgagacaagttcttcaccatcaataatcttctttgctgatgtcatctcatccgcaagagatttcattttggcaatatattcaaccattgtcatattactttttcttgtattcgctagggcagtccgtgtgttcatggttcgggctcttgcttgcgacgtgtaggtcttttgcagttctgaccacctcatggcgtgttccgtagatgggaacctgacccatgacttttttgagtcatggatgtcatgaagaagccaaggacctgttgctggaagcgcgacccatcggaagcactctgggttgacgccgtcgatcatcttgtgtcctgcttgatgaagatcttctcgttgggcgctacagccgtgccatctaggtggccttgtagctgcgcgcctctaaggatgggtagaacttgcgctttctatagcgcgaagttgatcttgttgagctttacagcaacactttgccctaggagagatgttggta

SEQ ID NO: 4717 - DNA, 572 bp, Zea mays
ttgcatgcctgcagcacaaacacgaacgaacgaaacccagaaaaccacatccggaaactgatggcacatgatgcactagctaggtactctcactacacacgcatacgaaactgatctgacgatgtggcaatggcgacgcacgaagctgatcaggcagctgatgaagcggatgacgacatcacgtcacgtacgcagctgctgcttctggaggtcgacggcgaggacggtgctgaggttcatgggcgtgatgtagtcggtggagccggacatgaactgctgcacgatgaggcggttggcgcgctccgtggggtggaaggcgtcccagaacacgtaggtgtcgcggtcggcgcagaggctggacaccatggtgcagagccccatgccgttgaagcggccctggccgcagcacgcgtcggtggcggtctggaagccgtacgccttggggtcgtcgatgaagtcgttgtggatgcgctgcatgttgacgccgacgaacacggggtcgccgccgccgtggcgcgcgttgagctcctccagcagcgccatgagccgcgggttgtacatctcggcggcgc

SEQ ID NO: 4718 - DNA, 1034 bp, Zea mays
ggtagtacccactgcacagcacacaaacaggagcgcaaggttaccacttaccaccaggctgcttgctagtaattacgcactagcagtagcaggtgctgattaggattaggttcagaccgtgggtagggggagcccttgatgggcttctgcccatacttgcgccacgcccacgagtcagacggcggcggcccctccccgcactcggccagcggcaccgacacaacccgcttctccaccgatctccggctgctcgcaaacagaaaaaggacgacccaaattaatcacccatctatctttgcagctcatgtctagtttgtctagactcccttgccagccaccgccgcagcagatgaaccccgcccgtacctgcgcttagctgccggcgacgaggcgtggaggtcgcgcttgttcggcccggctccggcgcgaggcgactccgcgtccgcgtccgcgtccgccgccgcagctgcctgcggctggtcgggggattccgcccgcggcgaatccgagctgcagcaggagaaggcaaagactccacctctacagtggtagcctcttcaattggcttcatatctacaaggttgcagaacgacatcagcctgccacactataaactaaagcgtctatttgggaatacagggtatcatataaactcacttttaacttcatttgaagggaacgaattgaaaggctggcgttgttcatagtgttctggcattgcactttttcttttatttctctttatcaggaagaatgcaacaagtgctccaacaacaagaacagatatgataatgcctgctatggctccagcacctatgctagagcttccacctgaactcgagttgttacttccattggagtgctggcctgggctctttcgacggttgcgcgaacgtggaggagctgtaaatggtggtggtggtggtgctgagcctgtgctccaagagttgccgtcagttctgtaaacaaccacataattagttgaagccatagccctccacatcatcataaaaacaagagttgaatagtacata

SEQ ID NO: 4719 - DNA, 546 bp, Zea mays
gttgtcgtcgtcgctaccatcgacaccagcaagggcccaatctgccaggttgagcactggcgccacgaatgcaggctccaggtacaagagcgtgatcggccggaggctacctcggacgctgctgtcgtcgtccacgagcagcgaggaaatggcagtgaggccgtactcgccgtcgctcccctccttgaagacgcccaacgcggcgagcgcgcgcatgacgctgtgcaggcagcggagtctgctcgcgtccagagagagctcggtgagcaggtcctcgacggaggccctgccgccacggcgctggatggcgttggcgacgccgagcttgacagcgcaccggagggccgtggacttgacgcagccgagggcgtgatgacgaagctccacgctggcctccagcagctcggcgcgcgtgaacataccgacgttgcactgcggctccattgggctgattcgttgttgccttcatctgcatcctcttctcggaaggctagtaagtacaagcagtacctgctgcatcgatgactggccagaatgataccatcc

SEQ ID NO: 4720 - DNA, 440 bp, Zea mays; identical to SEQ ID NO: 3702

SEQ ID NO: 4721 - DNA, 570 bp, Zea mays
aagaagatcatgacacacatttgagttctggtttgcctcgtaggtagcaaacgaaacatggagctgaggccgcggcggcggctgctgctgctgcttgcgctcatttgcctgcgtgctccccgtttggcttcggctcagcagccggatgaggcgacggtcatagttaaaggctccactaggattgcggaaacggatgacaactacgtctgtgctacaattgattggtggccgccggagaagtgcaactacaatcagtgtccatggggccaggcgtcaattcttaatctggtatatgctttatgtttgttttccttctcttgttattggtgggttagtgttacacaatgctgtttggactaattttccatgccgtccattcaggatctggatcacccgtttctggctcaggccattcaaggtaggccctttgagttacattcagtggctgccggttacatatttgtcatccctcgtggctttagataaggacctagtaggctggtagattgttggttgatttgctccatgcctcagacagtcttctttcttacaacaaaatggtaattataa

SEQ ID NO: 4722 - DNA, 519 bp, Zea mays
agaggatcgtcgcctcacttgtctcgaggagatacggatccaaacaggtaaaaaaaaaatgggactcatgccttaacctatttcatccattaatgcttttgtaacgctgatgatgcacagtaacagagtgtctttttttttcgaacaggttagccaagataaaacttgggtctaacatgccgacgagagccgaacggacgatacgaaagggtgactgtgaggtgcagatcatgggagagcctacgggggagttgtacgatgtcatactgtacttcgggatcatagacatcctccaggactacgacatcagcaagaagctcgagcacgcgtacaagtccttccagtacgacccgacgtccatttcggcggtggatccgaagcagtactcgaggcgcttcagggatttcgtgttcaaagcgttccaggaagacaggttcgacttgtgaagggacgcgtgggaagctcgatcgggaggctaccgttgccgctgacacgggttaaccagtgttgagatccgca

SEQ ID NO: 4723 - DNA, 561 bp, Zea mays
gctggtgctgcacaaacgaggcattctattacgcaaaaatatcttacgccaaaacgttttccttcaccaatctggagggagtaagagaatagagaaatattttttctttatttttaacggtattatctatttgatgcactatgacttcaagattgttttaattttttctgatattttttctcgaaaaactgcacgataataaaagaacaaaactagagagtcctacagcggccaataacaagcatatataaatccatccataagtgccatgagagaaggacaagaaaggggagatgagagtatagatgtccaaacgggccacccggcacgggcccgacccgaacccgattcggcccgatccaaatagtgccgggccaggcacgacccgttaatggatcgggtcgggccgtgccggtccacgtgctcagctgtgtgcccaaacacggcacgttcatgtctagatcgtgccgggccggcccgaaagcccaccgtacctaacgggccgtgtccaacactggcccgcactgtttcgagaccggcggcgtcaggagcaggcgctac

SEQ ID NO: 4724 - DNA, 525 bp, Zea mays
tgcaggttagtgcctatactgcccacaaaggaaccagatgaaggccacaatcaaccaattaacatatgtataaattctaatcaacatggcaaaacacaagctgacaagccattaaaaatttcacccatgcatgccctgcccagtctgcacgtagtcatcatgcaagcaatcttatgaaattctcctatatggctcactcccaatccacacagtacgcaaactactgatccagaccagaggttatcccccaaattccagcatatatgctagcaccaaccaccaagtcatcaacaaccttaaaattcacaaaatggcctggtaaatcatttcccaagtgtcgagactccctaagaatctaatatctctagccgcacagcctaattttagccagcaatagtacaagcaagtttagttactggcaaacacgaagacaaaccctctagttacagagctcgccgaacgagcacacttcacccataactcagcggaggcaatgcgggtactagggcggcaaccttcttaacg

SEQ ID NO: 4725 - DNA, 519 bp, Zea mays
gggtgcatccgagcgccggcgaggaacgcgttgctgtgggagaagaacatctcgagggagccgccggaccagcggagcacctggaggagccgctcggtgaggttgatcggagcggtgccgcggaacgcggccggctccacggagcagtacatggagcgccagccctgccggtgcatgcggaacccggtcaccacgtcctccgtcgcgatgttgtacacccacccgacgtctctcccccatgttgtcccgtcctcgtaagcgcacgtcatcagcgacgccacctcgctgctgatcgtcgtcgtctcgtcgtcatcgaggaacactggcgtgatagatcgttcttggttcgcggcgtcgtctagtactgcgtttctgaacaatgtcgatctgccgtactccttgcccttgtggtcgtcgtcgtcgtctatcaccttgacgctgccagtcgttctccaccgcggtggctccatgccgtacagcgcggcacggcggaacatggttccggtgccgaggtaggaa

SEQ ID NO: 4726 - DNA, 446 bp, Zea mays
ttcttgtaaaccgtctgctcccaactaattctggccatatatgttccttgttttgtaattttgtagccctattcacgacaaataaaaaaatattagacggccaatctgttcataaacaaaaaaaaacaggcatatgtattttaaagattttctagaggcggaatgcattaacattgaacaaaatgagtgcaactcagcagaaatatcaaaatcttggacttcgacaggtactggactatgttccatagttcctgaatgtgtttagatttgcttccactatacaagttttaaatttgtagtccaaaagtataattcagattactgtaggagatttaccttgtggtgtgcagcatctgtaggtacatctacattcaagaatgatccttgagggtaagtcccattcttgatctcagtcacgatagcatttatcagaggcatgcagacct

SEQ ID NO: 4727 - DNA, 534 bp, Zea mays
gtttcgtcagtcgtcaacgacgttgggaacgctgctggtgctgcgcctagagctgctgaaaggtcccgtgacagtccggccaacgaacttgccggccttgctgagtccactaccgaacgcgccaatgccggagccgacggcgccgatgcccgtgccaaccatcccaacgccggagccggccgcgctgacacccgtgccggcaacggtgccggccgccgcgatgcccgtgccggccacgttggtgaccgtggacgccatgccgcttgccgcgtccgcggcgccgctgacggcccccgtctcgctcttcaccttccgccgctcatccacggtctgcttctccagctccagggcctcccgcgcctctgcgttggtgaactggtggtacgccacctgcaatacagcttgcaagaggaacgtcagacaaccgctgcgaactgaacacggaaaggacgaggttgatcgatcctgccttaatgctgagcacgcccctgtccttcttgtccttgaccttggtcgtgtccagcgacgacagca

SEQ ID NO: 4728 - DNA, 498 bp, Zea mays
aggaaccgcgtaatgccggaacattgcggcaagtgatatcatcgccacaagaacgcatcctgcaagaagcgccaaccccaacctgacggtaaaactactgacggttttcttctcgcatgccatcctgtaatgcttgaaaccttcatctatggcaaacacggagaaatagcatggacattctctgagtagttgccttgattgtattcgtttccatctgacatcaggaacattctactgttcttcttatagagtgttagttcaaacatctggactgaaacaagtggcgtttgttgagagatttttctcaggctccagcagaagaacatgaagcactactggtcctgaatgggttgccgtgcgaagttagatgagcgaactcctggtagaaaagaagcgaaagcaaactacgtgtctcactcaccttttggtctggtaggaatgtgtgtgggtactgtgcacattgaaagtctgcatgtttgttgcagtagagagcaaata

SEQ ID NO: 4729 - DNA, 555 bp, Zea mays
atactatatgtacaatacagtacgtttctcagcaaggagaggcagaatatactatgggtgctgggatgctggcagataaaaagctcgaaaaaggaagaggaaaataattttcactactacagaagaagctcaaaaaaaaaaaaagataacatggatcttaggctagcaagctcgtcgggttgcacttgcgcgcgatcatctatctgttgtgcagagggttagcacccgtcggtatccgccgcttgtcgtcgtcggtggcgcatgcaccagcagctgcgccggcgccgcccgctgctttccgcccgcggctcttactacaccaacgagcggcaccacctgcggcggaggcgtcgaagcggactgacgctccgacgacgcccacggcgtggtgcacggtcgtcgtcgttgcccttgcacccgtcgacggcggcagcccgctcccgctgtgaccgcgagggcgcgcgtggacgtggacgtggccctcggcgtcaccgtgcgcgcgctcctgcgtccgcggcaacgacggcgccctcccctcggcgaccacggcgaact

SEQ ID NO: 4730 - DNA, 526 bp, Zea mays
tactcacaccattatgtccagtggtgtcttcattcagctttgctgttttagtactgtgatcgccatggaacaggccaccttttctcaaccttttcaaagcaggagagccaaaaaaatcatcctcaactgtgttaccatcttcagcatcataattatcatcatcactatcctcattatacttaacttcttgcttctgcctgctagatctgcgagtttgttgacctggccctgccctattttcagaaggaccatgttttagaatctcttcctcactgtcgctactggtttctgatatgctagattcactggattcaaatgctgccctcctgccccttttcaatccagcacttgatgaagcttttgaaggtttcctggtggactgtgcagatttcattttgtttttcagtccacctgcgttaccatcagctttccgctttgtattcacattagcatgatgagaactggtattaacatgaactcctgaagtggcagaccagcctttctgaccagtgacatttgattgatg

SEQ ID NO: 4731 - DNA, 556 bp, Zea mays
tgacttgaactcttcatccttgaacatcaatgccctggcactatcagcttgacttcgcaacaagtcctgtgcctccttggcagactttaaagaactttccagctgtattaccattataaagaaacatatgaaattagagacatcaatacattcaaccaaaaaagtttgtaaagtaaactacaatggaggttcacatgctccatcaaatactacttctaacacaaaagtcccaaccaaacattccgaatttagtctataaaaaaccccctttccttgaagacagatgaattaaaaagggtcatcaatttcagagcatgtacgcatatagcagataacaccgtttccaaagcaaattggctattattagggaggcgtcaatttaaacaaacaattgccagtagagctggtgttttgacaccaactagaaggcaacatgacgcacagcaaaaaaaaatcatagatcctacgacactgaaccaatgcacagtttatcaaacagaaatcgaacaactttttaattatatggtcaacatggcatattgcatctggcagaatg

SEQ ID NO: 4732 - DNA, 555 bp, Zea mays
aatatagttttcaaagaaagctgttgtttcccgtactgatatggcagttgtggtttgtgttgatcatgttcagatttccaaattccattggctgttgaccctcccaaagctggaagtagggaaaaaaggagttcaagggcatctattgctttaggaattggaattcctattgtagcaatattcactgctctgattctcggcatttattgtattaagaagcagagaaagagttcgatgcatgaaggtaccatcgttatttttctcatttcaattattttgttatttaataaactggtaactctctttcagtttttggttaaatccacatgctatagcaaacctactgagctgcactaggaattgcaaaataccttggatcccaaataaacagagattcataaattttttttgaaagaaatggcaggagctctgcctaatcattaaaataagagagttcagaaaacacaatgtacaggtccgaggaccgagacaagacagactagcaaacacagcgtgaggaacggtcccaacagacccgcacaaaacagctaaacc

SEQ ID NO: 4733 - DNA, 576 bp, Zea mays
gcaagctacggccgccaaggaaggtgatgacgccttgctgaattttcgtttcaggttcgaagcagcctctccgtatttgcaaatacggaggaaaaacttgcctcggtttatcccttttctagaccccactcatctgtgagccttcggcattaggcctgccccacttttctcattaaatgttcaacgctgacgcattcgagaaatgtaccagtgctgaaaggcaaacaaaaggttggatgggcatcgcaggtacatacatatgatagcaccacgatgcatacttgccttctcataaactttgctgctgctgccatttagtagctctggtgccatccatggaagagtgtcgcgtacaccaccagaaaccagagtgttgcgcttgaaccttgtcaacccaaagtctccaacctaagaattagcaatgaattattaatgtaacagttcaacgagagttggaaggccaaaccaaggtgaaactttgctgttcactgacaatgaatacaaactcctaacaatcgtaagttcgctactgtactgctgcgtatgatatgctaacagtactgtcccagctgcgaa

SEQ ID NO: 4734 - DNA, 515 bp, Zea mays
tgccaataagcaacgggttggtcactatgcaattgtattatttcaattattgtacttatatactaagttgataatgtgtaattatgtatcttcccatgacatgtaaaaccatttgaatctggccacagtggacaatgctgaacgtgaccgcacatcaattttctttttgccaaataatttaatagtcattattgcagaaggatgcgatattattttgtagtggattgatcagatttgcagtagctgttttatttccatgtgctgtcacaccaactatatataatgatgttttgctattcctttgtatatttctttatccaggttgcagttgttgtagctcatgaattagctcatcaatggtttggaaatcttgtcacaatggaatggtggacacatctgtggcttaatgagggctttgcgacttgggtaataaattagaacaaaaataagtaattgcaaagatctatataatttatgttgttcatataatatttttctttccactgcaggcatgc

SEQ ID NO: 4735 - DNA, 559 bp, Zea mays
gcaatattcatctatctcttcttccagttagttattgaatgacaactttatcttctttacattacatttatgtgaattgatttgtcatttttgttcttgactgttatacatgaatgcattcatactgattttatgtattttccaaggaatacctacaataacctgttttctgtggtggatgcttttgcgtgcgttagaagtgtcgagttggctacaataaggtgacctaatcaaatatttaggagatataattaatcaaaataacagtgctaattgattgctgaagattcttagttgagaagtgcaagctgatgaataattgctgaacttatatttgaaataacctatggaaattacataagtaccaacacattaaatttgagatgcattatttgatttatttggagttatggaacaaatgattcagtagttccttttgggtttgacatggcttatcagactttatgtcagcagattgttaattagatctcaaatccttgatatgcctatgcggttctttggttctagtaattcttggccctgattgttagtacactgc

SEQ ID NO: 4736 - DNA, 515 bp, Zea mays
tggccaagctactccacacacgcggattccacgtcaccttcgtcaacaacgagttcaaccaccgtcgccacctgcgcgcgcgggggccgggcgcgctccacggcgccccggggttccgcttcaccgccattgacgacggccttccgccctccgacgccgacgccacccaggacgtccccaagctctgctactccaccatgaccacctgcctaccccggttcagggacctaattgtcaggaccaatgccgaggccgaggccgagggacgccccgccgtgacgtgcgtcgtcgccgacagcatcatgagcttcggcctccgcgccgcgcgggagctcggtctccgctgcgccacgttctggaccgccagcgcctgcggcttcattggctactactactaccgccacctcgtcgcacggggtatcgtcccgcttaagaatgaagcgcagctcaccgacgggtacctggacaccgtcgtcgactggatcccttgcgcgcccaaggacctgcaggcatgc

SEQ ID NO: 4737 - DNA, 617 bp, Zea mays
gcgagcctctctccggggcacttgcgccgccccatcccaaacggcgccacgaacagcccctcggctttcccgccctcgaaccgctccggcacgaacctgcccggctcctcccacacagccgggtccctgtggatcgcgtacacgttcaccagcagcgccgtgccgcgcgggacgtcgtagccgccgaccttgcagtctgccgacgactcgtgcgggagcagcagcggcgcggcggggtacaggcgcagcgtctcggtgatgatgcacctgaggtagccgagacgcggcaggtcgcccgcgttgagcaagcgggagtgccccacggcggcgtcgatctctgctcgtgccttctcgagtgtccctggattgttcagcagcagcgacatggcccattcgactgtgctcgaggtcgtctctgttccagctccaaataggttcttctcaaaaaaacgatccgacgttcaaccatcgtcagtgacagagaagagaaccaccgtctctgtactaggctagccagttgagtatccggtgaaaaattaatcgaacgaaaaaaatgaatccctcaccgaacagaaagccgtgatcacggtgtcggtgtaaacctccggctccagctt

SEQ ID NO: 4738 - DNA, 631 bp, Zea mays
aaaggcgcatcatattatcttattaatgcacttgttggttgaaattaaatggcatacatcgatatcagtttgtatatatatatatataccttgagcataactgcatcagccgacgggatgtgctcaaacatgtcgccgccgtggaagcacagtccggtgccggcgggagcctcggcgacgatgtgggggaggtccatgacggtgcacttctggatgtgcgggaaggcggcgacgacggccgcagcggccgtgccccgggcgccgccgacgtcgacgagcgacgtgaggccgtcgtcgaagacggcagggcacttgcggatcacggcctgcatgacgaggcgggtgtcggcgtccatgctctcgtagaagcaggctctgttcgcggcgtcgtcttctacgcacgcccacatgcacttgcggttcaccgtctcgtagagcgacacggagggcgcctgctcgtccttcatccactcggccatgctgaacaggagggagacgtttttgggacggacgtggctggagatgttgggatgtatgctcagattattcttcgaggcgtcgtcgtcgtcgtcgctggtggcgagcaggcgggacgccggggtgagccggtaggagacggcggtcgcgtcgt

SEQ ID NO: 4739 - DNA, 598 bp, Zea mays
agtcgacctgcagatgacgccgtcctcctccggggtgaagtcgccgtgctttatgttgggcctcaggtagttgagccacctcagccggcagctcttgccgcacctcttcagtcctgcgcatgcagcagcagagttccgatccattccatatggatcaactaacaatcgatcgagcgagctataaaaatgcatggataatatatagatgcatggatggatacgcacctatcttgtgtggcagcgcaatccagttgcccccggtgccatgctcctcgatgtagctcttgagcatcgcgtcctcctccggcgaccatggccccttcttcaccgtcgccttgtcgcagcagggtgctctccccatctcccccgtgtgcgctggcggttgcagcttattggtttaatttggtcgtggggtggtctgcgcggcgccgcgcccagtatttataggacttcaaaaggtacggatatggtttgaccttgatgctgacacaagctagctttcgcatcggtcttcttcttcattcttttgtttccttggccaccctagctaagctagctacatatgccatattcctctgcaatgctgcaggcatgcaag

SEQ ID NO: 4740 - DNA, 1624 bp, Zea mays
acgatgaaggggggcagtcacgcgatggagcaacggacgcacaacaagacgaagggagaggagggcggcggcactggagaagggggcaatggagcaaaggcggtggcgctgagcagggagcacaccgcacaggtggcagcgactacagtgctgcgtatctaggactctaggtttggcagaacaatgtatttagacctttagagatggtgggccgacccatataaaagagaccggatactggcccaaaacagacgaaattagttggtcatgaccctcgtcggacgactaatcgcgattagtcagtgactaggacgactaatctcttcctagtcaccctagtcgagtcgaagaccctgatcgagcttgctctagcgataaggctgactaatcgcgattagtcggacgactttaaaaccttgctaaaccatacccatcaggaaaatggtaaccactcccagattccaaatgagagaggcctacattgctcatacagatgtccaacaaatggcctgcaggagagccgccagagtcaagctgaggagacgcaaggccatcccttccccagggcagcgcctccgtccaagcccgaacggcagcaagggggcggcgaccgtggcagtggcgtccaggaaccgctccggcctgaactcctcgggggcctcccacagcctggggtcccggtggatgagccacgcgttcaccaggaccatggtgccgcgccggacgcggaacccgcccacggcgcagtcctccatggcctcgtgcgccgggatgactgggccgacggggcagagccgcagggtctctttcaccacgcattgcacgtacgggaggtgagttgcttctagtctcatactcctatgctgtaagtctccgatctttattcgccttttcagattaatcatttgtgtgagtgttgttgagtctcttatgatcgtaaagtcagttatgcacccaatcggtgtactttatccgtgttgaccgcgtatacacaattctacctttcggtttgacactttcgctcacgttgacattagtctaatactgtgtatttattactttatatgcacaaatctgctaatattcacctcttgtatatctcccgcctatggtacttgctcatcgtcatatctacgtgctatgtctatattttctcgttgctgctgatgttataatctttgtatatgtttctatagctctagctcgcagagtataactatacttacatatctctctctcggtgtactgacatagtagtttatatgtaatctaataacacgatgtcgtgttgtgtgtcgtcgtaatccgcattcttattgtattacgtatactatacaatcatgtctatatatatgtattcatgtagcatcacgtgatacatttattagggagacttctatgcaacttataggtactattaataactactcactatgtttaatattattctattgatttcaatgctaggctgctattatctagttcatgcatactatctcttcttttattaatcctactattaatatgctcttgttgtactagatatactcatacgatcatactgcaagatgtagctatcatattctctacgtcaaatgggcttcactatcacatatcacttcgt

SEQ ID NO: 4741 - DNA, 571 bp, Zea mays
agccttattaggcatcccacatcgtaggtatccagaaattattgtgttccaagaaactgtgtcacaagctccttggggagcagaatcgagaacttgtcttgcagttgttggatagctacaagacgagtacatgttgataagagaattaaggacaaatgtatctgaaaccaagccaagtttgacagaaagggaatgaagctgagcaccaacagaaacagatgggaggcgggcagtggcatagaaagcaatgttgagggagtagctatcgagggtcatacatccagaatggcgtagcagggcgagtaaatcgagggattgagatgggaaaggccccaaagagagagatcggaggacagagtggacaagggggagcttgaggagaagacctgaaacaattgactgggagaggaggaggggaatatggcaatgggagagtcgtgggattaaaattgaaagggcatatttatgttcaggaaaagagcttttggcaatgcagaaggcttttgacttcccaacaaatatttgtgaaggtgcacccattaaagccaatggagttgacaagcgatctgtt

SEQ ID NO: 4742 - DNA, 578 bp, Zea mays
aactcagcggtctgcgtcacctgaactctgggcagcagctctcgtcgtttgatgcaacgcgtaatcctgaacaggtttctgacgttctgtggttgctgtttagactagaccccccttggtggcagggtttgaatcgattgtgctcctccgcttgatgtgcagtcgtctaacgaggccagcggcggcggaactgggttgaatgcgccgccgttcatggttccggccaatggggctgctgggaatggagctcctaagccgcgcgtcagggctcgccggggccaggcaactgatccacacagcattgcggagagggtgcgtgagccctttgtttctttgtctgaaactcaaaactctgcatcgattctgggactgagttctgaacgtagtaacagtgtgctctgttggtcatgtgtctggcagctccgaagggagaagatctctgacaggatgaagaatttacaggagctcgttccgaactccaacagggtactgtactcgattgcacatgctgtgctctttcttgtcaaatagcggtcgactacgtggcatcagtttgtgaaaccctgcatttctgatgt

SEQ ID NO: 4743 - DNA, 555 bp, Zea mays
attgaatgtgtcgagggcctgcaaaatttacttttggtaaagcttaggacagaagcaaaatgcatagatatccattatccaaatagcaaatgtttttatacgatgtaaccattaagtaaatccatttctcttgacacaactacaggttattgtatatgagcatagcgttgatcatacattcttaccttgtttagatagttcatctgtgttacaatgcacaagattacaacaaatgagaacacccatgtttgtgaataaacaagctggttcatccctgaaaatgtcaccttcaaggctatcccaagagctttgacactcatgacctggcaaaccaaagacaatacagaaggagagtatttatgtcctagctttcttgagaatagttatgtgaattcacatggaaagaactgttaatcatgagaagcataccgataaagatccaacaagagaacatatgccaatatataccatgatatgtgtctgcccatactgagggacaaaatggcatatgagcacaaaagctgctgcaaatacaacagctgcatagaataggaa

SEQ ID NO: 4744 - DNA, 477 bp, Zea mays
tgggcaggggtcaggtgcgtgaacggccaagtgtccgccctgtccttccagaacctcagcatagccaatccagttccagtcccagctgcttccatatgcaacctcaagaacctgtcgtctctcgacctttcctacaacaaactcaccggccagttccccacagcgctctacagctgctcggctgctcggttccttgacctctccaacaatcgattctccggtgccctcccagctgacatcaacaggctgtcgtcggcgatggagcacctcaacctgtcgagcaatggcttcacaggcagtgtgccccgggcgattgccgcgttcacgaagctgcggtccctggttcttgacaccaacagcttcgacgggacgtatccgggctcggctatcgcaggcctcagcgagctcgagacgctaactctggcaaataaccccttcgtgccaggccccatccccgacgacttcgggaagctgacg

SEQ ID NO: 4745 - DNA, 641 bp, Zea mays
ttatcctacggccgcaaggagaagggggacgaggggacgtcgggtcggcatcgccatcgcttcgacaggatgggatggcacatgaccgagtacgacgacacccagggcggaggcggcgaccacgtgctgtgcaaggtgcaccgttcgtcctcgtctctggccaagaagaaatgcaataccaagaggacggcgacaggcgatcaccccgaggcgccgccaactaaggtgatccgcgacgtgcaggtgcagcagatgcaggaccctgccggcgccatcttcaccggtgctactgcttacccgacgatggatgatccccggatggtcggaggcgagttgggcaagtccaacgtcgactacttgctcaacatcaacaatgtcgatggggagcagcagcagcaacagccatgcgctgagccgagcagcgacgtgcaggtgcaggtggaccccgccgccaccttgatgccctgctatgttcatggtcatgaacaaggcggggatcccctgatggccggaggcgaggaggaacagagtcgacgcgttgagtcaccagaggcggagctcgactacttcgacgactggctcaacaatgtcgattggaaaggtttcctagagataatgggagacaatgaggagcaggggtt

SEQ ID NO: 4746 - DNA, 460 bp, Zea mays
ttgcacaatttcagctgcaaacaaaagattcagagcctttttgattgaggcctacaaggttccctatttccttgtgaaatctaggagtcagtgttttggttgaaattttgacactgcaacatacagacagatcggtcgaaaagcctcaacagcatctgtatctggcttcctttgggattaagagccatgttagatctgttgatcctctcgggcttgacggactgactcccaagctgccaaatagcaggatggaccgaatcccttctggccttgggcccctggtgcatgcgctgcgcctgttcactgaatgcagggctgatttcacttcatgttcagagaaacttgcagtgagagcttcagagcttgtgttggccgacgttgatcgtagaagagatcgtttcggtcaaagctccaggacgaactccctggctggtcgatgattgaagcgaagaactgtgtc

SEQ ID NO: 4747 - DNA, 536 bp, Zea mays
agaccccgcaggtccagcctccgccgccgcctacccaagggcgcttcgaaatcgttatcaacaacgacaacatccgaacgctcgacctatcgccagtcgaagcagcactcggcgacttgagctccttgacaccaggttcacagccagcatacgcccatgccattagctttaacttgcattcaccgaccttattacaggtaactttatgtgcattgttcagctgcttcaagaaccctgctggaccagaccgtcgggttcaccatcagctacgagagggaggacgagtacgacacgcgggagctgtcggagttccccgacatacggctgtggttcgtgaggctcgacgccgcgtacccttggttcccggtcgtgctcgactggagagccggcgagcttgccagatacgccgcgatgctcgtccctcaccaggtgattatttctcagaaaagcttatattatgcacatacaagtcttgtgcggttgtgcgccctttgaaaactatacatgcggtgtacgaaacggtttttgtggatggg

SEQ ID NO: 4748 - DNA, 519 bp, Zea mays
catttgttctgagctactagccacaagaaccgacatttagaaggagcccaagatctccatatcagttcatgttcatggtgaacaaaggcacaagaaccatagaagaggccattgtatgcagcttttgcagagtaaagaccatcaggcgcaatagaaaaaatatgcctatcctcaatatcaggctgctgcaccagatcagagagagcattcccgaggtgcagataatcaattagggctcccacagttagagcccctttaatatcaccaatccaccttctatttagccagtacttcttgcacaatattgtgttaacttcattagaaacatttattgaagttcatgcaatgttgtaagttctgtttcgttaccgtccgttccggatggaagtatgaaacaccttgtcgtcgcatgtgccagtacataagaggtcgcatccatactggcgacaatcctggccatttcagttctttccggccgttctaggcggaattgaagttccgtcgataccgctacgagtc

SEQ ID NO: 4749 - DNA, 490 bp, Zea mays
gaacgagctggccccgccgccgtaggccggcaagggaacctgcccgctctcgatctgctggacgtcgacctcgaggtgcttgaagtggctgacgacctcgcgcaccgtccggccggggatggcccgcgccacctcctcccagtccgggcggcagaggtcgagcccggcgagcgcccgctcgaactgcttgttctccgccgccgtccacagacgcgccgccgccgggaaccagttgctccgtgcggctatgtggtccaccggcggcagcacgtccatgtacgtctcccgcatcatctctgctctgccccggggcgttgttccacctctttcttccccccctgtaggaatcacgggactgaaagaaaggttagatttctttttgcctttctgggcatctcagtccgaacacgataaagattccgagagcactgtaacgattattattaaacgatttctctgtctcttgctctgaacaggaactcctatcgtc

SEQ ID NO: 4750 - DNA, 485 bp, Zea mays
ctctgccaaagaggactcatttcctgttttggaagccccccagaccagcaagcgcaccaagtcaaaagcatctgatatctgtgcccagaccgagaacaactctgttatagtatcggaggcagaggctttggaacagactttgaaagagaaagctcgtctattggaggaacaattggagttagctaggaaggcagaggagttggcacggaaggaggaggaattaagcaaagagagggctgccgctgagaaggagcggcttaggatggagcagaaggctaaggccaaggaggccgaggagaggaagaggcggaaagccgagaaggacaaggagaaagccgagttcaaagcgcgcaaggaagctgaggagagggagaaggtaacgatacgttctacgtgttctctgctttgaaattcgagttacattactataaatcatgcactcggcaacaggtctccaattctaattctgaccctgatcaaaacat

SEQ ID NO: 4751 - DNA, 543 bp, Zea mays
ccaagcttgcatgcctgcagcgagggctacgagggtcaccaccccacccgacccacagacagaaggaatgcaacgcgacccgcagcgtctcggcgacctttggagcttcagggcggcagatcgacgtgaccggcgacctcgacgagtgccttatgtttatgtacacagtgcggtggccacgcgacgaggacgaggcagcacgaacaaggacattcccagaccacaacattcctagagcattttgtacaccacctgcgaacagtcacgagcgacggtcccttccactagttccaccacaaccacaaggtctcatgcctcctagagctaactgcaccgcaccccgcgcacgccgacacggttcacctcggcacggtgtccgtcgtcatcgtcgccgccgccgagggaggcggcggtggggcgtgcgtctggtcgtcgtcagagacgctggcgaggccctggacgaggcgcacgatgtccgcggggtcgtccaggtagtacttggccttgctgggcttgcgccccacagtgcacgcgaacacctcc

SEQ ID NO: 4752 - DNA, 489 bp, Zea mays
ataagatatccattaggatatccattaggcttgttcgggtagctctcaatctatatagatatccattaggttgtttagttagctctcaatccatatagattgagtgagattgggtgagtttaaatctcaaacaagtcaaacttcttttaaattttttccaatctcgtccaatccatgtataatgggaataaccgaacaaagccttattgttactattttattgtacataacagtttattattattctgacggaacgtgcaacgttccggaaacccacaattatacagatgcatgcgattgccgtataaggaagctaaagaccaaagatatgtttgtcattaggtctgcacatagtcatcgtccctaccagcggctgagatgaaagagacggcgggctttggatcgctcttcaccactaaactcagcacctcaggtcgcgagtagtggcccaccacgtcaaaatcaaacttggctcgaacaatctctcca

SEQ ID NO: 4753 - DNA, 532 bp, Zea mays
atccttccttttattgtactgttagctggagttgctatctggtatgccaactgaaaattgtatcatcttttattgtataggatacagcttcagaaatctagatggtacacttaggtccctgttatttgttatgcaggtgttatctttctccttcaagtataatgaggaaccagccacatttgctcgtgattggaactggctttaattttggatatttggtggtaagtttcgttgctgttgttttttgttctcagattatttagctaattgtagctgctcaatgcaacagggtttttttatgtacaacaacactggcaagaacgaatccttttagttccaaacaagatacagtagggagtaggccagtatcaataataaacagagttttatatctaatcttaggtttgaaattttaatttgccgaagttccttttgatttaattttgtaaggctggtataattgaaaatagcagcttgagctagaaagcggaggctgcaagcctcctcacacattactgtagcaccagcagag

SEQ ID NO: 4754 - DNA, 571 bp, Zea mays
agcttgcatgcctgcagtgtccacttaatagattaatagggaggcgagtatgcaaaatcggcagaagttctggccacacgactggaactgtgatggcttatgcccttgaatacaatgacgagaaaggaataagcttcttcactgacctccttgtcgtcggtgagaaccgccaaacatttgatctagaaggtgatagtggaagcctcattatcctgactggccaggacaacgagaagccgcgtcccatcgggataatatggggtggcacagcaaaccgtgggaggctaaagcttaggtgtgaccatggccctcaaaattggaccagtggagttgatcttggccgccttctggatcgtcttgaacttgatcttatcataaccagcgaatcactcaaaggttcggcattttccttgctttcagttatatgtgttttactcgtttttgcatcccttttcagatactggaaaatccactgtgatgtacgcttctgttgctttttgttccacgacagataactgacataatttatcctcgataaagatgccgtgcagcagcaaaggcgcgcgttggt

SEQ ID NO: 4755 - DNA, 535 bp, Zea mays
atctcataccgcagggtgcaccgcgccccgaagactgccgcgcccatcttgccgccgccgaccttccgtcgccgctctgccatggcgccatcgaggcaggccgcaggcccggcagtggtccggcggcatgtccagcgtgcactgcgccagcgcgtacaccgcccggtccctgccccccgacgacgaccacggcgcttcgccgacggcccacctgcccggtcgccccgccgccgcgtcagcgagcgcgctcagcagctccgtgacccgctggtcgaaccgcgcggccacggcgagcggcacggggcctgggttcgtgacgtcgacccattccggcgcgttgctgaagtcggcgaggaagtccctgtcggagaaacggagctggtacagctcggagtagacggccacgtccctgtggagcgcgcaacgcgagcggccgtccccgtcggtgatggcggcaagggcgtcccggaggcgcctggcgcagtcagcacccgctgtgtccgcccggcagagcacggcgccgtagaccttgtcg

SEQ ID NO: 4756 - DNA, 544 bp, Zea mays
atacaatgagatggttggcatgcaaagtattgtgttgaaactgataaaacattatcttatatctcaaagttctcaattgtttacaagaaggtaaagccctgtataattttatggcagataactgcaactcccatagaaaatccaatgccggaggttcccacatgagtagggtctgggaagagaaaaaccaaggcaagccttcccccgcagatgaggggaggctacaaatctcatcaacagacaaaactcatccatcggcgttggtagcgcccagatgccacatctgggtctggcactggacgcagcatccaccatccatttgtcctatcctttgatccacagttcatttaatttagtccacaaggaataacatatctacttctaattaatccaagtgaaatgggactatcttcgtgcattcctttacctccacatctgcctacctcttgcaccatcgctatttctctcgtgcggaattccaaggctgggttaaaaaaaacacggaacacccctcacccctgtcggcctgttcttccactgacgc

SEQ ID NO: 4757 - DNA, 550 bp, Zea mays
cactccgactccgtgaagtggctgccgtcgtccaccagcatcatcgccgagcaatccttgaaggggcagtaggccctcttgccccccagcagcagggactcgcacagcgcggcaccccaacgctcgaagacatcgcggggcaagatgtcctggcagagctccgggtccagcacgccgccgcaccgctcctcggggcacctgacttcggcgatcctctcctggatcttggcgcccaagtagcccgcgaggcaccggccgcagaaggagtgcgcgcagccgcggctggcgcggtgcacgtccgagggcggcaccacgtccatgcagatcttgcaaaacacgaccgccgcggcaacggagacggacggcctggacgacgaggcgtaggcgcacttaccttggctgtgacccgacgttgctgcggctgcggctgcggctgcggcggcgttgttgatgctagaggcactggcatctgtgctgctgcgactgcgactgcgaggtggggcggccgaggagcgcgccgtggccgcgatggcggaggacatgatcacct

SEQ ID NO: 4758 - DNA, 494 bp, Zea mays
cctgatctcacaaacagatcaacacaggtaggttgtatgtggaccttggacaagaaacgacctaccttttttttcttccttcttcccggcccgttgcaagcttgctttcacatctcctccggtcctcctccatgtgtacaccaaacaaaccaagaagaaaaaaatgcatggttttgttcccgatttataccttggagcaacccttccattctcttgaaattttctttgtcgccccttgaactttcttcccatatgtccagtccagctacaaattaatggcgacgagcgatgaaacgcacggaacatatatgcctcagcaggcaaacgtcccagtcgtcgatctctggcacttaattaattgtttatattaattccaactcgttcgtgcaacggtgcaaacaaaacaagctgacgatgtcgagtcgctgtttccccttccaccttaattgcttttgcagccaaacctcctgctggacaaccagcagctccagcta

SEQ ID NO: 4759 - DNA, 475 bp, Zea mays
tgaggcaagagattaaaatttgcaaataatccatgtccttgaaattacaatttcagtgtaagtgtcctaggagtttcattttatgcataaaaccagcacatacttttcgccgtgaaaaataaagtcactcagtcccactaaatgactaaaaaactgactatagtattttcaacggatggttacaacagtataccctgtcggtcatgctgtttatgaattttatgttttgttttcaacttttgtctctacagccactatgcaaccccgcttcagaccccccccccctccccaaaggccaaggttatgaaggtgtgggcacataattcgtgaattggtacaagagaaaaaacaactgtggcctatcttctacgaacaacaacatatcgcacctcctgtggaggctacgatgaatgacacaaacccagttggcaaatctcgaaaaaactagatgtacctgatacacaaatcccactgc

SEQ ID NO: 4760 - DNA, 522 bp, Zea mays
ggaaccccggccccttataagcagtttttctcccgatcgatcgccggcgtcagcaggtggtggtggcccggcctggctctgggtctggggtcggtcgacacgggcacacagacacagtcatgcctctcttacgattctgggcgatcggatggccacctttatttgtcgctttcccagattccctagctagccctcagcccctcacaagcttgccactttttgttttccgtgggctccagctccagctccaggatcatgcttgccgcccatggccccttcttctctagggtgagtttggttgcgggacagtaaggggatagtcatgttctcaatccctgatcccaaccaaacaaacttatttaagaaatcgtcccgtcccatcccatcctatcattgcaaacaaacgcactctaaaagtccagtctagacgactagactcctctcttctagttccaacccctgcattatattgacagatgcataccgacctgggtctcccctctgcccctcgctgatttacta

SEQ ID NO: 4761 - DNA, 584 bp, Zea mays
tcgatgtcatcattgtcttcgttatctgaactctcaatgtcttcgttatctgcattttcagtagtgtcttcattgtctgcattgttttccttatggcagggcacattcatgttctgctgtgacgagattattcctgcaatggctttcatggctgcggcagtcctgtcgctgcttactccgtcctctttggtaatcccaataggttgttcagcactttcagatgcaccgccgtcgctttgctgcggagggggtacaaagaaggggattttacccctctgccagtcatgaagtatcatcttggctgctgttgtcagatcaggctccccgccctgagaaccaaaagtgtaattattatattaagggaaagaataccattaccatgtgaatgaacaacaaaatcaactgtgcctttctaacacaggagtaatagaattttgtaaaaatctggttaaatatccatttttctacagggagaaatacttgtaaaaacatagcaagatataatcatatattaagaacaaatgcagtaccttgagaagttttccagtggtcctgcacagctggacaagaaaatcgttatcatc

SEQ ID NO: 4762 - DNA, 506 bp, Zea mays
ttgcatgcctgcagacaccacagttaaatatagaacatatattggcaaatcaagaaatggaccccaagttagccttcaaaatttatcttaaaaattccatcacttctactaggtttgatgaatcatagtaccactatcgatgtggttatacccatgatacaactatgtagcataatgttatcacatttcataatcctctacacggcaatgaagcacatattcggtgtactatactattcgtacttaccaaggctaattttactttgatagcatgggtttgcacggaatgtgaattggtctatcacagattcagaagtcacagaaggagatccagctgtaactttggaactgaaagatgacacttatagccgttctatgtgggatttcagcttccatgcactgtacaaggttaacctctgccagtgtactatgtgctttgatggtttctgtccatacattcatgatcttattcatattattgaccacagaagaggtatccttgtgct

SEQ ID NO: 4763 - DNA, 577 bp, Zea mays
tctggaacaactcgctcaccggacggctgccggagtcgctcggcgcgagcggtcggctcgtccgggtggacgtgtcgaccaactccctgtccggcccgattccttccgggatgtgcatcggcaaccgtctcgcccgcctcatcctcttcgacaaccagttcgactggaccatcccagcgagcctggccaactgctcgtcgctctgccgagtccggctggaatctaaccgcctgtctggcgagatcccggtcgggttcggcgcgatccgtaatctgacatacctggacctgagctccaactcactcaccggcggcattcctgctgatctcgtggcttctccgagcctcgagtacatcaacatctccggcaaccccgtcggcggcgcgctcccgaacgtgtcgtggcaggcgccgaacctgcaagtgttcgcagcgagcaagtgcgccctgggcggcgaggtcccggcgttccgcgccgcggggtgttcgaacctgtaccggctggagctggcagggaaccatctcactggtgccatccctagtgacatcagcacctgcaagcggctggtgagcttaag

SEQ ID NO: 4764 - DNA, 527 bp, Zea mays
tacacggctatttctacatgccacatgtgcatatatatagtaagcatatatgaaggatcacgtctcaattctcatatgtcatctatgtacataatatacatactattaatatgttttttaaacaaacttaacctgcggctagctagctagaacctcccacgcaagttgataaaatctttcttagacctcaccatccatatatatagctagcatgcagatgcaacatcactcctcaattcacataagtcatcaaccttctcatcaggtagactgagaaaacccttcttaaacatcgacaaaaccatactttttagagacctgtgcttcggcggagtcgaacttagaacataagaaataagaaatgctattcggaccatctaactaactcagcacatgtatattattaataagtctaaccttcgtgtggcacaaagaagccaagcagcacagtgagtcagttgggtataaacttgaagcgaggcttggaaaacgccggagccggatcgtagcgcccataatcatttgtc

SEQ ID NO: 4765 - DNA, 566 bp, Zea mays
tgcggtggttcaaccagctggacccgaggatcaaccggagccccttctcggaggaggaggaggagctgctcctcgcctcccaccgcgtccacggcaaccgctgggccgtcatcgccaggctgttcccggggcgcaccgacaacgccgtcaagaaccactggcatgtgatcatggcgcggcggtgcagggagcggatgcggctgtcgaacaggcgtgccggcggcgctgctgctgctggtgctggtgccggcgccgtcgtcgccaccggtgctgctgccgaagatggcagtaaccctaggagcgccaataagaagccgaggcctgacgcgagcggcatggcctccttgctagacaagtaccgaagagaattttccgccgccgtcccgtttgccattaaccatgatagcaatcagcagcagggctattgttcaaatactaacgaaggtgaatactgctactactacgtactgcatgtatgctagctactaccatatatacaagacacatttttcatcaactttactaattacatgccatttcgaatctgatctgcaggtcgactctag

SEQ ID NO: 4766 - DNA, 1082 bp, Zea mays
ggggaagctgtcgcggccggtgtgccggacgcgcctcaatgactgaagccgacgtgtctaagcctgggttagtggcctaagtatgccagatgtcatggagtctgtaatcagggcaccacctgtgggcccagtcgtcaatgcctatgtgcagagtatgtaataagcgagacttgggaacttgagagacaagaaagaaaaagaaacagaaacttgccgccggaacctttcctggcgagcacccacctctccctcgttcgtttgagtacgcacctcacgccatcggagatcctcggtggccacggggcacaacacgcatgcacggcagacggcgagcacacaactggcgaagggcagcgcctgcaacattctcaatgaaatgcccaaaagaacacagttcgctttgatttacgtagacgcaattttactgacctggctgttgcgaacttactacataaacgttcaatgtcttgccccaggcttctctggcaatcgtgtctggaagagaaggtagttgcatcgctgcagtccacggggtcgccgctcatgctcaacgtgtacccttactacgactacatgcgctccaacggcgtcatcccgctggactacgcgctgttccggccgctgccgcccaacaaggaggccgtggacgccaacaccctgctgcactacaccaacgtgttcgacgcggtggtggacgccgcctacttcgccatggcgtacctgaacgtcaccaacgtgccggtgatggtgacggagaccgggtggccgcacaagggcgactcctcctccgagcccgacgccacctctgacaacgccgacacgtacaacagcaacctcatccgccacgtgatgaacagcaccggcacgccgaagcaccccggggtggccgtgccgacctacgtctacgagctgtacgacgaggacacccgcccgggctccacgtcggagaagtactggggcctgttcgacatgaacggcgtccctgcctacaccctgcacctgacgggctccggcgtcctgctggccaacgacacgacgaaccagacctactgcgtggcgcgggagggcgcggaccccaagat

SEQ ID NO: 4767 - DNA, 477 bp, Zea mays
acaagaaaacacaaattaacaggacaactgctagcttgaaaaagaaaataactttgttctgatacggtactcttctcaaattatccttagaaaggataaaccttgggtgagctaaacaactaaaaaggagtcattccttcaacatttattcaagcaaaggtagtaaaaccgcgcaagatcaagcaagtccccatgttcccgcctccatccgtagtcaatccacataaagtgtcaaaatttctaacctcccactcccaattcctagctctccagacccctgagatagaatagccgctgaaaagaagtaccgcacattgaccgcaagaaaccgcgggcctccgcaccaccgtaccttcggcaaagttgacagaatgggactcgtcctcgccggagacctcccctgaacagatcttgagcaggtactgctcgaggcttttggcaacgtccacctcccaatttgactcggggtccctattc

SEQ ID NO: 4768 - DNA, 474 bp, Zea mays
atgtcggtggagtttcaggtgccttccccactggtgccgaccagggaaagctacttcgtgaggtactgcaagcagaacgccgacggaacatgggccgtcgtcgacgtctcgctggacggcctgcgccccggcgcagtcctcaagtgccggcgccggccgtcgggatgcctgatccaggaaatgcccaatggctactcgaaggtgacctgggtggagcacgtcgaggtggacgacaggtcggtgcacagcatctacaagctgctggtgagctcggggctggccttcggtgcacgccgatgggttgggacgctggaccgccagtgcgagcgccttgccagtgtcatggccagcaacatcccgaccagcgacatcggtggtgagatttctgagacctgcactgcacaccatatatatatacatgatccaaaactagttcagatccttgacggccgggggaacgaatcgtttgcttgc

SEQ ID NO: 4769 - DNA, 1094 bp, Zea mays
gaaataaaagttctgattcacaaagcatgttccatgacaccaatattcagaaacaggtggctttttcgcagtaaataccttgaagctgtccattgacaaagacatgcaaggcatgaccagcagactgcacactgagagacagaggcttgccgccaccttgtagaaagttttcagatgagcttatgtcaacactgtagacatgaataagagattttgagaaacaaaaatgttctcatccatgttgagaagtagagcaagaccaaaggaaaaaaaaacaggcttccacaatcaagattcaggaaatccaaacaaacccttggaaagaaaaaacaacctcatctgagattattacatttatacaaattggtaagataactgcaagaaatggatacaacattacctggtgatgtaccacaaataatcattgttgtctctcgtgacattaagctgctcaagcaaactagtcgtggtgagcaatggagcagctgccagaaaatcaacctcctcatcatacctcttccacgtcattgatgaggcatcatctccccacatttgcatctgagatgtctgaacaccaacctgcagtccgagcaggggatccttgctgccgcaccagggaaaaggaggaaggggcgagcagcagcaggggagggaagccggctgggaggaagatgaacagcgaggcgctggaaaaaatttctgggcgccatccatagaagctgctgctgcctgcgctgaaccggatcgaaggggagctcgacgtgtgctgcgggagatggccggctagagcagagggaacagggagctcggccatggagaggctgctggaatttctgggcgcctgcccttccctgcgcgatggcgaggccgagttgggagagggaagccgctgctccatgctattggggaagaagggcgtcgctgtcctctgttggccgtcgagcaaggagcagggagctcgcgccaagaggagaacagggagggcgctcggctgcttgccatggacagcagagagagggaggaagagatgggcgccatgggagcagcttcaacgcgccgaggaagaggggcgtcctgctgcaggcatgcaagct

SEQ ID NO: 4770 - DNA, 534 bp, Zea mays
ctttgtgccagcttgtatagaagctttacttaatgatgggatgaatgcaggcaaaaccagggaggccgttgctgatcatcagtattctgagtatgacaatggattgaaagataaggatcagaaaatattatttgaagatgacattgatttatcattgttcaactgcaagttcgattcccacataacagatagtcctatcattgatgctgtttatactgcactcaaagaagcagagcttcgttctacagatctttggccatactggaaggttgattgcttgtgcaagataattccaagacagctactagcagagaaggcagtgatgcttataaggaacactgttgacaagctgattatgaagcataaagaaatacaagttgaaactgaacagattgtgggcgaggattatgtaaatgaaggggattctagcattctacgcttcctacttgcaaatgtgtcaccaaaaatagaagagccaaaaattcagtacaccctgaaggccattgcaggaagcgtaactgcaggcatgcaaga

SEQ ID NO: 4771 - DNA, 549 bp, Zea mays
gaacctcaagcagagagccaatggcttccatattcttgtcctcgagaagggaacaaggaatgaccgtgagcatcacgccacggcaagtattggaagaagagcagcacagacaagaggaaggaggacaagcctgaggtggactttctcttcccccagcaaagtacagcaataaattcatcgcatggacataagattgcgcctttgggtggccctcctggaggcctgggcagccctcgatgttcgcttcaggtttttcctcaccaacttctctaccttctctattgaaccggaaagtttcttgtcagcaagggcaggatccattggtttggatggagtattcaatgagccttctgctgccaaagaagacacattcaaattgtcatcagccaaaacagtagcagggtttgctacagcttctctttcagttgagccggagccagatgcaacagcatgggaggcttcagcaatgtgagcatcctgctctgcttgtgctggagtagtcacgttcacagattgtgaagactgctcgatcctttggcttcgctgctg

SEQ ID NO: 4772 - DNA, 505 bp, Zea mays
aaatatttggcagcgcatctgacatctgccccctccattccccgcttagatatgcagaacactcataccttgtcacctaaagcggggttatactcaaagtaccattgaaattcttttgtgtgttctgttacttgtggaatatgcagcttataaaggaattggcacagcctgatgtaagacatgaaatatctcggctagtaaagcccatgactcaggtctgtaaacattcctcgcactacctataacagcattatttgaatcccacattcaaaggcgcatgcttccattccatgaattgttctcccatggagatggcagcaaactgaccaaaccgaatggtatgctgtttgcaggccttggatgccgccttcaaccatgatttggaacagcagcagaaatcgtccaaggccggaaacaggcacaacgggttttgagcctaggagattggtttgaccaacacatgaagcgagacggacggacgggctgtgcccgaatacacaagagc

SEQ ID NO: 4773 - DNA, 998 bp, Zea mays
cgcttcgtgagggtatctccgtcaactgtcgtctgcccggagtgtgatggcggcttcctagagcagtttacgcagccgccgccccgcggcggcggtgggagcggccggcgcgggacgatgaacccggtcatcgtgctccgcggcggatcgctttcagggttcgagctctactacgacgacggcgcgggcgaagggctgcggccgctgcccggtgacgtccagcacctcctcatggggtccggtttccaccgcctgctcgaccagttctcgcggttggaggccgcggctccgcgtccaccggcgtcgaaggctgcggtggagtccatgccatcggtgacggtggccggaggtggtgctcactgtgccgtgtgccaggaggcctttgagcctggcgccgccggacgggagatgccgtgcaagcacgtttaccaccaggactgcatccttccctggctctcgctccgcaactcctgccccgtctgccgccaagagcttccggctgcagaactgcatatcaaaccatatagcatgagcactaaagtaatttccttatacaagtccaactgaattacagcatccaactgaattccaattctcattctatcaaaactaagcatgaggtctccagctagtcggagaccacgtttctgatcagaagcaggctacagttgcacccttaaacttcctgaccattaccgaactcacaggaaactactagaatgcctcgatgcattattcccatacattattacatctgcaacaagtgcctgccctttacagccttttcccatagcactaaaagctccgcggtcagcaagcgttcatgcacggaaagttgttcaatgaccccgtcagaaatcgcggatgggagacagaggcacgaggatgagtggcaccggcggtcaccgccgaggcgccgagggtctgctcaggcccaggataacttgcggcactcatcccaacggttgttccgagttaagactgcgaaatgcgaataa

SEQ ID NO: 4774 - DNA, 570 bp, Zea mays
aacagcagccacgtacgaatacgatcagcttgcttccatggagctagctgttatgacaaagcaaatcaagcaaatgctgttattgtgtgaagccacaacccaggcccagcccatctcacctgttcttgatgtcagcttccctgcggccaaggcgcggcgtgtcgacggtgagcgcgatggccttgaacccagccctttcagctcgcctcaccagctgctccaccaccttcctgtccttgtagacctatatacaaaaaaacattcatggcaacgacgtgcgtgcacgcatgcacggccattgacaagctaataataagctggtgaaggaagagctagctagatatatactcatgctgtgtagcagcaggagtggtagtgaaggtgccagtgcatttacgtatagctggaagaagcggatccctggcccggtcgaggcaacctcctcgacgcttgaagttgcccaggacgacagtgtctgaaaaaaaaaagaacaggccatcaaggttaagttcagcattatgcatggtacacttgttgtttttaaccactgggaggagctgggagggacat

SEQ ID NO: 4775 - DNA, 550 bp, Zea mays
tgcatgcctgcagcctgaagcacagactcaggtgcatcccagggatggtgtatccattccgttggcagccttgccagctccggtagccatcgccggacgtactccccgtgcggatcaaacttgtacccttcaaactgcaaaagttcagttcatacaattcatcaaggtgctgtctttgttacccgtgaaaagattgaacagaggaaaggcctagaaagtacctgagggttgtcgatgcggtcaagctcacggccatcagggagagacccagaaatgtactgccagcctagtgcgtcgctctcaaggtcagcatccagcaaggtgtcccagaagtacttcatcccccagcgccatggcagctggagcaccttgacgaagaagctcgagacaacgacacgtatgcggtcatggacccagccggtggcccagagctccctcatgccggcgtcgacgagagggtagccggtcctcccttgcctccagaccttgaagtacacctcattgacgacccaggggaagaacctgaggtgcgacaggaggggcttctcgt

SEQ ID NO: 4776 - DNA, 552 bp, Zea mays
cgccgctcacgccgccgccgtcgtcctactacaccgccaggcagcagcgccggcagacctcctcctcttcctcctccgccacggtcgccaccggcaagaacaagaagctgtccaagcattattacaccagcgtcttcagcgccatcctgcccaagatgatcctgcacaggcggtcgtccaggccggcctcgtcgcgctccgcgtcctcccgctcctcctcctcctcctcgtggtctgcggcgctcgcctcctcggccgcgtcgtcgctgtcgttccgcagcgcgcggtcgcccgccgcgtgcagctcgtcgtcgaggcggagccgggtgttcgcgttctcggccgcggacgtggacggcagcgaggaggaggaggaggagcaggcggcggcgccgatgtgcttcagcgtgcgccacgagagcttccgggcgctccggggctgccgcgtcgccatgacggtgaagagcgccctggcgtccgtcggcggccacggccacgctgctgggcccaccgctgcacagaaggtgtagtgctcaagtgctctcgatctat

SEQ ID NO: 4777 - DNA, 502 bp, Zea mays
ctgcctttgataacaatgttagggaagtcaagtagatggacctccaagggatccaacatgcccttccttgtcacaataatttgctttggctgctcttctacaggaagagatcgaactaatgcagcaacctcctcagctgttttccacttggccagctgcccaagacgtttttgccctgcccatacacttgtgtggataacctgcacattatgatacatgctcagtttaaacctacctatgttcaaggttttacagaaaaaacaaaatcacatgaaaactggagcagaaattcgaaaagaacaaaccttaaggaaaagttgacccgttcttggattgaaaatgaaaatagcaccattaattggtttggtggtcaagttaccctcaaatgttttgtgaatagtgactcgatacacatttgtatcatccacaaaccatatgatttgattgctgaatatctctccatagttttgtgaagacaggtacggttctgtgggttcagaag

SEQ ID NO: 4778 - DNA, 565 bp, Zea mays
tttgcatgcctgcagcagcgtgactgaacaatgtggttctttcactttatctggccttggaagacggtgaaaagaaaccgagatctggcatggaaactgcttcctttaataatagaggttttgcgtcttccgagcaccctgcaccggcggtcatgctggttcaggcgtgcagctcgcctggctatcattggaatctgttgtcccgctgctagtccgatgtgaattactgtatgttagtctttcatttgcgttcatgaactcatctagccatgtcatgacttacaactgatcagggtgttttaaattttccgctgcttgccctggatgttctaaagcaaatgttttttcaagagcttttggagagctgtttcttctgtgtggcactgatttgtgcataaaaaggatgcagctatttcgtcatacgattgaactgttagtggtgatagcttgatttgttgaagctgggtgctgagtcccacaggccatagcaatcccaggcgcttctggatttatttatttatttatttattacttggtagcgtggttagaaatcagatttctagca

SEQ ID NO: 4779 - DNA, 1056 bp, Zea mays
tacgccaccttcgtctgatgaagaaaccttcgttcgcatcaagtaaccacattgctcattgatcaccactttatctttgttactgatcagaaattcagtggcgtagcattcttgatcagaaaaaaccaccatcatatgcaaatcactattgactattgtgttcgtttacgaaatagattatcataccgcagataagctccatatattccaagctcagaaattgcaagaccctcgtggcaaacaccaccacgaacgagataagcaggagaagcttttgggaagattctttgcatcagtatgtaggctgcaagcgcatcccctccttccttctgtagtctgacaagcgtttccctcaaatcaagaccgtagatgttgttccctgtgcacaaatagcatattcaagaaacagtaagaaatgatatgcatgtcaatggaaatacgaacctccgccttcacgttgaggcttcaatacaaacaactcaggtttttccactgcagctcgcggctcctggttgttccctcgtctcgccgtcgacgtcctcctcgtcgtcgtcgctgctgctgatgtcgattgaggagggatcggagaggggggcgccaaatgggtacctttctgacgggcctcatggcagagctgtgcaggagaggaaaaaaggtatgtgaagacgcgagcagttaatttttcctgtttttttctctctctctctcttctggatgagcacatgcatgatgcatagtttaggtactagtacctgtttttcattttctctgatgatgaaaagagaaaagaagaagatttgtcctttggaaatccaaaatcttttctttagcccaaattgttttcttattggttggtggtagtattgtgcatcagtctgactctgacctaaagagttgcattatgctttactttcttggtaaaaataaagtcgctttatcttccctgcctgatagtgcaatcttgcaactgtaaatcaagccactgagagatatagtcggttgaataatcggttggttggtaacatagcagctggtgtgtttctaagcataagcaat

SEQ ID NO: 4780 - DNA, 494 bp, Zea mays
aggcacggcgccgggatgatgcagtgcgtcgtcgacctgctcacggacgcggagagccggcggtacgacgcggcggcgatgctgcgcttgacaagatactgcatctgaggtaaagtaaggaacagaaaaaccatgtgtcggtccatggtcctagctttggctgtggatgctgaagacgaagcgcacatggttggtcattcatcgtgaatgttaataaaagaaatcgatcacatgcagtacttgtatctagagttcttcctattctatctagcatgatatatatactcctcaacatccccagcaagcaccacaacgatcgtagtcagcactcagcactggcgcgctagctagcttagctcctgctgccacacccagtggctggatttccctagtgctacccgcatcgccgtcacagtatgcgtatgcgctccacttcctcctcctcctcctcctcctcctcaccgtctagttcccccatcgccacattcagaaga

SEQ ID NO: 4781 - DNA, 507 bp, Zea mays
atacaaatacaatacaatgcagttggtattttcgtaatttatctgtggccactactgttgctgctatgccgtgttgtttcattgtttgtggtgtagtggcgtacgtaccgtcgccgtggactgctgcacccggcggagccggcgtcaccggaggcgcgacaagcttcactaccgggctgctgtcatagaaaaggaacacctcgaacctcaggttgcaccacaccgcgttgaactggccgccggtggagccgttgaacacgtccggaatctcgtccctgagcctgccgaggcacgccaggcacgcctcgggcgcctggttgggcgtgcactgcaccagcccgtagatgtcgtgcaccagagagtggtccgtcgtcgtgaacccttgggcggaggtgaccaccccggcggcgtatctcgccgtcgagttccacgccgcccaggcggacagcgcgcccacgaggtcggccgcgagccccgcgaaccgtccgggatcggcggtgacgttca

SEQ ID NO: 4782 - DNA, 557 bp, Zea mays
agctacaagacagtaaaaaaaaaaccatcaaaagggtaggatggcgtgtttaccatactgtggcctgctaatgctgggaacgatccacctgtggcatcattttcatggttgggatgttttgagcctctagcagggcttaacgctgaccaagaggatgtcttaaaatcaaaaacctgccaaacgtgtccaagtttgttcaattataggtaaaaggaaattgcgagggacgatatttagtgggcctggcaaacctggacgtccgatagagaacggccgttgcgactccctccgacaacgtacagcttgtcttgaaccacttgggcagcatgctgttacatatgtgagagcggttaaccagagggttggatcatcgcacagcaaacgaaggccagcacatctaactgattccgtcatttcacatggatggaaatcactgcttgatgggccaatgtccctcgaccctcatgagctaaagctaaaactagccgctagacatataaaaaggggtcggccaccaagaggcagaactagggcgcggttcgtgctggctgcattct

SEQ ID NO: 4783 - DNA, 1005 bp, Zea mays
aagacctatgtgtcgcagtcaagagcctagaccgtgaacacacggattgccccagcaactacaaaaggtaatacggcaatggctgaatatattgccaatatgaaatcttttccatatgagatggcatctgcgaagtagattgttgatgatgaagaacttatctcgtacattctggcaggacttgatgaagagtataactcggtggtctctgttgtggtggcccctgttgagtaggtcaccgtagctaaagccacctcctagattctcagctttgacgccaagatggatctacttcatggagatcatcaagcctttactaatgttgttgtgctaatgctactggtcaagggattggaacaaccatcatggacacggccatggtcgaggcagagggcattggtggtcctcctggtggccgtggtggcaaccaaggtccatcatcatctttgatggacgtccacaagcttggcgcactgacaagacctgtcaagtctgcagcagcagcgcccgctgccttcctgtcgagaatcgagatcccagccccgacaaccgctcccatgatgatgatcccatccgttgcctctgacgtcagcggcggtacacgtcgtcgaacaccgccggcggccaaccacgacttggctgcgaccgaaacttctggaggcgcgagacacctcaccgggtcacccacgcgggccccgcccccacgacacgcggcgcacgggtcaacggtcggcgaggctgacccggctccgaccacaacaaccacagctagcaccacgctacggcgagtcgaaagccgagatgatcggagtgtacatgcatatgtgtcgtacgtagtcgtaccttgtggtcggaggagagcgggacgggcggcgtcccggcgggcccgcggcagagcacggcgcgggagtcgccgcagttggcgacgacgaggcggccgcggacgaggagggccaccacggcggtggagccgacgatgccggaggaggtgccggcgagcgggca

SEQ ID NO: 4784 - DNA, 557 bp, Zea mays
actgcacaaagccgccttcgtcttccactcgttcttgtttacacacacagcacagcacagcacagcagcctcccgggaaagagaaggcagttccctcactgtctctcaggtatacctccgattcttattctaatgcgaatgcatacacgcagctcgcgcgcatcgctacttttgttctgttttagttaatgttggcaatcgatgcggtcggggtgaggaatctgtggggaccaaagcgagtagagagagagagagagagagaggcggaaggaatggattcgttctcgtagagctagctgctcccgatctttagaattccgcgcgtcctccgagcgctccaagaacacgtacgccgtcgctggcttctcctatcggtacgccctcctactgttttatgctccgttcctcgtcgcctttgcttccttcgcacttcacaaccacgtctgcctgttcccgctgactcggcctccgttctactccttttttttctgtgcatttttctcgtcgccgttcgatcttccttgtggcaactggcgaaggggaactgtccacggttc

SEQ ID NO: 4785 - DNA, 541 bp, Zea mays
atcacaagggttatcgttgcttaaatcttaacacaaacaaaattatcatttctcgccatgttaattttgacgaggatactttcccatttcgcacacagcagccacttctgaccacacccacaacagatcccaacaactctccctcagttctcgttccagggcctcccgtggtgctacttccctccaattcagcttcaacgtcacataccacttcatgtccaccgctgcaacctgattccactagggcccctatttccacgccacgtacttctccacatgcctctaccagcacgctcccgtcagctccagtcttccgttacgcatcaccggacatcactcgtcatcacatgcagacccgaggcaaatctggaatttttaagcctaaagtcttcacgaatcttctgtccacaatctcttccattccaaaaacatatcgttctgccttaactgatccccattggcgccaggccatgcacgaagaatataatgctctgatgtctaacaatacttggtgcttagttcctaaacctgcaggcatgca

SEQ ID NO: 4786 - DNA, 556 bp, Zea mays
agcttgcatgcctgcagattagtagatgaactggattagttctctagataaaactgtctgcaaacagacatttctgttttgaaggctgggggcagtatcagtttatcagatagcagtttcagatgagttgaagaactacaaggcattcatctataagcaagcataggtgttttactgacataaaagaaaatgctacatgcgatgaaataggatagaaacatacccatgccactaaattttgctccccttgggtcttagtattgtcaattgctttacgccccgtgataagttcaaggaacacaacaccaaagctatacacatcggatttaaccgtcagctgcccagtcattgcatattctggggcacagtagccatatgtacccatcacacgtgttgaaacatgggtcttgtcaccaaccggaccaagttttgcaaggccaaagtctgatagcttcggatgaaatccttctccaagaagaatgtttgatgacttaaaatcccggtaaataacaggaggactcgtcttgtcatgaaggtactctaagcccttagctgc

SEQ ID NO: 4787 - DNA, 494 bp, Zea mays
cccaccgtcaatcagcgtccctccccctaacaccgcaatcagcacacctttcctgatgcagacagtttccaatcgaagtctcttttccatctttcctgagacagttctggttgattttccatttctcttttttttccagtctgaaacgaaccgaactaatgctgcaacgtaccttacctttagaattggtgtcaagtagagtaaaactatataggataccaaaactatctttcattgtgcatttttctcaagcagagtaaatatcagcattttctacttgttagcagtgggtaggggatgcacatgtttgcgtgtaggactgtgaataacaccgatgtttcacatatccctaataaccatcacccttatgcagtttgattctgatgcaattagttcatggatggatatgtttttgcgctgtccatctctagaatgagttaaaacatatttcttgctcatgggagtactgcaactgtaggccattatctggatat

SEQ ID NO: 4788 - DNA, 545 bp, Zea mays
gagtcgacctgcagcctcagcaggacgccgaggaggtcgtcctcccgccgcccaggcacgcgcgcgccgtctcgctcacggatgatgctcccgatgatgccgtacacgttcttctggcaccttcccatgtctctggcggaagcgctgaaccagcgcacgaggcgcgacgacgggtacaggtcagcgaggctgaacccgccggtgagccgcaccgcctcgtcgagctcgcgcaggaactcgtcgcggtgcttgcaccggtcgccgatggcggtccgcacgacgacgtcgttcaccatgcggcagatggcctcgctgaggttgacgacggcggcggcgtgcctgccgccaccgccacactggtccgagatggagcgcaggaggcgcgccacctcctcctcccggacgctccggaacgagagcacgcgccgcgggttgaagagctccagcatgcacaccttgcggagctcgcgccagcggtcgttgtagggggagaagagcacgcccctcccgccacagctgatgatgtccaggctggcgctcaggta

SEQ ID NO: 4789 - DNA, 543 bp, Zea mays
aagggcgttcaatcaagggcttatcaatcgtattacaagcaacaagggaactccactccgacctggtgtgcctccagctgatgtatatctttttagccttctcgatgaagaggggaagagcatactaccaggaaactttgagcggcactggggaatcttctccttcgatggacaagccaaataccccctgaatcttgggctgggaaattcagtactgaagaatgccaaagaggttccgtaccttccatcacgttggtgtgtcgcaaaccctgctcgggatcttgacagtgtttcagatcacatgaagcttgcgtgtagcatggcggattgtacgactctgtactacggaggttcatgctatggcatcggggagaaaggcaatgtttcatatgctttcaacagctactatcagcagcagaagcaggacccaaagagttgtgattttggtgggcttgggatgataacttaccttgacccatctatgggcgaatgccgctttcttgttggtgttgatgacagcaagagctctgcaggcatgcaagc

SEQ ID NO: 4790 - DNA, 425 bp, Zea mays
gcctggaacccttcggagctcttgccgacggccaaccccgactcgtagaggaagtcgagcctctcctgcgccctgtaccagccatcgcgcgattagcacatcagacgaagccagatatggcccgaaccccactgactcgaaaggaaaccctagccggacccggaccaacggaccgaccaacctgtcagatccaaccgagagaaggaaaaatccaagggggaaggatgggaaagaacacttacggcctgaggccggcgcgctcctgcatggcccggaactcggccttctccctctcggccgcgacctgcttcttgagctcctccgtcttgcggcgctccgcctcctccgcctgctccgccttccatacccgctcgatgttgcggagggaccccgtgtgccatcccttcttgttcaggaacttgagc

SEQ ID NO: 4791 - DNA, 543 bp, Zea mays
gcttgcatgcctgcagaaaataatgctgctctggggcgagcaggacaagaccggttcagaatgtccgacgaggtcaaaaaggcaaaaacacatgcggggccgaagctaaggttgtaccaagctgatgcaaatacaccccttctaaaatggaaattctatagatgcatttaaaatttcaccatatatatgtatctctagaaagaaaaaattagtaggcatctactagaccaattgcaccctcctagattttggtctatcttcgccactgcggccattgccatgtgagggctgctcgagtgtgtccacgctgacgcagcacagagtacagtcagacgcagcgcggtctgacggtacgtccggcctgggtccagcaggtgcatgcgcggttccagtccgtgccgtgacggtttcccttttccctgcaaaagtctccacagtgcgcgcgtgagtgggcagcacaccacgacgagacgcaaaccggaggtcacgtctccacccatcgggggcacccagggcccgtgtacgagcgtggactgtagcgct

SEQ ID NO: 4792 - DNA, 552 bp, Zea mays
agtcggtgtaggttttgctgcacaagtcaatcagctacgaacgtggagagcagaaaaaccattgaataaaaaaatcgagatttgacatcaatgatttcttttacatttttattttgcaacaccgcgagaggccaggccagccagggtgcagcaaagtgggcagtctgggctatagctagcggtgccttaattgtattgtatcaccatctttcagcaaggtcgtaattgactttaatcagagatgattcagttcagagcaattttttagctagctaactgttagttccagtgcattcaagcatgccctaaactaggtggatttgtatttgaaatctggcaaggacggcgcgcgcatacgctgtaagatagacagcaggatggatcagtgaggaaaaaccacgcccagtttctgttctgtgagcgcatggtccgccggtaccttggagcgctcgagtcgcaaatgataagctgaaccagaatatcccgtgcgggaagcccactgagaaaggcgcccgcttttggcacccagtttccgtctctccgtgcggggca

SEQ ID NO: 4793 - DNA, 585 bp, Zea mays
agcgactgccccaggaccaaagtgtcggttgggttgtcaaaggactgccacgcagacgagttcttccggtcgaagagcacaaggtttcctaggtcatccagcttcatgcctgcaactgcaactgacatgccgctggtacctgtgctccagattactgtgccgccaccagcttcatgcaggagcaggtctccttctctggtgaaattcaggacggcgctgctgctcacaggactgtcgaggttggcggaccagatgactggagccttgggtcccagaaacaccacagagagaacaaacgaatgcccatccgtggtgtagaagccgaacaaggtcctgtacaggtttgcgctgttttcaaggacaggtcgcatgctagcgaccgctccgtccataggtatggcttctagattggtaagttcccacgagttcgggggagctgtagtggagagctggccgacgacagtagtgaggagaaaagggaagccaatcactagaaggaaggccacccacatgtttgaagtattgcatgcccatggtttcatttcatacctatggtttcaagaaaaccgcctgcaggcatgcaag

SEQ ID NO: 4794 - DNA, 509 bp, Zea mays
aagcgcgttctccatctgctcgcggtggtacggctgcccgcactgcggcaccgcgcatctccactcctggccctggagtgccgagtcgcggcagagatccaggtcccggcaatcgttgcaatagctgccagtgtagttgtttcataaggtttggtaacatcaagattcaagagaaaaaataatgaaaatagctcttgaatctgtccgttatggttctaagattggaacaatttccagctaaagcttacatttacaaattaagcagtaaggtgagaactggcaagaggagcaagaaacactatttggttctgattctctgattaacattctcctgtttgttgctttttatgaatatatatatatatatatatatatatatatatatatatatattccagctcatgtgctttgatgcaagcacaaagataaatagctaaaatactatcacaaacgatcatgcaaggatgcaacaaactttccacaaacaaatctggttcatagataaaata

SEQ ID NO: 4795 - DNA, 515 bp, Zea mays
gatagatagatggatgacggacagtgcagtgctacggtacactacccggatcagcaacactacctgtcctagggtcagaaagagagagcactgttccaggcactgcaatagaatagtgttcaggacatctcagaatcaaatcttatgaaacttactatgccaaaaccacaatcgttccaggcactgcaatagaatttgctcatcaaaatccgatacagcatttacataaaacagattggcagaacagattggcagaagattaaatgaacgaatagtaaccattccgctaacaacatttcgaaggttaacaatgttgtgcaactccgtaggctaatccattctcatccataaacaatacctgcatatggtttaccctttgcatgttcctgcacattcctagttaacaagactcacgggcatgaagaagaatcaatcttgaatcaagcccagtggaacttacaacctgctaaatctacatgaaatgaacagtgaacctgcaaaaaaaactttgcgta

SEQ ID NO: 4796 - DNA, 555 bp, Zea mays
agtatcctcggcagctgctgcactccggtttgccgtggtggccgcagcagccgtgcccgtgatggcacggcctcggatccacgtcatggcagcacgggtgcgctctgcactggcggtagcgccgggatggcaagccacggggaggagccgcggctggacggggcttcgccgcacgagctacgctgccacggtgaccttcggcagaagaagtgacgtggcgagcactggcagggaggcccgaggccggccccgccaccgcgtgggacacgtaggcttcttgcctgggaagacgaggagggcgcgcgcgtggcgcgttgagctcgggggacttgctgaaaagttcagagagatcgcctttcagctcatccaccgtcttcagaatcttcttccgcaggggccgcagatgttcctcttgaacctcgtggcgagaagggctcggcgccttttctccggcagtagcagcttcatcttcgcgtgcaagctgagcagccgcgggttgagccgatgatttcggtgcaagttcttggcgtcggtcatggtcgtaacgcggctgct

SEQ ID NO: 4797 - DNA, 577 bp, Zea mays
gcagccgcagtaccaccagcaccaggacggtcatcaacaacttgcgccgaaaccatcagctgctcaacctgcacggggacaagaagaagaagaagatgcaggggaaaaggcgccgagcccatctcgtcgcgctgagctccaagaacaacatctggggcccctgcggaagaagattctcaagacggtggatgagctcaaaggcgacctctcccaacttttcagcaagtcccctgagctcaacgcgccacgcgcgcgcccacctcgtcttcccaagcaagaaggctacgtgtcccgcgcggcggcggcggcggcctcggtcctccctgccagagcgcgtcacgccgccgctgctaccgacggttaccgtggcagcgcagctcgtgcgccgctgaagccccgtcaagccgctgctcctcatccacgtggcttgccgtcccggcgctaccgccagtgcagagcgcacccgtgctgccatgacgtggagcccaggtcgtgccgccacgggcatggctgctgccgccaccacggcaagccggagtgcagcagctgccgagggtactgctgcaggcatgcaagc

SEQ ID NO: 4798 - DNA, 494 bp, Zea mays
tctctcagaagcggctattgaattgcttaggcatagctgggaataccggatacttgtatatggatgggagaaaaataaagccattatcatttgcacgatcaatgtggtttatctagtaaaaaaatgagttgtgattgaaatagcttatgcaacatttctcatttaaataactagtaattgcacttcatatattgtacattatgagcatgtattcttgaaacatggctaactgtaaactcttatgatttgatttatcttgttgtcttcttacaccttgaagttttcatatttcatcttgacctgcaatgccaatattagcattactacaagaaagtaggtggcaccctttggttcatcattcagtttcagttgctccttaatgccattccttcctttcagtgatgggcaagtacatagaacctaaggacgaaagaacattgctatgtggtaccgaatccgttgcttgtaggctacggtagctgttttagaagcct

SEQ ID NO: 4799 - DNA, 605 bp, Zea mays
  unsure (1)..(605): unsure at all n locations
gcatgcctgcagagcaatctcagcaaacttctcttcacgggcagaagaagcttttatgaactttatgctttcacgaatgctgtatacaacaccatgaaccgaagcaatgacatcttgtgcaacagcattaaggatatgggcatagcacctcacaacaaagagctgtcccttaagcatgagactgttcttgttggagagatgatccctcaaatttgcactgtagatatcgtgtgaggagcattcattatccaatgtgatggtgaatagcttgtccttcatactccagtcagagaggctcaggctaattgcctcactaagtgcattctctgagtgaggagatgacaccatcatgaagttaagcattcttcggcgtactttccactcagagtcgataaactgccctgcaagtgaaacgtacccgagagtctgactagttgtccacagtcctatagtgagactgatccttccaggcatagtgttgaatgcttgaagcaggttctccttttctttctgataaacagcatacacctctccttccatcgtatcaacatccacaatcttgaaacgtggctgcaggtcgggtctaccgcatncagcgggtaccg

SEQ ID NO: 4800 - DNA, 556 bp, Zea mays
agcaatctcagcaaacttctcctcacgacttggagaagcttttatgaacttgatactctcacggatgctgtaaatcacaccatgaatcgaagcaattacatcttgagcaactacattcaggatatgtgcatagcacctcacaacaaagagctgtcccttaagcatgacgttgttcttattggagaggtgatccctaagatttgcactgtaaatatcatgggaagagcaatcattatccaatgtgatagtgaacagcttgtccttcatattccactcagaaaggcttgagctaatagcttcactaagtgcattctctgaatggggagaagacaccatcatgaagttgagcattcttcggtgcactttccaatcggagtcaataaactgcccagcaagagaaacatagccaagagtctgactggttgtccagagtcctatagtgaggctgatccttcctggcatagtgctgaatgcttgcaacaggttttcttttgctttctggaaaacagcatacacctctccttccattgtctccacatctacaactctgaaacga

SEQ ID NO: 4801 - DNA, 518 bp, Zea mays
acgaggccgagaagctttgccgcaaggccctggagatccaccgggagcacagcgcgccggcgtccctggaggaggcctcggaccggcgcctgatggcgctcatcctggacgccaagggcgactacgacggcgcgctggagcacctcgtgctcgcctccatgaccatggtcgccaacggccgcgacatcgaggtggccaccatcgacgtcgccataggcaacacgtacctggccctcgcccgattcgacgaggccgtcttctcgtaccagaaagcgctgaccgtgctcaagtctgcacgcggcgacgaccaccctaccgtcgcgtccgtctacgtccgcctcgccgacctctaccaccgcacgggcaggctccgcgagtccaagtcctactgcgagaacgccctgcgcgtctacgccaagcccgcgcccggcgctgcccccgacgagatcggcggagggttgatggagatcgctgccatctacgaggcgctcgacgacctcgacgaggcgctgaagctt

SEQ ID NO: 4802 - DNA, 570 bp, Zea mays
agagtcgacctgcagaagtctttatacctgatctgaggttttagtagatgatatgaaagcttgcaccacatagttaccacagtggtgagatgagattgcaaataatgcacccttcagactacgtgcaagcataccattgcgcaattcgtctggggcaacctccacaatcacctgcaaagcattattatcgcctaatgagcattatccagcacaataaattgtgtcatcattaggattttgccaccactccttatgtgagtactctcacacacccaataaagaagaagcagatataaaaacaaaggaagagccacaaggtcaatgtagggcgaggcttaattacaaggaaatggaaggttatattatttgactttttcattgcagggaaagatgctcaaacaatacctccaagagatgactataagcactttcttcaagtaaagtaacaatctcgtccattttttcactgtaatctctcgtctgtacagttttatattcatcataaccaagaagtattgatattatatgatgcaattcattatcatcaccagacgatagcttcagtgcagt

SEQ ID NO: 4803 - DNA, 553 bp, Zea mays
ggtaatccagcaaataggtgatgccccggaggcaaggcatgttcacgggccagccaatgtccaaaggtagaattactggcaattctgcctcagcaacagtagcaggattcaccacgctgccatcgtcgaaaggcatgctgctcctggcaaaggcaacatacttccccatgctggcacggcatgtcaacttctcaaccataggcagtgctccctgctgtccacacatgatctccaggtttgtgtccagatgtctcagattctgaaactcgtctctgctggtagcagtataggataagcagttgatgccctcactccagatgtagaggtagctgagcaacggcagcctcccgaggatttctagatcctgcacttgcacggcctggaccgtgagcgacaagtacgagaggagcgggacacatgagggatcaatccatgacggacgcctgggcaaatggatgccacacagcatcagttgacggagatctgaaggggttggcgtccagtcttccaacaagccgccaaggtcaattgtcctctccttcttggaccatat

SEQ ID NO: 4804 - DNA, 561 bp, Zea mays
ttcgagttggactcgctggaccagaacctggccaagaatgaggccggcggcatcatcggcacccggttcgagtcctccgaagtcaagtccaccccgttgcagccctacagcgaggtgttcggcctccagcggttccgcgagtgcgagctcatccacggccgctgggccatgctcgccaccctcggcgccctctccgtcgagtggctcaccggcgtcacctggcaggacgccggcaaggtacatgaatagctagctattaagctatgcatgcatgaatccatggagttcgttctcgatctgctctcaaacgatctaaccaacctgcgaattaatgtgacggccggcgtacacgtacgtgcaggtggagctggtggacgggtcctcctacctgggccagccgctgccgttctccatctcgacgctcatctggatcgaggtgctcgtgatcggctacatcgagttccagcgcaacgccgagctcgacccggagaagaggctgtaccccggcggctcctacttcgacccgctcggcctggcggccgaccctgagaagaaggagcg

SEQ ID NO: 4805 - DNA, 488 bp, Zea mays
gctacagctatatatattgatatatatacacacacatggtcctgttataggtggacgactataggacgactaggagtcgactaggctcgactaatcgagcaaatctaatcgcgattagtcaccttatccgtgctcaggcgactagattcgactagctgattttaaaaccttgcttccgagtagcacctccaggtcccgggttcgatccctctcggggggtgaatttcgggcttggttaaaaaatcccctcgctgtgccccacccgctctcggggatcgatatcctgcacgccaccctccggctgggccgttgtagagtgggtagttgatcggcccgttaatgatggagccaggttcgagggttttctcggccgggagcatgtttttcggtctcttcttaatataatactgggagggcagtcttttcctccctggttgagttttttttttccttttttgacgatcatggccacactaggggaaaaaaat

SEQ ID NO: 4806 - DNA, 581 bp, Zea mays
accatctatctcctgtttctcgatcgagctgtaacacatcagcgtctgaattgtaatcacgcgcgattgcgtatcgtttccttcctgcaaaaccctggccgctagcttccaccgccgcgttcctgtcaccatcgtcgcggcgcggccaaggccaatactggcggggggcttatatcaggtccatgggccactggcttaactaacgaattcctcctgtcgttgcactctccgcactgctcctgcgcagacgacgtacgtacgtagccgttgttatcgcagcgcgctgcccccttgcaccgatcactatcctccccacccggcccatcggccgcggccggtgccggcaatgcggtgggcgcccgggcgggcggcctacgtcctcctcgcggcggcgctgtggtgcgcctcactcaccccgcgcgcggcgccggacctcgcggcggaccgggcggcgctgctcgcgttccgggacgcggtggggcagcggctcccgtgggacgcggccgcggcgtcgccgtgcgggtggcgcggcgtcaggtgcgaccccaccgccgcgcgcgtcaccgcgctgcaggcatgca

SEQ ID NO: 4807 - DNA, 490 bp, Zea mays
ggctaagcccaatagccgcagctccaacgctaactctccgacggcgaaggtaattaagagaggcatgcatcagagtcacgaatctagcctgcttgagttcgtagctgctatctagggtttcgttcgtcaataagccatatcctcagtttcgcttgcgctccaattccgagtctttccaggacgactgctctccaccaccggcggcgacgaggaaaagcgtctccgagccgcctgcggccgcgaaaaggccacggatcgaggcgccatcgccgctgccgacttttaaggtgaagagcgatccgagttagtttctgtttcaatttttcagccgcagttggccgggtggctgcgtcgtctctttttgttccttttgatgaatgacattttggatttcacgtcttctgcatcgtcgatggatgatgacaccttagagagtcagctgggctgctaaatgttttctctctctttttttccccctgctcgcttttgc

SEQ ID NO: 4808 - DNA, 543 bp, Zea mays
ttcccctgcctgcttcgctgcttctccggatgcgacgtgagacacgtgtatcgtgagggaaatcaggtggcgcataccctctgccggcaggcctaccattgcccgggagtgtgggaaggaatgttgccgtcgtcgatcgtcttgcgcaaggtcgaagaagactgccgtggtgtcttgcacgagcgtgctgtggtggcccgatgaggcgatgatcgacgaaagaagtcatccagtgttcctgctgacggctgacgtaatgctatgatggtggcttgatgatcggcgaaacaagtcccgtgcaagttgcatgggcgaccttttggagaatacaggcccaagaacgaggacgcaagtgtggagaacagcagaacgatcgaacgacgaaggaccggcagccgcgccaagaaccagatgctgcaagaaaatacaggcgatgatcgaacgaaggggaaggatgctttggacagatctgtttgtttgcttttccttgtgtccaaactaaacaagcgttgatgttgaatgaattactccatctgcgacgtg

SEQ ID NO: 4809 - DNA, 514 bp, Zea mays
aggacaaaagcattgttgagttaaaggtggagagagggcagatgttttgcttgcacaagcaaatctgcacctatttttctctgttcaaagttcaaacaggagaaaaagggaattattagctatggatgtgtttagcctaataggaagttcaaaagtgttatgtgtggagactggagagcttcatccaatcatccttgacattggaaattgcatgttcaataaaattttactgcatgtccataatacaagcaaggggaatagagaaggggaaaaatcaccttgcctcattcgcaggcaatttttgtatcaaaactgctcagacaaattgcaaaagcttgaaatgccgatattggataaccgtagtccatggtgaacaagtcttttccgatctttccgaattggagaatcaccttgtcactctcttggttctctggtccattgtcctcagaagccaccaactggaagtttttaaccgaggcaacagtgacccgcccacggaaattcaggcaccaac

SEQ ID NO: 4810 - DNA, 506 bp, Zea mays
cgtttctctccccttccccactgagccctgagccttcctagcaacttgaaatgcaggtttcggaagagatggatcgattgttgtgtcactaaattcagtaagctttgagagaagcttttttgcagattcttgcacactttcttcgataacagagttatctcctgaatggtttttatccattgcataacttaacagtatacgaacaacatcaacagtcctaacttcaacctcaccctttggagtgacataagctctatcacaagatgccttaaatttgcaaatgctgcatgcctggtattagggcacaatacagtgatattattattctgtagttaaattataaagtaaaataggaaagctattatatatttagaaatgacagctaagcttacatcttcttctttgacctgcacgtactctctcaacctttttgcagaatagacgggcttccgattgttattaggacagccagacataacaatagcttgaatatcctgcttgggaag

SEQ ID NO: 4811 - DNA, 478 bp, Zea mays
tcaaggcattttaataagtgcatgatcaatcataaactcaccaacttccaaggtttccacatcaaacacctctgaatccacgcttccctgcacgtcttctggaaataattgacgagcaatcactctctttcgagatccggcccatccgggactctcacttgtttgtggtaatgcagcacttttggttggatgcccctttgatgggaaacccaataacaggtcctcgaaaggatagcgaacagcagcagacgaatgaccacattttttgcaggacagtgtccgagccatctcaaacctaaaaatcgaatccatcattgtaggtgcatcactttgcttgttattattcttgtcgctttcattccaaatagcgcgcaaggccgtaagcaagtcgtggctgtcttccatagttccaatttgaaatcccgaaggatcacgcagatttaaacaattcaaaagtttaatcggattaaggacgcct

SEQ ID NO: 4812 - DNA, 485 bp, Zea mays
tattttacatgcagtttttttagccgatgatggtgtcttccagtaccggcccaattatgcttcaggttatggtaatcacatttgggtttcgctgatatctccacgctagattcagcgcccacacggccagtagaatggtttattagttaatctgcacttgcagtaaaagcctgctccactgcgatttatgggactagtttgtcactgtttcactgaaagttcatgataacaaccagaacaccttaattaatctgcaacaagatttcacaattgaggtctccattttaccatgtatatattcatgagtggaagtgttatatatactgatcatctatcctcatcaaggcgcccaccacctccctcatggaaggcctcgactcgaaggccacctgggtgcaggaaatcgccatgtccagtacgtccagcgcctttgccttctcgtcttcaggccagtacatgatctcctcgtccagaaatgtcatcac

SEQ ID NO: 4813 - DNA, 560 bp, Zea mays
aaaaaggatacagcctgaggaggatgccgctctcctggatgaggtcacagccatagacgcggagcgcagtctcggtggcctcgtcgatcccatccttccgtgatggcgagtcacggagctgctcatctgtcaggtagaacgtgtcgatcgccgtgtatatcatcctctagcctctactagggtggcctcaccgcccccaatggcggacccaggatttgaaacaagggtagtcctagtcaaaaaaaaagtatatgcaataaggtaaaaaataaaatattgctatacatgactacaaattaaccaaattgattctattaagtttgattccacgacaagaaatttcattcaattctatgctctgatttcattcacaagaacaaatccctagccaataataatgaatcacacaccaatttcacacatacacaatctctaaatccaaatttatagtccagtgcttactgtcaaaccctagggtatgagatttcggatttgtgaaagctcagaacttcaaaaacacactcactgattcaccggtccacgggcgctggcgcgctgct

SEQ ID NO: 4814 - DNA, 500 bp, Zea mays
  unsure (1)..(500): unsure at all n locations
tgtcacctgctccactgcggtacgcagtacgaaagaaagacgagggggcattagctggactggatctcaatgctgctttacttagtactagttgcgttgcccctgccaacttggcacggccagaaatgtcatggcaccgccggggccgggcacatgcaatgcaaggctgcacctgcacgggtgatgccgcatcggctgcacatgcgacgtgctgctagcctgctactgatgcaaactccttgcctagcttgatagatctgggtgctattgctatagtacccccgctcacctttgggagcggccatgacggtgtgcttggagacgacggcggggacggcggcggcggagaccggggggaagaagtgctgcggcggcgactcccccctgcagaggcgtggtactggtggtagtggtagaacgggtacaccggcaccatgccgttgggcgccgncggcaccatgcccgccatgcgctggccgccgccgccgggtacgcgaagt

SEQ ID NO: 4815 - DNA, 512 bp, Zea mays
actctccatataccctagactacggttatccaacagtaagtgtacctaactacattgctaataagctctatttgcttcaccaacagtacaataaaatcgttgcttttattcatttcaacatgaattaataagtgcagtagcatggatgtcactgagtgcatcaaagtatctttgcatcatgcatcgtcaaaattatgacatgataaacaatgcacggaaaattgcagtgtgtaattttttctggctataatatatgattatataacacaatgttccacagaaggaaactaaatgcaaatggcacacaataagaaaataatttaagaattacccgtcttttttcccgacgaaaaccagaattaccaatcattttagcctcagaaacctttcagaccaaaacttgagggttggccttcagctctcgtgtgcttactgtacaattccgttatgctggaaacaagttctaaaaagactgacagtcagcatgcaccttttcttaaaacagaagtaca

SEQ ID NO: 4816 - DNA, 585 bp, Zea mays
agaaagaagaggaagaagacgactgccccatcgaggaggtccggctgacggtgccgatcaccgacgacccggcattgcccgcgctcacgttccggacatggttcctggggctcctctcttgcgcgctgctggccttctccaaccagttcttcggctaccgccagaacccgctgtacatctcctcgctgtcggtgcagatcgtggtgctgcctctcggcaagctcatggcggcgtgcctccccaccaaggccgtccgggtcatgggccgctccttctccctcaacccggggcccttcaacctcaaggagcacgtcctcatcaccatcttcgccaacaccggctccaactccgtctacgccgtcggcatcatcaccatcgtcaaggccttctaccaccgggagatccacccgctggccgccatgctgctcacccagaccacgcagctcatggggtacggctgggccggcctcttcaggaagttcctcgtcgactccccctacatgtggtggccggccaacctggtgcaggtctccctcttccgagcgctgcacgagagggagaccaggaggcccaggggaggcacca

SEQ ID NO: 4817 - DNA, 1069 bp, Zea mays
aagaatgattgactacctcttgggccttgtgcatgaaggcaaactcaaatacgagtatgtaatgttaatgttgttctgttgttgagtttctttcagatcttgttgacatactctcatctagacattgccgtctctgtaaaggggaaaaattaagtgtgtccttggaaacattaatttgtttgtaggatggagtccatttctttcggcgagttcagcttggctctggagaaggccctgggcaaacatggaagccagccgaagcaagttatcaagttctgagaccagggcgggttagaggatctgagagcatgcgattgccatcgatctgtatgaatgatgaatccaacagttagctatgtcaagtgccagagttttaaatacaaataaagtaaaggcagcaatgtttaatggaattgtgaaatcagcagcttagctatatttgagcgctgtgttgattttgcaatgaaatcagcagcttagctatatgtcaagtaaagggtgcgtcaatttctattgcatctacagtgttattcttttgcagccacagctggtcagctgcagcataaatgctccagccaaacaccatagtcgaccttctcctgacactgaaaacagcacagcctgaacattaggacgattcccctcgaagacacaagcattatgatgcttccaaagctcccaggacagtaaaataactaaagaattaaaatccccacgaagcttccctgggagggacctagcagcatgcttccaccaggagttgaaggaacttgaggagttcagtggctgcacatactcatcctcatctctcatttcaagctccactctgtaatcaaagtctacattgtaaaatagtgtcttacactgccatatgaacgatctgctggccatagcctaagactgtctctagcagttcaccatatggtcacccaaaacactgttttgcactgtagactgcactgtttacaaagtagagtttgaaataggtaatgagggatggataagatgctggagatagcctaagggcagttgccctagctaaaccccataagttagcctcttgaatatt

SEQ ID NO: 4818 - DNA, 524 bp, Zea mays
tagatgaaccctcaggatttgcacgacaatcaatactgtcaagtgtttttgtctgtgacggtgtagctggctgttgtgcagatgactgagattgatgaagaccaagtgataacttgccattgctactgatatctccagagtctacagagttcaaacaagctgcatcaaaagtgatgtcaaaaactcaaaatggcctcgttagtaaaatcgattatcatatatgcaatagcttttagggaaaaaaaagaaaaatgcctcatatatatcacagccacagcttaagaaaatgttcaggcataaacttgtacaagttatgatatggacaaaaagaactgggataggatgcttggaacagtttatagatttgagtagcaaagtaaaatcccacatacccgcagatatctcggagccatcagtgggtggaaggcacaatccaatagggacagtcacgagctgtcgcgcagcactagagtttaatgcatttacactgcatcccctgttaccattagcttgggataattcat

SEQ ID NO: 4819 - DNA, 1034 bp, Zea mays
tgatatttgcaaaaagttgactgcatcgtagaaaagtacagaatggaatatctgacagtgttcccagaagacataaagaatctgaagatcaaaggcaagattattcatcctctgtatagaactggagcaaaaatgttaaactaaataaattatgcattgagatttgcaagaagttgactgcatcacagagaagtatagaatggaatatctgagagcgttcccataagacaaagaattgaagagtagagctttgtcagtttgtgccaaaaggacagaaagaaaatttctcttgactactgttaaaaagaagggttaattggaaacatgccactgaattttttcaaaaattggaaactatttcattttcatgtcactccatggcatcaaaatgaactagatgtcactccatggcatcaaaattaatcctaaaaagaaagctgcagcagcagcacaggcagtcaggcacagccgcacaggcagccagccgtcgtgggcggccttgcgtggtgtgcaatagccagtaggtgcctgcgtggggtggtggtgcggtgagccgttgccttcctcgggacaaggggtgcgtggagaggaggttccgttccgttccgatctttattcacgccaccgttgtttatttattatcccctctcgaaaaagtgaggcgcgcagaaaaaccgaggaaacctaaccctgcccgtgatttttgcacaaccaacagcagtgatgggtatggatggattccgtacatgtacagcgtactgcgtacgcgtaccgtccatctcgcgcgcgagggaatccgaagagtagccggtcctgccgccgccaccgattgaattgaattgattagcgacggcgacgaaacacgaagccggcgagtgattggcaccccgtaaccaccaccccccgcgtaatgtagtaatgccgctcgattaatcagccggtactgcgtgctcatcggccgcggcggagcagtcctccaatgaagcgccgagcaaatctgaagccgtcaggggccacttattctatcccatact

SEQ ID NO: 4820 - DNA, 1205 bp, Zea mays
ttgtatgcgaggaaacccatcatccctggaagaacctgcatttaaagacagttagtcattcaggaaatatgtgtggaagaatataatctagactaaggtatttattataacagctcttcatattagaatataataagcatagttattataataggagaaacgagttctgaaatgtgtgttcataacgtgacgacatatacgggcataatatgccaattaaatgacatctggacagtagcagagtggtgctctcacctcaaaactgaaaaaactatttttgaagtggtctgataaagctgacaatccaaaaatcacggcaggaatcacaagccttggggatgaaagagctactcttccaccacccaatgtcttctctattgtattcttcaaatcttcacttgtaatgccaattctagcatttgcgtaaataggcatatttatttaaacaatcaaaatgtgaggaatcaaacaatgggatacagactgcagatactgcgcgtgcacctcaacaagctgcgctccctaccgtcgtcggtctgcgagatgcgatcgctgcgcctcctggacgcacacttcaacgagctccacggcctaccggccgccatcggacagctgtccgcgctggagacgctggacctgagcagcaacttcagcgacatgcgggacctgccgccatcgttcggcgacctagctggcctgcgcgagctggacctgagcaacaaccagatccgtgcgctgccggactgtttcggccggcttgccaagctggagagactccgcctggaccagaacccgctcgctgtgccaccccccgaggtggtcgccgacggcgtcgtcgcggtgaatgagtacatggcgaggcggtgggccgaggccgttgccgaagaggagcggcggcgtgcgaacgcggccgccgtggcggagagccccagggcgtccacgcccagggagtggctgacgcggagcgtgtcgtcgctgagcacctgggtgtcggacgtgacggtgaaggttgtcgggcaggagaaggtggacgatgaggacgagttcctgcagtcgcattcaagtaatgccccttgatttcaccagtttcggcttgtgctttataaattgctttggcacaaaagacaaaacggtctctccagcgcataaatgggtgtgagtttaccttttcatcatctttgggtaaaatcaagtccaccgggttg

SEQ ID NO: 4821 - DNA, 1072 bp, Zea mays
acccacgggagccggaggtcatcaaggcggcgtcggtaaaccatgtccatggccacaggccacagctgagcttcctccgctgcccgccactcgtgccatggcaacgacaggtccgtcgtctgtgctccctgtctctgctgttctgatgaaattcgcaaattaagctgctctaggtcgagtcctggtagctggcatccccagctcggccattgtatcacagatgctgagccacttctgcctcagatctgaaactcgctagaaaaaccatgtgacatagaaacatacactcatttgaggattggggttttttcgtctgtagcgggtgcttggtttgtagtatagattaattttttaatctcactattttatttgattttctaaattattagatatagaactaaaatacagttttagtttttgtatttatcaatttaagaattaaaatagaataaaatgagaccaaacacccctaaatacattcgtcttcagtttatttgggaatgaattggcctcgaggctcgactcgctttattaatttggttgcgcctacacatgaagccactaggatctgcagaggagagaggtctacggagcttgggagcaatatcttgggatagagcacgctgatactgcaccaaaaagggtctatacagtgaatcaggtattctgaaatattgctgccaaattttctagtgttgattttgtgcaccatacctgtgtcattcttgctttaggcaaacacgcaatgctttatgatcttaatagccgcatctttattatgagatctgcttgtaggcatttgctgtttttggttaatgggttaaaggaccttttagtctgcatgacaatgtagggaattcactgttgaatcggtgtttgagctctggtgcctagactggtttcatagttgctctcaccgaagaaaggcatttgaaatctatccagatattttctgcgaccgtttttcgaactgtggcattcgcatgcacggttacatacccattgttttttgttatgcacttcactacatattcggttatgtaatcctaactttcttccggtgattctacct

SEQ ID NO: 4822 - DNA, 584 bp, Zea mays
aagaacgggaactgcacgcgagaatcacgcatcgtcggttaatataagcagcctgccccatggtttgagctcaataatcaccagcagagatgtgtggatgcagaacggctcaccttcctgacccaccggacaaccatggttccagtctcggtgcactcctccagcgtctcgtgctgaagaagcatgtcgtcccagctgttgttcatccggaactcgtcgtcccagaagaaatctctcacaacctctggtgacgcatcttccaagattgtgctgctgcggtactgtggtggaccactctggaatgaaacaaacacacacacacacaaacaaataaatcaattcgacgaggtctctctagccatttaagttaacagtgggatgaagaaaagactttgctgctgcataccggtgggtctctccgccaggcttggtacctcatggttggtaaggtgcggtccatcatgtgaatccacgacgggccaccgtccttctcgtcgacgagccgccagaggtgcatcaagtcaccggtgttgaccgccagctgctgctgctcgtcctcggccgccgcatgagccaccacagtt

SEQ ID NO: 4823 - DNA, 565 bp, Zea mays
ctagagtcgacctgcagcagcgaggataaggacagctgagccgatagcccgatatacggatcactcgccgtcctccgagatagcgcttagcctcttcacgacggcacgatggcgagaaccgcgggctctgtagctagctcccttcctcgtcttccccgctgcgcgtccaccgtcttgacccgcaggacgcgccgcgtacccacggtgcacgtcgttcttccgagcagcaccatcgccaggcggaggcgggctgctctccttgctcacggcgaccagaagaggagccactcgcgctgccgactgccgccgcggccgcttgcccgccggcgtcccgcctcgtctgtcgcgccccggcgacaggccggcggcgagacccgcctcggccgcgagcgccgtggcggccttgacggcgagcgcggccatgtccttggcggtcagcggccggcgcagcgcggagtcgggcagcacgaggtagagctgccccggatggagcgcctcgtccgcggccagcgcgcgcgggggcgcgtcgaagcccagctcgtcggcgctgcaggtcgactctaga

SEQ ID NO: 4824 - DNA, 1138 bp, Zea mays
agcttgcatgcctgcagtctatcactggctgcggtaagaacacaagaggctgtgcgcctgtgccataaagatgtgccgggcagcgcgacatgccggtcaacacagcagccaaaggcactgccagattgcacaagcaatgaaatgatcatccaccaaggttatgtaaaactcatatagatactccgtatcttaaaaaaaactaacagagtaaatacaaaaaaacacaaaagacgatatcttggtaaagtaacgtctctagcacgattctctaagtttaatacagttttaaccatacaaaccacataaatgaattgtattttaagaggttttaatgaataagatacaagacttaaatacattgatttgtataaaggggtttcttagatgtatctagtgcttcgagaactgcaacatagtatctaggttgtacatgccctaagcacaagaggagatcagctcacaatgcacaaaagttcacgttgcatcaactgcttggctttaataatctataccgatttctactgcttctacagtgtttttgacactatagattattgactgcaggaggatgacggcgacgacgacacttgtaaagcaggggaagtttggaagccctacaacctatgcgtggacctggcgcccccttactccggccggctgagctgcctgaaacacctggcgcgcagcccagcggacgaagcccatcgcctggtgaaatccagcctctccgcgacgttccaccagctctacaccaaggaatcgctgaagctgcacgacatctcgcatttcgtcttcacgaacaacgccgccttgaaccgctggaaggtgctcacctcggctcgagggctccggacggtagccgcggccacgctgctcggtgcgatcgcggtgttccactacggcggcggcgccgccgaccaggtcaaggccgacgtcaccgtcacgtacgcgctgctgtggtctgcgtttgtgatggagtacgtcttgcccaccgtgatccaccatacgttcggcagggtacagcggctgttcaccgggcaccggacgtggccggaccaggtcgcgcagtacaacctcatggggtacgtggcacgcagaaggaagcactcgtggctcatggaggtggtaggctggctcg

SEQ ID NO: 4825 - DNA, 1108 bp, Zea mays
ggcttactgttcagcatgttcagcaccggatctccatttatgctgatgacattatcctgtttctaaggcctacaagaggtgatttgatcatcataaaggagctcttagatatctttggtcatgtcatagatctcaggacaaatatggtcaaaagctctgcaactcctattcgctgctcgaaagaagacacaacactcacttctgaaattctctgctgcacatctgtgatttcccttgcacctaccttggtcttccagtcaccattcacaagcctgctaaagcagatttactacccttggttgacaaggttgcagaatgcagacaacctccctggatggaaggcctctctcatgaacaaggcaggataactggttgctatggatctttgcccaaatggctaattaaggcaattgagaagaggcgtcgcggttttctgtggaaagggcaggaataggctaacactggtaactgtatgatttcttgggcacatgttcagaagccactacaatttgggctgcagcgccaacagacgcggctgctgtgctgtgtttgcctgccgtctcttctctcgccaattctattcttaggctatcaacctccctccccacctggcgtcgcgacccatcaccgcatttccttcccgccacctcctctctcccctccattccttcaccccatgcacacgcgggacgcgtagctttttcgccctcgcctcctcccacgacgacgcgcacgggcgtgcgtgcatgcggccagcggtcacggcccctccggcaaggcgaccaccgccgtgcgcgtgagaacaccggctcggctcgtctcgtcggacgactcgctcggcgccgcccgcgtccccatggcgcggccgcggccgcacggccgcatcgtccacgtcgccttcgccttcgcgttcgcgtctgccgtcctcctgccgccggccgcggagggtgtccaggagggcgacgtgctggtcgctttccgggacacgctgcgcggtctggacggcgcgccgccgggcccgctgcggaactggggcacgccgggtccgtgccggggcaactcctcctcctggtacggcgtgtcgtgccacggcaacggctccgtgcag

SEQ ID NO: 4826 - DNA, 512 bp, Zea mays
ataacaagatttgtatcattaggagctcaagctatatcgataacaaattttgaaatatgtccaaattctcacactaagaagtatgtaccttgagtctttgtgagcaggttgtcaaaatcatgatcctgaatggaattggaactccgataatcataaatcatggagtcatgaatactataattgcaaaatcgtagttttttttttcagaatagaatcaacccaatcaagtaagatcgtaaagatgtaacaccacacgatagaatcgtgattttaacaactatgtttgtgagtcttgtcattgcaattcttgccagttctcttttccgaactgctctccattttcagtgttctgaattctgatttatcagtccactggcatagcacaatgtatgaatcagctcagcataatagtaccatctttgagctctgtagtaattgagctgcatgcaacatttctcctgacaatcctttcatccatcgacttcctaatcctcacgacatcctcccaccta

SEQ ID NO: 4827 - DNA, 531 bp, Zea mays
tgccaggtggaggtgcgtgcgtatgatctgcactctgctctgtctgctctgcccttcttaggacgtagagcatagctttttcctttttaattaacggaaaagaaaacacgagctcttctgaactcgagcaaaacgggtttgcttgcttccgggacagttcctgtcgatgaagctgtcgacggtcgacccgcgccgggagctcgacgtgggctgcttcgtcgtccccaaagacgacgtaacgatgcaggccaacaggctgtgcgcgcccgcgacgtcgtcgtcgagctcagccttctgctacgccgcgcggagtgttgttacgaacgccaaaggattcgagacgccgctgcccttggcgaaccatggcgtcgcggcggacgacaggccacttgagcggcggactcgagacgcaggtccccaggtacgtcaagacctgctgcgtccatctatttcctgtcgctgtgcgatcaatccactccaaactgtagatcgccatggatttcaggcggcggggagcttgtgggaagagga

SEQ ID NO: 4828 - DNA, 504 bp, Zea mays
tgtgttattggtgctcacaggagtgttgtagttatatgtgctttcccccttaagaaagcactgacgaatcatggcaataaaaacagcaaaagaaaatgccacttgattagctgacaactgcttatgctgggaatgcaggtttacaggcttccacagaaccatacagttggataggaagaagctagttgagcttatagatcttttcgaagatcaggagctgtcctgggaagaattctctgttgctgtcaaggagctccacgggggccgaatgagccagcccaccgtaaggagaatcgtcccgggacaaccaaaggaagaggactacttttatgctaatcctcatgaatgccttgggcctgcaaaaaaacgaagggatagattaaaacatatggaaatttgaaagccgcgtgcttaatgcctagtaggctactacagatagaaggccaaagtgaaattggtaatgagatagcatttacatgcccttttgaataaccagattagttg

SEQ ID NO: 4829 - DNA, 500 bp, Zea mays
tcttgcatgcctgcaggcctccttgatgtcgatcagtcccggaagagccgacaggatgatggaggcgagcaccgccatgggcgtgtagtagaggagcttcatgaacagctccagggtgacgaacacggtgatggacatgacgatgtttgaaacggtcgacctggcccccgcgctgaagttcactgccgttcgggagaacgaacctgacgaacgaaaaaaaaaacacacatctgtcagacatccttgcttcttcccgaaagattgcaacgacggccaatgagtcagaaaaccatatggatcacctgttgccacatagcacgaggacagagacccagcaacgttggagaaccccatggccagcatctccttgttgccgtcgagtctgtaccctcttacggaggcgaaagatcggccaacggcgatagcttcctgggaggagaggcaacgcaaggtttcgtctttcagcgcatccgcatttcgccaaggtgaagggcgggcct

SEQ ID NO: 4830 - DNA, 1074 bp, Zea mays
agtcctcccaacaagctgaagatgctctttctcaagggatggaagcattgcaacagtcgcttgcagaaactctagcatctggatccctgggccctgctggaccttctggcaatgttgcaaattacatgggacaaatggcgatggctatgggaaaacttggcaccctagagaactttctacgacaggtttgtcatgcaaaatcatggacttgctcatttcataacagtgtgttatctttattttccttaatttgctgtctactctttgaggtcttttatatagactatatcagctacatgatattctaaaatccatatctttaagaataaaattgctgagaagcttatacaagcttaatctgaaatgccaaatgaattattggaaagggttacaattatcaaaaggctgtcgatagatgatgacatataaaatcagtggcacagattttgatttgcagtggtccctttagcagatatctttatcaaaagaacttttgcatatatagcaaggaagtacaaatttttttgacaatgtcgtctgcagccagatctagcacgtgcgagcagttggacgtttggatttactgtatgggtgaaccagcaatgggggcaatggcgagtggcgacggggtaccaaccgggagcagagatccgtgtccgctcgcttggttgcgtcgggaccaatccaccaccaaggccaagccaatagccaagcagcggggggaccgaccgtgctgtcgatggcggattgcatgcacggaatgcagagatgcctacgggcacggctcttgtggtgcggtggtgtgtggagcttgacagcttgtggcttgctatctctgtgcctagcctagctagcagtagcaggcgcgcgagtgccaaaactgacggcagcaggtagctagtaggttggtcggctagggccatcgaggtgcgtcgccatccgacgcaggcaggaccaggaccaccgatgatggactggaatgatgatccgagtggaaataccggtaagtaggaccgtgaagaaaggtagcgacagtgtcagtgggatacccgtgatcattccgatgttttgaaa

SEQ ID NO: 4831 - DNA, 468 bp, Zea mays
atcggattgaggaactcagagttggtgatatataagaaagagtcagtcgtcagctgatgcatgttcgtcattaccatagcccatgagaatggagatgatggagccaataatggagcacgccacggcgtacttgttctttccgccatggccatcccgacgttgcttctcttctcccatggtaataatgtttatatatttcgatcttcaaaacacgcatagtatgatgagtgaagcgcgaaacactcccgggcaacttagaccctgtttcaatctcacgggataaactttagcttcctgctaaactttagctatatgaattgaagtgctaaagtttagctttaattaccaccattagctctcctgtttagattacaaatggctaaaagtagctaaaaaaagctgctaaagtttatctcgcgagattgaaacaagaccttatactagtatccgatcctgccggttgtatct

SEQ ID NO: 4832 - DNA, 564 bp, Zea mays
aacctggagcctgtataggacatttccacaaattggactatttccaatgcgcagcttccttgaaccacaagcgaatgttcattaaggaagggaaaaacactcgcggcaatttgacaagtgaatgttcaaactcacaagaaggcacaatccatccttctcagtagtgcccaatttcgcatttcagactaatgcgccagatgctaataacttattggttaacatatggaacgttaagtagaaagcacaaaggattgaagaaccaggaagcaacatctcgtccactctaccccatacgaaaacggatcatcgagcaaacgggagctagatccaaaccgcgcgtatacccgaatccaactccgatcccacgaacgcgagcgggtgtagagcgtacgcccttacacacccgtttactgagacagagagatctagcagcacccaccgctgtctccaatgaggagcagcttgataaggtagtcgtagtcggcccgggccctcgccggcggcgccgccataccgcccttcctcttctcctcctcctacccggcgcgcgaccccgccggtccc

SEQ ID NO: 4833 - DNA, 441 bp, Zea mays
tgccgggccgggccatagcacgcgggccttcgtagccgtccaaacccggcccgcttaacgggccgtgccgacccgaacccgttattaaccgtgccagaccgtgcttggaccgggccaaaatcgtaccgggtcacgggccaaacggacggcccgtactgtttggacatctataccatatatagacgcagaccaagccgatggagacgactgcacagtacacgagacctgctcgaccacacacacacacacggcacgcatagccgctgcactgtgtctgcacacatttttacgaaaaggaaaacaaaaggacggagtgatggacgcgcacacacagcacaaacggaggtcgaagaggccatgcctgtagtccagcagagcaaaggcgtacgtatggtctcagctggtttcgtcgagtcgccctcacgttttcaggtcagtgct

SEQ ID NO: 4834 - DNA, 526 bp, Zea mays
aaaccaccatttctagagacagtgttctttggagtctcgtcctcatcatttccttccggatttattgggggtactggtgtagacacttccatgttctgtgcatcctgttgcatcagcttccgattagaatccaattcactgtggacccaaacccaatcaccagtcatgtttcattgacccactcatctaagtatttacctttggaaggttattcattttggaggctggagtgcttgtccgtgttggcaagagctgctgcaccgggcacatggcatccatgctttctggtggaatatcattttgtacaacctgaaacatttcataatgaggccatacaacaattgaacagagacagaaaaaacgatttgaagcaaactgctacaaatgtaaactgaacacccagtgcaaatatccaagcacacacaagtcaagaaagtttaatgttttttatggctaataaaatttgtgctgagcagattatgtgcaatactgcaaagtgcaaatacctctatttagtgtgcacact

SEQ ID NO: 4835 - DNA, 500 bp, Zea mays
tagctcaagtatgtcaaattcaatctaaaagaaagtacagcaaaaggcgtaagagcgtgtgtgaatcataatatattttgtcatcaaaagtggcaagagaagcagtgcctatcacctcttgtctgggcgaaggattccacaatgcagaatcagggaaccacttgtgttggtcgcctccaggccgatctttgacaccaaaccaaaccctgcggccctgagttcactgaaacctgctccacacaatacaccaatagtgttacagagcaaatggtgaatgaacctggaatcccgtggtcgcacctggagctcagagttggaagagaacaccgcccataccaccgccatcggggaacagcgtcgacttcttctccagtatggcaaggctgctcatccctccgcctcacctgctgccatcgtgcttgcgctgatggcagtgcgctgccaggcccaggggtcaggggaggtcatcctattaaaaaaatgctctgattttttatgtg

SEQ ID NO: 4836 - DNA, 545 bp, Zea mays
ggagcagccccagaggacaaaatggctcgtctgttcttactcttcctcgtatctatttattctttctctctctctctctctttctttttatgtcgatccccattgcctcgtcgatccagatacactagggagtgctttccattgctatgaccatatatatatttgacaaaaaagatctctggggtgagtagctacagagcgaatggaacactgatgtggttttgtttacctgtatctgcatcagcaggggaaggaaggatttgtgccatctgactccagtgcctgcattctagactcccaagctcgaacacaggccagggaagggaagcggtggccatggaacctcacagcctgcggttcgtcaggtgcccgaaatgccaccagctcctcgtcgagtacccctccattcctgtctacaagtgtggcggctgtggcacggttctcagaggtaccgattgtcccccccatctttcatttctatgtttatggaaacaaacaaacaatctgatcggtatatgtggtttgtcaccggcgcagcgaaacat

SEQ ID NO: 4837 - DNA, 566 bp, Zea mays
agcggatgctgggccttttaaaccaaaaataccgcgctgctgagagcccacgcagtaccggcctattctgcccatctcagactaatctgctacagtgtagcccactaaacccaaatcaccaccaccagtccaccactacccgcgctgatgctaaaacctcttgtgctctcttcccagtcccagtcccacaggctcccagcagttcgattcgctcgcctagtcgccttctcgaattctcccgcaaacttgacgctgaagcctgcacgagaggacatggccatggccacgcccacgcgtgtcacggcagcagcagtcgtcctccgggttctctcgttgctgatcctgctgcgcacgggcacgtgcgccgacgactactcggcgttcgtgtacgcggggtgctcgcagggccgctacagcgccgattcgcagtacgcgtcgggggtggactccgtgctcacctcggtcgccagcagcgcgccgtacgccccctacgacaacttcacctcgccgaccgactcgtccgtggtcggcctctaccagtgccgctccgacctccccgcctccgt

SEQ ID NO: 4838 - DNA, 492 bp, Zea mays
actgacaaggcatccatgcttgacgagatcatcgaatacgtcaaatttctccagctgcaagtgaaggttcgctcaccaccaccaccaccattcctctgctctgctccatgaggtctggcttactatcctgtaaagtttctgctgatctatgttgtatgcctgtgattgaaggttctcagcatgagcaggctgggcgcgacggaagccgtcgtcccgctccttacacagtctcaggccgaggtaaatcacgtcacgcgagcccggccccagcccccagagatacactgcactgtgcttcttatgactgggctgctgtccatgcagagctccggtggtggtcttctgctgtcccctaggtcaggctcaggctcaggcaggcagcagcaggcacgcggaggcagcctgccgccgtcgtcgtccgaggtccgggacggcgcggcgttcgagcaggaggtggcgcagctgatggagagcgacatgacgacggcgatg

SEQ ID NO: 4839 - DNA, 545 bp, Zea mays
atgcaagagagtacggcaacgctgccggttcacttcttcagcccctgaaccttggcacaggaccacacggccacgacgagcttgcagccatgacggcgtacaccgagtccaatgatccaccggtggcagaggcagctaccaatcctaccatagaagaagtgctcaacaatggcgacagcttcagcacctacagcacctcgctcatggcacctaatcaggttcttgatgacatggcttcggatgtgaatgagttggcaatggcaggaggagcaattttcagcaacgacgacgcatcgtttacggcgcctcaggatctcgccgcggcgctagatggtggccagctagcaccaggagcattggacgccatcagtgcatcgctcatggagacggacgggaaccctggtctcgagctagaggcaatgttttctcctgatcagtacgagaacaccttgtttccgctggaagctctgctggggctggatgatgctcccgtgtacgaggacggccaagactaccggcagggtggcgggagtgccgacgatgag

SEQ ID NO: 4840 - DNA, 666 bp, Zea mays
aatgaaagccgatctgatgctgagaagataacaaatactttcatcttcaacacatttgtattttgccaggtggagtatttgttcttcaataatttaagaatcataacagaacattagcggacgaatcttgcttcaccttttagacaaatacatactggcattggattgttcccaaaagaaaagaatcaatattgagttgactataaattgatagtagttttcccccaaaagggactaatgtgtactctagccttgatactacatggatatttttcttcacgtaaggactcgttataagctattcattgctttaccatagtcgaatttcaggtatggcataagttttttttcttgaaacacgcaggagagctgcgtataatttatattaagaaagagataggtctgagaacagaccggggtacaaacgactccttacgggggacgaaaacacaaatacagaaacacactcatcccttatctatgacacaacagcaggccctcctagtcttaaggccataagcccctaagccctctagccccggccataccccacagcgtagcatcctcctggatgtgctgcagcatgcaagcttgcactgccgcgtttacaacgcggactggaacccgcgtaccactaatgctgcgactcccttcgcgctgcgatac

SEQ ID NO: 4841 - DNA, 494 bp, Zea mays
gcgcaaaaacgaaaacagaagccacttgagaggttagtcagtcagccatctagtgccctgaaggctgaaaaagccgatcgactcagtcacagtgcgcgccgtttttactgatggatgcctgaatgttttggctcacgttgggcgctttctccctgatcccactactcacggccgagagcactgcaagaacacttagaacgacagattagactatttccagcatacccattcacatattcaaacttcaattctacaagtgtagaacagtgttttaacttttaagtaaccatataaataaactgctacacggtattagcgtacactgttcaaatccacaaattgatgcatgaaccggcccggaatacttatccgtaccagagattgctggcgtcaaggttccgtcgcctaggaggatggacagcgccgacacgggcttgtagccatacacggccgagagacccatctcatcaaggccgaagctcaactaatacacc

SEQ ID NO: 4842 - DNA, 568 bp, Zea mays
acaagacaacgttcacgatgagcaaaagctgacgcttgcgatatgcttttacggagtgctttgtttgttccaccgagacggggaaatcttaattaccttgggtttggatttcccttcaccaccttctgcccgtacttcctccaccggtagccgtcgtcgaggatgtcgatatcgctcatggtctggacaacgaccctcggctcacgcaccgttcggttgccggccatggagataccctcgccgtcaccgccgtctttcctcctgacagaagcaacaggaattcaattccgcttgttcgttcttccaaggatgcgacagaaacagcttggcgcaaaaaaaaaaaaaaggtactgcatctgtatctatcaccaaagcacgcaccatctcttggaatccggctcgtcctcgtcgaactcgtcgccgccggcgttcccggcccgcggcgagcccacgccgacctcgtcatccccgaaggacgcggaggagttctcgggcgtcgcggcgggcgtgcccgacatcccgccgaacgagtgctcggacgcgtcgccgccctgcaggcatgcaagct

SEQ ID NO: 4843 - DNA, 532 bp, Zea mays
agggacgaggagagcaccccaaagcagtgcgatggcgagaaggacggtagtgggctgcttcatggctgaacgtacggccggccggccggtgctaatggtggttatacaggccaatgtgtgtgttacggttagctgtgtcatgtgtcggcatatatatataataaaggtcattgagcgagattcagttagctagaataatggctaagacctaataagatactgcactgttttgttgtccgccggccgctcacaacggttctttggtccgtgagatttcgtcaatcgaagcctggaacacgcaggattaaactacgattaacatgcatagctcaaatcttttaatgcgtgggagacacattggcttagaacatggcacgcatggtgagtaacatgccgccaaactctctgtcaccttgcagccgctagtgtacaaagtaagcatgcaggtggtcaatataatgtcgtttaaaattgtcggatcgagagacaacacaatttggagagcattgcatggggaaaaaaaattctaact

SEQ ID NO: 4844 - DNA, 447 bp, Zea mays
ggtggattttaggtttgcaaagaagttggaaggtcaaaggacatacacaatatgtgggatcgctgactctctggcaccagagattgttcttggtaggggtcatggatttcctgctgactggtaagtggttattgacccctttcgtttatatgcattccatatcactggatcaactatgtgtcttgagttcttatcaaagacaaagttgtggttaccgattatctttctaatgtgtccctaagaattttaaagcagtgtgcagtatttcctatcagtttcgtatgcgaacaatgaaaatgccatttttccttgtgacctctgtatatggaacaatactgtctatgcactgcatagcatttttacagatgcgcaaacattgaaatgctgtttacagacattgccatttccaaatctacctgacattctcagaacagactgaaacatgca

SEQ ID NO: 4845 - DNA, 556 bp, Zea mays
atggaaatacacgtatgccatttgattcaacctgaataaatatggacatgcctaagtgctcaattatgaagtttgatagactattattagtatttgcttcagaaggaatcacacgttaaaatggattaaatggattaattaatccatttaatgtagaaataaaaaacatgttaggtggtttgagcttgcaaaaggggaagtagctatgccggacagatgttctaactaccatgcatgtccttatagtttatgcacaacaccatacatttgtgacttcagtatttcttgtgtactgaatcatatactcatctgtccacagaatatgattatgagaatccgaagattgcactgcaatgcaaacataatttccaccttagctgcatttacgagtggatggaaaggagccaggcttgccctgtctgtgcaaaggtaccaaactttctccagaaaccatctcacttgagtaattaaatatcacttggtattatcaacatggttcttttgaacagtctgaaaacatttttaagaagcagatctctaacgtcatactgctcca

SEQ ID NO: 4846 - DNA, 471 bp, Zea mays
gttctgctcgcccgtggtcatcgccctctctccgccgtcgtctgcgcggccgttccagagcatggcgtgcgacgtcgccatctcgtgaggcagcacgacatgcatgcatggggcccgcgtgccactcggatcgaatcactagctagctagtgtctgtctttcgtggaggtgtgcagtgcagccagccatggtgcctcgctcttcaatttgtaggtcgcggtggtggtgacggctgctgcgtgctctctgctgcgcagccaccaaatcaagtcaggctagagcactcgatcgactggtcgtgtacgtcgacttgattgattgtttagacttcagacgtggcgacagcgaagaaggtggcagccgtgtacgtacgtacttcttgccgccgacagtaacagccggcgtcgtcgtcaacctcgagtgcaagcgcagggctaggctgtctgtggctggcttacgggccgccaccgt

SEQ ID NO: 4847 - DNA, 548 bp, Zea mays
aatagaagtggggtagcttcactcggccgcagcacctgcaagccacaaaaggagtatccagggataatatcataacagggatgggcaacaagggtaccattcttttaacaagcacgggagctgtgtattattatattaaaacaaagaggtttacaacccttaaaaacaccacccgcactgacaccattgcaaaagtatttttctgaatatttgtaacacgtggaccatgaaattgtacttgttaggaacattcagaagatggaggtattttttctgtgacaaacttctagagtttttgctctaattattctataatgacataaaaaaaaccacatgaaacatcaataaaatatgaagatattcaaagcaggaaactgaaatgtgataatcacatttcataccatgtccagcaatatatcatatcttcagtaatgcacatggcaaatgtctccattagtcaccactactgtctggctaaacctaatctgctgctattagtcacaggacatcccgaagggcgaggatattgttaaaatcacagtaatcct

SEQ ID NO: 4848 - DNA, 502 bp, Zea mays
gcggcgctcatggaggatcctggcggcaccgagcagcattgcggtgtgcgcgtcgtggccgcaggcgtgcatcttccgggcctccttgctcttgtgctcccactccacttcctcctgatccacagaaacttgccgagggttaattaacaacacacatgtgttgggaaacttacatatagtgtagtatattcaaagcttcaagatgttagcttgcttgactttgcactttacacgacgaaagaacactgaccccgtaccgtacgcatgagcatgacttgtgcagagtttgatttctatatcgctagtgccatcccccctctttctttttcgtctctagtgataggtttgcagcagcagttccaatggcactagcactgcaaagcgtaccgtagtactccctaggcgcctcggcctcaatcaaccaaaatttgctgtgggaaatgctagattgaaccgaacgccgcggcccgaaaacagcgggaagcgcgcacagcgtttcgta

SEQ ID NO: 4849 - DNA, 1177 bp, Zea mays
tggtgctggacttcgtgaacaacggcaccgtctccgggatcaccctgctgaacgccaagttcttccacatgaacgtgttccagtgcaaagacatgacgatcaaggacgtgaccatcaccgcgccggaggacagccccaacacagacggcatccacatcggcgactcctccgaggtcacaatctccggcaccaccatcggcacgggtgacgactgcatctccatcggccccggcagcagcgggatcaacatcaccggcgtcacctgcggccccggccacggcatcagcgtcggcagcctgggcaggtacaaggacgagaaggacgtgacggacgtcaacgtcaaggactgcacgctcaagaagaccagcaacggcgtccggatcaaggcctacgaggacgccgccagcgtgctcaccgcctccaagctccactacgagaacatagccatggaggacgtggccaaccccgtcatcatcgacatgaagtactgccccaacaagatctgcaccgccaagggcgatttcaaggtcaccgtcaaggacgtcaccttcaaaaacatcaccggcacctcgtccacccccgccgctgtcagcctgctctgctccgataagatcccctgcagattgtctgctcatttcttgttcgagatatgggtgttgattggcgaatgggagccgaatggttcgagacatgcttattggattatgacccagcttcgaattatggcaattggacatatggagcaggttagttgtctttagtatgaccaaaggaaataaattcaaaaaaaaattacaagtgtcgcttacatatccttgtagactggaactgaatgaaatgtttctggtgtactctgacaggagttggcaatgatccacgagaagatcgatacttcagtatcccaaaacaagtaagtagttgaccagactgaactcttacctgaaaaatcaatactgtaatgaactgaatcttaggatatattgccactgcaatattttttagataaatggtataaaatccagcctctatatccacttggaatatttgcagacaaaagttacatgagctcttaggctcaaagcctcaaaactgaggggcatatgaaattgtatgttctatgaatcaactggtcacttcaaacataccaagacgttaatttcgcagcatgttaatttgt

SEQ ID NO: 4850 - DNA, 511 bp, Zea mays
accagcaccagcggcggcggcggcggtaacaacgtcgtcagcggcggcctcctcagctactactagctagctagcttgctggtgtcgttgttgttgttttctttgaggtctgcgaacggagagattggtcggcacggcagtgcagctgtgccgcgcacttgagaatcagtgttctaacccaagctccagacctgatctaactattatgcaattcgtatttaaaaaaagagagtcatggatcatcatctaactatttattatccataatcgtgaggaatacgtacgcgacaaaactattgccagttagttttctttctttcttcaaaagctacttcagtgtccacggaaatgtggcggcagttttttacttgaagcgcgtcgcgacagagcacggccatctatgccgcgcaggcggggggcccctgtcgtggagccgtgtgtccatgtcggggagcgagaagggggcggctgaaccaacgcgaggtgatggccaaccacgccgtggatgtta

SEQ ID NO: 4851 - DNA, 562 bp, Zea mays
tccaccacttggcacaccccccctcggcagtccacctcactgactcaaataccgggtacagctcaccaaacacctgtgcccaaacaaattaaacagccagcagttcagtcgttggatcgattagtgcaacccagccagaacaagaacagcaacaagaacaccagatcaaaagcagctagtagcaacaagaacagctagcagagatcaaacttcaccgagaacagtgggcgccttttctctgcgggggtgcggcgcatcgcatcaaccaggaggtcgatgcatccgctcgcgatcagcttgaactccttctgcacggccttctcctcatcagaaagtgcgagcggcattggaatgtagcagctgagcaggttgtcagtcttctcggcgagaacacggtagaaatggtcgaactcctgcacaaacaaaacgtactccatcatgcaaacagacggtgtttccgtgatagaatatagaacaagtagaaatcaaaccaaacatacgatgtatctatacgagaaattaacgagacatacatcctcgcctggcatgcgggggtcagact

SEQ ID NO: 4852 - DNA, 582 bp, Zea mays
ttctggaggtacccctccgcgggcatgtgctccacctccttctccacgagcgccgcaacgcagtcatccgagagcaaggggaactccgtcaagaacccgtcgacggcaaccccggcggcggcggcggcgacgacggtgtcgcgtggcggcgtagctgcggccgcccaagaggactcctccccatcgtcgtccaggccgagaacagcagcgttgtcctccgcgcacagcagcacggaggcggcgcagtcatagccaggcaccatgcttgccacgccacctacttgccgaaaacggcacgaatgcagggactggagcagcgagcaatcaattcaccagcgaagctcctcctcccccttttccccttcttgcgagctgattgctatggagtctggatttgctactcctccccctccctcgctccctctcccctcttcctcttcttgatttattcagataatatacagatagaaaaaaggtacatgtttttttgcctattttttcctaattgtgttctttatcaagtggagaggggaggacagaggagcgagagagaggagggggaggaagacgccggcaaggcca

SEQ ID NO: 4853 - DNA, 540 bp, Zea mays
atttggtacggattacggcccccccgttctcgaactccttcctctacgtgctcccatggctcctcgtccttacagaaatccccgattaggccagtgatgaagcgacgggaaaatcgtttcttttttcttgatttctcgccaaatcttagttattaagctccctttcctcttttcttcttttgctatttatttccccatcaagaaagcactaccatacaagctaccctccagtgcttggcaactgttcatgtctccttcactgctcttcccttactgcaaatcctttgcgagagctgcatgatccgtgtaggcttccccttaatctgctccaaagactcgctcgctcgtccaccttcttgccccgggatgatatttcatgtgctctgtgctacttcgagagcagccccctccgcgtgtctcctctcctctctggcatccatacctcacttgctgcatctatcagcataaaatcatgccattggattcccaaagaacagctggtttggttggacatgaaataatatgtgccttgctttctct

SEQ ID NO: 4854 - DNA, 578 bp, Zea mays
aaatgagcgaggccttttgcaccagctacttcccatcttcttctttcctcatcagcagctctgagacttaaggacatacttgggttgcagccatcaaaaatgcatttatttcgatgattccataaagtccaagctcccaaaatgatgagagagttaaggcccttttttgtgagtccaagtactgctccccccaccacttcccaccatcccaggaaggagtttgcggtcggctgtggtgcgagtgaatgaagaccaaatttcctgagtaaaaggtaccagaattctcgtgagaaggaacattgcacaaggaggtggtctatagtttcttcctcttgatcacatagaagacacttgtctggatggtttaggcctcgctttgccaatctatcagctgtccagcatctcttatgggcaaccaaccaaaggaagaagcgacatttgggcaatgcccaagacttccagattcttttatagtgtccaaatgacacagatcccaggaacagaccttcatatgctgatttggctgagtatacaccattcggggcaatactgaagatatgcctgtcttcaacctccgg

SEQ ID NO: 4855 - DNA, 536 bp, Zea mays
tcttgcatgcctgcagaaaaatcttagacataaacttagagccaaacttatcgccatgacatcatttaattgtggacgtcaaacagaatattagattcaatatgcagagcaagtgacaaaccagatctaaatcctctttctcaattatttctatgtcagaaatttccccttcataacgtcgcctaatatatgcctcaacttccaactccatcttgtcctacaaaatttaaaatataccaaaatagaacaccaaaacacaaatactgcatgagaaaaggttcaagtttctccatgatcgaattttatgatgggaatattagaataaaacctcaagctctagctcaccttggtcgcagcataaaagtaaggccgaaacttgtatttcgctttaaacgtagacccatcctgcaagaaaccatacgaagttagacatagaagttcagacaggcctcatattgtaattgcaaaatttacctgtgatacaaagtataagtcaacacagctgtagatttttccggtgtcctcatcttcccatg

SEQ ID NO: 4856 - DNA, 473 bp, Zea mays
cgttacaaagtataaatgtataggaagcaagcatattgcacctttttcttggttggatctctgaaaaactctcttagataatcaccaagatatttacgaagcttaagagtgtcaacaataaagtcctctgttcttgttgaaatctgcatcaagcatgtcaaaccctgaaacgacctataatggttgtgttccaaatcgacctgaaatgatggaagggtcaaaatagtttaattaataaacagtgctcagtgcatcaaaataatttaattaagaaacagtgttcagtgcatagatgcatatcacacaaagaaataacttttagcacagcccaacatagagaaaataggaatgcatgtaatttccaagcattatgtttaacatatagggtaaaaatctcttgtagaaaatgtgatgcatcaataaatggagaaaagtcatccaatacattttgaatgataagacggtagaactaa

SEQ ID NO: 4857 - DNA, 541 bp, Zea mays
aattcagtatttgttttgcttactgtaaacatagcacattgtgattcattggcagcaccatgtgctgttagatgacattgtggataatgctgctccagtgagatgtttgttggtggcctcagctagaatccagtgatctagttagtacctctgaatgttgccaggcagcagcagtatctgttcggagcaatgacaaatctgctcaggtgtttttccactagtcatgctaactggttctgatgtgagaagatttataacaaaggtggtattccatctctcttttttggtgtgaaataaaccaacccaagaatttccattctgaataacagtaccaaaaaaatccgctaatatacgaccaaacagcgctaactaacaaacaaactaagatcatacaaacaaaacactgcctaacaatcactcttggcgttgttttccttcttccatttctgcgacctggtctcatgaaggatgtcacatttgcacggattaagatgtctcaggaaaagcaggcgatgcactggcatattggcgatgctagtca

SEQ ID NO: 4858 - DNA, 551 bp, Zea mays
aggccgccgaggcctacctggtgggcctcttcgaggacaccaacctctgtgccatccacgccaagcgcgtcaccatcatgcccaaggacatccagctcgcgcgccgcatccgcggcgagcgcgcctaggcggttcggttgcggcgcctgctcgctactgatggaggtgcttagtttagcacgtcatggttgtgttataggtgtgcgttgttgttttcaagaggtagcttcttgctatgtgctgatgttaacggtggattatgattagcagttctgaaaaaaatgtaatggatgtgatctgctctatctacatgttttctgtctttgtcctggaatcccatggtgtttagcattgatttcacatgtcttgtttttctctgaatcctgcttgtaatgacatcgacatctgttacacgatctgcttcaatttgtttttgcttggtttctcagcaagtcatatttttaactttttaggtacatactgttcacttaattactactaccagtaacaattataagacttgctccttgaagacaggcatttgctcgccg

SEQ ID NO: 4859 - DNA, 524 bp, Zea mays
ttttcttccgcgccacatgggctgttggttgcatctacagttcagaggccgcctttttttttttgctcttggcctctcggctcaggaacagaggtccgtccgtcagtcccaggcttggcaggcaggcgcctagcctgagccccccctagtagtcgttttaggaaagccatcatgtcatgtgcatgagactgagaggagaagaaaccaccgaccagggctgtatccatgtatgtatgtacaggcacaggcagggagagggatcgagagcatcttgttgcgaccagagagattcacccgcattgttgctttgccttgctactaataagtactcaccgccgtcaccggtaggtgtaaaacaacaaacaggtgagcagaacgacatgagaataatgaaccagacaacgaccaacctgtgtgtccactatccagtagtagtattcaccggctggctcagctgtcgaagaaagtaaactatgctggctgtagatcctgcggctgcggccgctttacccaacccaaccacc

SEQ ID NO: 4860 - DNA, 532 bp, Zea mays
catcttgcatgcctgcaggtgcacatatgtaaaaaaaactgtgaggttataacatcacaggtagtgcaaactcaccctatgttttgctaaccgatccagcagctgctgacaatggctgacgatcttccaacaatgtttgagctgaaggaagagaagaaaggctcattctggcagctcccttgtcttgctgatcttctatctccttaccgtctgaacctgttctccccctagaaggtatagaaaaactgcgggatatggatccaggcggtggagttggtaaaggtgaagcagtactgggaagcatttgtcttgccctaaaatggtcttgaactttgggtgtcagagatgcaggatttgctaccaatggggccgagtgggcaaccaaactgggaaatgttgtgttttttgatgtattaacaggcggtcgaggaagctcatgaagctccttgatcttcggtgaggaaatgggtggcggcgagttgccgggggatactctcatgtgcactggctgatgtgcagagctatgcctggg

SEQ ID NO: 4861 - DNA, 494 bp, Zea mays
agagcagcgcacaggcacacgccgcgagtggcgagacccaaaccagcagccatgcagatgcagctcagcgttccgccgcaggttgtcgtgtgtctcgcgttagcctttctgctcccgtgccacgccacggcgacggccccggccggcacgatacggcgcgtgaccaagcagcagatcctggcgagcatcccgccgcactgggacgagaaccccgtgctgttcctgacgtcgccgtcggggaagtacgcggcgtacttcatgcgcagccagaccgagccgggcgccggaggcctgggcgccgacttctgctacgtcgaggtgctcgacacgacggcgccgggcgccgagggccggagcgtgtgggagtcggagtgcatggccgtgagcaccgtgaacacgtgcgcgctcgtgttctcgtggaacggcctggaggtgttcgacgggagcacctcggtgtggcacacccacgacgcgcagtccgacgaccagaactt

SEQ ID NO: 4862 - DNA, 639 bp, Zea mays
gcatgcctgcagtgcaaataaaaaaggcatttctccacggcgccccggcgtttgcacgcatggcgagatggcgccatgaaaccggggagagacgctcgtggtcgcctccatttctcctcacttgccgctacctagcatcgcatcccctccacccaagctcgatcgatgaccaataaaagaagcttgagatcggctcctgcatggccggttgcgtgtcgctgggggaaatagaatagaaagaggctagatttgaggtcgctgcgttctcaccaccctctccacttctgaattgaagaacctacgatccgttccacaaccgggcagcggtttgttccgtgctgcaaattagatcgagaggccatcttcttcatctcagagtttcgccgtcggttggttcccggagccgcgccatttctcgatcgacccaattttgtttcaggtttcattgacgacgttgcagtgctcaggtttccgcatttcgatttcgacttttgaatcgctctgaaactgcttgcgtgcgggcgttcgtgtgtgtctgactatctgttcatgagttcatcgcttgttcagattcctctctctctctgggttctctggacatcacggtttctgacgtctcggcatccttgctgcatgcat

SEQ ID NO: 4863 - DNA, 792 bp, Zea mays
tgaaacacatggtcaggtcaaatgacaaacaagtccattctgattcagctcggccttgaacaagacagtagcacatcaaaaaaaaaagaaaaaagtccagcccaacaaccaaaggcaaacgaattgagtagaaaggagaaaccacagcagaatacaatgatatattcacaacccgaacatgcaagatgcaacaacacaaacacagtacctcaccctacatatagaaaggcacaggctcgtccaacctatacaaccactacagcactgcctccacaaaatgagggcgggccgcaaggttaaacctcaccgaccgaaggatttaccttcactacaagcaagtcatgtcagatgaaaacctactctttcccctcatctaggtatcgcagggtcatctgtgctatttgatcacaaaacgaataagaacacgggaacaaatacaatggaaatgaagcctatggacgaattccatgcctgcctgaagttagatgtatgctattggaggttgcgcgtcaatccacctcgtgatgcagttctgcagcctgcatcgtggccttcctcccctctaaattcttgatgccatgatcctccctgtcactcaggttggttacttaccactcatctcacctgcgtgttcggggacaaaaggctcggttggacggctccttttcgccgaggtgtcgggcagcagcttatgacagcaaccgagaaacatcgccatctgcccatctgcatggaggtgagaggtcattgttctgctaaactagtccaatatatatactccctccgtttctt

SEQ ID NO: 4864 - DNA, 465 bp, Zea mays
gaatgtgcaagaaatacacggcatcatatttcacagttcacaccgagcaacatttaatttctttttcctgttaacttacactaccgctgtcctgtattttcattgaattactgtcaagaacaaactgcaactctagcagtttgagatgtgaaaccacccgatctgtaaacatgttgacagaaacctagaacccaaaaccatgtttttaaaaaccaattaaatcaatatttactctgctcatttatgtgccattttatctggcgtctgcttggtggttgggccttcaatagtgatattttggccatagggacggtccctcctgcatgacagaatgctttccttagcttgacagttagtcggagatcgacgcgacctgattgacctcgaaaagccttctgctgctgtcggagggacgcatatcctgcggcgatgccgacatgaccttaataattgggaagccatgca

SEQ ID NO: 4865 - DNA, 518 bp, Zea mays
aggatgcacggtctccgtctgcttctgtgttgatgatgacaaagtttgctgacttgcctagggttgcgacatcagagaagaaggaatacccagtggatccatcccttccggacatcaagaacagcatctatgcttctgatgagttccgcatgtactcgttcaaggtccgcccttgctcacgggcatactctcatgactggactgagtgcccctttgtccacccaggagagaatgctcggcgccgagacccccgcaagtaccactacagttgtgtgccatgcccagatttcaggaagggtgtgtgccgtcgcggagacatgtgtgaatatgctcatggagtgtttgagtgctggctccatccagcacaataccggacacgcctatgcaaggatggcacaagttgcaatcgtcgcgtctgtttctttgcccacacaactgatgaactccgcccattgtatgtctccactggatcagcggtgccatccccaagagcttcagcaacagctgctatggagatg

SEQ ID NO: 4866 - DNA, 540 bp, Zea mays
acggtaagacggggctccgacaaacatcacggcatccaatcacgtgacatcacatcatatccaaattcatgcgggacacgcttgtggacgactgtgcatgagctgtagcatgccacgcaaactccagtaggatacgagagcaatgaatgggttttccatgtggcatgtgcgatgccatcacccttgatgcacgacggcacaccttctaccgactgctgggcctgggcctgggccccgctacgaatatactagttgtggcgagaagtcgctcacgcacgagcgccagctggttcggataaagcggggagccccgcgacacaagtaaacactgacgagtctgtatttatcagaacagtattttgagatttaaaaaaacgtagcaaaatttactgacacggtgggacctgccgcgcgaccgtggcagcggctatatataaggcggcggcctgtctagtaaagcgcgtgcccagtgtctgacaacgcgccccaaccccaaccccaacccagcggtcccagtcccccctccgttctctctgcact

SEQ ID NO: 4867 - DNA, 480 bp, Zea mays
agaaattgaaactaacacatctgtggttagtaggcagaagcccatgactgaactgaatcagtttctcgcaaactagtcaactagtactagttatagttatgcatcggatgagaactgggcatctcaccaaaagataagagcaagaaatgaagttcagtaatggtcatttatgtaacagtaatccaggcatccagcaatccttgttctgtcaaagtgctggtttaacttgaaccacaaagatttcagggccaagttgccttgattcgacatggcatataatggaaagaaaggcactgctgattgtttcaacatgagcagaaggtaatagcatcccttggtcacgattacagttcgttcgtgttaagtctgtactacggtactctggatgagctgttgagaaaatggtgtagcatccacaaccacaatcaagcagctggagatcacttcctcaggctttcgatgacgtatgagccatacagg

SEQ ID NO: 4868 - DNA, 543 bp, Zea mays
agcaaatcccttgccaaatttcctccttcccctgcaaatatttgggcctgtccttatccctgaagaagctatctagaaatcaggtgcagcccctacttgataaagtagcagatcaactacctggatggaaggcgaacttaatgaccaaggctggaagaagggtgcacgttcaatttgtaatgacagggatgcttatatatctggccatggctgatgacttgcctccaggagcacttaaagctattgataaaattaggaagggttttctttggcgtgggaggaaggatgttagagggggcaccgtttagtggcatggggaagagtttgtcgttcacttgagcttggagggctaggaatttttagcctaaaagtacttggctgggctttaagaatgagatggttgtggatggcaaaaactgatcctgaaaaaccctggaccttgctccctatgcagatcccagaaacaatgaagggtttcttttccattgttgtaaccactgaaattggaaatggcaactcaacccttttctgtacagaccgctg

SEQ ID NO: 4869 - DNA, 579 bp, Zea mays
ggtgaagccgcagatgtagtagtgggtgccggaggtgaggttgacggtggccgggccgttttggattgtgttggcggcgttggtggtggagcagccgtcgtatccgctcttgtccacctccaccacgtcgtggttcccggtggcgaagttgaacactgcatgcatgcatatggatgtaattgcatatatatatttacgtttcgtttgttcattcaattcatcatgcataagaaagagtagtaatactactacgcacctagctgatctccatccgtgaaggtcttgccactggcccagttgtcgtagttgacgctacgactccagccgctactgtcgccgacggtgaacgtggtcgccgaggccgccgcgacggagctcacaaggacgagcagcgtgatcagagcggaacgggacgccgccatgtgggtgggtgggtgggccggtgggtctgtgagctgcttgcttgatcgatcgaggctagcgtagcagtagcagcttaattagctttatcgatcgtggtggatgacgatgcacgacgatggcaggcaggctcccttagctttttatagagctagctac

SEQ ID NO: 4870 - DNA, 872 bp, Zea mays
gcgtgcctgcagagtgatgagcgatcgtactaagtaaatttccaaaaaaatctcgaacgcgtaggagagctgtggatcattatattaataagtgaaaaggaatagtccaaaatagactctgaatctcagatacaaggaaaccctcctaaggaggcctaaaacagagataccagcttcagttaattaaaaataataattttagggtctgacttctgaatggggcccaccatatctattcacattgatttacacaaacgtagtgactagtgagcaatcgtattatcgtgtccaaaaaaaattaatcgatgtcaataaaattttaacatgggaatgcaaagtttttagttaggggtgtttggcatgactctgctctacccaaagcaactctgaagtttttaggatttcggaacagcaaaggaggtactctaaaaattatactgcagaaaatggaacaagagaagctggagaagctcgcacgcaaggtatgcaaatacacaatatctctaaacattgaattgagcaacatccttttgtgttcaatccagtgttgtcataaaaggctgtgtagtccgtacatgccgtttaaacactacacactgactagctatgtccatttgattggctgtttatcccgtttatttgaccatgtagcctgaataaatgttaaatgataggcgcccatctgtttaccatttagcgttcttgtgaacattggctcaatgataatcttatgctatgttgatgctatgtattttacaaattctcttggaatcatgaatgttttactggtgtatatctttggttatatgtatgtttgctcttgttgagtaggagctatgtcttttttgttttgttgctggaggttatgaaaa

SEQ ID NO: 4871 - DNA, 523 bp, Zea mays
ccgccgccgccgccgccgccgccggggacgccgcggcgtcctccggccccggcggtggtggggccaagatcaccagggtcaagctgctgaagcccaaggacacgcttctccttggccaggtctaccgcctcatcaccgcgcaaggtttgttagcactcagctgtcctggccatgggcttaaggttaaggcccatggcgcggttcaatttactcgggcaatcttgaaattctcaacccgatcgtgctccgcgcgcagaggtgacgaaggcggtgcgggcgaggaagaacgagaagatgcagcggtgcgaggccatcaggcagcagcacgagcagctccggcgcggcgacggggctcaccggagctcttccagccaggtcggtatgcgattctctgacaccattttttctttttatttcctggtgcaagaagcagctactgattcttctcgccccacgctgtctgtggctttcaggacgggaagcaggacaaggaccggcaccggggaagaggccggcactggcg

SEQ ID NO: 4872 - DNA, 728 bp, Zea mays
  unsure (1)..(728): unsure at all n locations
gagagcggcgcgtcagccccattgttttgtttcagccaaaaaaaaatcctagattgatgtattactgacgagaactgcgttttactacctgacattgctgtgactctgtgtcaaatttgggattgcgcgcagtatcggagctcccgagatcgatcgaacaggagcttcttgcactcgctcgctggtcgctgctacagacaagccgttgtaaggtctaaatctaaagaggcagcggatggcgccgaagctgtgaatcctaggaactccagaaaggaatttcaacaaagaactgatggatagcaactgctcaacttacacgaagaagaaaaaaaacagtctttgtagcacggtccttggtaggacaaaggtacatccatgaaaacaaaagcataaaacggatgagatgcacgaaaacatacattttcccccctaatgaagcccgcgagatcccgattgtagggtaggcagagcagtggaggactaggttcctgccgtccgctgcagacattctttgagacggttattatctcttatatatgctccgcagaaataacttagaataaaattaatcacatgaaatatgctgacaaacaggcaaaattggataatctatgctatgaatctgcattggaatagttagcgacgattgggaaagtacactgcatgaatgccaacttttaaggttgggtgactcgccaccggacttgaaaaatangagtcgaaataaa

SEQ ID NO: 4873 - DNA, 494 bp, Zea mays
tgttgggttctcgacgcgaaatattgagatatggaagtctgggaatagccttgtcctgcctttttgttgcagtcagaaattggaaggtacgactttacacaactaacttgttgcacagctcttgcttcagctgatacattaatatgtatattgatggtgtttatttagctttttagacattgcattataatatttgtagaagaattatttggttgcttgcaagttccatctgggaaaacacaggaaactgaataataaaatgagcattgggcatttgttccagtttggtggtgtatctctcgagaatatagtatggctattgtcctcattcattgtctggttgcaccactagttttttttagtatttttttatgaagacaaccttgcaattcatagtggactaaactgattaatacagatacccgcataacaacataaaacttttattgtgcactaacgtagtaacgttacttataatgcacttgagaagggtt

SEQ ID NO: 4874 - DNA, 560 bp, Zea mays
aatccatgaggatgaaatcagttttggccatgcctggatcgaacttcccttcattatagcaaacacaacagaggtcaaaatctgcctgcataaataaaagaaaaaaacaattaccagtcgatagatttaaaacacaactcttcctgtttcttgaacaatgacagtaacaactaacaagaaaaagttgacatcacaaagatgaggtaagcactcagcagtacaggccacagaagtatttcggaaagatagtcacatcagattgatgtttatagatatcagaattcataagaatgcaggttacttgcacccaaattccatactcaatgatgtaatagttgttatttatgtagtacagactgtgcccaatcaatttgggaaaaggaagagaaaacaacactgaaaaaatatatgtatacaagaatccagtctgcctccaaataatacagtgtgtacctccacataccgtaacccgtgacacttatactgaatccaaagtgcagatacatacatgctacagtatacacaggctgatgaaatatacaagaaaatttcaggaggga

SEQ ID NO: 4875 - DNA, 540 bp, Zea mays
tatacagcaacgacctcctgtccagctcgtcggcgatggtcggcatcagcttcctctcccctccggatgttccagagctggttcacacacaaacaacatcctcagttataaatcagtacatgttcccatgtccgttaaattttgattccacagccgcatgcatcacagcgttgtgatcgtacgtgagggatgaatatatagtacctcgtgaggaactcggagatgggtttgcctgagaggatcggcgaggcatcgccgttggcaatgcggagtatgtccggctggaggccctcgtaggtgacgagcgggaccacacggcggaaggcttcgacggcatcggcggatcctcccgggacgccgtagcggcgcagatactcggctggcgcgttctgcgacagtatctccgcgaggacgcgccgctgcaccttcccggcgttcgccgtgacatgctcgatgaactcgagtgcctcgcggtgcgccccgggggcgaagccgccggctggcgggtttatcttggtagtcggtgcttccggcatggca

SEQ ID NO: 4876 - DNA, 518 bp, Zea mays
cgtaccatgccatacctgaagttcagcatgtttgagaaaaataaaagacaacagcctcattatttcagttcgaggcaggaactattagtgtaaccattaattacttggttactaactagtcagctaagctttgtgcgtgccatattatataagttttttttggttggtgattgcagacctatttacagtcagcttctgtgcgtatcgaagaaatgagagtgaaaaggcgtgatacagagcagtggatggcacataggctactccctgagaatctaaaggatcggattatgcgccacgaacaatataggtggcaagaaacaagaggggttgacgaagagggccttcttaaaaatcttccaaaggatcttagaagagagataaagagacatctttgtttgtcacttctcatgaaggtgcttccctgaacctctatctgatttgtcttctccttgctcatcttgtggtggatgtctgattggttatggatgcagtaacaacactctcaagataatatttat

SEQ ID NO: 4877 - DNA, 450 bp, Zea mays
ttgttattggatcagaagaccttgctgctaaccatgacgtgatgcaaattgttgaagtattggatgatagaacaagggattcaagattacttgccttgcttgacaaataccatcaagcacaaaggtagatatcagttagattccactttatgctgtatttaagattcatttccttaaggcactgattcctgctgtcacactggaagctaagcatcggggcaggcaatagactaatgctcaagcaaatacatatatgaaacttgattatatgtttttttggaagcatgaaattcggttataaatggtgaaattggcggtctgctagaaactcatcattcgcagtaggattagaactaattcacaagtgtgaattatgaaaatatcatgtcaatctatagttgcagaaaacatccaggtaactttggatgtggcacaaatgtatgagcacaa

SEQ ID NO: 4878 - DNA, 473 bp, Zea mays
gcttcccgccccatgggctcctcgaacgtgccctccgactcgtagtaggcgcaggacgagtacccaaggacgcggtgcgcgaggaagacgagccacggctgcttctgcctgtcgacggacgacaggcaccgctcgatgaacctgtactgctcggtcccgggcctccagtcctcctccgtgtgagcgacgcagaacctgaacatgccgtagtccgttgcgtacctgaagaagaagaaggaaggaaggatcagtgttcactgctgtgctcagtcagtagcaaagttaagacatggcagtctggagaaagaaactgctatggccttacgtaactgagccactacatttaccagaactttgcgcggttctcagccggagtgtagaacacggtttgggcagggacgccgcattctccgccggagtcgaggttgccgtagaatgaaccggtgccaggccaatccctctcgtggttacca

SEQ ID NO: 4879 - DNA, 462 bp, Zea mays
gagacttatgtgaattttgtattttccacaaaactacatttaaattcttcaaattcatccattagaatggctagatactgcttataggcattaagtaagttgtaaattgaacggagtttcagagttcagggttgataattggttcttttccaaagcaatttgctttaaagtcacaacatttctttaccacttatttcaaatattgtttgcaggaacatttgctgatagtctgtgaacttctgaaggcaaatctgtatgagtttcagaaattcaacagagaatcagggggtgaggtttacttcacaatgccaagactccaggtattagttttaccgagttatgatgtccattaatattgacttaatgtttcacagccaataatggaatatgagactacaatttttcacatagattgaatattttttctttgttgtacccttggcagtcaatagctattcagtg

SEQ ID NO: 4880 - DNA, 717 bp, Zea mays
agcttgcatgcctgcagaggaagaggacagaataggataggatagatagcccctgttcttctagcctgctagtctgctacactccacgtctctacctctacggctctaccgcacattttgctacgctccagctccatctccatcgactatcgaatgcttgctggacgccggggccgggcaatggatccgggcagcgcggagatcgttttcgactgcgatttcttccggatatacagcgacggtcgcgtcgagcgtttcgccggcatggaaaccgtgcccgcgggcttcgacgccgacaccggcgtcacctcaaaagacgtggtcgtcgacgccgccaccggcatcgcgacgcggctctacctgccagccatccctacggccccgtcatctccccagtcggacggcaacggcaacggcaacggcagcgccacggcgaagcttcccatcctcgtcatcttccacggcggcggcttcgtcatcggctcaccggctgatcctggtttccaccgctacatgaactcgctggtcgctagcgcccgcgtcgtcgctgtctccgtcggctaccgcctcgcgcccgaaaacccgctccctgcagccgcagtgtagcttagaggagcacgtcggcgacgagactttgaggtgagcacatcagcgacttgattgcatttcctgctaattaaactggaaataaaaaaacagtctcttcgcttgtttgca

SEQ ID NO: 4881 - DNA, 721 bp, Zea mays
actccggcaagagacggtacccttcctcgaaggaccctcggacggcggccatgatccgctccttgcctctccaggcttgcttgtaggacagcgtgatcccgtgggccttgtggatctcttccaggatttccttgggcttgcactgcgggttctcgcgtagcctctcctcgacggtggttgcgacccactggacagacgcctgctggtggccgagatggctgatccccacgcagctgtgggtgtcgtggatggttctgatggagaaggtgggcacgccggcgagcttcgctgcgtgtatgcgccacgggcagccctcggcggcgcacttggcggtgaaccgggtcttgtcggacttgaccgtctgtatctcgaagtggcaggcgatggcggtgctgcggatggccctgcggcagctcatcacatcggggaactcctgccccactgcgagctggaactcggggctcacgaccatggtccgcgactggacgacaggagcgaccgcgagaggaccctgggagaagtcgtgtggctgcagtagctgcggaatcttctactggtacatggacaactgtttggactgatggacttaccagtcttgatcgttacaaaggacgatgctatcacatcgagcccgttcctggggacccagatcaatatatctgttatgtagcttatccattagaccctattgaagagggttctgttactaacatgtttactt

SEQ ID NO: 4882 - DNA, 477 bp, Zea mays
gcatgatgtaaattcgttcacagtccaaactacgccggcggcgtcggtcatcatcatctaaaccaaaccacggtcgagaaacatacagcgaacacagcagccatgcacgcatccgtcgtcctctacacaccaacgaccatattcaccacagtccgcagcagagaacagagacacgtccctacgtcctcgtgctagctctagctgtgctagctagctagcaccggtcgtcttcggccagctgcctgaagttcatcggcgcggcgaagtggagcgagccgttgtagatggcggcggcggcgatcttggaggcggcgtgcgtggggtgcagcaggtcccagaacaggtactggtgtcggttgtcgcacagcgtcgcgttgggcgtgcacccggacttgccgttgaaccggcccgacccgcagcacgcgttcgtcacgtccttgaaccctgcaccgtaaccccggccagctaagttattat

SEQ ID NO: 4883 - DNA, 513 bp, Zea mays
ttatagcatcgtgcttgagatatgatccaaaatcccgtccagagattgctgatgtttggaaatgtattagaggcttgttgacaaaatttggtgatgttactttagctcctgatgatgatgttgcagctcagaagagttttagatgtttactccttggggagttatcctccatgtttgttgattctggtgctgttgagtcagatgataaaacacaactgtctcgaggagctgatggcaacagttcggatcaggatcatggaagtaatgatggtttcttaaacaatagcggaaatgatttgtcaggaatcgatggtccacagtctgtcggagtgtttaaatcatcaacactgcttgcccaccgtgattgtgtaacaggattagctgttggaggtaaaaatccaacactgctaatagatatatctaaaacatttgctattttgtttgtcattttcttgtgttcagagggttttgtaatgctggctcaagaactgcctattttcattctttctttca

SEQ ID NO: 4884 - DNA, 1077 bp, Zea mays
actttaggatcaccacccaaagcagtgaaccatggctagactcgaggcaaggaggagagcttcactgaacctgcacctaaggcactgcagatgtaggaaagtgttcactgaaccactacacaactcagtggggaagtcttctggggatgccagcactgcatggctaacacacatggctcccatgcacaaaccttgctggcacagcacacaactcacaaatatcactaaaacactgaatctggtctatttgatatggataaggagcaagcagtcaaaactgcacctacaaacagacacattccagctcaccttgagacttattaatggggagcgagacttctagtcctcaatgatgcacttcatccatatcccatactcagctcaccagtatcccatatcgcagacaacaaacaaaaccaacaaatactctactgcccactgctcactgctaaaatatcccacctattcactggatatggacagaggtaaaggcagataaaaaaaaaccccacggtagacaggctcaaacacatccaaaggtttgatattttctgcaggtagtgtggagctggtcagccggatccagcggtattgtgggcgcaaagaacaaattcagttttcttttataaatattgggcactgttggagtatttacattttatctaggaattaaagacttaaagttttgaggagatcccaattcttatgtattgggacaaatatttttgggatctttaggagatgctcttagagatagatatgtattaggaaaagagaaagttgtattgggagaaaagtgcattgggaagcaagaaggtcaagtatttgggacaaaatttgagtgctataacatcaactattttggaacggagggagtatatgatttcttcataatgtttgtcgtatgtgagaagatggcctaataagactagactgtcagaatatctttttagccattcaatttcttttatgtaggtattaattctctactttctgtagagtctaacacttttcatgttgcaggactatccctcaagtctcaggatttaactgcattatttctagctgttagactgt

SEQ ID NO: 4885 - DNA, 495 bp, Zea mays
accattagacttttaccttatttgtattgcattcacatacacattattatgtttcatcaagttatgaaagatattgcaattgtgtacagggccttgaagatattgagcccagatgttgatccagtgcctcccgatgttctcgttgaattcaacttgcctaatctctttgatgtaagcagtaccttgaattatattatactttaattattcttcttgcaccagcaatagtaggaacctttctttattgaactacagtacgaatgtagatatgaatgtttgctgtgctgaccgctttaactgaatgaccatactaggcattttctgcaacgctattttaactaatgcaagccatgtgtcctttttatcaatatctagttttttttaccatttagtaaaattttgttgtctcttctcttttgttaagttttatgtctaacctgccccagcttgcttgggaatgaggagttttgttgctgcttctgttactgtagcaaa

SEQ ID NO: 4886 - DNA, 490 bp, Zea mays
tctcctacctcggcctcgtcgggaccatctctccggccatcggcaacctcacgtacctcgagctcctcgacctcaaccggaaccagccctccgggagcataccgtccagcatcggccggctgcggcgcctcacgtacctcggcctttgcgacaacggcggcgtcggcggggagataccggacagcctccgcaactgcaccggcctcaccgtcgtgtacctcaacaacaactccttcgtcggcggcatccctacctggcttgggacgtttcaaaacctcagctatctctatctcagccaaaactccttgtccggcgagatcccgccgtcgctcggcaacctcacaaagctccagatcctcacgctagaccagaaccttctggaaggaccgatcccagagggcctttcacgtctctcttccatgcaggtctttgacgtccaccagaacagcttgcgcggggagatcccgcctggtttcttcaacctgtcgtc

SEQ ID NO: 4887 - DNA, 542 bp, Zea mays
tgcatgcctgcagacatccacggtaaatagatgaaaaaaatacatttctttttttatataaaaaagcttcaagtccaaaaaaagggaaaacgatttctaaaaaaatggaagagctaggcaaactcatgtcggtgctggagattgaaaagaagagcttgtcggtgctgtggtgacgactgacgttgggccctgatatctatctaaagttcttctatataagagggctgctgccagtggtctgttccatcgaagcaaatacaagcagagagttttttttggagaggcgtgtaagcataggcagaagatacacagtagcctcttgttgaacacggggatggcaaggcagagtgcagcctccatgttggctactacgacgccgttgcttctcagcgtcttggccaacatcggtattctcgtttacttacagcattaaatgttttcagggtaatatttgtacttgtagctagagagacgaaaacagtttttttttttgtgaaatataaacgtttcacaataacttatgtgttaaaaaaatgtgattg

SEQ ID NO: 4888 - DNA, 558 bp, Zea mays
gacaaactgccggctgcggcttcaggggagctagtggaaggaagaaggcctggtctggttcctccggcggcgcgtcgcctgtggtggtgatctgtcacgcaacgcaagcaacagactgtttaagagtatacgcacgctcagtttggattggattggacagaaagcacgcggacgctcggtgcagcaggttggttgatctgcatctaagcaattccatcaacagactgttcgtcgtgccttgcctagctagctagccagctcctgaacctacagtgctggcgacccagtcaatcagtagagtatactcgcaacgcagccgcggacacgaatggccagggcgcgcgcaccacgtagtaatgtagtgcatcaccgtttgcgaaacgcacagtcccgcgcctgcgatcacccacctcaccacctgtgattctgcccgtgcgaccggcccgtaacgctagctctatcgctgtgcctgtgcggcgaatagggagagacttgtcactgttgtccacttggaagtgtgcaggcgcctctactatgcagcgctggccaacagtttca

SEQ ID NO: 4889 - DNA, 569 bp, Zea mays
ttgtccagctccaagaataccgtagttccgtagttttataatggtgtttggatacaacattgtaaccatggtatttaggcaaaagctagccatgccatgaaaactgagttggaatggagttctaaatactccaaaaataccatggtgtctagaatactgtggttttgaaatactccatttaaagataaatggtaattttggaaacaggcagtcagcctctgtaataattccccaccagcgtatttaggatcatttaagttggacatatgaaaatgtgcttgtttgatttctgaagtactaaatattgtaacattaatatttctacaaatactatagtagaaataagtttctgaagttgttgtttgaaaataccaactatattataatattaaaaaaacaaaaaatgacttcaaaaagtaatacacaatcaaggagtccaattaacaactgaattccaatataacatttacctgagaagaggaagctaatgcttgtggatgtacattaggctccaccagtccatatagctgggcctcattggttgtatgaatattaggatctttatgacc

SEQ ID NO: 4890 - DNA, 476 bp, Zea mays
attttttccagcaatttgtaaacacttgtttccttgttataacttgtcagatatgtcctgcttccaaggactattgttctgtcctgaagccgcttcactgctgcttcataatttttgtatttaccatatcagccccccagggcatgaggttagttgtttgtaatttactattataagtaaaacacgtgtttgtccctaatgttattaaacttttgtagttctatggcctcactagtgttttttccatttatatgggaaccatgcagttaggagctgctccaatttcaccgaatgctcctataccgtctgttgacgatttggcagatcaggttgtggatgtcctcgatttctttgggtaaatcctccacgaaatcatctcataaatctgaaaaaatatcaaatgattggagtaatcttatgttgtctggtttaatttgctccttccagattaggctctgttatgtgctttggtgtca

SEQ ID NO: 4891 - DNA, 579 bp, Zea mays
gtgaatagattgcctcgtctggcacaaaccaccagaagacggataggaaagtctgctccaaacagacttcaagatcccaggaggttgctgatttcgaagacgggaccagacagaggctctttctggggcgacaccgccaagacgtgaccacactgtctgcttggaaacagctgtggaaaactgagcacgatctggagcctccgagcagcgagatgccttatgtccaagcccacagcacttgaagcatcttgtccttgaacgacagtcacggaccaggtgatttggggagaagcagttgaagcacctgccggagagattggtaggtgcagtgcgctggaaattggcagccttcaggcgcagccgccgggaacgccgggactcaacagtcttccaaccatcagcagcgccggcgtccttcacagtgccccccacgaccgacggctgaagagccgcagcccggagctccctacaccgcgacgcccgtggctcagacctgggaatccagctggccggagaagagggccgggagcgcaggaccacgtcgcggaaggaagggccagcaggggcgctcccagcgga

SEQ ID NO: 4892 - DNA, 493 bp, Zea mays
atcatttctgagtggaaatagctgcacctttgaaatggtcctatttttgtctttggtatttaatctggtttgccagaccatcatcataatactgtgaccatgtttataactctttgatcgcttttttttttttaaaaaaaagcggggtgttactctttgatcatgaatacatgagtgtgcatccctggcacgtccaggtgcaaggacatgcctaatcaagaacccatctggcggaacgttcatcaagctttgcactgaattatgtggaacctatcatcgagggcatctcccctttctggggaggagagaccattgtttttggcaattttcaaagctcctcgagagttcagtagcgctgtagcaacaatatagagaactcctgactgactcctgagcccgaccgttcctttgcaggcgcttcaagggcccatatccttccaacgatgaccaggggctcaaggagcaggacgaggagaacgacaactgggagctc

SEQ ID NO: 4893 - DNA, 527 bp, Zea mays
actcatgcactacaagtcttaaatctacatgaagtgctccaccaaccaacccacactgctcctaaatcgtgctcttgcaatgcatgcagctactagcttctcaacatacttggcttattccctgatgattcatagtagcacaaactaacaagctaactctaggtgcatgtgactaacacatccatgcattgatgcacaagctaaccctggccagaacatgaacacagaacgtttccggccacttgctcatgcactaaaaggtgcactttctgttggagttcttgcggaattcttaaatcttcgggacatccttttttcaagtcatttgcagcctgagtcagaagataaacacatatggcggcttgctgcttcctctgatgacactgcaaagtcagcatatgaagtttcttcaaaggagccattttattcagttcatggagcctatttggagaacctggctcctaacaaatattgttttttcatgtggttgaccatgcacgataagtgctggactgcaggcatgcaaa

SEQ ID NO: 4894 - DNA, 494 bp, Zea mays
tgcaccgcggcacctacgcggtggtggtgagcacggagaacatcacccagaactggtacttcgggaaccgcaagtcgatgctgatccccaactgcctgttccgcgtgggcggcgcggcggtgctgctgtccaaccgcggcgcggaccggcggcgcgccaagtacgtcctgaggcacgtggtgcgcacgcacaagggcgcggacgacagggccttcaactgcgtgtaccaggagcaggacggcgagggaaagaccggcgtgtcgctgtccaaggacctgatggccatcgcgggcggcgcgctcaagaccaacatcacgacgctgggcccgctggtgctgcccgtgagcgagcagctgctcttcttcgcgacgctggtggccaagaagctgctggtgagcgccaagacgaagccctacatcccggacttcaagctggcgttcgagcacttctgcatccacgcgggcgggcgcgccgtgatcgacgagctggagaag

SEQ ID NO: 4895 - DNA, 1066 bp, Zea mays
aaacaaagtatgtttatggataaggtgcatacatgatcaaaatcaagctttagaatggaagtttagctgacctccagtaaggatggcaatatcatccaagtactgagtcttgcgctctccaaaaccaggggctttgatggcagcgatcttcagtgatcctctgagcttgttgacgacaagggtagcaagagcctcctgctcaatatcctctgcaattatcaggattgggtatgcacctctgatggattcttccaaaacgttgataagatcccttgcattggtgattttcttatcaaccaaaagcagctgaacaatgaagatgaaagacaatagcattaatagtctgaaacaggaaagcaactgctgtttgcctaggaactgtcttacccccacggccccaccccctgataggtcagagtttttttcttttgaaacaggaaagcaataaacagcaaaaaaaatagaattgatatctcagattttacagttaccttgcagttctcgtactctgcagcgcaagcataaaccatgacggcggcgtacgcacctgccgccagaccagccggtgttgacgagccaccctgtggcgccgtacttctgcatcttctcggcgagcatggcggcgtacttggtcgggtggagcatgatgaaggccgcgccgaagcaggcggagaaggtggcctgtggctccttgatgccgtcctccgtgccggcgaccagggcggtgtatccgctgatgaagtggtacatggtctgcgccaggtccagcttgctcaccggcgggagcacgccgaaggcgtcgcacgccagcaggatcacgttcttggggtgtgggccgacgcatggtatcttggcgttggggatgtactcgatcgggtaggcagcccgagtgttctctgcgatgcaagaatggtttttttttttgttttggtgatgcctgtgtgtgactcgaaaaaattagagtctgttgtgtacggagaccatgacatttattacttaccggtgacagatttgtcggcgtagtcaacttcacgagtatgctcatcgaagacaacgttctccagca

SEQ ID NO: 4896 - DNA, 545 bp, Zea mays
aacatgcatgcatgaactcaccctgccttccatgtaccaatggcatagatgtgataggacagatgcatgacttgtgacaaggaacagaagatgattctagcacatgcatggttgcagttggatagcctcctacaacaaggctttaatattctcaactgcatatatactgtgcacaagtgtcgcttgtgtgctaggcttgccgatgcttcgtttggaggacatgtctgtctgtctgtctgtctgtcacttactgtagttggggcatcgtgatgaacgctcacctctaacaagcatgacagcgagatgcatccatgcagctaggtacccggccggctacctccaaatcttattattccttgacctttgcatcggagcaagcagtagcacacacctgctgttcagttgccgtactctgaatgaccatgcatcccaaaatgccaagtcagagatccttttagaggcgattttaatttccatgtaaattcattcaaaacactgttttgtattatagaaagaagtttgaaatggtaaatagggatgagtaa

SEQ ID NO: 4897 - DNA, 622 bp, Zea mays
tgcactgggagcagctcgccgacgacatcgagtccgggtcgctgaccccgcgcgtggccgacccgtccgtccgggacgccgtcgcgcgcgtgctccgcggggacccggagctggcgcgcttcgtccgcgccgagtgctcccgcggcgactgggcgggcatcgtcacccgcgtgtggcccaacacccggtacctggacgtgatcgtcaccggcgcgatgcagcagtacatccccaccctggagtactacagcggcggcctccccatggcgtgcacaatgtacgcctcctccgagtgctacttcgggctgaacctccggcccatgtgccgcccgtcggaggtgtgctacaccatcatgcccaacatgggctacttcgagttcctccccgtggacgaggcgagcggcgtggcccccggcgacgcggcgcagctggtggacctggcccgcgtggaggccgggcgcgagtacgagctggtgatcaccacgtacgcggggctgtaccggtaccgcgtcggcgacatcctgcgcgtggccggcttccacaacgcggcgccgcagttccggttcgtgccccgcaagaacgtgctgctgtccatcgagtccgacaagaccgacgaggcgga

SEQ ID NO: 4898 - DNA, 539 bp, Zea mays
ataagtaaaggcacgtgcgtgcgtgtttattactagttgggtgggtactgtacaccagcagggcagacgatgcaagcatatatatatataccatgacgcggaccctcttcttgcacaggtacagcgcgatggccctgccgagcttggacgtggcgcccgtcaggaacacctccgccgtgcccttggggatctcgttcaggatcaccgccgccgtcagcgtgttgccgtggacgacgcgcacgcgcaggtcagggtgcttgttcacgaacaacgtgccgccgccgttgagcgcctcgttctgcacaaagtaagccggccggccacgacgatgtcttagactggctagctgcatgcaggcggctccagctccagctccagaccatgaggagctgaggccttcatgcatagattagtaaatatgtatatactaccttgttcagggctgcaaggctgaggaccttgacgcccatcttgtcggccctgaggatggccagttcgatctgtctgttgatgccgtccttggcaaacggcaagaagta

SEQ ID NO: 4899 - DNA, 498 bp, Zea mays
tgcgccggcgatccggcgaggccagcaataatgcagcggcgagcattattgccgggagatcgaccagtgattgtttgtggactcgtagtgggggagcgactcggctccatcgccccgcctttctttcttttttataaagcctgacaaccaaacatggcaggccgtgcccgtgcatgatctatctatctatccagctcccccagcatccatccctcttctctattttttccccccttcgagaattgatgcacgcaacatgccgtcggttcgtggtcggcaggcaggtacggcccagaaggggtactacgactacgagcgcgcccatgttcgcgtttgcttgctcggcaatctctcctgtgtctcgcagtgtacaaccagcgttacgtcattcggttcgcgtctggtctgtcgtcttcgcccgactcggtcgcttgttcaggaacaagtcgtctgtggctctggatgatgcctgcgaggttgggacgacgccgtcattga

SEQ ID NO: 4900 - DNA, 521 bp, Zea mays
tggtctggtggaagatggctggcactactttaggtccatgaagaggctctttggcattcaacctgagagagagcaccacaactgcatggtcgatctccttggccgagctgggaagctcgatgaatccgtggaattcatccatggtatgagcctcgaaccagattcagtcatctggagaacgctcctaggagcttgcaggatgcataaaaacgccagtcttgcagcatacgcagccagagaaatacttaaactggagcctgacgaccaaggcgctcgtgtgctgttgtcgaatacatatgcggatctgcggcagtggacagatgctgagaagccatggaaagcgatgagggaccgaggcatgaggaaagagccagggcgaagctggatcgagctggagaaacgtgtccatgtgttcatcgctggggatctatcacacccatgctccgacaccataattcaggagctgaaccggttgatcggaaggatcaagtctcttggttatgttccgcagacagaatttg

SEQ ID NO: 4901 - DNA, 569 bp, Zea mays
tatctctttgtacgctgtgacaatgaaccagctccttggaccaggttggacaaaacacttcatgtcatcactgtcactactagattagttcttgaccttagagaaaaaaaatgtgtgagtcttcctgctgacatctttgctctgttttttagcgatgatcatggtgaccgtccgagacccttgccaaagataaaggagctacaaggtgcaactgatataacagagaggaaagggcgtccttcatgggattatgatgtatgtacatctgttttcttttttcagtgttactgtactgtgttatggaatatggatgagttgtattcactgtgataggagaaagatggctggaaatggatggtgcctccgccagtcagcaagaggcctgttctctctggtgatcctgagaccgacaagctaatccggaaagcaacaaagcgtgctcatttatctgttgctgaaaggctgcttaaaggttcttgctcttctgatttgatctgttacttacttagtttccttttatggtgttgctgtaaaaagcatggtcttaggatttgtttgtgtttcctgat

SEQ ID NO: 4902 - DNA, 500 bp, Zea mays
aagggccgctcctatggttgatatgcactcaaaaaattacatgaatcagctacactcagtgaggtcgatcgagcagattaggaaacgcttcacacccagcaaatggttacagcttttattacctgtaccacagtctccggtgagaaaacatgaggccgtgtgatgttagtgaccaccaacgtggcgaggcaaactggtctacaattgtgtcgggctctgcttttggttacgttgtagcatatgagtttgcaggctgcaatttttgacctgttttttttttcccaaacacatagtcaacaccgagctaaatacagttcaattatggagattgggtaagaatgatcgtaggagatgtccatacatgtattgctgcaaccgtggacaagagatcctttgattggtccaacaacatttgttcttgtgttgcaactttggcaagctcagacaccacagagcttgttccctcgacctgaagatgaataacgtatcattagatattt

SEQ ID NO: 4903 - DNA, 581 bp, Zea mays
tgagtttctttttctcggtttccttctctagttttctgagtcagctctgttctctgactagacatgtgagtttattgatttctcgtagttcacagtttctcctgcaaatttttgtttacggaatgtttcagagttcaggactacaattgacattcttgtttcatggaattttgttggttaaacatgaaattcatgaatcagttttgttttcaccatacacttttttagttcattccgaggtgtgagcttcgtattaatctgcaagcttggatgcgatctactactctttattttcctagctctcatagaaagaataaagttgctaaaaccaacagttttgacttctgattggcctcttcaagcccactgactagtttgtcgctcaggtagataccagcatctcttttccatatctgaaggcctgaattccaaacaagagagctcgaaacaacagtaatgggttgcttccctgtgttctggaggaagaagaattccagaagccagattgtgcaacatgaccaaggtaaagttttccttccaatcgatacatagctgttcttctgaagcatctcagaacctta

SEQ ID NO: 4904 - DNA, 477 bp, Zea mays
atcagacggaagggaaaaacttgttgaggttgaagggcagcgagtagaactcctcgctgcggctgtccgtcttgaagctccggaacttgtcccaccagtggtagcccctgtccctcctcacgccgctgtcacgcacctggatcgtgttgtccagtaagaaggccaccagcacagccacgaacggcttcgacgagaagggcacgttgatcatgtcgttgaactgccgacatccaaagccaatgatgagtgaacagccgttacaagtctcatttgcagtgcagaagaatgacatgcagagctagctccaattcacgtacccatcgggcgccggtgtgcacggggccatagccagccacggacgtgtactcgttgaagtattggggtactgacaggcccatgaacaaggagaaccccatgatgaacttggtcctgaagctgttcaggttgcagaactgaaggaagctcaggccacaagca

SEQ ID NO: 4905 - DNA, 446 bp, Zea mays
aggcctatagtcccagtagatttatacagatcaatacgtgattcacaacttattggcctgtcaggatacacaaaggaggtatagctgtttacttccaataataaaatctgttggttgaaccattaccctatatggattgattatgagccagtcatttgtgtgtttgaactagacatgcctttttactgttggtattctaaggctaccatattctggacttaatgcgtctatctccttgttgaaattcttaatacagagtactttgattttcagttttcaataggaaagttaatatgccgaatgaagatcgcactgaagaggttaaagtgttaacttatattgattgtcaaacttccacggaatgatgtcctactaactgcaacatgggttattaaggtctgtagtttcaaagtatgacatggcgtcataattacttgaactgtgat

SEQ ID NO: 4906 - DNA, 535 bp, Zea mays
ctgtctacagagagggctttctttttgtccttgcaagacagtgactacctttatttgatcttgttccaagattactttttccttatcatgccaagtgctttaacaacttttcctcccttcttttccctctgcatgtgcagcttttttttttaatttatctatcttttacctaatcaaacgtaatatggttccagttcatccttcattttcgcaattgtatgattgctcgttagcttgcataacaacacgtcacgtctactgctatatatattctgcatttctgcacaagtttaacataatcaggatgaccgtatgtagagctatatcaaatttctgggcattagctagagaggttctcattcttttctttaatataaaaaacagagagacttttgttcccctcatgatcagtgaaaagaatagaatcaaatcaggactgatattaatttattaaacctactgatttattataacttttgcgtcacgcgtttctctgttgttggtttcagtttcagtcccagagagcagaatcagc

SEQ ID NO: 4907 - DNA, 571 bp, Zea mays
cactgaactaaggaaatgaaaccagaactgtatggcaaaaacacatttgaccagcaaatgattcatggtttcagcctcttggtcgcacagggggcactgctcaggtcggtctagtcctctttttataagcctgtcagcagtccagcatctattatgttccacaagccatataaagaacttgcacttgccaggagcccaagatttccacacacgttctgctggttcgaactggaccgaaccaaggaaaagagctttataagcagaactagttgtatactcccctgaagcgctgaatttccataagtggcgatcccttattccaggttggagctcaactgcatcaagcacttcacagagttccaagaattcagcaatgactctaactgaaattgccccattcacatcggagatccactgaaaattagggagcacatctttgaccaactgtctgttggcaagacgcgggggcaccaaatcaaacactgcaggagctatgtctttaatacatttcccatccaaccatctatccttccagaaaagagtattggctccatcaccgagcttagtaata

SEQ ID NO: 4908 - DNA, 533 bp, Zea mays
ttctccaacgaagtgaagaacgcgctcagccgattgcttcggcgcccgagagcagcgccaggcttggtcctggtgccgccgccgtccaagagcgacacgacgggcttccacgacgcgtccatgtagccattgatgtatgcttccatgcgctgctctcggacgcgaacccaccccggcggcagcaacagcttgagctcggagcgcatcgcgcggcacacgatggcgaacgtgttgttgagcatgaacacctgtctcagccccggaaacgctagagcggcagacttctcctccagcacggtctccaggcacgatatgagctccgccaccaggccgaggccgccggctggagcgcgcggcggcggtgcttcgctgtcgctgtcgtcgtcgccgccgccgaggatgaagtagagggagatgcggttgcgcagcagacagcgaaagtagcccatccagaagccgacgcacgggtgcacctcgccaccctgtggcatccgccatgggtagtgcgaccttatgaaagacgacctgaggtc

SEQ ID NO: 4909 - DNA, 553 bp, Zea mays
gaggcagcagaagccacagctgatcgtggagcgtgctggctagcgacatcgtcatccacagctgatggtagccccctccatcactgttgccagtagcaggatgaggcggctggtcggcgcttccgacgccatcgccgccaactctgccggtgctttgcccagacgccggcggcgaaacgaggggagtgacatcagagccgtgcaacctgcgcgagcagacagacaagggggaaaaaaatgaatcctcaacttctgccagtcgagtcagcgagtggcacatcaggcatgcatgcgatgccatcgcggagcagattttgaccgcatcgaaacatgcacgtttcggtcggtggtgatacgtgcggggtgcggccggcgatcgagattacccggacgacggagggaggcagaaggcgatggtgtagccggcggcgctgtggcaggtgaaggtgctggagccgtcgtcgtaggcgtagctgtacgcgcgcgggcacgccgacttgaagatggacgagtaggccgtcgggcggcacgccgccggcgtcgcgtacgcgcc

SEQ ID NO: 4910 - DNA, 476 bp, Zea mays
agcagccttcgcttcgctttcctcgcagcgtgaccgactgaccgcgaagccgccgtgaaccctcctcatccccgtcccccttgctccagcttcgccgggctcctctctcccacttgcgccaacatccaagccccgaccccaattcacacccgaggcgctcgcccctttccatctccatcgcccacgcccacgcccgcgcgtctcgtgtccacgcctcgccgcgacttctcccccctaaaccccgcgagaggccgaggtacatgagagagtgatcggcctcgccttcgcgcccacgctcgcgccgagagtgtgatgggcaacacgtgcggcgtcacgcttagatccaagtacttcgccagcttccgcggcagcgcgtcgcagcgccgtgacgcgccggggtactcacctgtcgccacctccgcggccgccgatgagcccgcgccgcatgggaacgggaagcgagccacgcgtccgtc

SEQ ID NO: 4911 - DNA, 565 bp, Zea mays
ggcgagcagtgcctgtgcggctgtgccacgacgccaacggctcacaagtcaccacgatgattccacctgctcggcgacgtcggcgtagcacctgaaagccatgtcccaatcccattccccagccgcaacaattagcactttagcagaaaagttcttttctcctttaattttctgtccttttttttgttagattatataattaagaacatgaatatgagaaatatatatcgaagtatatgagactctacatatagatcgtgggcataaatataacaatttagaattagataggttctcgtcggctattacgtagtccagcaaatatattgaacatgaacagagctattaaacttgaacctagctccatcaccccatgttttccaatcgtccaaacactgggcctgcaccagagaaaggttctcgcccagcactttgaaagccgctggcgcttcctttgtcgctgacgctgaccatggcgatgcgcgtggaggggtaacggtcgtttcctgccgccttgtgacttgtcatcaaactaaagcacacacatgcggtgcagccgtgcgcc

SEQ ID NO: 4912 - DNA, 534 bp, Zea mays
tgacatgacagtgagctagctagtgtgagtagaagcaagcagcaagatgggagaaatggcgcatgcttgctctgcccctcgcccgtctcccgctcaccatttgtgtgtgcgcatcctactagcgtacctgcttgcggcgcggtggctcgtgccatcctgctcggcggcttctttcttccgcttcccttggcccgccgagcggcacgactaccgtgacgcgctggccaagtccatcctcttcttcgagggccagaggtcggggcggctgccgcctggccagcgcgcgtcgtggcgcggggactccggcgtgtcggacggcgccgcggccggggtcgacctggagggcgggtactacgacgccggcgacaacgtcaagttcggcttccccatggcgttcaccaccaccatgctggcctggagcgtcatcgagttcggcgactccatgccgcgcgacgagcgccgccacgccgccgccgccgtccgctgggccaccgactacctcctcaagacgctcgcccaccccggcgtcatctt

SEQ ID NO: 4913 - DNA, 1013 bp, Zea mays
acatactgcttcatttactggaaaacatgatgtaaatattagtcatgtgataaaaagggcaacaattgacaaatggagtgcgcaatattctgggaaagccttttatagggaaaggccatcaacttgcttaagtttagaaaagcaagcatgtccttggacataattagtttggagccttcatgcaacagttagattttatgatgacaaaaatactggtggtgtttcttttttagacgtcggcagtgatctagccttgctgacaaatctgaaaaaagatctgagcgttttagtttgcttggccgaccgagaaaaaaagttcagtcagatttttattcaatcgtatcgtcttgtatactttctctaggaaggacaaagattaagcaataatagtcccaaggattttatgagcaaggtctgaactgtttctattagagagacaattcaacatatcctagtttcttgtgtgttctctagacaggtctgggctgcagacaaaagcaaggtgacgatatgtagcaaagaacacaactagtatcacgtttgcgcctgatctgatgactgttaatccattacagaataaaatggacgtattggtataacattgtcttcatggtattttatcatctataaattaaaaacacacagtagaataccaaaggagaaccaatgctcatgttactaagattataatatgcataatatattacttattttcagatcagagggaagggagggggaggaacctgatatagctcctgttcacagaacaataaaggaagcaaagcatcggcagcataacctgctaactccgatctgcaaaaatagcatgccatcttaaaagtttttacataaaattagagctactaaatgattggcaaattatgccaaataaaatttacttagcttaagattcacatcagtcaaaaccaaattactaatacgcagagctcacctgaaatcttcaaaaagaagtatttgcaacagaagtctcaagaagtgacttgatatgcttt

SEQ ID NO: 4914 - DNA, 540 bp, Zea mays
caaaaactggcagctactagccgctactgacaaacagaattcacatggctagctggccaaggacccgctactaaaagcaacgactcatcacttgggtccaagaattcgaggttttgtttgccagtactgatccaagcgctgccttgcatactccttgtacgcgaagtcgatattttcgttcacgtgcgcctgatgacacggtagagaaaacaaagaaaccaaagatagatttgtatttattcacaaaaacgagacatgcacatttgactctagtgtcggtggctcaccgagattattccccacaggccccagaagagatggctcgcaagagtgtactttgctatcaaccctagcagttcttcaacttccccatccgttggctttttacctgatgaacatatatagaatacatttcttgaaaacagagaattctcacaacatatccatgtggtgcgagtgagcgtcttttttaaatttaaaatagtccacattagcacagcatcaccgtgcagcatcctcgaaatccttgcattgtgatta

SEQ ID NO: 4915 - DNA, 1065 bp, Zea mays
attaattgaacaaattcatacgaaaccaaataaccaaaaacagagtctatatactactagtactatactcccacgatgttctattttggatataaattggacgcagacatcattcttagatcctatttcttctcgtagtcttcttaaaacacaaacaaatatccatacgatggctcagtatatccagcatgagggctggatcaaacagactttcattaaatactcctattcgaacactgagctgactctactcttcctaattactggatttcagaaattaattaacaaaccacttgtcatcaatgagcaagtcaactgctactctgctagtagatagcaaggcaaacagtacctgggagcagtgcagctcaccgggtggcacaacgcgcgtcgactcgagcagcgccctcatagtgtgcatcccgatcccgccggtgggtacgtagtcgttgaggaaccctgcgtccaccaggggcgccggcatacccgccgccggcccctccacctgcagtagctgcggaatcttctactggtacatggacaactgtttggactgatggacttaccagtcttgatcgttacaaaggacgatgctatcacatcgagcccgttcctggggacccagatcaatatatctgttatgtagcttatccattagacctatttgaagagggttctgttactaacatgtttacttccattgtgggtaacgtatttggtttcaaagccttacgcgctctacgtttggaggatctacgaattccccctgcttattcaaaaactttccaaggtccgcctcacggtatccaagttgaaagggataagttgaacaagtacggtcgtcctttattgggatgtactattaaaccaaaattgggattatccgcaaaaaattacggtagagcgtgttatgagtgtctacgcggtggacttgattttaccaaagatgatgaaaacgtaaactcacaaccatttatgcgctggagagaccgttttgtcttttgtgccgaagcaatttataaagcacaagccgaaactggtgaaatcaaggggcattacttgaat

SEQ ID NO: 4916 - DNA, 543 bp, Zea mays
ttaagctcgtcatagatgccatcatgatacaaaaaggacttacgaacaagaaggatatgctgagaaacaggcataaagagttgcatcattcacttcagaacttaaatcaccaacaaaaatatggaaatgccctggaaataattcaattggcacggttaaccaaacaaggattataatatgaaaagaaagagacaacaagaatatattttttaaaaaaatatctcacctgacgtatcctccctctgcgtacttgcatatgcccagttcaccttgattgcttgtccatatctgtttaagaattttgataataaataacaccagaatttaatctcttaaattcatgttgttcaaagtattataacagctgaacttacacgtgacggccatgaagggtcatgattgctagagcagcagatcttcgatcatagtagtccacaaacccaaaggaagactgcaggcagggcgagacaactatagctaggagcctcttttgcttctgcccagctccccgaaaacaacgttcgacttgcatgtgttaagcat

SEQ ID NO: 4917 - DNA, 505 bp, Zea mays
tgacctggccccaggcatgcgtggcggcactctggcaagaagtcttcaggaacttatactgagatttacgcaaagcagatgacgacgacggtgtcactgaatcagatgatggcagctgctcttctggccatgttgctttcccccttggtgccaactccgcagagaatgcattgctaagagtgaaattgccggatggcagccggcacgagctatcagctttaggtgagtcttcagcactgcggcatgacacagactcttgcgagttgtggagctcctcagagacctcttgccgtgaaagggggatgttgcaagcaagagaaatagaactccttgcaggcaaggcgttccatggtattgcaacggacacgtcattgcagaagaagtgctcatatgaccatacggttttcacacggctcgtgactggggcaagttggtttgcataattccacatatagatactagagtcgtcgctagcagcaataatgtgatctccatctggtgtaaa

SEQ ID NO: 4918 - DNA, 560 bp, Zea mays
tctggctagctgttttttttactttgtccagcgtttactgcattcctttcctggtaaattgtctacatggttgttactactttcatttgtaaccccttttgataaagagttacatttgatttcacgcaaaatgatctctttatctttttatatagcaatattaaccatgttagtcacgcgaaactcaagagtggtctcgatttgtgtttttaactggaaattagaggacggtgtaaagcctctaggtcgcgactgatggcacacggcactcgcagcgccattaacaaatcaagccacgttcattcccgaatggagggcctttgttgactccctccctctgttgaattcggaacaacctgactggatagtactgtatgacctctcgtttcatcaagctaatccatggtgtaattaattttgtaggaaaaaattaagtgcaggcgtgctgaattgctaattacttactgtgtaatcgttaatgattatcctggggatcttttcggctgatctgccagtttagaatgacactgctattctatgctgacggcggaggcgtcaag

SEQ ID NO: 4919 - DNA, 470 bp, Zea mays
agtttcaggtgctagtggtactagttggacagatgaggaaacattacttctattagaaggtttggaaatttttggtggaaaatgggctgagattgctgaacatgttgctactaagacaaaagcacaatgcatgttgcactttcttcaaatgcaaattgaagaccgcttccatgatggcaaagatattaatcaaaacatcccagtaagtacagatcaagccacaactgagaaagccattgctgaaacatctgagaaaatggaagttgaagataaagtggaaggaagaggtactgtggatgaaaaggcctcagagaaaacagagggaaactgtgaagaaacaaaaactgaaaatgccagtgttgttgtaaataaagatactcagaattcagatggcagagattcaggtgcatctccaagcactgaagagccaaagcaatcttctgatgagcaacctgtagtaaaggaaaatt

SEQ ID NO: 4920 - DNA, 434 bp, Zea mays
tgacatgacggacttgatgttgtggatggtctgctgtcattttcagcattagtcatgcctgttgatatggcattagaggcagacctgcttctgggagaaacccctcgtaaagcagctgatgaggaagatggtctacaatttttgtcagcaaattctgtgtccaatacagcattgataccatcagaggccagccgtcttcttggtgacatccctcgtgatgacattgacggtgttgaaggtctgatacttttttcagtaatatttgtgctctttgatataaatgctagaccatcagaggtgagccgtcttcttggtgaagcccctcgtgttgcagctgacactgttaagggtttgttactgttttcaacaagatcaatgctctttgatgtcactttgacaccatctgaggcgagccgtcttcttggtgaaacccc

SEQ ID NO: 4921 - DNA, 946 bp, Zea mays
gctgcttaataatttcataactttaaaattatgacagcagtggtaacaaacaaaaactccagagtcatctacataaaattccacacaagttttgtatacaatttataattaaattccaatatctaattagcccaaaacagtccacaagatgaaccctgtaatctgtttttctttgtcttttggacagcgacatacccggattcaaacagcgatatcttttaaaatataattccaaatcaagcgcataagtactcattggaaagataagacaaatccctacatgattaccatactcgttaacactaattacccacgaaaaattcccagaaactgctaataccactgctgttcacccacctgaaaaatctgtttttttggacagcaacataaccggattcaaacaacgatatctcctgaattataactccgaattgagcgcataagtacttgttggaaagataacataaggacataatgagatattgaggaaaaaatataaagaaaccgttttagactcccaaaactcttcgagggcaaggaaaaccaggacccaactacctacctcaataaaagctgctagctattctgggtgtgagtttatgaatttcattaaatgcaacataacatgacagactaaaaaattgtgtgataaacaatcaaatgagaatggcctcctaactggcaaaaggttgaaattaacaaagaatcgcaagctcaaaaaacaaaatacgagccagcagtatgcagaaacaaataccgaaaagaagaattaccgtatcacttaaggtttgccagtagccgcgataacatggaaccgaccgactatcacgaggtccaaaaaaaataaccaccacaaaagtaccagcccaccacaaataaagtttaagcggacacaccgcaccgaccgacgacgataactcgcggcagcgactgggccagccagcaa

SEQ ID NO: 4922 - DNA, 572 bp, Zea mays
cgacctgcagagaaaatttatctaataagcagaatctctataaaaccaaacacggccatagaagcgtctgcccatgtcaggacatcggtcaccagtggagtggaccgatccacgccggtcaccagtcgtcctcgtcagctcagctcgaaaaacaccagccgacggagtggccgccgactgagagggagaaggacccaggtcggccgcgggcccgatggacctagaggaccaagaagcgcagaagcctctcctggtcaccgcgcccgggagaatcggtgatggcagtcacttagctgagtccgacgctgccccgtcctcctcttcgattgcggtggtggtcgccagcaccgcagtcgccgtcgccggatccttcgagttcggcatctcggtaaccactaaccaaggccttccgctgtagtttctgctacatcgtgcattaaatttcgtgcctccgtggagttggagtagatagataaccaaaactagctagaagacaactaaacaagaactggtggtgtttttcccgggcaaattgtcagcacttgcttgccggggcaagctaatttcgagtt

SEQ ID NO: 4923 - DNA, 1000 bp, Zea mays
tggaagcagatcgcagagcctgtgatgaagacctataccgagactacggacgggtcgactattgaggacaaggagactgccatcgtgtggtgctacgaggacgccgatccagatttcggatcctgccaggccaaggagctccacgaccatctggagagcgtgcttgcaaacgagccggtctcagtgaaagctggacccaacctcgtcgaggtgaagccacaggtagtataaaaagcctgcctgccgctgctcacaacagcaactgctactgttgattcagttagcgacgtgtctgtctgtctgtctgtcgtgctaaggaaaatgctggcccctccccccggtttcgcagggcgtaagcaagggcctggtggcgaagcggatcctgtcgacgacgcaggagcggggcgacgccgacgacgacctgccggacttcgtgctgtgcgtgggcgacgaccggtccgacgaggacatgttcgaggtgatagccgcggcggcggccgcgaggggcgtgtcctccctgcagctgtttacaccgctcaaatgagcaaataatttcacgagcagctttctcagtgaagctgagccgtttttataccttgtttggcaaaacagtttctccatggtagacaaacaggagaaagtttccctaatgcccttagttcccttctctattttgttccgtcatccccccctccccccagtggctgtgctcccgcgtccctgttggccctcgccctgtctagccacatctcaagctggccgcgtcccagtaggttgcgcctccggcggacgtgctcctggcatccagcgcctcaaacccacattgtccatgctcccacatcaccgtcggcatttgtcctggcaggctgcgctcccacgtccccagcggcacttgcaatggctggctgcacgagagactcaagagtccccatgcccgtggctactcagcaagcggacatgctgccgcggcggcgctcgctgtcctggggacggcctcggt

SEQ ID NO: 4924 - DNA, 1048 bp, Zea mays
ctctgatggtgtgaaggcgtgggacctattaaaggaaaaatctttcaacgtagaccttgttttaactgaagttgaactgcctttgatgtctgggttcctcttgttatccacgatcatggagcatgatgcgtccaagaacatccctgttataagtatgtcactcttgtcgtgttttcgctctctttttaatctaatgccaccactaagtctaatggtttttcttgtcatccagtgatgtcttcgcatgactcagtaagcatggttttcaaatgcatgctaaagggtgcagcagatttccttgttaaaccgataagaaagaatgaattaaggaacttgtggcagcacgtttggagaaaacaactggtaagatggcatatttgtatcttttaggcatgaatgcatttctttttatgctttatccatttttacttcgatttggtacctgtgatgagacatgagtttttgctcaatttatcttaccttacctgcagacgactccgatagtcccagtagacgactgagcacagccacgtgatcacgccatggacgccgctgtcgcgccgctcctcgcagtcgccgtccttctcttcctgggcctccggcggcgcgggggccaccgcaaccactgcccctacccgaaccccgtgctcggcaacgtggtgcccctggtccgcaacctgcaccgcttcctcgactgggccacccgccaccgaccagctcacggccgccccgtcctccaccatagaggtgcgcggcgcgctcggcctcggccgcggcgtcgccacggcggacccgggcgtcgtcaaccacatgctgcgggcgaggtttcccaactacgttaagggcgcgcgcttcgcggggcccttcggcgacctcctcggcagcggcatcttcctcgcggacggccgcctgtggagcctccagcgcaagctcgcgtcctactccttctcgtcccgctcgctgcgccgcttttcggggcgcgtcctccggggccacctgcaccgccggctccttcctcttctcgcgagtgcggctgactccggcgagg

SEQ ID NO: 4925 - DNA, 522 bp, Zea mays
gaaggtatgaactcctattcccctctgcggtcgtgttttatgtgcactgatccaagatggattagttccctgttatcttctaaagtaatctcggagttctaagtatacacagttagatccctaatttctatcagatatatgttgctctgtttatctttatacactttcctccttgatagcctcttttcgggcaaaccatgtgaagcaacttggcttttattcagtcttgtagcatcaacttttgatgttcacactttttggtcatgcagtttctctttctacctggttgattacccgcaccattccatcctgaatcatcgcgtgcgttgacttttctgtacacgaggaacgattactgcatgagtggatgcaaaataagtcgttttgaggccatccacctgcatctgtatatacgccagatatggtcgtacctggccggccaggctcgcgtgggactggctgtgcgggcgcagtaaaccaatcaggcactttgtgttcggggtcacttggctaatgtagcta

SEQ ID NO: 4926 - DNA, 576 bp, Zea mays
tttttagttctcgggatagtgataaagctactactttcttgatagaagttttctcccacgtcctcctcctaatattctctgctctgctccgtgcgtgagccgtgagccgtgagcttcccgaaagaaagaacatgaaaaaaatgctttactttcccagtaagtaaactctatcaaatgcctgaagcaaaccacgggcactctgaagtctgaagccggagctagcaaggagtgcaaccgggcagcgcatcgcaggaatcagatctgaacgggaggccaggcttcggagagggaaaaagctagctgatgatgcctttggaggaacacgagtgtttggtcgtgtcgtgtgccagggctcatccggccgaagcactggaactccgggaggaagagctgtaatacctccgtcctccgggaataaagtcggcattattgtatcgtgaaggctgagaaagaatggctgggaatatcggaaagcaggaaatactctgcctctgcttgcatgcttgctgctgaagttgcttgccccctcgccaaacagctgcggtctgcagtcgcattcaagtaatgccccttgat

SEQ ID NO: 4927 - DNA, 551 bp, Zea mays
tgcagaatagatgggattagctgaggtagttatgctaccataaccgactccctaactaccaggcccgcgtatgagcgccggcgatcgatgcataaacgcgcgccgagcattcgatcgagcgacaccgcaacgctcgaactgaagactgcattctgcaaacagcaacacgacaagcaggagcagcagctaaagcagcagatatggatcgatcgatggggctgatgacaacgatcaggctgctggcggcggccgcgctgctggtgctggcgtcggggcagcagcagccgccggcggcggcctcgtgcacggcgtcgctgctcaccagcttcaccccgtgcttcagcttcctgaccagcagcaacggcagcagcgggtctccgccgacgcgggagtgctgccggtcgctggcggcgctggtggacgccggcaccggctgcgcgtgcctcgtgctcacgggcgccgtgccgctcggagtgcccgtcaaccggacgctcgccgtgtcgctgcccagggcctgcgactccatgtccgtcccgctgcaggcatgcaag

SEQ ID NO: 4928 - DNA, 518 bp, Zea mays
atctttgttatcggcgtgaagacggacctggggatgatcgtcaagtccgggaagaaggccgtggccatcgccttcttcggcgccatcgggccgcacatggccatgtacgccgccgccgccgcgctcggggcgcgcgtgccggcgccgtggaaggccaacttcatgctcaccaacctcaacgtgtggtggtcgctctcggccttcatcgtcgtctgctccacgctgggcgacctcaacctcctctcctccaagctggggcgcctcgctatgtccgcggcgctcatcggcgacttcgccaacaccatctttgtcgcgggcatcacgtcctacctcctcgcgtccagccccttggagagggtccagcggatcggcttcctgtcgctcgtcatcttcgccatcttcataggcttcctgacctacgtggcgcgcccggccatcctgcgcctcatgcgcgacgtccccgagggaggcctcctctccgaggcgcgcctcgtcgccgtgctgctcatcaccatcgt

SEQ ID NO: 4929 - DNA, 571 bp, Zea mays
tatctcgttatgcacccgaggatgtcaacactgatgctaaaaggcagtacaggttcatgaggggtttggtggatcccctgcattaccagctgatgaatcacaccttccccaccttccagcacctgatcgatagggcagttatgactgagaagaagcgtaaggatatggaagatcggaagcgcaagatgagtggaccccagtccggaagcatcagccgtccacgtttctcaggcagttcgtctcagcaaggcaggcctggtcacccacagggatatcagaatcagaatcagcgtccgcatcagcagcagtttcagaggcagtacccgcagcagcagcagcagcagcagtatcgtcagcacagccagcagggaggtaatcagtatcagaagcagaacaaccagacacctcgccttcctgccccagcagcaaatcagagcaaccaagcagccccagcacaaggaggaggcagaggatgcttccactgtggagaacaaggacactgggcgatgcagtgcccaaagaagatggctcagcagcagaccaaccccaatgctccaacaaggcaaggtgt

SEQ ID NO: 4930 - DNA, 523 bp, Zea mays
accaaggccagagcggcgagagggtggccctggcggcggcggcggcggcggcggccggagccgacgcgaggcagctcaccctggaggagatgctgtacccgccgccgagctgggagacggcggcggaggctgcgacgccgtcgcggcgcagctccccgaaggtgtgcccggtgaacctggccgacttcttctcggacgaggagggagcggactccgggaccgggagcggcggcggctactccgcgccgggcgtcaacgagagcgcgtccgtgtccgtcgtcagccgggcgtcgctccggggcctgcacagcgtgtcccggagggtgagcttcaggtcccccgacgagtccgacgtgttcatcatcccggcgagaggccactccgacgacgacgatgagtggagcagtgacggtgagccaagcaggacgtgacgtgaacaaaccaaggagagagagagagttcatgccagtggcaggttctgcaatatgatgagtggaggaccggacgtgagtacgtgacacgt

SEQ ID NO: 4931 - DNA, 473 bp, Zea mays
attctgttattagtcctcagacatctgacaatgtctccttgaccatgtcggaagttggtgctgaagaatccagggagcagtctccattggctgatgacctaaatggctccgaatttggctactcgtttggagcatctcatgatgaccctgagcagactgtctacaatcctcggagacggatccttgaagcaagcccctatgaagcaatgataatgaatgtggagatgaaactaccacatggtgagtcagaagtgcctgctgatgatacaccatcaccagcgaccttagcagctggatcaagtgagccagaggccactattaatgagttagcgacaactacagctgatcctgagattactgttctagatgcaaaatctctggaggatattgagactgcctttaggttggttagtgatggtgtggtgtctgaggccaccatgggtactgaaactttgcagatctcaggtgctgat

SEQ ID NO: 4932 - DNA, 445 bp, Zea mays
cttctggaggtcacgaatacctcgctcaagcctggtgcctttgggtttaatacatgaacctgccctaccaacaactgggtgctgaaacaatggaaaatgttgaaatgtatttaagactctcgtgtgccacaatgaaacccttaccattgtttgtgtagaataggccgcactagccataaccaagccaggatattcacttgttcaatgcttctctttgtgatatattctatttgatggatcttgattttccccacttacctttctttgttggaaaccaagttgtgctgaagtgcctttatccctgtcagctggataagcataatcaaatgcctcactggtttttgacttatgtgcataggaaacaggtggtggtgcagccttttgcttttccaagtctcttagctccaaaggagcatctgagacatccttaataaccttagcgcgt

SEQ ID NO: 4933 - DNA, 516 bp, Zea mays
aatctaaactgcattgttgttgctaaaaaagaagcaaatccagatgaacaaacactgttttaccatggcctgttttcgtcacggagtccaggaatatgagccgtacacttgcgatggctctgttgacatcaacggcgacccagcgtcgaaaaagcacactgggaaatggagagcctgctactcgattcttggtggtgagttctgcgtctctttggcgtactacggtgtggggacgaacctggtgagctacctaaccaaggcgcggaagcagagcaatgtcgctgcggcgagcaacgtcgcctcatggcagggaacctgctacctgactcccctactcggcgcattcctggcggattcgtattggggaaggcaacggacgatcgtcatttccctcgccatctttaccatggttgttagctcagctccactccactctaggcagccgccgcaggccttcactttctttgtcaaattaatctgcacccgacccgcatgttcagttccactttcttttgt

SEQ ID NO: 4934 - DNA, 502 bp, Zea mays
acgtggaggcgcagcggcagttgcgcccggacctctccgactggtacgcctccctcgccgacctctaccagcggaagctatggcaccagctcaccctcaagctcgacgaattcttacagctccaggtcgcacaggttcgcttccttttcctcctctatctctcccaccgccttcctcatcttagggttagttaatgctttacagatggggatgcctgacagatggattacagacgccttcgttcataaggcggatctcgccgcaaacccaccccgcctcctagacttcccatgttttagtaagatttacgagttttgactggataattgttgccagcctaatcattttgagttacttatgtgggggaaaatgcatacaagtctccagtattcagtcaattctttgttgctcatggttctcaattcaattctgatgtactgtgagtttcaccagcctgtgtcttggacacatgaaactttatgcatgttattcgagtaccctt

SEQ ID NO: 4935 - DNA, 493 bp, Zea mays
agttgctccccaacctgatgtgagaactttctctgcctggtggtattgggcagccagcagtttgccaaaggagaagaggaaagggtttaattccataatcatccttgtggcctgaatggctggactctttggaagcatgggaatgtgtgtgtttacgggtcttaatactagtgtccccttagtctgccaagaagttggtaacgagagcgagctctgttgtcttgccgataacacggcactcaaggagctgctcggtggagagcgaaggctaggcgcctaagtttgtcctgtagggtcgttggtttgtccttgcgcgtggcgcgcttgtactctagagtgatggtgtggtgaggggcatacctcatgcctcccctcatgtgttgtactgttatctttctttcttaatgaaatgtcatgcagccctcctgcgccgttcgagaaaaaaaaagtagaagtactacaaaagtttatactttacagctgcaagacagtt

SEQ ID NO: 4936 - DNA, 552 bp, Zea mays
agacgacagcacgacggcggccggcgcggtgccgcctcccgccgcaatctcggcgttcgccttcgccttgagcttccgcacgctctccgcggggaagtcgaagaagcactcccgcaccggcgggtactcgggctgccggacgatgtcctccagcttgcgcagcggcagagcgatggggaccgggcaggtgtcgaggaaccacctgtctagcaccggccgcggcgtggagagctccgcctcgcgcccctcgccgccggcccggctgatctccgaccaggtgttgaacaggtgccagaacgtggtcccgtcgcccacggcgtggttcagcgacatggcgacgaagacgccgtcggcgagctcggtgacctgcgccgatagcaggggggcgcgggagtcgtcgtccagggcggcgtccgtgcccagcagcccgttcagcgggaagagcgaccagaccagcgcgctggggacgtagtaatggcctgcgggcggcgtgatgatgtcgctgacggtgacatccggcgcctcggcgtggacgaactcggcgccctcgcc

SEQ ID NO: 4937 - DNA, 572 bp, Zea mays
taagttatatcttctgtatgtgtaactgctaatgtattttactgctatcacagcttctctacaggaagtacagtggaaacttccttgttaaccttcttgggaagtggaaggagtctgaatactctggccattctattcctgttggtggtcttgcttactatgtaactgccccatcaaggtgaaaagctagttccttcattggggactggggaggccttctcgccatgatcatttttgttgtttttgttattcaataattaggtattcttttgactaacaatagcacattggaaaccacgcagtttggctgatgtccttgcaaatccattccatgcactgttttatgtggtcttcatgctgtcagcctgtgctctgttctcaaagacatggattgaagtttccggttcatcagcaaaggatgttgctaagcagctcaaggtacggacaaatatacacatctttttatgtaaaattttggtcctgtttggcattggcataaagctgctggctgtaccagcagctacagtactctgttaggacgccaacagctttacactgcaggtcgactctag

SEQ ID NO: 4938 - DNA, 508 bp, Zea mays
aggaatagttttctttttaaaattctttgtcatatctttgcagtttgtataggctaattacagtttagtccactcagactgtagcaaggagcatatatgtttagcatagagggtatttgactgcccattgcccaaggagtagattcggctcttgggcatggtctgtatcatcctgacattctgttggatggagctgcaattgtaccaccggcatctctcttgacaccgaaacgcctgatgcgttggaaacatttatatctgattgattggtttaacttcgtggaatccctattttcgaagatcacgaaacgacagagctactgtacgattaatcatcatagcacttggttcctcttattccccgccacgtcggatgattatcagagcttcatctgactccccgccaccaccagcatgagcatgcccagtacctacgtgagtgtgtgtcacggtctactagactactagtctacagctttccttccggcgcccaacaaactccggtcgt

SEQ ID NO: 4939 - DNA, 905 bp, Zea mays
acaacggtgggctctgggagctgccagacgtctccgagcctttgccgccatgctcgccttgccccttgctgctccacagcttgtcgaagatcctcctggaccgcgactgcggcaggaggcccccgagctggtctttgaagctgttcctgccgccgcccctgtgctcgctgtcgctggtccggtggtgctggcggctctccctcgcgctcaggctcgtcacctgcttatctagtgactctggatgcttcggtatccgcctttcgcagggttcgcactgatcctgcgtaggccgtgtgcaagcgtgttctccgttgtcaaccagggcgagttctttgcccgagccggccctcagctgctggaagaagaggacctgaaccaccaaccggagaggcaggcggtcgttttgcgtggcgtgcatggacgcgtccgtgctgagcttcttcacatccaccagactgcagtaaactggagaagttcagggcagttaggtgcagactgaaaacagcagaaatatttcccttcattagtttttctaggaagttctagggtgtaatatgctaaagaagatctgtgttaaaggtgggttcgtttgctataattacatgacactcgtgataagtccaaaagaaaaggggggttgaaactggtttgtgctgactgtgctgtctgcttgagcagctgatggacacatgttgatctgccagggggggttgctgttgtttccctgcctttggacacctgtgatgtgcatgcagtaattccctagccgtgcacatccttacaccctctggtgacctcgtgtagtgctgtgcagttaaaaaaaattcctttgccctgatgcttttataacactcggtggagggcatcttcacagtgacttttcttttgaactgagttgcctaagc

SEQ ID NO: 4940 - DNA, 503 bp, Zea mays
tagaaatcctgtcctgtcgctccctccaccacacactgaactgaacacgcgcgcgcgcacgccattcccctcccgtagcgtgcggcgtgccgtcaatccaaaccaccaaaagcaatgccgccgccgtccgcaaacggcgccaccgccgccgccgccgccgcgagggacgacatgtccccggcggaggccaggctggcgatgatggagctggcgaacatggtgtcggtgccgatggcgctggcggccgtgatccggctgggcgtgccggccgcggtgtgggcgggcggcgccaacgcgcccatgtcagcggccgacctcctcccgccgggccacccggacccgtccgtcctggagcggctgctccgcctgctggcgtcccgcggcgttttctccgagtccaccgagtccacgcccaccacgcggcggcggctattcgcgctcaccgcggtgggccgcaccctggtgccggggcccgcctcgggcgcgtcctacgccgactacgt

SEQ ID NO: 4941 - DNA, 524 bp, Zea mays
catgtgattgtgaacgtgtgctacgccaggtctcagcctctcactgaatgattggaaaccacccccctccctccgtgttgcctgtgctcctctgctgtctccgtccaagctcacgagatgcctcgttctggctgggcgtcttctttgcggtggatcgagagcaactatattaatcatcgtgtcctcctagccatgcagttgcagttgcagggcaagcgatgatggtcggtccttaatcatcgtgtcttcgggtgattataattgaaagtagcaggtgaagaaaaggctttaatttaatgctggcgacgaacaggtgatgatactactatacgtagtagtatgatctcgtctggggcgcagacaagccccatgacgtggcaaattcgattcgatcgaatcgaatagccatagcctcacggggacagaaaagaaaagatctgcctcgcgtcatcggccgcatctcttgaatcgaacttccctgcccgccccgtgagcttttgttcagttcaaagccacggacagat

SEQ ID NO: 4942 - DNA, 588 bp, Zea mays
gtgaagtcaacttttacagctacaatagatggagacacagatagcggcatctcaagttctacctataaagaggatgggtgcatgtttgaaaagggtagttccaagcaggatatgaggatgggttccaatcaagacttgagccagattgataatgtattggttaaggaggtgattatattagaaactaatagtactgatgacatacagatgatcaaagaggtcatcatatctgaagttacaactcccaaacaagtggtagaggggaatatgatggaaactgaattagatgaggcagtccacagttcagaaagcactgcactgggagaagacgaggacacaaaacgacctaatacttttttcaaaaaagatgagggacagagtgcacgagatgaatatgctgcttatgacaatggcatagtgattgaacgggaagaaagtcgcaacaaagaaaaatttaccatcacaggcacagattcactagtggctgagcccaaagatttaccacatcttgacagctcaaacacttctttggaactaagttcagccaatgaaaatattgatcagcttcgtgcttgcagtagtaatgtc

SEQ ID NO: 4943 - DNA, 543 bp, Zea mays
acctgtccaaggaggaggcagccgtgcacgcgcggatgcgccggcggacgcagttctcgcgccgcgccgtgcggaacctcatcgtactctccgtcctcgccgaggtctccacgtgttttccttctttcgcccctcttgttttctgtcccccacctcacccaatgtttggagatgatctggtgatgcgggtagcggttttgctcgtttttggattcgtggtcattcgaattgttatcgtggaggagagtttgctcacaatatgagacggtgtctgttacgcgtgttccggtaaccgatccctaggcactgtttgctgcatacggtgaattattactctaatgcttgagattagcttatactggcacgggagacgaacaacagaaaagatgacgccccaaagatgacttccttaaaaatgtggatgcctctcttttatttcgaccaagggtaaaagggcaaccactttacttgcattagatgccttgtgttttttagatatcttacggactgtatccgagttatgatacatgtatggtctttccg

SEQ ID NO: 4944 - DNA, 492 bp, Zea mays
agtaaaaccatctttctagaggtatgtctttgcatatggaacttccactaggagctcacattctagcttactacttatgaaaatatttgctgatactgagacaacgtttgctcctatgcaacatacaccacatggaaatataaatgttatggagccatacttttgctcattggagtataaatgtcttgacatgctgaactttgtgccatttgttcataataatgaaattatcactggctataaattttggtgattgaaatttgtgaacaagtttttttagactccagaccgataggccctgctttatagaaagcaacgttttgctggggagaccagcttacaaagggtagcattgagttatgccattacatgtttaaagtgggattctctctaaactccctcttccttaagcaaaaccagaaaggtaagatacccaacattgcattcaaagctgacacactgccaccatagctctgttattcagctaactgt

SEQ ID NO: 4945 - DNA, 556 bp, Zea mays
aatcgatgtcatgatcagcaatgctccagtgcaagctttgtttgactcaaccttagatggctgcacttcttccagcctcaacacaagcttggtcagggtacatgcaacaacagcagccagaaagaaatcacctgatagaatgagtgatctgaggttcagggttgatgccaatgacccaggagcaactgatggggctgaaatggtctcagtagcagcgctttgtgtggcataagtgccatctgcaagaacaacaggcctcctggaagatacagtgacagtgttcaccactgcctgggctgaattggtggaatcagttgcctccccttcatcagatacagtgtagaatggtagatccccaagacattgtttaatggtagcaatggtgctttcaacctctgatagagagagggagtactccccaagaatccagagagcacatgagcagacccgggatgctcgaatctgatagaatgtatcaataagcctctggatcatggaaacacgcagctttggattggtctcaatgatctcacgtacaaacagaacaacatcaaca

SEQ ID NO: 4946 - DNA, 508 bp, Zea mays
acaatcaagtggcactaagtggcaaaatcccaatgttaccttttctgaattaggagtaatataaaattcccccaccccacccccgcgtgcagcacatgcaggagttatgtcctagagacacacacaaggtgatgcggcaactagaacaggcaggtgttacgagcatgtttgctcaacttttatcttaattttataatctcagaacaagaatgtcagttcaatcgaagacagacgtcattcctgaaaacaatgctaaaaacaaattttgtgttttatagaatacctgatatttggggggagatacgaagctggaagaatccgacattgaagtctcaaactcgatgcattaaatatgccaacagtggcatccataaagcttgcatagatcagttgactgtcacacgagaatgcagcatgtgtgattggaggtgaattctctcgaacaggccactgtaagtgaagttatggtgggaaatgagaacatactgaactccattgcaagtgtaat

SEQ ID NO: 4947 - DNA, 554 bp, Zea mays
tcttacaaaggttttctctttttttaagaaaaaaaaatctgcctccatttaccgtaggtgattcttcctggacatttttgttccgcggcaaattaaaatagtaattgaacctatgtttcacatgagaaaattgctagtaatcgggtgtttggaaatgattctgaatcttgcggacttaaatctgaaaccaatcgtcccaatgcaattcgctagagcaattgatctgttcatttccaatcagtcaatcaccaagccctagaaaacggacagctagttcagtagttcccgcatcagcgccattgctgatggatcgaacagctgacgcgaatgaaaacgacatgacaccgtcggggagatcgttggatgagttccgagcgataacgaactgtacgggaagtgacatacacaatgcgtgcgcgcatgcaaagttgattggaatccaatgcgtccagctgataggagtatttacactacagatacactcatagttgctagggtaggtgatcttgagatgcatcttgatccctcgctagttagtactattcatgctattt

SEQ ID NO: 4948 - DNA, 1088 bp, Zea mays
agcaatgcagctgatggcaactgtccagaaggccatatacccaaacgttgcaagaaggacatagacaacaaggcatgaagtagcaggcggtaaatgtgcaccgatgacagaaacagaaagcatatcagaggcatgcttgagacgtgggccagtggcccaacaactgtataatcctgctgcaattgcaaatacaactacaagcgctccaataccaagtgcagcagtattgccaacaagaagtatgactacatcacaagcaagtgcagaaataggggcagcccagagagaggtcttgatggcttttggagggtttgtgacagcaaggataacccagaagcatgcagcaattgtggatactaagacagaggataccagagggatgaagttggagaagggcttgtaggcagggttctggtggtaagaggcctggacgcctaggaatgctgtgagggcaatgaaagcaagcagatgaaagatgaacagcaacttcgttacactgcctgtgaaaccactgcagtttagatactttctgttgtgttttcaaatttgataattgttgaggtagatgtgattagcatttatttgtttttggtgaaatagctgccgggctgttgaatagacacataaggattttttacaggaattaacagatttgatcctctttgacctttgtgttgtaattcaccaatcagtagtgttacattggcttgtcattgcggtgctatccgttaagttctctgaatcaccatttgattgaatgtttctttttcatggtttcaggtagggcttgagggcagcgcgaatgggcaatggtggatagacaatattggcaaagcgcttgatgagggaacatcattccaccgagttggttctaggcagttggctgcattgcttattgctgcatggtattagcttgttgtgaattagtttcttagaattaaactacaaatctgttatcacatgatgataagttgttcaattaactgtttgtttaattacctttctcatgtgatatgcatgacatggaaaatattaacttttcaagggcaagaaagagcctaaaaccatatgttggagatgttgaagct

SEQ ID NO: 4949 - DNA, 532 bp, Zea mays
tgcacacacagacaggaatatggacaagggaaggagcttttggagaatcggccaagggcatgttgaagctgctggcaggcagatgccctctctagcttctttctagtgtatatatctatgctatgctatccggccaggatagccatggctcgcatccgtacatgtacatgtagcagcagcacactggctggccgtgcccgtgcccgcgcgccgagatgcgtccgcccgtgtgacgacgacggagcggaagcggagcgcggccccagtggccgcctttcggggcgattccgccgccccggcccccgtccgtcgttttcccggccgatccgcagccttcgcccgcggcctttgcattgcatgcatgcacggacacacacacacggtcactcggcggcccaggggcaggggcagaccgccagccccccaccacgttgtcgccggatctttagtactatactactactagtacgtaggcactgccttttctctacagtactacgctttgcgtcgtcgtggtcgtagtcgtcgcgct

SEQ ID NO: 4950 - DNA, 552 bp, Zea mays
tgccttacatttagcactcaaactcacatttgaactgcacagattcagcagacaatttatgttcagccaataaaacatgaaaggtaccaaaccgtgcatgctggacatgaaccttattggacagggcatttgcatagacaattcaacatgcagcctgaagcataattaatagaccctatgggcatatttatttgtcatctggaccaggggagctagttcaattacggatgatttttgtcagagcgagaaaccggtggtactacaaggcaggaattcaactgaatcccctacttttcaaataaactcactacagcctaaaaaaccactagcaccaaactggatggattaaagaggacatttgtttcttttcaaaacaccaaccaaaaagatgtggatatagtggcaacttgcattgactatgtaacataacctctacaataacttggtttcatataaaaaatggtgaggaatggcgtggaaaccacacctcatcagggtgctacctataaggaaaaagaaaaaaaacaaatttccaactgcacattctgatcc

SEQ ID NO: 4951 - DNA, 944 bp, Zea mays
aggattaggaatgtttaaccatgctcctttatgagagtaacatcagagtcaacatcagaatctggtaaattaatggattgaaagccagtgactagcaaaatgggaatcggtcatgctcatgcctccttttagtttcagagataaacagcttaaactgcccatataggaaatcaggtgcacacctattcttttgtataagttttagaatagtttgatgattcaaaatcaaagcatatagataatttctgggctcaatgtcagctgtttcagtatttagcttgatcattatgttcgaattttggtttgacttgatccttattttcaaattttagctaatatggttcagtgttaacataatgctgtgtgatgatgcaggctttctgcaaacaaatttgattactattggttacaacttacaaccattctcttctgtcgtgtagagtccttcagttagatgttcctgcagcccatgcagcagccaataacagccaattcacagtattctataacccaaggtaaatatcatcttctttaattttaatatattaagaagtaatgtactgaaagtttcaattagactgtttttatccctttcagggctagtccttcagaatttgttattccttttgccaagtaccagaaggccgtctatagcaaccaactatcacttggcatgcggtttagaatgatgtttgaaactgaagaatctgcaacaagaaggtataaatttccacctctagttaatatttgggctgtgtagctatcatatcaactttgaaatcactttagaaaaagattagtgggtctttttggatacaattagctaatctagaatttagtattttggtgcatctagaatacttgtgtagcatgttatgaactgcatgtggttttccctacctagatttacagttctttatgggaactaggatcttttgacaact

SEQ ID NO: 4952 - DNA, 1165 bp, Zea mays
aaggtatcttgaggcaaacgatcttgtcacaacatactagctctaattcctccagagcaagggagttggaaaggaggcgctttaacccattccatttaatgctcacaaaggacaaatgtaaacttgttaggcttctcatgggggcaagttcaactgtgggacggagagcacaacaacgaagtttaaggtaccgaagtgaatttcgaaccccatcagataaaagtgagcatgggaattcatatattctccttgtatggaacaaccagagggtgacttcttcaatccctggattaagagcagcctgaagccaactgtcaagataactagttccatcgaacccacacatgccactgtagtcaagcttgaatgttttcaaactaatgccagagtgattcctgagaatgcggctaattttgtggtggaaattctctccatatgaattttttttcatgccaatcgtatccttattaaagataagattaggatgacgtctccaggaacgtaaaaaggcacgagataggcaagcagcacggccagcatcacgcattggcattagggaatgtacatgagaccaaatgtcctgcagatcaactggcttaatgctctgggaatctgctcaattcatgtgctgtcttttagcagagaacccttcgatcgttgcaagcaaaagggtcctggagttgggctgtggctcagctggcatctgctcgatggttgctgcaagtttcactccctttgttttagctacagatggggatgaagaatcactggacctccttagacaaaatatctcctcgaacatggagcctaatttgctgagcagaatcatggttaggaagttattctggggcaacgaagatgatatgaaggcagtccgagagcttcatggtaacggcgtgggttttgattgcataataggcaccgacgtgacatacaatcctgatgctatactccctctcttcaagactgctaggggagtgatttctgagaaagctaacgaggactcggtacctgctctcattctttgctacatccagcgacgagttgatgaggactccatcctttctaatgcaacgtcccagggtttcaggcttgtggacaaatggataaatggagttcacgagagtaacggtaccatcagttcttggttctctggtaatgatgt

SEQ ID NO: 4953 - DNA, 504 bp, Zea mays
tcaccgagaactcggacaacgcgtgggccgtcgccgcgcacggcggcgtcacggcgctgctcggcctgtgcgcggcgggccacggagcgagcggaggcggcgagctcgtgtgcgcggcgtgccgggtgctgcggagccttgcgggggtcgacgagatcaggaagtacatggtggccgacgccggggccgtccccgtgctcgtgtcgctctcgcagagggccacgcacgacgcggcgcgaatccaggcgatggagctcctcgccgccatcggctccggggatacctcagccagggacgcagtggtacaggaaggcgccgtcgagtgcctcgtccgggcgctcgacccctcctcctcctcctcctcctcgtcgtcgaaggtgcgggaggtgtccctccgcgccatcgacgcgctgtgcctgtcgccgcccaactccaccgggcgtctcctcgccgccgggttcctcgaccgcgtcctctccctcctccgcaacggcgacaacacgc

SEQ ID NO: 4954 - DNA, 459 bp, Zea mays
ttaaggttttgattgaggataacaagagattggttgagctctatgaacacactgttgtcaatgttgaggcaaatcaagatggaaaccctgtagatgatctgttgaatgcccaaccagcagccacatcagatttccatgcacataactcatctagtgtggcacaggagtctaagatagtagacgaaaaatgcaccaatgaggacaatttctcaagagttacatctgttgaattgcgtcttcagctggaggagatgcatgaggaaaatgatagacttatggggttgtatgagaaagctatgcaggaaagagatgaattcaaacggaaaattttagagcaaagcgactctgaagctgtaaaacatattcagttggacgagaaagatgtcgaaatgagtgaagcagctgagaatcctgaagtgaaacatattcatgactccacaattgcagctttgaaagaag

SEQ ID NO: 4955 - DNA, 538 bp, Zea mays
taattgatgatccacatccagtaaggttttctgtgtccggtctgttgcaaagcgtgcttcttctgtaagctccaatatctatattgatatacgaatgaattggccataactcttatgatctttgatgttccaacttccgttgacccttgaagaaaacactgtggagtattttctgataagaggtgtgctggaatatattggtagtgtgggtgtaaggtatcttattcatcacttctatatattaatgtttcctgttttcatgtatgttatatttatacttgatctaactgttattttgtactgtattaagtccggagtcatgctacctacatcatgaactcctgaacttgatgctagttcttatgtcaactcagttatgttctggaccatctccagaaccaaaggatgtgcatcctttcattgatgcagctatgcttcaggtaaaaagctgaaactagtggcacatcatatatgataatttatttccagacattcttgggataaaatttgaagtgtatctccatgtggcctgtttcat

SEQ ID NO: 4956 - DNA, 484 bp, Zea mays
gcagcttcagctggccagactccgtccgccgatcaacacacgggcacaacgcctcccgtttcctcgtttcgaggctgcaccgcgccgcctccaagacgccgggagcctcatcgcctcctctggcgaaaaaccgcttctctccggcgagctgcctccgtttccgggtgatcgagtctacgcgcgcatcgcctcttcccaaggcaggataggatcccttatcggcctgacgcgattcgtggatccgacggcgaggtctgcgccgtccacaggccacagcttacagcaccgctcctcccctctccttgtccttactctggcagcgcaaccctccctgcttcgactgtccttttttttccacatggagactcactagactactagagttgtccctccgctagccgcacggatcatctccgtcctcacctattctctctctctctctctctctctctctctctctctctctctctctctctcgctcgct

SEQ ID NO: 4957 - DNA, 517 bp, Zea mays
aacaaacaaacaaaataatgtaggtggtagtacctacctgtactctggtgtgtgcaccatcttcctgacccccttcttgccgcgatctccatcggtatcggggtcgtacatatcctgcgctcgaaccgtagctctgacgcgccggttcctgacggcagcgacgaccacctggcagacgctgacaacagcgttgccgctgggaaggaagtgcctgtacctgatggtcccgacggcgaagaggaggaagccgagcagcgccgcggcggtggcgatccagaaggccaggacccactggccctcgtcctccatgtaggcgagcgcggtgacggcgaggacgccgccgaggttgttggcgacgaagaagtatccgaagaaggcggccttggaccggcgctcccgcgcgtcggtctcgtcgaactggtcggcgccaaacgtggtgaccgccggctggtacgcgccgttcccgagcgcgatctggtagatggagacgtagaagaagagggaatgcgccgtcgtc

SEQ ID NO: 4958 - DNA, 523 bp, Zea mays
atgaagtagctggtgccggggccgagcgtgatgcggtcgctcccggagccgtacgacgtgccggagggccggcagccgttgtagccgccggcgtccacggccaccacgttgtgcacggaggggtcgtagttgaactctgcacgcaggaaaaaaaagccataataagcgtctgtctacaggagatcaccaaagctgctagctgccggttgccggctgcttgcgacgaaatagtttggcttcctttggccactactcaccgaggacgtcgccggcacggaagctcttgcccttggaccagctgtccgcgttgaaggaccagtcgaccctgtgggtggccgcgtcggcgacgccgaggaggaggaggaaagcggcggcgagtaggctgccgagggcaagcccccgcgtcgcactgcctcttccctgagccatagcgatcgctcgctcctgcgctgctgattattggggcgcttctgtgcttattatggaggcagagcagtggagtcagtgtgatgctgctttgtgt

SEQ ID NO: 4959 - DNA, 1021 bp, Zea mays
atatttgttttggagcacactgaactaccactgttggactgaactcacaacttcactcctctatttctcttggttccaaacagcaacaggaggactaaccttaataatctgtgttcaccaactaaccctctatcactttgccatagggactcaagccttacactccttggatcagatacaaaacagctctaaagttaggagaaaaacattgaactatatcaatcgttaccgcatcagacctgcattccacatgcctgacaaaactagtttgaacacctttttctgctagctttgtgtagtatcaagcctcctcatcccaaggaatttgttcacccaacacaacactgcaagtttgttggagaaacacaaagccaaatgcccttaatgcccttgggtcaagagctatggttcaccaaagtagagtaaaacaacaaatcacccagttttagatattgaaacaacatctaaccaggtctgacagagtctactgcagcactgctagctaggagtatactatgagcttgctagctagcctggctgatggatggtcactactcatgtgcataaacgtgcatgtgaagtggctgggcatccaaccaaatatataagctactggcaaccggctgccggctgctggcaggtcgttcttcgtgttgtatgtagcttgaggctgaggccgggagatgaccatggtgagaacgacgatggtcggcgccagggagaggagcgggggagtgaggcagtacaacaggtccaaggtgcctcgcctgcggtggacgcccgatctgcaccactgcttcgtccacgccatccacaagctcggaggccaggacagtatgtgtgcttccttccttgcgtgcatatgcctcctgctgctagctgcttgattatcttctcttgcattgctctcttttcattcctctcgtcttcctctggtttggcgccggattatattattgggcgcgtttctcctctgaacctgcatgctgtacgtggtcgcagaggctacgccgaagcgagt

SEQ ID NO: 4960 - DNA, 507 bp, Zea mays
ggacggtgcgttctctgcacgggcagcacggcccaactgcttatccagacatgtccaagtgtagcgctcccataggcgcctcggcgagcggcgaatctgtttcatccgctgcaagtgatccacaccaggcgcgcccccacaacaatccgcggcgtctctctccgcgcctccgctccacagaaccagctggggctagcccgccgcgcagcgcagccacaaattaaacggagcccggcctgggcatccattattcgttgcagtagtcgcagctgacggacgactgaaccaccgacagacaacatggccgcctccgcctccaccgtctccggcctcgccggcgcctccctggccagccgcccggcgttctccaccagtaagctcctcgtttccattcctctgaacaagcagtgcagaaatgcaccttcttgcttcttgttgtacgtagttgcgacactgggattggacgatagatgatgcatgctgtgcatatgaaatgatccttgcgcc

SEQ ID NO: 4961 - DNA, 558 bp, Zea mays
atgtatggtgtggtgtggtcagtgtggaacaggtgcgtcggtggtggccataagatttaactaaaggatatgctgtaaaaaaatttagacatttcaataaaacatctaccaatttggttaatatgtattgcactattatcattgcacaagaccattgggtttgtggtgtgaggtgggccgaaagatgttttatcacaagactattgggtttgtattgtcaggtgggctcaaagatgttttatctagtaaatgtctgaaaaacgtcgaatccgttgatcttcagtccacaccgagtcggcccatccgccaatcaggtaaacatacaagaccactatcaattaaattaatgttcaggtccgaacctgtacactggtatatgatacactgaaacccaaaaaggtgtcaggaggcataattatacatgtaaaccaaagaagaaaaaactaggtgatggttaccagctctacactatcgttgtcttctcattccccggttatcaacatgaaatacaccctggcatgccgatgcgatgatagttatgtgcaacttgcaagtcca

SEQ ID NO: 4962 - DNA, 465 bp, Zea mays
gaggacgtacggtcacgtcggctggtgtgcaagctcgatccgctccgacgagcgcaggcgtctagttgcatctcactcagaagtggaatgaaaaggggaacggatcggaggaggagccaagcggacgcactcgcttacgatggcaatcggtgaacgcggaaccgcggacgggggcgtacggactacggattgcttgcctggtcgtcacctgccagaaacggtctccactgtccaggccacacaggaacagatccgggaccgggttggggaattgaattgacccagcccagcccagcccacccggtcaaacgttttccacccaccattccgcgccgtcccgtctcctataaatagcctcccgctcgctcccccagctctcatcaacccacccagcagctctcacattttgagtcatcaccgcccatccaaatccactccaagcgacccaccgcgccggagcgagca

SEQ ID NO: 4963 - DNA, 1073 bp, Zea mays
agctgcggaatcttctactggtacatggacaactgtttggactgatggacttaccagtcttgatcgttacaaaggacgatgctatcacatcgagcccgttcctggggacccagatcaatatatctgttatgtagcttatccattagacctatttgaagagggttctgttactaacatgtttacttccattgtgggtaacgtatttggtttcaaagccttacgcgctctacgtttggaggatctacgaattccccctgcttattcaaaaactttccaaggtccgcctcacggtatccaagttgaaagggataagttgaacaagtacggtcgtcctttattgggatgtactattaaaccaaaattgggattatccgcaaaaaattacggtagagcgtgttatgagtgtctacgcggtggacttgattttaccaaagatgatgaaaacgtaaactcacaaccatttatgcgctggagagaccgttttgtcttttgtgccgaagcaatttataaagcacaagccgaaactggtgaaatcaaggggcattacttgaatgcgactgcagccatggtcttttatatgggcaaagggatgcctcatgtccagtccagttaatcgctgcttcacatttgcaatacacatttttgtatccttcatgaagcagcagcatatcaacactgctatttactggattggagagcttcaaattactttcctggttggtaaccaactgttggaggctttggaatgcttttcgatagtgtttggttggatcttttgtaacagtattttattacagtggcacttgataatgttagattgtgtttgtttcgcatccacagtaaacacatcacgccgtagagcgatatggccttatagaaacctgataccactcaaacccgagtttggtctattccatctccccctcgatatcttcgtccagttcgtgccctgtgatggcgccatgccattacgccccccgcccatcactacggtctcttcacatcctagcgtgactccacccacccattccctttctctctgctttatacaatctcatcctggatatgcaact

SEQ ID NO: 4964 - DNA, 603 bp, Zea mays
tttgcagccgcgcctttttgtcagaagggtagatcttgaggagtcccttcactttccacgaggggggtgaaaaaaaccccctcttttttctcagggaaaaaaaagatggagagcgactttgagccgagggctcggaatggatttcgtcgtcaaataaaagattagccggtcaagcaagattcaaggtacgcgggactcctccgggtccgatcggacggtgcggatggcgtcgccgaggagatgcggggtgggggtggagcctcgggctttcagagcacagctttgctgcgctgcgctttggtcaccacaccacacgagaggaaaagggccatggccaggcaggcagctttggaatcccatgagcggagcgtccgtccgagcccaaaagacggaccgacgaaagcctctgtctcggatcgcagaagcatgtgtacgagtattgcctacccccctcatctgatctgatctgatctgatctctgcaatcggagagaatgatcgagggctgtttcaggtttttccaggcactgtatttcagaggacagctgagagcgcaggacgcttgcgaatgctcactgctcaggctgttgtacgcaaacggtat

SEQ ID NO: 4965 - DNA, 467 bp, Zea mays
gcgacgacgggctcgacggcgctgtagagttgagggcgagctcgatgggaaaaaggactcagctggggctagcatggaggcgagaacgccatggagtccagggcacgtacaagctctagcgaacgaagcagaggggcacggatcggtgtgacggtggcaatggacgagcgcagggagatgggcgcgcgccggcacggaagctccacaacgaggtcacgactaccgggcgagcttgaggtgcgcgccgtgggagatggagcagagacgcgcggtccgagctaggaggccgaggcgctgggaatggcgggcgactagggcgagatccgagaggggtgccatggggacgagcttgacgagctggaagtcgtgtgccggccaggagatccgcaccaggagccgagcgccagaggagcagaggtgggggcgaccgaggatgcaacgacaagaaaactccggcggccatggag

SEQ ID NO: 4966 - DNA, 580 bp, Zea mays
aggtaggatataaagatgtagggatgtacccttttggtcagttggtcggcatcctcctttgcagccttggatgccacccgctccgcgagaagccttcccctcaggcactccaccgtccgcatgccaccgccaccgccaccgatcaccctgcaatcaatgcaacgaaacacaaatgcagagccaactcagaaaattggtcctagcattccacaaacaagcagcagctagctcaatgcaagaactactactcctagcaccagtttccaaaagaaagaaaagaagaagaaaaaaacgatgatgggagccaaagccaagaaaccatccacgaatgcaagaaagaatgaaccaactcggggacatttggcaacctgcattgcaccgtcgtctgcgcagccattctccgatccttcttttacccaagcttggcgcagatgggcgtgcgtgtgatacgatacaggatggtgctcgggctctgggtacttatctgcgactgtgtgttgagctcggaaatatacttggatgatgccaagtgcaaagcacaagccctaacctaaaataactgatcctgcaggtcgactct

SEQ ID NO: 4967 - DNA, 1045 bp, Zea mays
tcccgcaagacaaatactacgactcacaaaattttgggggtgctaacaaaagggaacacacagattgtatgtcatattatcaggttcatttattcttctgctggcagatgactaggaaatgaaaccacattttcaacttttgacttaaccatatatatactttccttgaatttttttaaacatagctagggcgttttgtgtttgctgttaactggatttggacatttgttgcctcaaaagatatatgaactagctgtgttttatttctgctttggaagatattaattgcgtaacaaattctctcatgtcagatagtggtgaatcttcttggcttgatctgtctctattgagttctgtctaaattgacaaaattctaggcctaatgatgtgttcttaatctatccatcgtagaaccattaatataacacacaaaaacaagaacctgctgctaatttgtacgcctatctgtactagttgcacagttgtattgtattcagctagtaaaattctctgcagccaattccttactcccagttacgttatttttactatttagctcagttaaaaccttctcacttttcatacatgcatttcgtttactagagcgagttctagtctttgcaagagtctctacattctgtcccttagctaaacgtgatgaatttcttgatgacctccttgcttttgcatctaaaggtggaccagcttcagcattccctgagtttttccttcgaacttgtattaccatgcaaacactacatggagataacaatccatcatttgaagttaggggttctgcccccaaattacaagcttcatacttgctcggtatacagtctttgctgcacacaagataaccagttgtatgtctatcaaaggacccgttacaatattccaagttagtgctattcaatttgtctattgcagattggtacatgcctaaagtgttagacaaaccagctgtaatctgtttatgaatttttttttcaaacagactccaagacagatcaccaacttgcatgtcaacagatatccccaaagtcag

SEQ ID NO: 4968 - DNA, 519 bp, Zea mays
acgacccgagactccgagaacagcagcagcagtaggccgggggccgttctcctgggtgttcctctcctccggctccggttctccctccgcacggcgtcgctgtcgccacgggcactgtcctacagtcccactcggccactcctcactcactcccctccccgacccacgtcccagtcccactacccaacaaggcaacaaccaccgcggggacccccgaccccgagctcgaaccaccccaggatatgagaagaatactatgatccctgtccctcccctactcctcccactgcctttcgtcacatgcgcacaagaaaccgcgccgcccccgaggcctgtgacccccacctctcctccagcgcccggccaagccgtcgcagcgccgcttccatgaccctcgttcccgtggcgacgagcggcatcgtcccgttcccgtccgtggctggtgcctttttgttgttgaccacccgctgagctgctgcgtgcccgcgcgcatggccgccgcgaggaggctctcggagc

SEQ ID NO: 4969 - DNA, 788 bp, Zea mays
tttactcctgccatccgaaacagttctgtccaaaagttgctggtaaataccacatctcggtcactcactatcgaacagggcatgccatgtaatctgacaatattgtcaaaaaatgcccgtgctactgaagctgctgaataagggtgacccaggggaatgaagtgagcaaatttggagaaacgatcaaccaccgtgaggataaccgatttaccccccacctttggaaacccttccccgaagtccatggagatatcactccatacttcagagggaactggcggtggctgtaatagcccagcagggtgaagatgtttggacttatttctttggcagactgcacagccccgaacaaatttttgtacccgtctcctgatatgggtattgtggaatgagctcctccatctatgcaaggtcttctctactccctcatgacttgctgcatgggcagctatcagcaactgatcccacacacttgaattatctggaacgaagactctgccccggcataccaacaatccatctctttcagcccatccttctcctgcagtcgcattcaagtaatgccccttgatttcaccagtttcggcttgtgctttataaattgcttcggcacaaaagacaaaacggtctctccagcgcataaatggtttgtgagtttacgttttcatcatctttggtaaaatcaagtccaccgcggtagacacttataaacaccgctctaccggaaatttttttggcggaataatccccaaatttttggttttaataaggtacattcccaaataaaa

SEQ ID NO: 4970 - DNA, 468 bp, Zea mays
cttgtcctcctcccttccgggaccgaaccggtcagggtcatatgagtcagggttcttgtagatgtggggcagcctgttggcgaaggatggtgatgtcgcgacgatgtggcccttggggatgtcatacactttgccttcctttgttgtcacggtgaagtcgctgtgtgattgacgaagcaacatgattagcggcgggtggagacggagggcctccttgatgcaccggtagaggacgtccatctccgcgaggatgtcatgatcaatcttgtcgccgtgccgtttcatgacatccttctgctcctctacagcctctgcaaagtactgcttgaaccgaagcatgtatgctccagtccaggttgaggtgatagagctggtatgctgcccagcaaagagcgctgcgataagtagcccggttacctcaccctcactggtggaacgcccattcttgtacttggaatcaatgaagca

SEQ ID NO: 4971 - DNA, 1414 bp, Zea mays
tgggacggctcgccgtcgccgccggaggagaagcccctcagcaccggcacgatcaccttgctgtagagcagcacccacgtgaggaggaagaccacctcgaacgagcccatcgacgccgctgccaccggcacggacaggatggacatgtccatggcgctaccctgctggatgaaggtggtggtcatctgcgcgtacgccgaggacacgatgacgctagtcacccatatgggcagcagccgcaccaggatcttgagctcctccacctgggtgacggtgcagagcttccacgacgacgaaccggtctcccccgacacgcgcatctcctccatgtccgattcggagacgatagctgccttgtcaaggaacgagaactcgtcggtatgcgcgatcttaggctgggcggcgtccaccttgtcgctgacctcgaagagcatgccggcgtcggcgggcgccttcagggcgatcttcctgcatgcggcgacgacgacctggctgaggctcttgagcggcgtgccggtgggcatgcggcgcttgtacatgggcgtggcgagcacgaaggcggcgaaggcgagcgcgaggcaggccgtggagatgccgaagccgaggccccagctgacgttgtcctggacccacacgatgatgaggccggagacgatcatgccgaagtcgacgcagaggtagaaccagctgaagaaagacgccttgctctcccggtccgccgggttgtcgtcgtcgaactgctccgcgccgaacggcgccagcgacgactgcacaccgccgcgcccgatcgccacgaggtacagcccgaggaaggcgatagtcttggcgccgaacaccgacgtgccgccgagcaccgcggccgtgggcaggaacgccgagaaggtgacgaacatcatcccctgcagggatttcttttccgattttgctggccaaaatcgactggacactcaagctgggttgctaggtggtgatcagagcagaggcacagctttgataggagggaaggctaaaacactggtggtggtgaacttgtcgctgacgtcgacctggtccgccgacatgccggccggcagctgccactggaacgcgtgcaccagcgacgctagaaccagcggcaccacccgctccgccatgggcacgcctggcggcctgggcacagcctacggccggagccgaacgggacgaactccagctgcttcccgcggaagtccaggtccctggccaggaaccgctccggcaggaactcgtcgggcctctcccacgccgccgggtcgcgcatgatcgcccacgagttgaagatcacggtgcaacccctgggcaccgcgtagccgcctatctgtaccccgtcctccacggccttgtgcggcagcagcacgggcgccgccgggtgcagccgcatggcctccctcacgac

SEQ ID NO: 4972 - DNA, 1629 bp, Zea mays
agctgcggaatcttctactggtacatggacaactgtttggactgatggacttaccagtcttgatcgttacaaaggacgatgctatcacatcgagcccgttcctggggacccagatcaatatatctgttatgtagcttatccattagacctatttgaagagggttctgttactaacatgtttacttccattgtgggtaacgtatttggtttcaaagccttacgcgctctacgtttggaggatctacgaattccccctgcttattcaaaaactttccaaggtccgcctcacggtatccaagttgaaagggataagttgaacaagtacggtcgtcctttattgggatgtactattaaaccaaaattgggattatccgcaaaaaattacggtagagcgtgttatgagtgtctacgcggtggacttgattttaccaaagatgatgaaaacgtaaactcacaaccatttatgcgctggagagaccgttttgtcttttgtgccgaagcaatttataaagcacaagccgaaactggtgaaatcaaggggcattacttgaatgcgactgcagttgcgcacgctgttcgtttccacttctgataaatcaaatgctgtgctgtctcagtgcaaaccgtcaatggcttcctttatgtcaactctcggtcacttgaacgttaccgaagacgatgctaacgaactttgttctgcaatatgggatctgtatcatctcctgctgaaggaacggcactgggcgctcattcacctcgcaatggattcctttggctacttcgccgcccgcacatcctttacgcagctctggagatttgttcccagagatgctgccctttcgtacaatgcaagcacagggacgagcatagatgaaaacggattcatgctggagttgagggcttatcttcagaaagaggtcgccttgcacaccgataaatggtctgaagagcagattcggctcctggtttctgaggggagagcgctgaagaagctggttgaagcttgttgtgaaattccggttgttgctgagcctgagaaggcgccggttgcgaaggatgccagcacgaagaagaggaagatgccagatgggatctgtgaagggatggcgatgctgcagtcgcgagtttcaggcgctggacctcggctgtcagtgcctcattcaatgctgttcgacaagacaacagaaacacgggattaacatagagggtgagggttcaactaacacgggattaacatttatatatgttctctcgaagcacatgtgggtactcctacatgccagtaattctttagaaagagtgatgagattaaataaaacacgagcaaatcttggttcccagatgatgcttagcacatcttcctaggcactacttgtagctgtacgacatgctaacgactactccatagaaaagcagccaaccaccaaagcaaccaacccggctgtctccaaatgccaacacgattcagagtttcagagccgtggggcacacgaactgggccggacaagccagcatgcatgtcaacgtcaacgaactgggaattaagcagcaagtagtgtgcagtacaggtgagatcggagacgcaccgtcacgcagctgcgcctgctgcgccatggcctgcaggcatgc

SEQ ID NO: 4973 - DNA, 530 bp, Zea mays
cgataaggtgagctcggttgcttcgtcccgactggaaacttcccatccgatggtgtgccgcgttctgttctgtttgctctgcacttgtgatgcgaatcctagtcgatatcctatgctccgcggccgtttacttcgtgttatgtgactctggtgcccttgttgacagatggctgagtatttcaacaggaagtcatgcttgtccgagacagtaccgctgggttccttcaactctctgttcagcttcaccggttcatggaagaatgatgctgcggctacgaaggcccttgcgattgatggctattctctgcctctgtttcgagtgaaaattaggagttctgaactgacgctgcttgagagcgttaagcacgcgatcccaaatgtttgggatccatcagcattggctaggtcagtaggtaatcttcttatttgatactgttatcaggatccatttctgatcagtcccattctgtacaactcttagcctagtactttacacaccctattatctgaagcctgaaggtcttgtttca

SEQ ID NO: 4974 - DNA, 540 bp, Zea mays
acaagcctagcgtgttgagctttgagattctaaagaaactaaagctactatagacttatggaatcaagttttcagactgtaagctaccaaaaaaaaaaacagccacctcgaggtttcagtactcctagtatcagcgataataaataacgagtcaaaagtgcaaaatatcatgcaacgtctatcctcctcgaagaaagcgtgacaacaacctatcaaagccaaggtggagaattaaagggaatgtctgagtacctatccccgtgattctgcgagtccaagcatcctgtttaaacccggtgaacaacacgacagtaccaaggtaaacccccaaattcccaagatatgacactgaacaaggtcattggcgagtgcaaatctatcccactaacacaagtagaagctgaaacatcgagaccccagcatctccaagaaatggtgctgtttttttttggaataaaagtacgcaaatatccaggtccataaccaagaaaaggtgacggcgtaaggaaacgattggctgcgcaacgttgtcgattaccg

SEQ ID NO: 4975 - DNA, 561 bp, Zea mays
gccggcgtggtcgcggctacgcaaggcaaggcgatctgctagagctcgaagacagcaggttgcactggaccagcacctaaggccctaagcaaagggataaggaagcaagtgttattgctcggccagaacctcgcgatcaagaaatttggggactccagcactgcatggaatggacacgtggttttccaaactcagccccacgcaggttccaagcggatgagatcaagggtgaattgttagagagcaagcagacagcacagccatctatagtggataggttttaggtccttctaggcttagatatttgaggcttaaagtctatccttacccacagcgccaaaacttgtccacatacaaaaaaataaattgagagaaccagagcacatagtggtggagagatccagttctgtttcctaaatcaaccattgcgactgaaactattttcagccttggacaagtctgaacccaccacttttaactccattacccctcacgattccaaacggtaacagggaaccgaccataacataaattgctctcccaacatccttctacatcttt

SEQ ID NO: 4976 - DNA, 572 bp, Zea mays
actacaccattcaaattggtatacggacgtgagcctccggcactagtaccataccaacagggcacggcgcaatcccaaaccgtggaagacctgctacaagaccgagacaatttcctggcagaggtgcgggaccgccttcttcaagcacagcagcatgccaagcgttggtatgacaaccatcaccgggaagtgacttttgaggtaggagactgggtctggcttcgactcctacataggccaatgcgctccctggttgacaaagcacacagcaagctggcaccaaagtatgcaggtcctttccaagttttggaacgagtcgggttagtagcctacaaacttcagctcccagccggcgctcgtttacatgatgtttttcatgtgggactcttaaaggcatttcacggcactccgccaacagagattccacaattgcccccaacagcacagggtcgcttattgccagtaccagacaaggtcctacaggccagtcttcgacgaggcatttggcatgttctcgtccagtggggaggcatgactaccgagcaggctacatgggaaccactgcaggtcga

SEQ ID NO: 4977 - DNA, 545 bp, Zea mays
taacaataatgcacgctccctccttgtcatacggacccttaagaagcttgtacatctggtagcgatctagatactcactagcgtctactgaagatttgtatgcttgcttaaatagctcaccatttatggcatccatctctgataattgactaatcaacttcgcctcttcagcctgcacaatatatctaatgatcaccacaaataaaaacagaagcgccaattcaaattgtagtttctgtgcacagaacaaatacaaaaagaattgaaactgtatatttgtgcaatttagtgaaaagaagtgacagagtacacatggtttagcgtgtcttttaaggcctgtttgcatgcatgaaacatcacactataaaaagcatatatttgtttcttgaaatcctgagaacaaaaaaccgtttgttgaactcataatactgtgtagaaagtaccttgaagcgaagatctttaagatggtcgaccaccctgatagcatcggccagagcagacagagtctcatgtgacttagctggattatcccacaagttacgttt

SEQ ID NO: 4978 - DNA, 518 bp, Zea mays
aggagccgccgccacaccacacaaactccaagagggatatgaatcttctaatcatagtaacatcgatcccatcccatatggctcggtttcctttttgtgcggttgttggtgcggctggctctggctgatgcattcatcgcctcccctcccatttttctttatgcgccaatcggtccgtccgcctgcctcttctctctccgtatccccccccccccccccacgcgcaaaggggaaagaagtacgggaggctgatgttactaggtgctggtaattgtttatgcgcggcgggcggagtcgtcactactacctaatttcgatttcgtaagcatttggttcgactagaaggtataaataaataaaaatctgtaaacgcatataaatatacatgcatgcaccggtggttggtgtgcaggctgctgctgcaatcatgcaagatcaatgccagcagcatcagctaacacacagctagctaccagtagcttattacggtcttctcggtcggcactgctacaattggc

SEQ ID NO: 4979 - DNA, 548 bp, Zea mays
gacgccgacatcctcgcggggttcgatgacgccatcgccgacggcgtggacgtgatctccttctccatcggcagctcgtccccgtccgactacttcagcgacgcgcaggccatcggctccttccacgccatgaggcgtggcgtgctcacatcggcggctgcggggaactcggggctcgacgggggctatgtttgcaacgtcgcgccgtggatgctgtctgtggcggcgagcagcatcgatcgccagttcatcgacaagattgtccttgggaatggccagaccatagcggtcagcgatgaacactagctaacagctgctttgtgttgtgccgtccctatatatatatatatatatatattttcttcacaggaatgaagaaaagggtaaccactacaactatatatttttttctttgttctgttgcagggatcctccattaacaccttcgcaacgataacaaatgccacacttgcattccctgccaacgggtaagagacgatatatacatacttgcaagttgcaacgatggtatgtttgctaaaaaaaca

SEQ ID NO: 4980 - DNA, 481 bp, Zea mays
catgcgtgagcgcggtgatgaaggccggcggaggcgcgacgggcgagggcacgggcatggggatgttctggccggtgacccgctgtatgaaggagacgacggcggcgtcgcgggacacggccatggcgcgttcctgggcgagcgcgtcctgctcgcgggcgaggcgcgccacctcctggcgccgccacgcctcctcgcggatcatccggtcctgctcccgccgctcgatggcctcgatgaaccgccgctgcatctcctcctgccgctccatcacctgccgcatcaggccctcgaagaaccgcatcatcttgctgctgatgctgccgccgaagccgtcctcgtcctccccgccgtcccgcttccgcttcccgctgccgccgccggtctcatccgtgtcctccccgtccgagcccgaggagaagctgacgtcaccaggcgtcatcatgcatgccgccgccgccgccgcgtcgctggcggcggc

SEQ ID NO: 4981 - DNA, 554 bp, Zea mays
ctggtttagccgagaaggctgagcactacttcgatatgatgaaggaagagtacaaaatagagcctattgtggaccactatgggtgcatggttgacatgtttgtgcgcttgggccgactggacgatgcatttgccttcatcagaaggacgggtttcgaaccaaacgaagccatctggtccagcttggttgctggttgccggagccatggaaacatggagcttgccttctatgcagctgatagactgatcgagctcagaccaaaaggaattgaaacctatgtcttgctgttgaacatgtacatttccaatgagagatggcatgatgtggctagagtgcgcaagctgatgaaacaggagggtcttggggttctcatggaccgcagctggattacaatcaaggacaaggtatatttcttcaaagctaatgataagacgcacgaactgagtgatgagctgtatcaactgctggagaatttactggagaaggctaaaaccattgggtatgaaccgtaccagagcgctgagttatctgacagcgaggacgacaagaagcct

SEQ ID NO: 4982 - DNA, 536 bp, Zea mays
gacgtttgaattaaattatcatccttagaaaatgagatggcaatgatgaataagtaaaatgaggattgtctttcaaatatatgggtaccatcatgcaagcagagttacactagtgccagtagatttcctttgcaaccatcgactttgaatttgttgcttcaaaacaaaataaaagtacgccttttggttcaaaatgtgctttggtccttgcaatgaccgcaaacatggatcggtgaacctctctttttttctctaatacgcaggagacttgcgcatcttttatattaaggagagaaaaagatccagagtggactagtaaaagaaagcctcctcacggtggccagaatctagagtacaaaaacacatccatgacaaacaacacagaactcaccccagcactagctagacaaagaactctacaacacaactagaccaggagctcatcaacctgaaggaaagacagagctttggccccagccaaacaccagaggacggcttcctcccttgctgcccaaagagccacaaccagacttgga

SEQ ID NO: 4983 - DNA, 532 bp, Zea mays
caaagtcattccactttcctgcaagataaataaaatattgcaaataaacgcgtatgttttcagacaacaaagcagaaagcacgtcgttagaacatgtaaactaaaaagctgttagggcatgtacagcgcggcatttaattagccgtctctaagagctatcattaaagagaataatcctacatggacagcaattagggaagagaaagagtgcagtcgtcatttcttgaggcgacggcttcgtcccgtgctccaagaacaaagcgacggacaaagcaacggctgtagagcgagtcgacggcgacggcggattagctacgcgcgggagcttttggcgggcggcatggatgaatttgctcctgcgcgcgccattttttctcctccccatatagcttctctcgttgtttcagttcaatcttgaattttttccccaatctaacagatggagtccgatggggatggtgtgttgcctccagccatcttcgtcttcgatgcgacgcaggcgcagcgactccttgtggcagcagtaagcagg

SEQ ID NO: 4984 - DNA, 506 bp, Zea mays
cagaatgaggacttcaaggagagaactgcgctatagtgaagatgaggtacgccgtccagctcctcatgacaacacgtcaaacatatgctgccctgcataaagctcctcatgacaagatgacaaacatacgctgataataatgtaccctgcataaagatccgtatggccctgtttgtttgagattataatctaggcagattataatcctaaaaaaaaaacaggatgtcaacatgtcaaacgtccgctgataatagtgtaccctgcttattgtgcaggctaccggcgtaggtatatcagtgcagatcatcaagaacaaattggctccagcgaacctgaagaaggaagccggcatcgacatcacattcggtaaggggatctgccacgagtcggagatcctggagacggcttcctccgtcggagtgatcctgaaagacgggtgtgggtattggatcaacaacgagttcctggcaggcaaggtggaagcggagaagttcctgcgtgaaaac

SEQ ID NO: 4985 - DNA, 709 bp, Zea mays
ttagtaacagaaccctcttcaaataggtctaatggataagctacataacagatatattgatctgggtccccaggaacgggctctatgtgatagcatcgtcctttgtaacgatcaagactggtaagtccatcagtccaaacagttgtccatgtaccagtagaagattccgcagctactgcaggagctgtcgccgttcgccaagttcgcgcacttcactgctaaccaggccatcctggaaggcaccgcggacgacgcggccgtccacgtggtggacctcaacgtcggcgagggcgcgcagtgggcgtcgctcatgtcggacctcgcccgccacggcagccgccgcaagccgttccgcctgacggaagcggtcgtgacggccgacgccgacgccgacgcgcaccgcatggcggccaccgcgcggcggctctcggagttcgccgactcgctcggcctccccttccagtacggctccctccgcgtgcgcagcgacgaggacctgcacggcttcgccacgagctgctgctcgtgctcggtggtggtctcgtgcgacacgaccgatatccggtcctacagctcgctgaccaagctgctcgccggcatcgtcaggatcctccggccgaagctggtggtcacgacagaagaggagctgctcagggcgggccgaaatcatcccggcgccgccgccatcaccttcgcgggcttcttccgg

SEQ ID NO: 4986 - DNA, 571 bp, Zea mays
ctgcagtagcctcttcaacaatattccgaacaagcgtaggcgctgtttgaaacgttaaagtttaaggaaattttcagtttcggatagtttgctcctaaacaggtctacctctctatcagtctatgtgatggtctccggttaatcttgcgtgctcctttacgccatgccgggccgaccaaatctgtttggctgaaagcagcagcggggtccggcttgtcacctgctggcggacccctaggcggctaggctctcgtcgtgtcacgtgctggcggtggcggcagccggcaaaggaggcccgacggcgacggggcacacgctgcggtgccgcgcggggattgggcgacctggccggcgctgtggacggacgacggacacggaggacttgccgtgccgtgcgaggcgtactacctgtctgtcccgccgaaaatgacaggcggtggtggtaatgtcactcgtccgtcctcatcgtcagctggccaatgatgtgcgtgtcggcaaaaattgattacggcgctggagagccgccgccctggcctggcccctccctggaggatggacctggacctggctg

SEQ ID NO: 4987 - DNA, 538 bp, Zea mays
aagagcatgcggtctgtttggttggctccacaacgggagctagctgtctgggccaagcgctagtccgatttcgaacagataggctcaggatcaatgatcataagcctatccaagcactgcctgcgaaaccatcatacgtgacctatagtgttgacgatcacgtcgtttactactacaagaacatcagttaagctcagaaataatctaaatacaactggggctctaaacttacctttgcttcgccgggagctattctagcaacagttcttttacaacggaaagtatcaacggcgtgcatcgaatcttacagaatgagatgaaaaaaaacagttggggcaaaattcaaaaaaaacgtcgacagcagggttcgaacctgcgcgggcgtagcccaacagatttcaagtctggctccttaaccactcggacatatcgacgattggtgaaaaatgattgaatatacatcgtgttatgttttattcgaacactttcaattagttgattacgttagaccttcagcctgatcccttgtacttttatg

SEQ ID NO: 4988 - DNA, 482 bp, Zea mays
agaaaacactcagctgcctagggatactgatctatcacctggacagcctttgcaacctggaatgccatcatctggtgttggtgttatcggccgaagaagtgtatctgatcttggtacaatcggagataaccttactggaacttctggtagttctggtcatgatcagaattattatctgcaaatgcttgaagctgcattccacaagcttccacaacccaaggactctgagcgtgctaaaacttacattccggtatgggtttttgaaggacatgggtgccactgtgtactactccctctgtttcaaattataagatgctctgtcttttctagattcatagcttttgtgacgcacctagatatatcttatgtctagaacaatgtatctagaaataccaaaatgtcttataatatgaaatggaggtagtactaaatttctagtgcattgttcttattttcttacccgccttcattttcagcggcac

SEQ ID NO: 4989 - DNA, 561 bp, Zea mays
cttgcatgcctgcagctgcttcacgtacttgatcgcgtcgccgagcacggatgccttgtccatctgcgaaaccagttacaattagctagttggttgacgggaactgggcggctggctggtggtcggtgctcggggcatgtcgccatggattttggacactcgtgtcgattcgtactcgtaccttcttgaggcccgggacgatcttggagagcgcgatgaagcgctggctgagcttctcgcggcgcttccgctcggccaagatgtggtcctggttctgtgaggccgggcgtgcggcggccgccggcgacctggcggcctcggccatcatgtcgtcgtaggagcgcttgggcgccgggcgcgcctgctggaacgacggcagcgcggcggcggcggcgtcgagcagctcctgcttgggcgccttggcgtggtggccggcgaaggagaggatggtcggcgaggagtagtcctcgggggagccctgctccgtgacgcacgagtcccagctggcgttgcccctggccgccttgcgcgggcggtggtcggccgccggcgcgggtactc

SEQ ID NO: 4990 - DNA, 537 bp, Zea mays
cggctcgcaccgtctttgataggtaaactgtgcaatggaagctgccagttatgtcgagagaagaccgggctgacgtagcagtagacttggtcgttcagtgggtcatagtacggcttcggatcttccaacggtgcagagaaggtgcagagggaactggcatacttcaaaagccaccctggctttacggtcgttacaccgtgcatgtatagcctctttgtactaagtagctccgagtaaactacaagctctggggcaacttgggcgacagatgatgatcggtgcagatatattgtatcatcaagtgcacaagactgataacgaacggctcgaacctttcgatcgtcttctgatggtttcaaataggtgtgaatcctccttgcaactctatcagcccatccagcgcaaattccttgcccaagaagttcctcttcattcaactgcaatatactgggctcgttcctccaggcccgttcaacctcagcagaatcacccgaattccaagcaaacttctcgcaccatttgctatggcgaaatatt

SEQ ID NO: 4991 - DNA, 572 bp, Zea mays
tatccgtaacggagaaaaaaggttggtgttttcttggtggagcagagctgccgatggatgcagatgtctagtgtactgtactgtacacccttatggttgaggagtccatcagtaattcggtttcgatgaaggcctaggcctagcctcctcgttcttcaggagcatcgaggagtccaccagcgtcctggaatattcggcaccgcttgaatgagaagttagctcatagtccatctcgaactaggcagagtattattgtagcgaacctagcaggcaaaaaaaaaaaacagaggatatcctaagttagaaaggatggatgaatccctggcatggatgattgcagcctctcaaaatattagccaaaagaaaagagagtgtaaaaacgatgtgggcttgtacaattggtataaacttgaatgggcaaatttgtgttatcatgtgtgtgtgttgatgtgttcccttcaattcatctacatttgcgaacaaagcttggcagtagtttagctactgaatctagctgcacaggagcatgatgtccagggcaccaaagggatacacgctgctgcaggcacgca

SEQ ID NO: 4992 - DNA, 489 bp, Zea mays
agcagtgcccataccaacaatgcccttcagccgtcagaacagtccccaacgcaaccggtgctgctggcgaggagggcggtagcctaggcattcttgactttgttggcgaggcgcaattctttgaggatcaacaatccagcttgttgcgtgcttcgacaaaggacaacaggggtttggtgttggcgatgtcgtcggtggtgttggtgtaacaggtgttgaggatgcaaaggatgattaggacgagctggggattgtcgacgatgacgctgacatcatggagggcgtctgcgagggtcttgatctgcttgcaatactcattgatggacatatcactttgggtaatggagtgaaactcatgacttatgaagatcgctcgtggagctttgttagcggtgaagagtctatcgatggtgacccaaagctggcatgcagtctgatcgacgatcatggcgagatcaaggaccttgtcggaggcggatccatagagcc

SEQ ID NO: 4993 - DNA, 530 bp, Zea mays
ttcttctcccgcaaggtcttcttgtgttcaagcttgtcctccttgtcgtgtttctgcatttctctcaacatctctgcataccgctgggaaactggagcaagagacaataaggaagttcaaatttagggttcacatccttcacgcaaattattgacgacaaagaaacagagacagaacagacttttatccttgtgaaccacaggttctaaagatacttcttcagcgacagatgcaagaggtgggatggcgttgccctcatcatcatacttgacccttgttcctgatggcctgttcacgtttatcttcagtttcttctttttgaagggtctttcaagtctgacaaagacaactggttagcataacttcggcaaacaaaacctggaactaaatattcggtagcatcaaatttcaaaggtagaaatgtcttagtttgaaaattgagttgcatggtacatacccagtcacatttgtatctgtggcagactccttgggatgaaggacatcatcaagtctgtcatccatattagcat

SEQ ID NO: 4994 - DNA, 505 bp, Zea mays
ttgaggatgtctttgaggaaccacagtcagtaccgccagccagacattgtgaccacaggatccacctgaaaccaggcactgcaccagtagctgttcgtccatatcgttacccccaattgcaaaaggatgaattagaagctcaatgtgcggatatgcttcgccgtggtatcatccgacacagtacatccgcattctcagccccggtcctcctagtgaagaagccagacaatacatggcgtttttgcattgattacagagccctcaatgaacacactatcaaggataaatatcctataccagtggttgacgagttgctagatgaactccatggagctcgattctacactaagttggacctccgttcagggtaccatcaggtccgtatgcacaaggatgacattgagaagacagcctttcgtacacatcatggtcattttgaatttttggtcatgccgtttggtcttaccaatgcaccagcaacgttccagagcttgatgaattctgt

SEQ ID NO: 4995 - DNA, 583 bp, Zea mays
tagctcactgaagagtgacgatcgagctgttcgcacgcatgcacacatatagcgccatatgcaagcgctgtggtgtcagcagactagcaaattagagaggcttagctaagacacgtgcatgctcattgcacaggtggagtttagctaagaagctacgtcgtctggagcgtggcgagcaacacgcaccaaacatctgtgtggtggcaactataaactgaaaaatatatatgtgctttgattatagtagcaagcgctgctgaagctgaactagctagccaaataaagagttcatcgagcagcagtagtgccaagagagattcgcatgacaaggaaaggcaggtcaagcaagaacacgcgaattaatcccgatggttgatggagactggactggagagcgaggcatgcatgaacctatatctttctatcaatctatcttatcaacaccaccacatgcacccagcagccaaccagctgcttattcttggcaagcagtgcgttaacgttaaaggcatgcatggtatctatagcggcacaaagctaattttgcgttttcttagccttttcgacccggtgcagaagctat

SEQ ID NO: 4996 - DNA, 450 bp, Zea mays
aaacagcctatatttgtctcattacaaaattatctcacgagcagaaattcatacccagtaagactttgttcggttattcctatcccatgtggattggatgagattggaaaaaattatcaaagattttgacttatttgggattgaaacccactcaatcccacccaatccacatggattgagagcaaatcgaacaagccttagggcttgttcgcttattccaattccatgtggattgaagtgtattggcatggattgagatgaattttgacttattatagatttaaaccgactcaataccactcaatccacatggattgagagctaactgaacaagcccttaaatggtaacagatcttactttctcatgttgtgccctgatatgagctcttagttttgattcttgtgtaaatcttcggccacattctgggtactggcacacatgatagttat

SEQ ID NO: 4997 - DNA, 522 bp, Zea mays
cctctacatccatgtggatcgctcaaccattacctgccagaactgctgcggcttctagacatgcaagacgcgtatcagcagggcttgccaacaatggaaggtacagaagggctaggagctcttactacagccttcatccactgatgatggtagaggcagaggtagatagcttttcctccccccgtctcaatgaagttaagctagcgttgtagagcctgaaactgatgttgttgctgctttgtgaagcggttcatgatggaccagttggtcttttacgaatcaagagcagcagccgctgacccccacagggacatgagactggacatcgacaacatgagctacgaggcaaggagtgcctgcatcttgctccaactgccttgctccggaaatctgaagattttcttccaactaatacagtatttcggttgtcctcaggacctgttggctttgggagaatctatgggcaatgtcaacacaggcttggccgatgagaaaatttcgaagtgcgtgaaagaagtggtc

SEQ ID NO: 4998 - DNA, 464 bp, Zea mays
acaccttactcaggtaactaccagatttgatgcagcggagctggacaccaggatggacacactccacatttacttgcacattttgaacaaccacgctgagaagcccacctatacactgagcaaatgcatcctggatcacaccttcatcctcgataaaggagaatgtgccaccagaggcctctgcgatcgaatgcaaagcatctgaatcatggtctattccaaaaccaaatccatgcacaggcactaggcgaaatgtgtgatttagaatggagggtggaactagtgaactataatctggccggacacccctaatatctgagagaatattgtatgtatcttggccatcagacaagagaatgatgctgcatactggattttgatggcttcggtcctcaataaccttggcagctttctttagtgcatcagcaatgtttgtgccaccactagcgccaagtgagttgaca

SEQ ID NO: 4999 - DNA, 522 bp, Zea mays
aacgtcaagctggagctccaagagacggtgcagtacccggtggagcacccagagatgttcgagatgtttggcatgtcgccgtcgcgcggcgtgctcttctacggccccccaggctgcggcaagacgatgctggccaaggccatcgccaaggagtgtaaggctaacttcatcagcgtcaaaggccccgaactgctgaccatgtggtacggcgagagcgagtccaacgtccgtgacctgtttgacaaggcgcggtcggcggctccgtgcatcctcttctttgacgagctggactcgatcgccgtgaagcgcggcaacagcgtgggcgacgtgggcggcacgtccgaccgcgtgctgaaccagctgctaacggagatggatggcatcaacgcgaagaagacggtgttcgtaatcggcgccaccaaccggcctgacattatcgacccggcaatgctccggccggggaggctagaccagctcatctatatcccgctgcctgacgagccctcgcggctgcaggtcgac

SEQ ID NO: 5000 - DNA, 509 bp, Zea mays
accctcaaacaatggtgtgctgctctttgatgcttttgaactattacggagttcattagaaaagtcacgagactacaaaacaaatgtgagattgttatgtcaagccattgttttttatgcaatttttaaagtttgggtcctagaatttcttagaaaatttaatgatgtatactaagcacacgtcaatgattttgtttaactttcagtattgaagagaaaattaaaaacaaagaagtactcatagaactccacctcacgtcgaattatcatgttcagcgaatggcagtaagctttccgcaaaggcatcatacaactcttgtccaaactcttcaaaacagagtacaaagagggcattagaatgcacaaagttttactagctaaaagtcactcgctcctcgttatcagtacgaaaaaaaattcacaccgagttattatgcacaaaccttgatgtgttgtaaaagtcgtgcataagtcctaaatttgtacctcatatcagtgtgatcaggcct

SEQ ID NO: 5001 - DNA, 561 bp, Zea mays
ttcctacgaaacctgcatgcatcagcttttactgtgcattttttcactgcgcgacgtctcgggcatcgggctcatgcgattgtctgcatgcatcagctgaaagtgcatgcgtcaacgatatcttatccgccgctgcatttggtccacgtccatgcaggagggacagcttcatcacgcaccgggcgttctgcgacgcgctcgcgcaggagagcgcgcggctgccgccgaccagcagcctcagcaacctcaccagccacctctacggcgccgccaccaacgcgggcaacatggcgctcagtctctcgcaggtgggctcccacctcacctccactctccaggacggccaccaccaccgcccgtccccggagctcctgcgactcggcgctacggccggcggcggcggtggcagcagcatcgccgcgcgcctcgaccacctcctgtcgcccaacggtgcctccgccttccgcccagcgcagcctccgtccttcttccacaacgcgggggcatcggtcggccaggactttggggatgacgcgggcaatgggccgcactcgttccttc

SEQ ID NO: 5002 - DNA, 590 bp, Zea mays
agtgcagttgcagctagcgcccttgctctctctatcttttttcacgaggaccactggggcaccgcacagcattagtctctataatttaccggggcggaccaccgcggaatgtcgggcgtgggggcccacatgtccgcaccccctactacgtacctcccctcaccagcagccctgcctactattccatgggagcgtcgactaatagggtgtagccaagttctcgacttagcttgtcataatgcaaagctaagtagctagcctgcctgctgctgcgtactgtaaccgtataatatatctgcttaaccgctgtcatcaagcatcaaagatgcgcactgtaatgtaagcactagacaaagtcgtcccaaaagttcgagtatttatatagttgtggattctaacgcggggtcaaccgtgtttgaatcgctgcgtggacgtacgtgctccaactccaacatacatgcgggccggggcatgcaaggattcgggcatcattgacaattatgcctgggctctgctcttttttacgattgccaaaaatggcggcatctcgccctctctcggccccatatgcgtgtgggtgggcgtgggaa

SEQ ID NO: 5003 - DNA, 1721 bp, Zea mays
ggaggcatcacaatggagataggactttgcagttgaacttggcggcaaatgatcggactttgtatcccacattatttgatgaatgttcatgttgtttaagtgttctcggttctcactatcaaattgatagttaccagagggggtggtcttgctgattgcagatctctaggtgggatacttgcatgggcacagaaaggaacccgatcaattcaaacctacaacaacctttaactctcactgtgtttgttcagtgtgttctacctggaagtagataatgattggggtcattgttgcaggtcttctcatatttttgcatgggcttgtcatgctgcacggaatatgtgttgggagtactaaacttatccaatttacaaaatgcaatgctagtatatgaaccatgatgaaaattcggttacttctaatttaatctgtagtggtagaaggcactggacatgtttgggacttgggagattcaagcagagatgggtagaactacaactttgatttaatcaatcgtgtttctgcttcatcatgctatatatgctctgactgaagctttaattcttgtgttgctatcatttctgcgttctgcagtatcgctggccctgtcctggactttttcaaaagacagttagagcatatagatgctgaaaggaatgccctgagattgaaatgcaattcaagcgatgataagttggcattgctcaggaagcaacttgaagcaagcgagggtcacagagctgagtatgtgaggcgctatgaggaagttctgaatgataaacagaaaatttcgaaggattactctactcgtataactgaacttcagatcaagagtagcaagttggaagaacggtctttgagcttgtcttcttctcttgaaaccgccaaacgggaatccaatgattggaagagcaaatatgatcatggtattttgcagcaaaaggcagatgagagcaaattaaaatcccaaattgcttctctggaatctagggtgaatatcagcgagggcaggttgtcggcaacacgtgaacaagctgattctgctcaagaggaagcatcagagtggaaacgtaaatatgaagttgctgttagtgaggccaaaacagctctgcagcgtcccccgtgatcagcatttcgtgggcaccttttttttctgtcacccgcttgggaaggggtttatcaggggttgttatggctgccttttgtggtggataaaagacgacagtcatgctgagcagccgccaattagagctcgacctcatgaagatcctctgtcaatccattgagctgcactgatgagttgctgttggaacgactgtgtgatggtttgccaggcatgagtggtgagcgcaccgtctgtccatcgggtgatcttgtgcccgcaaaagcactgaactgctcagagtatgttccactccaggatgcagctcgtgattttgagaatgaggtgtcgctgcttaatgatgataccccggaactctggtaaggggtggagatgttcgccatactagattgccgatggattgttgattgcattggtgacgagaattgcgtgtgtggtgggggcgatgaaaattgtgtgggtggtggggttgaagagaatgatgttccagcaggcggtgaggctgccctctcatcctgttgcatggtttcactgtgtatctctgctgcttggtgtggcatcatctgaagtgcagttacgacagataaggatccgaggt

SEQ ID NO: 5004 - DNA, 478 bp, Zea mays
aagcctgaccgacaacagaaatgtacttgagcatgcgcactgaaaacgaaatggtagaagaacccaagttttacctgcttcaggtaggcgaccccgaacgctctggtgacgttgatcttccccttgacccgaccattgactatcgcgttccgatcattcagatgctggcctttgatcctcgtcacctcctgcatcatcccaaaattcggacaagaacggctcggtgaacccaaaactcaatcatggaacgggtttacagtttttcccgttcatgaacagtagtgtctctcgtagtcaaaagttccttttttttcccttaacgatgagatgatgagatgtgacaagaatatacgaggatgaattcttgttccgaagtcagtctaattgaagttgtgaacaggagaggagcagaggagcagaggagggaaagatggcgtacctcctggaccgcggtgctgtgctctggggtgagctgcac

SEQ ID NO: 5005 - DNA, 532 bp, Zea mays
tacacttaaaccagcgaccaagtgggaccagattggtggatctaagcatgataaacactttttttttgttaccatttccatttacacgcacaggaacgatcgacccgaatttctttggagttaagaataagcactacatcaatcagtattttccatttgagacatactccgtataaccgtgatctgtacattctaacaataacataactggaatttgaaaccgtgatctgtacactctaacaacaacataactggaatttgaaaatgacaaagaacaatggacacgatcctaatctgattgtgcaaagcaaaatccatcctcacccgtggttgctgcaatcatcacctagatgccctggattggaacagatccaaccgagccttggcttccgggagcaatgcctcaacgcgcaggtcctgcaccatgtgtgcctgcttcgacgcccacaggagaacggcgagcacgccggcctgcgcgagttcctcgttctccgggacatgcagcgcgatgtagcagagcaatatgagcgcc

SEQ ID NO: 5006 - DNA, 540 bp, Zea mays
cacgtcggcgtcgcaaacggcgcggccgcggcccaccacggcgtccagctccgcctgcgccttggactggatgcccgggtgcagcaccatccgcgccatcacccactccagcaggatcgccaccgtgtcggtccctcgaaagatcatctcctgcgcgtgtattgtgttactgtttgaagaaacaaacgaaacgagtacacgagcatgcgccgagctgagcatcgacacgtacatgcgcgcagtgcgcatttcgtagctgatcgatccatgctacgaaatgacatgtccatgaatgtcagcagctgttcttggtaccgaatgaaagtgttcggtgttccttatttcttacccagaggacagcgatcatgtcggagtccgacagcttctcctcgccatccagtcccagcaagacgtcgacgaagtctccggcggcggccggctctccaatggcgtcgtccttcttgtgcctgtgctcttcgatgatcctggccacgaacacgttgactctgcccaccaggctcctgcaccgcctcctgacgc

SEQ ID NO: 5007 - DNA, 594 bp, Zea mays
  unsure (1)..(594): unsure at all n locations
aaccaggtcgaggtaataaaaacacaaaccatgaagcagcagcgtcgttatatatatatgttcgtgctaaaaatctgccacttattcatcagacagttccagacggcaattaatctgcaaatcacactcccacctgttttattttttttgtctttcttttcagttcctttccatgaggattgcctccatgagctcagtgctgtacgggttcggaacgaacagtgacggcctccatgatcatcacgcaccagtatgaactatgaaccaattaaacaaacaaaaccaatttaattatctaggaatatggtcagcgaatcgacgttaatactgtacgtgtaaacactgtgctgtttcagaagatgggaggcgtgtcgttccaggaagccgccattgcagtgccagcaggtccagcggcagcggtgagccaagctagcagtaggccggctccatctgaagccaccatgaacaccgcttgcactaccacgccctactcagtctcactgcaggcatgcaaagcttggncacttgggccncccgtttcccgggttttttttttttttaaaaccccaaaaaaaacccccgggttttttcccg

SEQ ID NO: 5008 - DNA, 505 bp, Zea mays
agcgacaacgcgtgataacaaggcttgcagcgaaatgtggcggctagctttgctttgcaggggctatcccggtgcagggcaacgtcggaagacggcgcaagcttcttttgtggcctaccagtgcgatggcggtggtcgtgtgcttgtgtcagagctttggtgatggcttctttgggttgtggggtagttttgcataccttccaaaagtaaatcaagtaacgggtcggtggcaatgaatgaagtgttgcggcggatgtggtgaggcccccacgcgttacgctggtggcgagtaccaattgtggagtccaacggcaaatgtggcaaggcccatgcgcgttgtgttggaacaggagccaaaatccagtggatttcaccctgttggttgggcgagtaccaattgtggagtccaacggcaaatgtggcatggaccatgcgcgttgtgttggaacaggagccaagatccagtggatttcaccctgttggttgtggttgaccggttgaggct

SEQ ID NO: 5009 - DNA, 552 bp, Zea mays
actagattggtcaaatttggtgcctagcagtaggaccaaatcttttgcagaatggtggcggcgtggcgcaaatctttgaaaaaagtccacaaacagcataagaaaggtcttaattccttgatcattcttggtgcttggatcctatggaaacatcgtaatggttgtgtctttgatggatccgctccttccatccaaactgttgtacaggaggtcaagaatgaggttgtcctatggcaggtagctggggccaaagggctgatggtcctggaccttggaaggttgctggtctaggctaggttgggtagaagtagaaatttgggtctggtctctttgttgagttatatataagttctgtttcagatcccacatccctctctatgatcctacgtggggtgatgtttgatgtactggatcatttttctcttatataaaaaaatacgcattcgaaaaaaaatagtcttatagaaaccagctcggtgctattgccatcctagagtccaaaataaccacacacacacacacacacgttgcccgaccgaaccaaacaaacaa

SEQ ID NO: 5010 - DNA, 544 bp, Zea mays
ggaagacgccagcgtgagcgacctcctcataccgtcgtcgtgcgcgggcgagacgctgtacgacgtggacgccgtgacggccatccttgatgagctggcgctgcggcaagcggcggcggcgggggtcccggaggcaagcccgccgcacgcgcgcggacacaggcggtcgcggtccgccgagagctcggagtacgagggagcgcgtcggtccgcgtccgccccggcgtcgcacggcgcgatggtcaggatcgggaggctggtcgatggattcctgatggaggtcgccaaggatcccaacctgcccctggacaagctgatcgccattgccgaggccgtgccggactgcgcccgcccggagcacgaccatctgtaccgagccgtcgacacttacctcagagtacatacgtggaaaacagactgcaccatttcagtttcagcccggttgatttttgatgcttcactcactgttcttgcttcgatttacgcgacaggtgcacccggagatagacaagggttcgaggaagaagctgtgcagggttctcaa

SEQ ID NO: 5011 - DNA, 550 bp, Zea mays
cagcttgcatgcctgcagctgaaatggacgggccaccggaacgagcattctcacacgcactgtcctgtgtcctgctgctgccctcgcccgaggcaccgacaccggctcgacccacgcaaggcggaggtggagggagcgtgttaggtgagcgcggtcacgatgccgccggtgggtcacagcgtgctggcgtggcggcggcatcgcttacatcgtgtcggggcacacagtcacgcgcgcgtgcccgctcctccccgccgcagtttttttttttcaacgcccaacagctcggcgacccggcgtcgaattctaccactcgtgtttttggtggttttcctcgcgggtcagccagctagccgcgcgcggcggcgtcctgctagcgcgcgggcaggctacagcctacagcgcccccccccccccctgccactctggtcgcattccgcgtccccaacagggtcggcggcgtccgttctgagattcttcttcacgctccttcatgccattgccatgtgagtgaaggaggccacgccacggagcatagacgcggcagagg

SEQ ID NO: 5012 - DNA, 589 bp, Zea mays
aacttgtaggtgcatgtccagattttgaattgattattaagtgtcaagcattttattttattttatttttatgttttggtgtatcaagggatccaactacgccgaaatgataagaagattctaaatgacataaacgctgacaaagatggtagacttctatttcatattgtcatgaagaatggaaaaaggaagaagcgtgttcagacaagagaagagaaaatattcttgctagcaaatgattgcttaactggagactctctaatccatgatttatccctcaaccaggttgtttgcttgtttaggttcagacaccccttgattttctcccctactatgttgacttaagtggactcccatgcaggaaacaaatgcaatatgctcaaatggatgtaggattgccaaatgcatgcgagaatattttatatacaaaaagaattacagatctgccattaattctatgatccttgcaaatagtctgcatcaaaagctttgggagagcagtccatttctgctgaaacaactgcctgggattggaattgtaacagcaaaggttattaattttgtgattgctatataaacacttttgtat

SEQ ID NO: 5013 - DNA, 502 bp, Zea mays
atgttgggtgcgctttatggcattgcatacttatcagtttttgttgtatacataaactactgatattctaagtccttgtataaaattgtgtgacagagttatcgcccattgacacaccagcagtttcagataaccaagatacagtatcgaaggaatcattgctgctactttgcactgaaaatgcgatccgtttgttttccttgggccacgcaattcaggtatttgtatccctaattatataccacctttttctttaacatgagttgctgttgttcttatgattctatactccattcagggcacaaagaagataatcaataagaagaaattgagcagctgttgttgtttcgcctctcttattcatagttcttctaatgacattggacttatactcgtcttctccaatgggaaacttgaaataaggtgaggcaacaatttacttaaagacttctcgatgtgtctgtgcctctgtggatactaaagtgacgtcaatgtgcattga

SEQ ID NO: 5014 - DNA, 520 bp, Zea mays
ggagctgatgctgtactcgacattggagtatgtggggaagtcacattatcattctgaatttcttgactgttttggtcaccagaattcagtcctccaggtgattgctctgaaggtgctgcaatatcttcattcccaactactgtcgttgatctgtcagacaactcatactcaaactcaaaagtgttagttatttgcttgtttgtaattcccagtgaattttcccagtcccagcttttattctcttcaaatatagcatccctgctgaccactagcttcttgttagttggatcaaagaatctaaaccctttggtccctgattcatacccaatgaagaccatcttacttgatctgtcagagagtttgctgttcccaggacagagaagtttcacatgtgccacacagccaaacaccttaagatgatgcactctaggtttcttcccatgccatgcttcaaaaggagttatattcttcagagcttttgtaggatatctgtttagtagatatactgcaggcatgcaag

SEQ ID NO: 5015 - DNA, 485 bp, Zea mays
tgcgccgggtccgcgctgcccgccgcgggctcgccgggcctgttgccgccgttggtgctggcgcgcagctcgaagggcccgaggcggtggtcggcgaggcgggtcttgtacatggcgcgcttgtactcggcccacgtgaactcccggtacaggctctgctccccgtcccgcatcacctgcggcagcggcgcgatccgctgcgacggcgccggcccgccgaagtagatcacggacagccgggaccgcgcgccatccggcgccggcgccggcgccaccacccggtgcttcacgctccttaaccgcccgttcgtcagaacctgtggatggatggggtgagctgagcaagctgaataatctgccgtgccgcacacagcacagggagcagcaccgcagcagagcaggcacaccgcactgagtaccagacgcatgcgtgcgtgcgtgcgtgcacaggaaaaattaaaaaaaaaaggtgacctactttaata

SEQ ID NO: 5016 - DNA, 602 bp, Zea mays
gcagcattctttcgagccctcttgtttgccttcttatcataggtataaatgccattggttacattgacaacagaatgatttcttcgcttctcatcataaactaccttcctgctagtatctgacaacacactccacgcctcagagatcagtttgaaggcctcctcagcaccaacagacttgttcttgtcagggtgcagcagcagagctagcttcctgtattgcttcttcacctcctcttcatctgcaaaggcgcctagagacaatatccgataccagtcactctctccatcaatcttggactcagctgcaagatgaacttcaagcgttgagaccatctgcaatatgccttcaagtgtcgggcagagattctgggccttgagtgcatacttccgagcacccctgatgtcacgggcatggaacttggtctcagcaacatttttggcttttagggcatcatccatattgtactcctcactcatctgcgcctctggactcgattggccaacaaactaacttgagcaggaagcagcaaagcacaagatcaactgatcaagagctggacaagattaagtgtgcatccagattagagatcttcattgcct

SEQ ID NO: 5017 - DNA, 493 bp, Zea mays
tgctcagagatcacatcattcacagcagctggagagtaagcctcgtgtctcggcgaatccgtggcattcgtctccactgacgaaagacttcaggccgggtggccacgtgaaaacgccaccaagtgcggagggggcctcggcgttctcccagccggtctctgatttcaagaagatgaagaggcagttctattctggtccaatggcaagcggaccagggttaagcatgccatcttcgctgaacgatcgcagatcatccgcggcacaagcacagcatcttgtgatgccaggaaatttgcaaggcctcttctggcagccgtcatctgcgtccccaaaagttccccccaagatgttggggcggcatccaacgaaatcaccaaggatcagcgagctgcacgagctgcctaggcctcctccagccagcgtggagtccctcaggccttctggtttggtcggctactctggtcccctggtatccaagcgtcagactcagatc

SEQ ID NO: 5018 - DNA, 471 bp, Zea mays
gcctggcgtaaatgagcgcgccgatcgccactcaagtccagggatacatatacacacagcaatacaacggcaggaggttggggggcgcggaaagtggaaatttaccgtgcatgtctgaagtctgaacagaacggagacgaaaaaagaagaacggacggcatcagtctcgcgatcgaggctagggaaaaaaagtagtggtggactggaccgctaccacgactacgactagtactactagagcagatcaagcggggcaagaccagtgagacgcgtggggacttggcaacgacagagagagagggaaagaagggagcagccaccggccagcgggacaacccaaccaacgcgatctctggggcaggcaaaggacgacgggtcggcgagaggcggggccatgaggatccggaagcgcacccctgccagggcagcgtcgccgggaccgccgcctctgcctcctcctcctcccctacc

SEQ ID NO: 5019 - DNA, 532 bp, Zea mays
cttggtggacccgcgcctacagggagacctcagcctggaggaggcggagaggctgtttaaagtcgcgttctggtgcatccaagacgacgagtgcgaccggccgaccatggctgacgttgtccgcgttctcgagggcctccaggagctcgatatgcccccagtgccaagactacttgcagctattacagcacgcgccaatgcggatttcatgtgatagatagttcatagctagactgctagactagataattccatctccgtcgtgacgacgcaaggcctcatgatgattgagctcgagcatggctggcatggcagcaccttcctgcttgactgcgtctgcgtggtcagattaagcctttgataattgtaagacgatctgaaaatctgagtggttctatggcgttgacaatcattagtgcaattgacaataactcaatttgcattgcttacacaactggcaggtcacgcggttggtttagcgctgaatcaacgaacatgcaggtagctggagcaggagcctgcaggtcgactt

SEQ ID NO: 5020 - DNA, 529 bp, Zea mays
aagcggaagttcatcaccaaggaagaggagccagaacagtaagcaagcagtgtgaatctcacctctcctcgtagcagcctgtgagtgactcggatgcgtggggtgatgggatgcatgcaggtactggcagaccgcgggggagagggagggcgagaaccccatgatgacacccctgccctacatcatcatcttcggcatgtccacccccttcgtcatcctcgccatcgccttcgccaatggctggatcaaggtccctgtgcgatgaccgtaacgcgatcagccagcctggatcatagatgctgactcgtcaacctgcatcttatccagcgtgtgtcctgcgactttgtaccttcatatatagagacaagagttcttgcttgtgagcataattgcatgatcgcgtggtgtatgtaacccgaaactgtttaccttttcgcaacaacttcagtcttcactcttcaggctgtgttccgattcagtgccctggtatcaatcttcagttattcgcacaagagaagatttgtaccat

SEQ ID NO: 5021 - DNA, 592 bp, Zea mays
tgcacaacagcacaagcccttgtcgttcatgtcaaatgatcctttccttaattggaataccaactcaaaagcttccacgcacgcagccaaacgaaagtataacggcaatccaggagctcctttagatctctactagcttctagctaggcagctttgcgttgcccgcaggtgcgctacctgctccaacccgctgcatcatcgtcacatcttcatttcccaacgcatgcatgatcacgccgggatcggaccggaggccattgatcgatcgagctagctagagatgcatggtcgaggctccacagccagcctcggcacatgcatgcatggcagggcctgacaagccctcgctttcccgcgctgcaaatcctagtcgcccgaccgatctcgtcccccgctgcgccgaaactgtgcagtgcctcactgcctcgtctgcgtgctttgcatgcatgcagtacagtacagtgcaagctagctagggaggccggggaaaaaggagaaacaggtagctgcaaacttcgcctttcctcaggtggtccgacgacgatccatagtctctgcgcgcagtcgtctctgcactgcactgcactgcact

SEQ ID NO: 5022 - DNA, 397 bp, Zea mays
aggtcctgctgcgctccggtgtcgcccccgccaccagtgcacgccctgcgcgccttgctccaggacctcagcgacctgcacgagtacgccgaggagatcgcccgcctgcccagcaactgggacgcgctccgcctgccccggcaccgccggctcgtggagggcgagctagaagggtcggtggcgctgctggacctgtgcggggcggcgagggacggcctcgccgacgccagagaccagcttcgggacctgcgcttgctcctccgcagacaccgcgcggtgagccacgacggaccacgccgaggcggcgacgccgccgccgctgccgccagcgccaaggcggaggcgtgcgctgctgggttgctgaagaaggtggccagggccatcaggcgggagtcct

SEQ ID NO: 5023 - DNA, 582 bp, Zea mays
cttgcatgcctgcagtcgaccagctgctgctccgacagcgacgtgaggttgcccgtcacgatctggttgatcccttccacggccgccaccgtggagaaggcccagcagctgccgcactgcccctggttcttgacctccgtcacggcgcccttcttccgccagtccacggacgcgggcacctcgtcgccgccgtcgcccacgccgccgtacctgaaccggccaccgctggtcctcttcggcaggaggcccaggtaggtggccttgaactcgtcgtgcgtgaggtcggcgaaggcgttgaggcccagccagtagctggtgacctccttcctgttggcctcgtcgatgtggtgcaggttgtccttgaacacctcgaaccggcgcagcttctcctcgaagctgccgtacgccttgcggtacttggccacccactcctcgaacagcctgacgagccggtcgtgctgcgccaggtcctccggcgagtaccccacgatggagaagaagtcgtcgctgccgcggtccatgtcgatgctgctgtcgtcgtccatgtggtgggggcgcgcctccgccgcctgctgcaggtca

SEQ ID NO: 5024 - DNA, 549 bp, Zea mays
aatttcaatcctactaatattctatgaaattcaaactttctcacattaattagctaagctatgagcaaattctactttcatttttttttcaagctaaaaatatgttgctaaacagtcgcatcataaatgtcttcaaagagccaacttgattatacttttagaaactacattaccttcattgcactggacaaaatgtagtttataatatctagagaattgaaaagcttctgtggctgtttagtattgataatcagccagaaataactcgctttaaagttggtactgaagagagaagcaaaagcagcagcagcaacaacaacaaagccttttatcccaagcaagttgaggtagtctagagttaaaaaaccaatagaacccacagtcaagggttcgggcacattccaggcactcctattcaacgctaaatctttgggtacatgtacatctcatactttgaagtctccttttactgcttcttcccatgttaatttcagtcttcctcttctcatctcattgctatcgcgctttaggatcccactactcacatga

SEQ ID NO: 5025 - DNA, 503 bp, Zea mays
aataaaccaagcgcgcaggatgcactacagccctggactgaacaaacacgaaacaaagacaaacaagccattggtttagctgggtgcagaaagatttgaacttgagggcgagctgtgattgaaccaaaggttaggttttgatggcaaacataaaggctcgttgttcagctggtacatccagtacaaatgtacaacaacaaaaaaaaaggggatacctctcacctagtaggaatatctcggtagccaatccttccttcctatgaagagagaagaatccaagcgagcaccggggacaagagagcgtagcgcggttggaagaagaagaagaagctgggaagatgctgacaagcaattcggacggctaaataggaggtgagccggtgaggaggaagaagaggaggaggaggaaagggaaagcaacatgaaaaggggacgggcgcaggcaggagcaggagcaggattctatagggccggccggctcaccaccccccacaaatgttatc

SEQ ID NO: 5026 - DNA, 531 bp, Zea mays
ggaaattcctcacgagtccactctaaagcataggtaaatcacagccagataatattaccttccaagatatttgtttatccttcagaaagacaaacgaagcttagataccattctaaagcataggtaaatcacaggcctttttttagttttaaatctctctacatacatggcatagaacaacggataattgaaaactcagcattctattggtaaagcaattgtgtatgcgggtcagagaggtgcataaataccatgaaaagtatgaggagaagagtggacagtcttggcagcagctatgtgcaccttgggaactgtggagatctttctccattcagggttgtccttcactctaatctgggtcaccagctctggacagcagcctatgacatggagccattgtagggaggagggcatgtctggaagtgatgtaagtttcccagctcctgacaacaagaagaagttgagcgctctcagggctcgcatacttggtggcagagactccaatgaactggcacataacacctttagtga

SEQ ID NO: 5027 - DNA, 508 bp, Zea mays
atggaatccatggctgctggtcattactagctcctcctgtgcaggaccacggtactagctagctttatatttagaagacttgagaccacgcacactcgatgaggcccaagattaggttgccggccggagcagccaccattttattttaattactggcctcctctcgcaacaggagcctgccggccggtgcagtgcctggattaaattaatggaaggggccgcagacttgggcgttcagtctgctctgcctctgaggtgtagctagcatgcattggtgccgtgaaatacttgcattgcaaaggcacacaaggagcacagacgactagacgagatagaggacactggacagtacgctcgctgctctacacggcacactgctggagctgcatgccggccgccggtttctgacggacggccggcgtcgataatcgtgctgcaactgcaatatatataatgcaacaggaagtggcgaagtgcaaaccatgattgaataccacgacctgttacc

SEQ ID NO: 5028 - DNA, 551 bp, Zea mays
gaactttgatacagcaatgaggttgcttagccggcagttgggcatcaagaactttgctccgctgaagcccttgtttcttgatctgcatatgggcagtcattcatatctgcgtgcccttgctgctgctccagttatatcagttgctgtagagaaaggttggaatgagtccgcaagtcctaatgtaagaggccctcctgcacttattttcagcttctcacaaatggaagacagactcaaggctgcctacaaagccacaactgagggcaggttcccagaagcactgaggcagttccttagcatcttacatacgattcctgtaatcgttgtagactcacggagagaagttgatgaagtgaaggaattaattgagatagtgagggagtatattcttggtctgaagatggaactcaagagaaaggaattgagggatgatgtgacccgccaacaggagttggctgcttacttcacaaattgcaagcttcagagaattcatatgaggcttgtgctttctagcgccatggctctttgcttcaagcagaaaaactatgcta

SEQ ID NO: 5029 - DNA, 619 bp, Zea mays
cagcccccgccgcggttcttcatgatggccctcatggagctgagcaggtggccgtaggtgaccccgcgcggctggcactccagcgtccggacgaagctgtgcgtcatggccccgacgaccgacgcgtgggcgtcgggcatctgcacgccgcgcgtcgtccaagcagcagcatatgcatgttaggtatatagatagatgcaaggcagcagagctcgatcagcagtatgtatgtatgtatcatgtccctgaccatggcgaagttgcctttgccctcgctgtatccgctgatgagcacggcgtggcctccgctggtgcccttccaggcgcccgacggcgggctctcgtcctcccactgccagaacccgttcctggacatgcggcactggtaggggaggtccaggaccgtggcgctgtagcaggcgtccaccacggcgtgcagcctggcgccgtgcaccagcgggcgcacgatgacctcgttgatctcgtcgtccaggatgggcccgctctggaacgcgtccagcgggcagatggcctcgtcgtacccgtccgcctcgtcgccgtcgtcgtccgccacctgcgcgccgatgcccgagaagtggaacaccagggagtcgccgta

SEQ ID NO: 5030 - DNA, 456 bp, Zea mays
aattgtgctgtctggatgcctgatgaaaccaggagcgagatgatcttaactcatcagccaagggaaagggatataatggaccagcagaactgctcgattcctattgatgatccggatgttcaagaaataaaggctaccaaggatgcaaaagttcttgggccagattcggcgctaggggtttctagccgaagcaagcatgacgtggggcctgtggctgcaataaggatgccgatgttaagggtgtcaaatttcaaaggagggactccggaagtgatgcagacgagctatgctatcttggttctggttttgcctaatgatggttcattggggtggggtagaagagagttggagattgttgaagtagttgctgaccaagttgcagtcgctttgtcacatgctgcactcctagaggagtctcagctgatgcgagagaaacttgccgagcagtatagggac

SEQ ID NO: 5031 - DNA, 562 bp, Zea mays
tagttctttgctcttgtttaactcagctgatattctttgctgttttgccatgcaactctgtaactgagaatggcaaagaacatgccttccctgcaattccttaagcttttcgtttttcttggaatccaagtacctgagagaaaaatttcaggttaccaataagcagcaaaagtcaggtaaatgaaaatctgagaaatggaaaaggatacctaacccttttatcttcatattaagtcttccaagagcatcaagttcttgctggaactccctttttctttctgcaagctgatgatactcttcatccagcttttgcttcaaagcattatactcttgcaacaagctctctttctctttggacaatggatcaagagactcttctaaaagctaagttattcagatataaaatagccggcattcaataaaacatcatgcataagtataacaagtacaacgatattgatgcaaaaataacaaaacagaggtgtacaatagaaaacaatgagatcaataaaaacgtgtatttaaggatcagattcaaaacagactgcaggtcgactctaga

SEQ ID NO: 5032 - DNA, 568 bp, Zea mays
tggagttcgtggctgaggatgagattgtcgaaatcgtccccaacatccgcatggacgccctcaacatgatctgcgtgcgtctgccgccgccacccatttccatctctttcaactccccatcccccacctgttcttacatctcacgctgctgctgctgccgccgccgccgccgtgcagggggatttcgggcccttcttcccccagattcccaccaaggtgcctctctggctcgctgtcgcgctcaagaagcgtagcaagtgcaccatccgcaccccggactggatgactgttggtcagtgcttccttgttgcttgttccccctttattcctgctcaagcatacacagccataaccatctgttgcttgcttttgttcctactagaccgcttgacacaggtattggaagcggaaagagagtcgccacgagaattccagccattaccattccactatattgaaatttctaagcttctgtttgatcagtgagcacccatatctactccatcaccctgtttcttcgatttcagcacatcttcttacctaaacctgacccgctctcgtttgtttt

SEQ ID NO: 5033 - DNA, 531 bp, Zea mays
acaagctgcatatagaaagcgagggtatttatcatatgttggaggatttgaaacataattttacatcagctgcatatgaacctgaaccgttcgctatttctgaacaattgtaataaatttctttggaggaagattatcacttgttaataaaaaatccatcatatcataaatattaaatatatattcaaacttacgagcaggaaaaagcctgtatctgagaatgatttaattaagtagaagttagtaatcgtacacttcagctgcatttacatatttttttgctgggagtattcattttctagcaattagcacaagacaagggcactgaactacaatcagatcaggcggctcggcatcccccagcaattcctcgctctcgtgcttatctctactctacagctgtaagttctgtacatataacagtcatctagcctgatagtgtggtcgaaatgcttgattagatcccccagatagacggtctctcgatctagttttagcaacatcaacaactatcatccagccgtttatgat

SEQ ID NO: 5034 - DNA, 478 bp, Zea mays
agctgatggctaccccatgatttgtcaatggcagcataaaagctcgaaacaaaacacccagcagtagtagcgctacacacacacacacacacacacacacacacagagagagagagagagagagagagagagagagagagagagaacttcaatacatggcaatacgatttattcatcctgggaggcgggtgacttcttcttggcaactgaagccctctttcccttaagtgtccggcagttgttctttgtcctctggccacgaactgggagtccaagcttgtgccggatgcccttgtagcacctaatctccttcagcctctcaatcgccacacggttgaaacgtttctgtaaagcataccaaacagcagtgtgccagctctcagcgttttcactcccttggagtccaacatcgatataaaactaaacagttaggacagtcaggaatcatctatgactaaggaagtgaaattaaatacgc

SEQ ID NO: 5035 - DNA, 477 bp, Zea mays
gtagaaaaccaagaatgagttcctcacagctacaaacaaactgctgaaaaaaaggttattaaggggttagttcaaaatttgttgcattatataatctgggcagattataatcccaaacaaacacccctaagtcagacagttaattgagaaccaggacttgggagtaataactccaaagtccaaaatggtacaccatcattgctacaaagtgatcagctacaaaggccgtggtgccaatgccatcgcggcacaagttattaagcggcgggacttacgcgagcaccgtgaacaccatgattgccaccaagaccacgaacagcatgatcagatactaggcacccacacgtcaaggcaacagatggcactccaaaaagtaccaaggaaccaaagcgattaaaagcttcactcaaccggttaattggaggaggaaggatactgtccagagcaagcaggagatgttcttccaggcaccaagga

SEQ ID NO: 5036 - DNA, 498 bp, Zea mays
ctccactgttgctgcgccttcacctcctcttccgctccgaaaccctaattcctttactccggcgacgacccagctgcgacgcgccccattgccggaccaggaggtatatatccgttcgcgcctccgctgcacagctcgccgccgcggacgtctcgacggcgcagcagcttgaacttgaacttggttggttcttttggcttccctttttcttctaatgccttttcttcacgtcggcgaatttgctgttattgcggagtgcgttttcgtcgcagggttggaggcggcggcagtgggcttcgtcaccggtaagaggaaggccaccgaggtagcccaagcgtaggtactaattcccgttgttggtttaagtgtgtgcactgtatagtgtaaaactataaacatctcttccagctctgaattgctgaaattaacagtatgggcttcttctgaagcttgttaagtagccaactagtacaattttagccctgtgtttactgagct

SEQ ID NO: 5037 - DNA, 516 bp, Zea mays
ttttatgtactaactggtttagattctaggctcaactataaaagatgaagccgatagagttttaataaagaatgtctgctgtcacatgactacatgaggtcggtggccatgcaattttgcattgctctgtaataatctcgttttatagaccttttgtgtgttggttgtttggagatgttcgtccctctttcgatagcagttcgatatatcaatttatgttgaccctaaccttgagaggaaagccggaaccttttctccattatctaaaaagaacagagatgcatacacaaacataatcaatccttacattgcacggcaaatacacaacaatgaaagaaacaagaaaaatcgatgctacatcttgttaaatatgcaagatagtgatggtagtagttaactagttatagcgagaggagcactaatctaaatacgcagtatacagaagaatcagacacccacaggcattacggtttccatggggctggtggcggcggaggcgaagggaacatgggtggc

SEQ ID NO: 5038 - DNA, 455 bp, Zea mays
ctcaacggaggagagaggtcgtcgtcaaaccagcggcggttacctcgctcgcgcagccggtacaggcagcagagcagcggaggcgagcggcaacagcaacctcggggaggagcctccggcggcggcggcgagcgacaccgacacggaggtgcaggtgtccatcatcgggagcgacgcgctgctggagctccggtgcccgcacagggaagggctcctgctccgggtcatgcaggcgttgcaccaggagctccggctggagatcacctccgtccaggcctcctcagctggcgacgtgctacttgcaaagctgcgtgcaaaggttagcgccatggaatggaagtatcatggaaaatgctgtttcgatctgcgattctttttctattctcttgttgggcgacagaagacagattgatttcaggtgtgcttctgaatgctcaagtgttcttggattgtct

SEQ ID NO: 5039 - DNA, 570 bp, Zea mays
aaggatcttggattagtcataagtctaaggatattgtagtcatataactaactaggacttggacttaaggacatactcctcttcattagcatccaggcgatgatctgctgataaaaaatatattgaaccctcagcagattctagaatgcatcgtgaatcgccaactgatgctacagtgacaacccatccatctattataacaaaagtcacagtggtccctgagcgtgcagctgaaaacattataacagtcagtttacatcgcagtgaaagagtctgaagatcccatggcaatataggaagctaacaccatgcaatccacagtaaacagcaaatggtgtatgctcctgtgaacattgcaaatccattgagaaataatttgcttttggatggttaaaagacaggcagacctggcatcccatttataataccttttccttggaagtctttatctgtttttacaaaaccagcaactagtgcccttggcagcgcagctttccactcctcacttgtgagatttggaggaatagcagccaacacactgcttattagattctcccgggtgtatatggc

SEQ ID NO: 5040 - DNA, 513 bp, Zea mays
cggacccgggtgttcctctaagtcgacctgcagctgcgcgcgcccggggacgcagcctccgtcgacctctgccgccgcctcgtccaccagatcgtcgcgctcaccgacagctccatcggcatgctccgctcgtccccggacctcgcctcgccgctgcccgccaccgggaccgggagcccgatcagcagcgacgccgcctccgaccaccccttccgcgccgccgccagcgccagcgccagccccagccccagccccaagaagcgcaaggccacggcgcgctggaccagccagcaggcgcgcgtcagcgccgcgggcggcagcggcgccgagggccccgtcgacgacggctacagctggcgcaagtacggccagaaggacatcctcggcgccaagcacccgcgggcctactaccgctgcacgcaccgcaactcgcagaactgcccggccaccaagcaggtgcagcgcaccgacgaccacccggcgctcttcgacgtcgtctaccacggcgagcac

SEQ ID NO: 5041 - DNA, 594 bp, Zea mays
agcttgcatgcctgcagaggtgcaggctgctggccatgcggagctgccccgagtgggagccggagaatttcacggtggcggcggcactcctcggcaagccgctcgtgccgctcggcctcctaccgccgtcgcccgacggtggacgacgacgagaggaggacggcggcagtacggcgcgctgctggctggacgcgcagccgccgagctcggtcgtgtacgtggcgttgggcagcgaagtcccgctgacggtggcgctggtgcacgagctcgcccttgggctggagctcgccggcgcacgcttcctttgggctctccggaagcccagcggcgtcgcggacgacgccgacgtgctcccgccgggattccgggagcgcacctgcggccgcgggctcgtcgccatgggctgggtccctcagatgagcatactggcgcacggcgccgtgggcgggttcctgacgcactgcggccggaactcgctcgtcgaagggctcctgttcggccaccctctcgtcatgctgcccgtcgtcggggaccagggccccaacgcgcgcgccatggagcggaccaaggttgggctgcagcgtggcggcgaac

SEQ ID NO: 5042 - DNA, 522 bp, Zea mays
tgtgcaacactttgctggtatgactcaagtgtttgccattgttgagtgttggtgtcaaagtaccatcctgggtattctgcgtagaacagcatgttcggtgggtattctgggggtcctgtgttggtcccaccctggacccagctcatggcattggtgctgctctcttccgcaatggtttcaagtgctgcatgtaaattgttttgcaagtacgatgcactaaactgctgctgatgttgctgtgtattgtcactcccaacggctacaacagcaccagtattatcagcaacgtaactctgtgcactgtgggtatctacctgataccactgctgtgtcgcctcatcatacttccaccccgggtagaggctctccaggtatttgggatcagtggagcccaactgtgcattagtgctttgatccccgtaccctgcactacttccactgggaccgaaatgagagttagcatttttatcaactccgtcagagaagctgtgtccagcactaatcatggcagtgttatacact

SEQ ID NO: 5043 - DNA, 603 bp, Zea mays
gcagcagccctggaagaagccggcgagctcgcgtttgatgtcacgatacgccttctccgtccacgccggatcatccggcaggagcctcggctcgtaggccacgagatacgcgcagtacctcgaaactcgaaagcatcagggctgcctcgccggtgggtggcactgggtggtcgttcttgccgccactcgcctctagtagcgtcgtcgcgagatgccacaccaggatcaccgtggcggcgccctcgctttggtcgcacgcccactcgaggtgccggaagccgccgcgacgccgcaacgcgttgctgccgttgctgaactggccctcggcgttgtcgtcgacgacgtcgaggacgtccttgaggaccgccgcgatggcctccttggcctgggcatggacgacgacgtcggagagaccgacgaggcgcctcttgagcaggcgcgagagcagcatccagacccgccgcggatggaactggtcgagcttgagcacggtgaactggtgcaccttgatgacgggtttggagcgcttcttcatccacagggcggccttcacggtcctgcggacgctgtcgtctgccttcgcagggcgagcttgcggccgta

SEQ ID NO: 5044 - DNA, 512 bp, Zea mays
gggcaattacaaagctcttcaggtatcctcttgctacatactttttctaaatactgtgttgtgagttatgattgtaactaattggtttcattttcctttgcttcgaaagtcacttctgcttcatgcccaagattgtgttgatatacctaccaagaccaaagaaacgccattattttttgcagtgaagaatggttctgtggattgtgcaaaacttcttttgcgtttcggggctgataccaaagcccggaacctgaggtgtgtaaatctttggaggacagtcaagtaatcgaattacaaagaatgagttgcaaaatgaaaatagaaataatgttttagtttatagtctgatgcacttaacattctgcaattatttgacatgaacagaaagcaaagacctattgatgtggcaacatcccaggacatgcgtttcatccttagctctgcgaatgtgttactatgtaagttacatagcgacatcagctttcatttctttcttgtagtttatttgatct

SEQ ID NO: 5045 - DNA, 384 bp, Zea mays
tgccagtaacctctgtatttggcaattcagacgcatttgtgtcctggataacagccacagtagagtctctctcctccaaattaatcactgaaccaatctcggaagtctggttactgctgctcgactcactttttgcatccataactgaaaaatagctttcaacagcaatctctgaattggtatgtgtaacaccatccagagtggcattgtcagagtttttctgcatcagttgaacttcaaccatggtattaacaatcccagacccatcagtcttaaggccatcagtacctttctctcctttctccaatgtaccctcattacccacttccttaacatcgatcggagtgacttctggttcactagcactggtatcaacacttgatg

SEQ ID NO: 5046 - DNA, 530 bp, Zea mays
tgggcgttggccacgtcgacgatcgccattggcgccgcaaccaagctcatataatagctagcttggctaatatataggtgacgcgtatgtatatattgcagtagctgttactatatatgcacacttcacactttgtggtgagtgtatatagtagcctacaaagctacatatatatgtagctagtgttggaatcgtgagctgtggagatgtgcaattcgtgtggtgcggatggcccagtatctgctgctatttataggagaagagaaatcgatgctgatgccctctgaaaccagacatggtttggcttcaactctggactgtggtgacagcggttttggcaccaagtctccgagttttatttattctttttactattatatattacatataatgttttttttagaaaatatatcatattacataatatatgccttcaccggttgactactcaaatcgatcactatttgctcacacgcactccgagctaagccaaccgcatatcttataaaaacatccaacacagcatacta

SEQ ID NO: 5047 - DNA, 555 bp, Zea mays
ttgtggcaccagggatggagacgtcaattttccaggattggtggagtatggctgaaggtcttgtgccatctttgcacaggaaagggttcaacacattggttattctcgtggcttggtggatctggaagcacaggaatgcttgtgtttttgatggtgtctccccaaattcgaatacagttctgcaacagatccaggaggatgccaggctttgggagatggcaggtgctaaggctctgagaaggctgtggccttaaattaggggcttggttcacttccccccccccccttttttttgtttgttctttctttttcttcctttttctcctttattttctaattttccccccttttttcctttttttttgtatacctgttgttcttggtcttctttagaccttctctctacttaatataatgatgcgcagttctcctgcgtgttcgagaaaaaaaaggtgttagccaaggtgggaaaaagatccttatattcaagaactgtggcgcaaaccttgagaattggcagtgggttagggatatcaaagctcctctctcgctggc

SEQ ID NO: 5048 - DNA, 453 bp, Zea mays
gatattgaatctatgccatttattgaagctttgggtcagttctcttatcgtgaacagatattttagcttgttgcagtactaaggttagttatcaaactgcgacaaaatttttacattgttagaatatgaccattactgagtcccttggcagtacttataactgaaactgtgtataacaggaattagaggaaaatgtgaagaagaaactctcccggttttgccatgttccggtagtgaaacattttaattcaaagcttcatatgctgtagacacttcactccaggaagttaattcttcgttgttttttgcaggcagcaaatattatcactttgtatgatgtttccaatatctggcgtattcctttgttgctacatgtaagtcacatctgttttctttggtctgagtcatttttgttttggtattcacattctctgttaaaatgtcatttgtgct

SEQ ID NO: 5049 - DNA, 528 bp, Zea mays
actcattgtgacagcggaaccgcacgttgcatcggcggcggcgcgtcggcgagaaagtgccaacttcttaagtaaaacagacggaagcaccgactgtggcgatacagtgctcgtcacacaccacctcctaacggctgaaatggcgatgcggcggaggcccaaagcgttggtccactgcacactgacgtgacctttgtgccgctgtcttcggcaatagagtcattttgtattttttatattagcccccatgctcccgtatatccatccttgacgcccagcggcgtcgacgtgacagtttttactactatcaacgaaatctacctaactctggcgcatccgccagtagtttctctagcttggcttcgcagcaatgctgagccgtgtcgaatcagtgatgaaatcagctttggttccataataataaaagtcaacatgacacgactttagaattctactctagttgtggtaatggtaaccattttctgtggattgatgcggtttctataatattctatttttatagattaa

SEQ ID NO: 5050 - DNA, 572 bp, Zea mays
aaaaggtcatgaaaaaactcgtacgccgattgcagatcagttcaacgcaaaggtgctctccaatggccgctcacctgtacttgacggtctcgctctgcccaccaagcatgatgctcttcttcaactccaatcctgagaattcagagaccaagtgatgacccgatacctgtgcgcaaccgatcttgttggccagatcttatggatcagaggaagaaagacgatgagttcatgtcagtgaggcaagcacgggaaggcaagttgcagaatggctgattggtgcctctttcagtagggattacgcagcattgaagaattgatgggagggaagggcatgaccaagaagagaaggtccagctatgtgcacaagtcttgcttggaagatatataggtgaggcaagttggatccagggataaatcttgcactacaataatgggcagtagtagtaggccactagatacgatgctgacatatatacaggagcaggagatgcatgccaaccatccacatatttggtcaggagctgtccaagtctccgtgccagcaggtttactcaacaaacctagacctaaca

SEQ ID NO: 5051 - DNA, 587 bp, Zea mays
agattggtatatacattaaaactatcctttgttgtgtcatctcatttgcagggggggaggctccgcatttatgggcaaagggtttgcctagctttatcgcttccccagacttcatttagaacttgttcggttattctcattccatatgaagtgtatgggattagaaaaaaataataagaaaaactttgacttgctagggatttaaattcactcaatcccgtccaatccacatggattgaaattaaaacgaacatgtccttatgtgggagtatcatgcgttgggtctgcccatttttgttatctcacatcaagatcaggtcacatccatacacgacgatacacagttttttcttgaatatgcaagagagctgcatgttttgttttttgtggtgcttctttaaatctgagtgtgtgcagcagtagagcctaccgcctgtaactggaaggttccggattcgagccccagcctctacatattatgcgggtaagacttgacgcttaaagatacccttccccaaaccccccacagtgcgggaagcctacggcactagatacaccctttttttttaaaaacctgtgtgtgcaga

SEQ ID NO: 5052 - DNA, 507 bp, Zea mays
gatgggcactgggcaacagatatacaggatagagaagttattgatttctgtttgcacatgattatcagttgcataaaagagaccaaattggaatacccaacataacactaggcgaccttagagagggatagaagacaatttgaacaaatgattcttgttacagtacttgagtgtggaataaaatagttcaaataaagcataagtactaaaatagctggtcatgaatgtgctggattacctatttcaatctctaaataagaaatgctgaagaagtgaagagtataataaagatttgcatatcatcataaagaaaattacctcaagaatccacgcaatgtatttaacattattgacatgctgatttatatcaagatcagcccaacgaggctgcataaaacagaccacaaaatatataaaacagcaaagaaaaaataactatacgaacagactagcaatctaatctaaatattaactcagttacttacagtcaggcctgtcctcacatat

SEQ ID NO: 5053 - DNA, 523 bp, Zea mays
tatcatgaagcttggtggtcaaagtcccaaaagaatgagggacctatcaagcttgtgggttccaccagtataccggagactcttaagtgctgacaaggcagaaagggacatggtagaaaggtgccttattaaggtgtcatgtgttattctaccacctcaacctctcctttccaaggtaattaaaagatcgctgttagatgacgctttagcactattagaagaaactcatatgaatctgtagcttgcaaattcatagcacatatgcacattgtggtctttttttaaaatagactatctcctaatagagcatttacgccaacttaactatctggttgcattataatggtgcacccaacggttcaggtagattgggtgacttattatgataaatcttgagggcagcttcatgtggaaaagcaatggttcaatacattttttgtggctgaaatgccaaggcaatttaactgaattgcatggtgacatattgatgtactccttgtgatcttgtcacacacaacaataa

SEQ ID NO: 5054 - DNA, 507 bp, Zea mays
cgctgaaccttagctccaaccacttcaccgggccgctgccccgcgagctcgggcggctcgataagctcgtcgtgttggacttgtcgcgcaacgagatatccggccagatcccaggcgacatgagagggatgctgagcttgatcgaggtcaatctgtcgaacaaccggctcgcgggcgccataccggtgttcgggccgttccagaagagcgcggcctccagcttctccggcaatgccgagctgtgcggcgacccgctgaccgtagactgtggatcatcaatctatggctccagctatggaacggagacggaccacaggggaatatcttacagggtggccttggcagtcgttggttcctgcgtgctcatcttctcgctggtgtcgttgctggtggcgttgttcatgtggcgcgagaggcaggagaaggaggaggaggaggcgaagaagaaggcggcggaggtggcggtggcggcagcagccccacaggtggtggcctcggccgtgttcg

SEQ ID NO: 5055 - DNA, 463 bp, Zea mays
ccacagccctgtccgcgtgacagcacaatgcgagcgaaaccaggcaagacagatcacagatgcgacgcaaacagaacccgggtctctctttttccttttttttctttttcttttgtttcgacatattgaatagaacgccatgtttccagagttacatgcatcaatcacctgataataaaatcactgacgcattcatcactgccggaacccagagccagagctgtactatgcacagacgctctggcatggcagaaactaccgggccgatcgatccatccggcgtcgctgcactgcacctccaaggccaccccggctaggcggcggccacggtctccccgccgctgccggactggtcggagccgctggcgccggacacggacggggcctccttgatggaggtcagtgagcagcaggtcttctccatgcgctcgtcgtactcgatccgcttctcccggcactcctg

SEQ ID NO: 5056 - DNA, 616 bp, Zea mays
tgcctgcagatatagcatctttgttctggttctagggttctttcggtttgtctccacgctttgcgccaacctttctcttctttcttgctatagtacgtagtagtacacaccgcaccacgaaagaaaaaaagacagtttggcactgccgctgtgttttgtcttatatgattcagactttcagcgatcagtacgaacagccttttcagggacagcgtttaggtccctaataatttcagcgctctaataatcatggctgctagcgacattttgccttgttggccttgttgaatgatttaggctgctgtgcacagtggcatctacgactacgacctagctagctaggtactagctttcatcgataaagtaaaaaagaaaagcattggttaataaaacgtattaaaaaaaagtagtgcaatatgcatgggagtaataatatatactactgtacctcacgggctgttgcggaccggaacgtgatcatgtgcgccagcgccgggatgatgtagacggtgaagctgacgaggagggagccgacggcggagttgatgggcccgaagaaggggaagatgatggcgaggaaccagatggggacgacgacggggaggcgcgcggcggc

SEQ ID NO: 5057 - DNA, 601 bp, Zea mays
tgcatgcctgcaggcttgcgttggaaagaggggtccgaaacaagacaagctgttccccgccggcgacgccgcctttctcgccaaccacgacggcggcggcgctgccgcggcagttccagcgcttcatcagcctggcctgcatggctgagtcgaagtactgcgtgatggagagatcactacagtagttccacatcccaaacgccgggatctgacaccccatcatcttctggcggtatagtacaacagtaaaaatatatactcacggttagacagacagagaactaagagaagtgaagaataacatctcattccagcagaaagaaacgatggtagctagtaatagcttcaaatatacgagtttttgcatgcagaatcctgtttaatttggatctgactcacctccatctccatgcaatgtcgtcgacgacaggagactctcctacatcccaagagggccagatgaggtggtcaggccatatatagcttttaggcgcgcggtctggtggtgcagcccagagatgcggtgatgcagcgtgcacatttatatggacgagtgttttgtcgcggtcatggggttcatgcattggcggtggcagtgcag

SEQ ID NO: 5058 - DNA, 1204 bp, Zea mays
gccgcctgcagcctgcgccctggagaaggaagcctcctcagtgctgccaccaggacgaagatccctaacatagcagcctagcaggaagcgccacggcccaccgcctgtgcctgatccattcagcaaagctcaaactgccaccaatgattctgccatgtcgtcaagatggacaacaactcatcaccctctgatgccgatgttgtttagagttagatttgattctctttaaacgagttagcgattcatgtgtttccagtaggatgacatcataagttttaaatttggaaaaagaaaattcaagctccatgttagaatacccgttaggatttggggttctccccatgtaattaccctctcacccctttccctttgtaatggacctagcccagttacctcaagtctattaatagtttaatacaactcccaaccctattccagggttagggttccccacatggtatagagctaggattagttttctctcccaacaccttcccccagtcgccgccgccgacctgtctagtccagccgccgctgttggaataagtctcgtggtttatgggaagaacaacaccatctgttggtccttgctgcagctgccctgccaatgtttgttgctgttcccttcaaatccctcctcttctgttgtttcagactttgatgctgagagtgaacatacactgtgacgggtgcgagaagaaggtcaagaagaccctccacaagatcgacggtacaaggacgaaccaccgatgccttctttttttttctttgtacgtcagaccgtttggtttgctctgcatgcggaaacgtgatggaggttgaccttgccactgtaggtgtctatcagagcagcatcgacgcggaacaggggaaggtgacggtgtccggcctgctggatccggacaccatcatcaggaagctcaacaaggccggcaagccggcccagctgtggggctccaagcctggcgtccctcagaacggccatggcggcggcaaaggccagcctaaggacgccggcggtggcaagggccattccaaggatgccggcggtggcaaggcccaaaagggcggtgcgggtggcggcggtcacaagggtgccggtgccggtggggccaaggatcctaagatggtgatgccgcagccgacgccgcagcagctgcaggtcactatagaggatctggggttcgagagggtgattattgta

SEQ ID NO: 5059 - DNA, 508 bp, Zea mays
tttcacctgaatagtatacaatgacagaccaagttgatcacgtgattcacagcagcagtgtcatcgcaagtacagcacttcgcacctgatgagcacagcacagtgcagtgcagtgctcatcgcgccattgtcaacgacgaagccctcttgcaccaaccaacggcaaaaaaaatatgcacggaggaatctctcggacgatgcatgcatgacaaggacacaaagcactggaacaacatctcacgggatgctttgctctgggctctggccctgggggctggggaaggtctgctccgaaatggagatcttaacaagaattcagtaccaccgatttatgtcgtatatggcgagtaggttaacgatgtcaggatcgtatgatgagcaggttaatcatgccgggatcattgatcggcaggttaatgatgtcaagatcataggtcctgaaacgacggacagctcatgttggtacagagaagaccgcctgaatattaatcgctgcctctgaatatct

SEQ ID NO: 5060 - DNA, 519 bp, Zea mays
cagcaaagttcagtattacaataacccgatgtggccaggtacttgtttccacacacactgccgatgctgtctaaattatggctgacaattgtctactggagaggccaattctcatatctcttgtgaccttattctcttatgtaggagaggccaattctttgaaagtggagaagatcttataccaggggaaatcgctataccaagaagtcttagtcttcgaggttcacatcatctgttcataccagaaataagaagaaaaaaactgcatttggcttattctgtttgtaacgtggtaatctttgtatgcagtcgtcgacctatggtaaagtccttgtgcttgatggtattgttcagttgactgacaaggatgaatgtgcataccaggaaatgattactcacctgccactttgctcaattccatcccctaaaaaagtatgcctcctgatctcagtttttcctcaatattgtaaaattgtagagaacgctgtgctgattggcagaaatccattggaagacttt

SEQ ID NO: 5061 - DNA, 532 bp, Zea mays
tttttgagcctctgatccctggtgcacgccatatccaccccttctctctgtctcggcatctgtttgagcagtacaaaccctatttttggaattttatagcattgtttcgtgatcagtcagttatatttaacatatggtagaaatctgagcgactttccataatatttttctaaaaccgcatattcgtctcttcgatactatttttctaagatcggatattttaatggtacagatctaattatcccaagcacgcttcctcgacttcctatctcgactctcccaagtcacaaccctcgacctcccccctactccaactactggaagcgccgatccatcaggttctgatcgattcttctgccccgatccgcagcggcaagcggagatgaactgcgagacctgtcagctgaaagaactggttcgctaccgatcctaacccatgcctcggtttcgctagggttcttctgcttgctttctggtcgcatatgctgacgaattctttttcatttatcttttatgaattcttgttgtttgg

SEQ ID NO: 5062 - DNA, 524 bp, Zea mays
tttacatacaaagtgttccttagatgcatgtaattatgagttaattgttctaaaccttctcctgtgaaataatttctcaccattctgatcacgctgtccgtggtcagtttttttccggacatatcattttcacgatgtttttttactgttaagtgttaacattaaggctctaaaaaaataattgatagaatgttggcttgaacaaagttgctctgatgttttctttaagttcaaaataaaacataaaaaatcccattattttgtttgtggttatatcttcttcattttatctgttcatgtaaattcaccatgactggtgacaacaccagattgttgacgagtttgagggggtcatcgaacagcaaaaggatttcaacaggtaggtgtttggttcagtgttactcacaggtttcacctgacaatctgacatagtaacatggaaactgtgatcactggtcaatcattttatatgatatatacatttacactaacatgcaagatatattgaacctttctgtagtttt

SEQ ID NO: 5063 - DNA, 1037 bp, Zea mays
ataccatcaagcaaaagttcatattcacatggtagaatgacatgatatagacgttttttttttctcgaacaccagagtcgaaataatgtattgtcagttctaacttctaaggccattgctaatccagttcttgaattcagtttagtcagaagtgatgagatttccatgtataattttcatcatgccagtgaggtgtctccttccaaaacattttgctcaaagcacattgtcgtaaatatatataagaatgggtttgaattttctacaaaatactattagccccaaaggtcaaattacctgattggtcacaactgtacaaaactatcatgtgcaataaacataagcatgatgttgtaattctaacgtaaatctatatgaatcagtttgaggttgcaggatgcttaggcatgttggtaagtataacatagcttcctttcatatgtccttctgtgggtggctacatgtaccttttgccctagaatatgacgagtcgaagacaaatttagcttctagctcaaaatctgcagcgccggcctcaaccgatcacagaacagggaaaaagaaaatacttagccacatcattatttcctcatattttccgggaaatatgggctgtaaatgtttatatgcttttcttttttattattattacagctctttgaagcagcaaccaagagcacaggggcacgcacagtcacagcctcacagggcagggcgcagacagacacagaacggcaaagtccaggacaagacgcactttccagctcctttgtggctttgtccacgacggtcgacgggaaccacctgaaacctgatttggtgatccaccagggatcacggaggaccgggagagcgtgtcgaggggaaaattagtttaattttttttgttaatctcttctaatatctgtgatcactctgtcaccaaataaaccgaatcgagaatttttttttaaaaaaaaccgtcccacaacgggacagtcgatgaagcggtgggcaatcctgaaacccacaccgtaaccccatctgcactgcactgc

SEQ ID NO: 5064 - DNA, 451 bp, Zea mays
atatttgtttttttattccgttgtggcgggcattttctgccccatgactgtggctgttctgacagtttgatacgctgattattaggaccgccaggatatgtgatcatggctatggctgctttctaacgtaataatatgatctctgatcgggtgaacttattttcttaatcttgttattggactgccaaagaatcagtggccatgggatctgctatcctcaacagcattgcccccgaggagcctaaagtggtcgtgccagagtacggtgagacggctgatatccaggacaaggaagttagtatggaacagctctgctccataagcacctatgatcagtggacgccactctctgtttctggccagcttcccaaaccacgctataaggtctacttcggttgtcttgactgcctaatttcacttagctcatttagtgacctgttgtctgtgatga

SEQ ID NO: 5065 - DNA, 559 bp, Zea mays
aacagatggactcgctggtggccgacgatgtcagcagcggaggagggtcgcctcacaggggcgtcggcacgcccctgaagaaggggccatggacgtccgcggaggacgccatcctggtggactacgttaagaagaacggcgagggcaactggaacgcggtgcagaagaacaccgggctgttccgctgcggcaagagctgccgcctccggtgggcgaaccacctcaggcccaacctcaagaagggggccttcacccccgaggaggagcgcctcatcatccagctccatgccaagatggggaacaagtgggcgaggatggctggtcacgtaagtgccatgtccagtatttgattccctgttctgcacatcggtatttcgtatttcatctgcacatgccgaatacttgattccctgctctgtgtgttcgttgggtctttattacgtacgtgcagtctttaattcaagatgtgtatatctgtagttatatttagcgaactattctatttcgcgtcacgtactggaactgtaatgatttgtccatgttgctaaatgttgatgtt

SEQ ID NO: 5066 - DNA, 516 bp, Zea mays
ttttcattatcatgggtttcaatgatgtcagttacatacacaccctggttgtccttagttgtgtgactatccagcccatgagtagaacaattagtttttcgtattttaggagtcggtatctgagaagacttgcctttctgctctacttccccaacagtgcttaaaggagtgtcaactacataacctccctgaaccaaattttcttctgcatcatttgtttccttcaatgccaatgtatcacatacctgcttaacagagcccttcttcctttgacgcttagtggttttgcgcttatcatcagcttgtgcaaccacatttccagttactatatcctcaggatcacttgttttatcagcaaacctcaaagaatcagattctgttaattctctattagcatcttcttcggatacaccacttgattgatgagaagagtcagtcatggttgatagcactttcgattttttccccttagacttcttttgtctaggtgagctaacaggagaagcaaagtgaacc

SEQ ID NO: 5067 - DNA, 572 bp, Zea mays
cttgcatgcctgcaggccggagtcgcgcgcctccagcttcagccccgccgtcgccttgcggttcgccgacggcgccagcccgaaccgccccgcgaacagcatcagcgtcgtcgtcgtcaccatgatctgcgtgcgtgcatatgccgtcgtcagtgatcgtcgtcggtcttttcctcacgtacgtactcatcagacttcacatgtatatacatatacctaccaggttggtggcggagccgatgtagtcgcagcggatgccctgcgacgacgacctcttcctgcccaccctcacggacggcagcgctgccaccgcggacctgggcgcggcgtagccccggaggccgtggaaccggggcacggcggcggagagctgggatgccatgtgtggcgcctgcgtcgtcgtcgtcgtacgtcgcacctctgtgccgctgtaccgtcctcagctagcgcggagtggtgtggtactggtggtagtggcggtggagctcaagtgcgtgtggcttaaagcctggacacggcgaggcgtgggatgggagccaccggggcagcttgtggcctgcaggcatgcaagc

SEQ ID NO: 5068 - DNA, 497 bp, Zea mays
atccagcaaaggcaacgctgagatccctacgacttcgaacggcctgtgacctgtggatctgtgccagcctgttggtcgagctacctgctccagcccgagcagcccgtgttaaagctagctaaggaaacagggcctaagtgagctccagaaaaaaaaaaggaacggaatggaggagggggacgtgcgggtggacctcgacaagctccccatcaagcgccttgaggccattgaggagactggcaacgagcactacccaccgtaagtttgctgacagcccgcatccgctcaaatccaccaggaactcacgcacttttccttcgtctgctcgctgagtggtgcctggggttgcagtgacactagcaacgaggagcagcgactcgcggccatccgccggattgacttctcctgggtcatagagaaggatgcaaagaaggccaagaaggcggctgaggctgacactgcccagcaggcatggccctggcagggccttatggaga

SEQ ID NO: 5069 - DNA, 496 bp, Zea mays
aacggcaaaattaaatatatactattctgcactgttacaataatgaatggccatcattcaatacgatacgtacgattgatgcgcccgtgagcacggtaggtgcggcgcctctgcttctgggcttgattcacctggatgtgtgaaacatagaggttgtccacatccaagcctttcacctggaaataacagacatgttaagtcaaaccagacagtaggaaatgtgagtgcacgcttaaaatgaaaaggaagagacaagagggcatacatcagcgttactctcagcattcttcagcaaatccaatatgaacctggctgacttaacaggccagcgaccctgcccattggagtggcgagactttgcttgtgcggtgcgaccaacacctccacagtatctccggaagggaattgcctgcttgtgagcaataacatcctcaaggtatcgcttagccttggtcaaaggcagcttgcgaagcgcaaaagctgtctcccttgtgtt

SEQ ID NO: 5070 - DNA, 564 bp, Zea mays
ggtggtgctggtcgtggtcgtggtcgtggctgccggcggactcctcgccgtgctcaacgaccatgggcaccggctcttgttctgccctttgcctgttcttgccgagcgacgcgcgcttactgctcccgggctggttgtgcttggaggaggtggaagacgacgcggcgcgcttgcggcggctgctgctgctgcggaggaggaggacgtcgggcgcggcggcggggtccctggcgacgtggcggatgtcgtggcgacgtggtccgagcagcagcggcggcgaggcgtcggacgcggcgtcgacctgcacctgcacgatggggtcgcccttgagcacggcctcgacggcggcctggcacgcctgccactggcccgaccagagcaggccgacggagccgtagaccgggttgacgatgcggccgcacgcctcgtagagcagggagcggaaggcggcggggcggaggtggtcggcgggcggcgcggccagcaggttgagcagccccgcccggccgtagaacttggcgaggaagacggtggcgttggcctgcgcctcgggggacttgatcc

SEQ ID NO: 5071 - DNA, 490 bp, Zea mays
gaaagcttaaatgagaagctcaccaatcacaacaacgcaatacgtagaaaccagcaattcggtgtaccatatttgtttcttcttctcctccggtccagaacgagatccccatcctcatccacggcgactgcgtcaggcgaatcacctcctcaacagagtaaatcatgttaccccaacgagcaattcaacacatacgcacaaaactaacctctacgtcaacacgaactaacgcaaatacacatccactgatccacagtcccactcagttaccagaaccgctagttgctgcgactagctcgctcccgccgccgccgcagccgcctcctttgtgtccatatggccctgaaaacacagaatcaaagttcaggagagttgagtacaaatcatgccgtgtccgcacaatctctccccggtacgcgccgagaggcagtgcagggaaggtatatgatgaaaaagcgcgcaaagggagcgcccggcagcccggctagag

SEQ ID NO: 5072 - DNA, 511 bp, Zea mays
gagcggcggccagagcgcgggcgcgtagggggccgtgagcgtgttgtccttgtcgaaaacgacgccgcggaacccggcgcggcggagctcagcccagtcgagccacctgatgtcttgcaccgacacgtgcggcagcgccaggcgcggcttggacgccgcgacggccgccaccgcggccacaccggctgggttgaaccgctgccccagggcgcgccgccaccacgctgccgcgcccatggtggccgctctgtccgctgaagtggcggcggttgtcgtcgtcgccgactcggtgttaggatttgcagctctaggtctagggggcggaagcggggaggcccgggcagcgcaagggcgtagtagcaccggcggcgacggtagcatcacaacagggtcctggctcgttgccgccgccgatagttgtgccgtgtggaagtattgataggaatggccagtcctgtaccgtattttcgttttataccgccggaaacaggacgggattattggccaacat

SEQ ID NO: 5073 - DNA, 497 bp, Zea mays
ccactgacgtccgtccccacttccgcgcggggaactgcctgtacggcctcggtcgctatgctgaagccaaggaggagtaccttcttgcccttgaagccgcggaggctggtggctcacagtccgcggacatcctcccgcagatccatgtcaaccttggtattgccatggaggccgaagggatggtacttggtgcctgtgagcattaccgagaagccgccatattgtgcccatctcatgccagggcactcaagctcctggggagcgctctctttggcgttggggagtaccgagctgctgagaaggcactggaggaggccatcttcctgaaggaagactatgctgatgcgcactgtgaccttgggtcggccctgcatgcagtaggggaggatgaccgtgctatccaggagtttcagacagcaattgatctcaaacctggccatgttgatgccttgtacaatcttggtggattgaacatggatgctggccgcttcgtacgg

SEQ ID NO: 5074 - DNA, 566 bp, Zea mays
cttgcatgcctgcagcgctgcgccggcaccgaggcgctccgtgtcggccgcgttgccaagggcaacgacctctccgtgggcgacgcgggcgcgtcgcagaggcatctctccgtcgagttcctcccgccgcctgcggcccggtggaccgtcaccgatctaggctcctcgaacggcaccctcctcaacgctacgcctctcgtggccactatccccgctccgctatccgacggggatctcatcaagatcggggagacaaccgtgctcgccgtctccatatcgaccgatgcaggcccgggcccgggaccgggccccgtcgcgacaaggcgttccaggcgaaacgcagcggcggcggcggatgaacagggcccggctgttcctcgcagggctggacggaggaaggctggtgcgacggaagcccccgaagctgggaatgaagtggaggaggaagctgcattgccgactcgccgaggcgggcggaggaagaccgttgagcccgctagggtagagacggaagcggaagatgaagaggaggaagcggcaataccgcgccgtggcaggtcgaggaa

SEQ ID NO: 5075 - DNA, 508 bp, Zea mays
aagaaactttgttgccacgtaatgtaagtagtcctcacaattctcataagtcaattatatccagcatcatacatacgtacagaacactaacaccttccttgatcatttgcaggatcagaaggttctgaataatatttatctactacctacactacactgaacagcactaaacagcaacccgctggcaggctcctacgcacggcgccacgcggctggcgtacaggcacgacgttgccgccacggtgctaaggaacgcctgctctagctcagcagaggcgctcctcctgagcaagcacatggcgtactccatgaccgccgtgtcgcagggcagcgtgatcctgccactgccatcgccgccggagaagccgaactcctcctgcgacatttccaggagctccctgaagaccagagtgctgaggcacgccaggggcacctcgaaccgcgccccgtcggccgtgtacacggcgcagtggcccttgctcgccacggagctgcaggcatgcaagat

SEQ ID NO: 5076 - DNA, 524 bp, Zea mays
agacgtctcagacaaagtgccatggaggaaggcgttcttgatgtcgagctgatgaactagtcaatcgcgcgagaggctagtgtgagaacggtgcagatagtcgccgccttcacaaccgggctaaaggtctcgtcgtagtcagcgctaggacactgcgtgaacccgcagagaacccaacgtgccttgtaacgctcgaatatatcgtcggcatggagcttatgtttgaagatccacttgtcgatgatgacgttcaagccaggacgacaaggcaaaaggtcccaagtgtaattggacagcagcacctcgtactcctccatcacgcgccaccaattggggacgacgaacggggtgcggcaagagaacgaaacgggagagacaactgttgacgaagcagccatgaactgagctggctgacgaaagcccagcttctcccgtgtgattatgcggtgatgattcaccacaggggggaacaagagcagccccctatggcagtgcacagggtggagacgagggtgaaacgtgtt

SEQ ID NO: 5077 - DNA, 477 bp, Zea mays
gcgcccggcggccgtctctgctgcgtgcatgcatcagcatgcgcgcagtaactccacacagccagcctctcctacaaaagacatgtactacagtaccgctaccgagctagtactaggtacacacagtgtgtgtgtgtggctggctactagtgtttcttcttgaacgatgaatatacagcacaatcctcctgctctcttgctcttgctcttgcgctgcatgctcttccttccccgcactccctaatagctaggcatgcattgtccattgaattgaagctctctctctctctctctctctctctctctctctctctctctctctctctctctctctgcgccaagccatgcccatgcaagtcgtcgtctctgttccagctgaattcatgcccatgcaaatgcaagtcgtacgtctctctttccagaattcagcagcagtactctccacgcactgatcgccgtcagagagctaggtcagtg

SEQ ID NO: 5078 - DNA, 496 bp, Zea mays
aaatgcttgtatgatcggttgaaactatttcctggtttgctttctccatcgatgcggcctcttttacagagcaacaaaagggtcttaaccaacaacccaagtaagtgttgaatataagcacagtatcagttgaatatatgccactagacacgtgttgactggcaattaagtgcaaagtggtccttactgtcagcagttggattagtcgagtttgaaagtaaagattatgttgcgctgcaaatttcagataagcgaaaatctagcacagatctctctgcaactcagccacctctgaagaagatggcaacggacgcaacagccaactccatggcctcagcttccatgggagggaacatgcaaggtgccatggatggctttcccaaccagttaggcaaccctggcatgatgcaggcctcgtcctctgggcagacggtggagagcatcccatcagctgcggtccggagggatcagggcagtgatctcgcgcagagagttt

SEQ ID NO: 5079 - DNA, 550 bp, Zea mays
gcccgccgggatcagcggcgcgccgcacgacaacaacatcatgctctggaacgccgtcatattcgggtacctcatccatcccacagagccccccaccccccgagtccgttaatcccgctcctgttctagggtttgattgacaggttccggatcttggggggtgagaaacgggttctcatctattcctttccattttcactcgtgtttgttgtgctgatgagagaggttcgtttgattttgcaggccggatgatacgccttgggacggaggtgagattcccacttctgacctcccccaccacccctatttgttgctcatttgttgttgtttgctatgtggttgctactttgcttgaaggtagtttgattcggaatcgtgcaggcggtaccctagaaatacatggggtacaagatatttggttgccacaggaactaagactcatttggcacctcatgactgttttagcatgttccggccatttaatctttcatgtccgtattggggagcattcggctcatttagctatcggttgaaatttctctttggagca

SEQ ID NO: 5080 - DNA, 565 bp, Zea mays
gatgatatctccaagtttaatgctgattacatccccaggcacaaggacggctgcctcttcctcggcccaacggccatcacgaagcacctagccaccagcaagaaacatcggttccaatttcaaataggcactgcaaagatgatgcatggaaaatacagtgaaatgtaagactaaatggataattaaggaccttggctttcggcgcaaggcgggccataagcgcagcagcagcattcccagcattattttcctctatgaaactgatagttgagttgataagcagcagtgtgatgataccaacgaaatcctgccagtctggtggctttccctgatgacagcgaatatatcatcgccagtcactaaaaacaaaaggcaataacaaacttatggcttgtttgttttgctctcaatccatgtggattgagtggttttaaaatcccaaacaagtcaaaatcttttataattttttttcaatctcatccaatccacgtgagatagaaagaccttaattggatttttaacaatatttcttaccccaccattggccagtgcgatggccatgata

SEQ ID NO: 5081 - DNA, 553 bp, Zea mays
gctgagctcctcgaggagaacggcatacggatcccagcctggttctccttcacttccaaggacggggtgaacgcggcgagcggagacccgatcaacgagtgcgcggccgtcgctgattcctgcccgagggtggccgcggtcggagtgaactgcactgctcccaggttcatccacgggcttatcctctccataaagaaggtgcgtcactctcgctctctactacggggggagaccaacagaagcattatattatttggaactcatggcaactgaatttgtttccaggtgacgagcaagccgatcgtcgtgtatccgaacagcggggagtcgtacgtcgcggagacgaacgaatgggtggtgcgctagccttcgtcaccaactaactggtcgtttcgtatctgtgcttgtttttgcgttaacagtgacaacaacgaacttgctttgggtcggtccttccacgcgttgcaggactcggacggcgccacggggacggacgacttcgtgtcgcgcgtcggcgagtggaggcgggcgggggccgcgctcatcggagggt

SEQ ID NO: 5082 - DNA, 460 bp, Zea mays
acttgctacacttttcctccgcaaccaaaacctccgactgaagcttatcattttcagccttcaagcttctccccacctcttccttgtggcttgagatcgcctttgcctcctccagttgcttctccagcttggccttctcgcccatcagctgggtaattttgtgctccagttcccacaccctgtccccaagtgtggagacctggtgcgatagggtcctcaccctgtcatctgcgaagagatctgcaacacacgtacggtacattttagagaagagagctggtactacacacaccaccgcgcagataaagaaaaggaaagatgatgacttggcgcacacccgcaaaccaaggcgatgtcggcgaagacatgtctgtcgggttgccgctgttgtcacacactcttctgagaaatggaagacgctttgctgtgcaccagtcccggagcagaggaatatatatac

SEQ ID NO: 5083 - DNA, 491 bp, Zea mays
aagatcctcaaatctacctataatcatccatcaagatgcatagctacatactgttctgcggaatgctgcctcagtatgatatcaagaacacgaagcgcctccagggagttctcagattcttcgcctctaatgacttgaccaatagcactcataggaacctctgctgcaaaatttatctccactttgaatgttttcgtctggtatggcctcctcactctcttcctatcaccacctccaggactgtcattacctccagggctcccattggcagcagtcctacaaccacaaacaaaaaacatggcaattactgattctgggtaagcataaacaacaagaaagcagatcaaagactaaaactaactttccagtagatacgtcctccaagacaacggtgaactcattctttttttgtggaagaccaccaactgtaaacaggctcttttctccatcatatgcaaagtccttgttagaaagctctgcacgatatgtct

SEQ ID NO: 5084 - DNA, 615 bp, Zea mays
gaggacgacgaggagcctggcggcgcgtcgtcgtcaccaaacagcacgctctccagcagcctcagcgggaagcgcgcagcgccggcgaggagcggcggagaggtggccgaccacaccccgagagccggaggcggcagcgacgacgaggactccggcggtgggtcgcgcaagaagctccgcctgtccaaggaccaggccgccgtcctcgaggagagcttcaaggagcataacacactcaaccccgtacgtgtataattacttatatcctgcaaaaagaaacatcgatcaaccttcaactcgatctaactaataataagaaccgttggctgatcagaagcagaaggcggcgctggcgaagcagctgaacctgaagccgcgtcaggtggaggtgtggttccagaaccgcagagccaggtgaacaaagcagcgcccttgaagcagcacacgcatgccatttatactgactcatcctccgtgggccgtggctaatactagtctaataataatattatcgttcaggacgaagctgaagcagacggaggtggactgcgagttcctgaagcgctgctgcgagacgctgacgaaggagaaccggcggctgcaggcatgcaagct

SEQ ID NO: 5085 - DNA, 602 bp, Zea mays
gccatggtctctccggggcacttgcgccgccccatcccgaacggtatcaggagcctcccttcggcgctgccgccgccgtcctcgaaccgctcgggccggaagacgtcagggtccggccacgtcgccgggtccctgtggatggcgtacacgttgacgagcagcatcgtgccgctcggcacgcggtagccgccgaccgtgcagtccgccgtggactcgtgcgggatcagcgtcggccccaccgggtacagccggagcgtctcgttgaggacgcagtggaggtagccgaggctcggcacgtcgtccgctcccagcagccgggagctgcccacgtgcgcgtcgatttcctcccgcgctttcttcaagacctcggggtggttcagcagcagcgacatggcccattccatcgccgtcgccgtggagtccgttccggcaatgaacatggactgtgcaaaaaccagagacacagcatcagagggtcggtcgatcgtcttctagattttttttttgttttatcgaacgaaaagaataagatacacagttttacaacttacgaagcatagagccatgatcttctcgtccgtgtaattctccggttccgactt

SEQ ID NO: 5086 - DNA, 450 bp, Zea mays
ggtgcgcatgcggtccgccgccggcgctggagctgctggagcacggggaggcctggatgcccaccttccccagctccaggctcagccgcgtgctcgccagctcctcctcgtcctcctagtcggtgcatccacgatcatgaacaattatgtcaattaataacggttatgttactagatcgagcaaattagagcggcgacggcgacagtggttttaaccattcatacaattcacctgagtagtagtagtagtagtaggaggggcgagctgcaccggcgggtgctgatctccgccgggcggcccgaccccggccatgtcggcgagcgccatggcggcgtcgagctcgacgtcgacggtgacgccccggcggcattgccgctgcctgtcgctatcgtcagacatggcgggagcggggcgggtagcgtggagccagacggggcgacctgctagat

SEQ ID NO: 5087 - DNA, 565 bp, Zea mays
cctgcagggtgtatactcgtgaggccattcaaagggcgtgactgaactttagggttcaaatcgtttttaacagatgacgatgaagccatactcgaccgattgtttagctgagaacacaggttcttatactggagcacaaggttggtattttccattacctgccaaaaaataagcattgataagctctaacacgtcagaagcctggttagcagagttagaataaagagatacttgagaatcttttttttcttatttctttcacacagcagttctaagtgcaaaaatagagcacaattatcacaagtgttttttttcttttcaagattccactactgtccacaagaaggttttgtctcctcagatctcaccacaatatagtgtatatacggagatcaaggaaaaataacatttgaccagtcaacaatgtaacacagtcataaagtagtatgtcatggctcatatataataataacagagaacaacttcaagacatgtagaatgatagatactatatagtaatcccagttactaaagcatggatatcttaccacacttgtagcgccta

SEQ ID NO: 5088 - DNA, 793 bp, Zea mays
tgcagcatactcgacgagcaacctcagcctccggctcaagacatcaagctcatccatcctctgtgctctccaccgcttggagagctcgctctccacattgccaccattgataatcccgttactctttgcctccctcaggcattcctcaaacacatctaggacagcatttgccattcggtgctcgttgctgcacggcaccaccgttttacactccgcactcatctcactgccaattccgttgttcccattcgggagagtaaccacggcctcaggctgctcctgcaccacaacatcgaatttgctatctgctacaagagcagcgccttcatgattgcccagctgcccgctttcttgctcaaggtaaaacgtatcctcgccgttggaaccatccggaaacaaaccgggagcagaggagctaatcccattgtagtcatgggagttgctatccccagacgcgtctgggggagggagcggcgtgccacgcgggttggagcggcggcgcttgttccccgacgttccggcgctggccgcgaagggcgaggtggcggcgttggcggggtcccacagcctggagcagaggtggagcacgtcgcggtcgtgcggcgcgaggcgggccgggtctatgcctcccgcgacgcgcgcggacatgctgcggaacttgttcttgaggcggcggagcttctccgagagctgggcgcgggtgtagggctggggcatggactcggagaagcggtcgtagaagacgttgaggtcgcgcgggaagacgaggccctgcgtgccgcagccgaggagg

SEQ ID NO: 5089 - DNA, 745 bp, Zea mays
cagcttgcatgcctgcagcgtcgtcaagaaccccaagcgccgcttccgcttcacggccaacctcgagaagcgcggcgaggccgaggccatcaagcacgccaaccacgtgcgctccccctcccgattccacttactcccccttccctttcctctcttgttccatcctacgatgccgccgcttagtcccgccgggatccgcggcaacgtagcccgtgggatctggacctagggccactacctgtttgccggcgcctgcacttagtagcgagtcgtcgctgcatctgggtgccggattcagtgagctcagcatgcgcgggggtgtggcggttgtggccatgattcacggtcaagctagttacttttctaactgaaaagccgcagtgtgttttgcggccgcctgctttgtttgcgcattttgggggtcttcatttttgttttgagacccacacccactcagtatttgtggtatcaatcaagcccttaatgccacccaaaaaaaatctatgatgactgttcttcagctacgactatgtacgcgtacgagggaccatttgcttctcgcaccatttcacactgctgcgacaacacgcctttggatctgctctgttttagtgctgccagtttgggaaatatcagtctttttcactaattattattatgtgctaccttaattacctcccattttcagtaggttcttgcaactggctactatcaactccactcatagttaagactaattagaacc

SEQ ID NO: 5090 - DNA, 729 bp, Zea mays
gatcgttgtccaggtgctgaaggagcccctgataaggatcaagaacattcccacttgcgccactgtgcccaccttcctcccaggagacacggagcgcgttctctggccttgtttcttgcagctgccacttgcaagaaatcagtaacggaccagtaagtttacgtcaagcaggcatgtcggaacagagacaaatatagcatcagtttaaaagtttttatataaaaaaaaggtttaaaagctgttccaagttctcatggagagtacagtaagaactaagaaacgtatgcgtgtaaacaactcaacatcgtcaaggtacgtacgtatgtacacacagagatgtttggaggccattgcattacctgcttccttaggtctttattgagatccagcaattcttgttcctgcaaaaacataaccgttagctcggcactacaagattttggtacggatgcatggagcagaaagaaaactaggcaaaaggtaagaggacctcgtcattgctaccttgcttttgaggtcaaagagctgatcaagtagcatttgattctgcaaacatttcagcccttgtcaattgcgagccaaaacagcgcactgaagaaatatgtaagccacgcagtcaggtgttctacctttcttgagctgatatgcttcagagatatctctatttggtcctccagctgctcgagctccttcatgctaagtggacccagatcctccccaagaatattt

SEQ ID NO: 5091 - DNA, 788 bp, Zea mays
ggagtcttgtcatcttaaaccacctcgagggtgggaccttagaacctatcttctttgggcacatctattttcttgtggtgcctagggtacccataactaggggtgctagaaaggtaaagacggcttggtagagttgtaataagtggcctaagacttttaggatcacctttctcaatcagctaatagtggcctaatttggactatagccgttaaattatatatagtactccatttatcctaatttataattcgtttgattttttaccgagttcgatcgacttgtcgtattcaattttttttttaaaaaaaataaaaattcagccatacttaaaagtatatcatatactaaacaatattacagtaaaaattagtaataaaaactaataaaatgagtctgctaaatttagagtaaaaaaaatcaaatgaattataaactggaacgggggaggtagataatagctttactctttataaatagctatatctagagattgtgatggctataacggaagatttagaaccatgcagacaaataatgattgctttttttatacttgatctatcttttggagtcgagaagaaacctgctttatatatattttttttcgtaaaggagatatatgtgtgtgtgcagattacaaggcgtttagcccaataaaaaaagagaggaaaaatacataacatagattgtctaaccaaggaggccagctaaaacggaggtggcagtgacaggtatagctgggcaaaatagctgcccactgctggagtcagtctaagagcactttcat

SEQ ID NO: 5092 - DNA, 733 bp, Zea mays
atttttcacaacaccctccagtgcaagagctggttgcaagagatctgcatgataatgagtggaaattccgccacatttttcgtggtatgtacttaaattgtggaagcaaatggaaaaattatgctgtttgattattgaacaagtgaaatggaactttagctatcgataaggaagcgtgaaaaaatgttactgtacatgagcagctttcactagttacatatctcaactgtctgtttctttctgtctcaatactttagtgtgattttgcttaggtcattaggttatttagttagtatggaaaatgttgtattggcaatatttctttacctcggatatccagtgaagttattgatacatcaaattatattctgggatgtcttgtttgctctttttgtatctttattgggtgatgctttgacccttgcatgtgttgtgcaggtcagccaaaaaggcatctactgacgactggttggagtgtttttgtaagcgcaaaaagactagtagcaggggattctatcatatttatctggtattctgtactttaaatttttaactgaactgcattctagttttgttaaagcttctgaggttgcttatacagcatgaccttgtttttcatttcaccaggaatgataataaccagcttctattgggaattcgtcgagcaaatcgtccacagactgttatgccctcttccgtgctatcaagcgatagcatgcacattggtctcctt

SEQ ID NO: 5093 - DNA, 757 bp, Zea mays
aaactctgaaaactacaaccatatggttgaccaaacaaaatctgtacttttgccatagacgcatcaaatgtgtacttccctggtacattgtcacagttacataaatatatagttttgtgatacaatgacacattaaatctgtagttttgaggcagttaacaacaccacgtagacttcttatgagctttacacataactgttattttgtaatatcacaattagagacccatatgaaaaaattgtgctcattggctatttgcaaagtgcatccatagtgatcaatgtagacaaaaaggaaaaaaggcatgccatcagcaagacaatgtttaaaactttttgcttaatactcgtggtatttataccagcgcaaagtttcaggttttcagtcacatgcctgctatagtatttagcatgcatctccaaagatgacgatggcttagacagaacaattactagaccaaaactcaacagacacttgatgaaagtaaaaactgttagaatcccgttaggtttttgtcagtccctgtgtaattacatgtttacccctctgtgtaatgggcttggcccaactacttggattatataattgcactcccaaccctgattagggttagggtttccattctccaactataacttcatcaaaatgatagatatgaagggggcaaatcaccttgaggacacacaatcacccaatatgacataattggagggagcttgtggccgccagaacgttaggttgtaacccagtaggtca

SEQ ID NO: 5094 - DNA, 783 bp, Zea mays
atcacatggccattgacgacgacgagcaaactgctccgcaccaaggcaaggatccgtagtccccagtccccaccaccactgtcgtagtagcgtcttcgcaagattcacttgtcggttgaactaataatgacactgtgctcttcaattgctgccgtattgcagtggacgacgacgacgagcaagatcttgagccaccgacaaaaggtgcacgaacacctctgccaatttcgtccctattttccccctctgtattctcttccatttcttcactgttgtgttcttgcctccggactgcatcaccgtgaatgtagcagggattaagcccacgctgtcggtggaagaagagagagcgaccaacccagagccggtgaagccgccgcctccaggtgaattccagatcacttcgccgttttttgcgttttttttggctgcgatggattagatagtagatatatatggccgccgcgaatactgtcttaattttctgttcgtggatggtccagggaagaaactagcctcggtggtcgatctccgagcggtcaatccggaacccatgacccctgctcctccgccaggtgaatttctatattccatcaaatgcagaactcacgctaattcgggtcacatcacttgctgctccgaaacgcagtcgagaagaaggcgacaccgatagtggttcaccgcatgaccaacttcgagctggcacaatcttttccaggtaacttcgattctaaaaaaatatatcagcctagatggaattttagcatcaccttgttgtgggct

SEQ ID NO: 5095 - DNA, 736 bp, Zea mays
acggcttgaaccaaaaaagctaaagaggcctccctctggaataaagattaatgggcagtgtaagatacgacagcggaaacaatgtgagtagctatcaaatacttcaatatctaaccttccatcttgcctcctttacccgtccagtatgaaggcataagaaagtagaaaactgacttccgaacgccgtttacatttggaagtatgttgtcaaagtatatcgcaaggacaaaccacaagaaaaatgtggatatgagccacttatatatatcatcctgtaagatattttgcaaacaataagtgattgaaatctagtcactaaaagacataaaatttaataagcaaagttttgcacgtacaatagtaatgacacagtcagtctcaaaagatgggcactccccacgctgattccagctaaaacctttatcctcaggagtggctgttgccttgcctagaatgttgagggctttggcaaataaatcaggaggaaataaagaccacaatgtccggtacaactttttgtagtcagccgaataagggaacccaaaggtggtaacaagctgcacaggaagaacaaaagtttgtcatattttctgcaaaaaaaaaatactggatacataagatgacgattaacaaaatattacctgagtcaagaacccaataatgaatattgcaaatccaacagtagtagctgatgctgccttcgctacgaacgtggatatcatgaaagcaaaactaa

SEQ ID NO: 5096 - DNA, 766 bp, Zea mays
aaggactgtttcggatgttctcttttgtcataaatcagatgcactttctttgcattgcaatagtctgctagctctataagatcaaacaaaagaaagtcactctcaccatacaaagccaacaactcacttattttagcatattccatgcagggcaaattcctcattaactcatcatccaacaatgatgatccacggagagatcgtacaccaagcctattagccagttcattgccaatgctgagatgaataaaattctttgaagtgggattagcattcatccagggtgcatcattatagacaaggtttctagcaggtgtcagaaccccaagtgaatccggaatcgccaatgagttcagtaacacatcaggtgcttgactgtcagggtaacagtcaacaaatgcttccaatacacagtgaacaaaactgagttgatctgtggacaacggctctcctttgacatctccttctaaacggcgaagcgcattcagataatccattgcatcaaatgtctgccttacacccaactcggagagtaactttttaaattctgacagttcggatggaactgtgtaaagatagggatgatattttacaggtgaatcaaaagcaagtgcttgtggtgccacgaacctatctcctacataaacccattgaaatccatccagatacttttttagagcgttgccactgggagtgccaatgatgtcttgcaattttgagtacattacttggacctccttttgcagaatagcatcaatgtctgtgt

SEQ ID NO: 5097 - DNA, 746 bp, Zea mays
agtaagttccccctacatatctgtgttcagtaattgtgtgatatgagttgtctgaatgccgtgtattgagcaacacgcagctctccgagcgtcatttgttccccctcaaacctgtaaactcaaaatggcttattctgtgtatagttagttattcccaactatgtaaaatgtctaaagagtaaaaaaaataatacttggtgttgagtctcatgtgcacatcgcacgttgttctgtcatgttaaactagagtggttactagagcagtatgtgtactacctctgtcccaaaacaaatcaacttctagagttgtcatccctaagtcaaactattttaagtttgattaaatttgtagaaaaataccaatatttgtaatagcaaattagtatagttagatccatcactaagtatattttttataatgtatttatgtagttctatagacgttgttagttaatctttcctacaaattgagtttggtcaagcctaagatagtttgactataggtgattattggagttgatttactttgggaaggaggtagtagtaactattgtgtgtgcatcagcctatttgaactgctgtcgctgtctgccttggaattattgtgattaggcagctctgcggctagtctgttattgttgtcgtgctagggtttgtgcagatgcttcctgaatgattgagtggtagaataggtgggccttggcagctagctagcgtgcatgcgcagaaggtgcaggtctatcggt

SEQ ID NO: 5098 - DNA, 754 bp, Zea mays
cagacacagagttggtaatcgatccaccaatgcaactaggtcgatggaaagcaagcgagtccaccacgcaccctgcccgccgcccttggccgccgccagctgtgccgtcacggcgaacggaacgctgcataggaccgcgaatgggaagccgaggaagacgaagatggcgagcgcggtggtcttgaggcccttatccacggcggcggcgtcctgcacgttgcccccgatgtcgccgagcgaccaggagctgaggacggtgaccaaggccatggcgacgcagacgaggaagctgctcatgacccacacgaccttggcggtgagcttgcggcacatgggctcgatgaggaaggagctggctccgaggacgacggagttgaggagcaggccgaaggcgccctgccggacgccctcctggaacctggccacctcctcggggctgccgtcgggcctgccgtggtacatctcgcggcccatccagtcggtgtcgaagaggatgaaggggaaccaggagagccaggtgaggcccgtgacgatgagcacctgcggcatgccggggggcatgttcttcatgcccttgaaaacggcgaacgggcccgacgactccccggcctcgtcctgcttcgccgccgccgccgggtccagcggcacctcgcgggcgaagatcatggtcaccacccgtggacaggcccaggaacaccaccgacaccaagaaagcggccttgaggtggcgcacgccctcgcagcatgccctcgt

SEQ ID NO: 5099 - DNA, 713 bp, Zea mays
agcagggaaacaaagacatagcaaacttgtcccacagccacaggtaacaaagacatagcaaatttgtcccacggccacaggtaacatggcataacagtgttatgtttccaacgctgcttcaggccaaaacaaataatgcatagaataaccaacccagacacctaataggatgatgaggagatttttattcccagaatcatctgacatggccctatggcctatggtctaggcgtcaaaggtagtgatgcattcacatgggagacaagcaaaccagagggtccatatcatcaaagccatggcgaccatggtttcagtttccaaaacaaaacaaaagcttccatgccaactcaatttgcagctcaaaaccaagagatcgaccctcatctacgatgcacatcaataccattattcctaacccagactagggtgtgggagcagcctaaaggtgcataacagcttcatcatacagagccaccaaaaaaaatgtagttgtcaagtttcattggggggtgggaggggggcataacataactctgaagatgaacttcatagaaggtacgtgttgggagtccctccgaggtatttgaccaaacacaaatggacattggcaagccaaaagagactaggtatagatgcactattgccattattattatgtcgtttgtgttcatgttgtcggttgtcatggcatgcaaatggaattatcagacaag

SEQ ID NO: 5100 - DNA, 774 bp, Zea mays
cttgcatgcctgcagctctgtcgtcggtaccagcctacctgctaccggctgctagggagggcatgcacctgctgcatgcatgcatgggcaattgatgtgtattctatgcggtgtgcaggcagcaaggcgcagggggagaggccgagagcacggcgcaggaggcgtcgagcagcgtggtgcggcggcggagagctggacgggggaggggaccccaagaagcggcggctgagcgacgagcaggcaaggatgctggagctgagcttccgggaggagcggaagctggagacgggccggaaggtgcacctggccgccgagctcgggctcgaccccaagcaggtcgccgtctggttccagaaccgccgcgcccgccacaagagcaagctgctcgaggaggagttcgccaagctcaggcaggcacacgacgccaccatcctccacaaatcccaccttgagaacgaggtaatagtaatactgccctgcccgcacatgatcgacagtgccgcacaccggccggccggccacacatgcacgcacgtcctcctcctaagtcctaactcttttgtctgagctccgatcctcttctgctcatcgtctccatggaggtattgcagtgtatactgatactgagcatttcgtgggtgcgtgcatcggtgcatatggcagttgatgagggtgaaggacagctgactggtgctcgccgaggaggagctggcgcgcttccgatccgcggggagccacgccatctccggcgatggcggagacgccatgatgggt

SEQ ID NO: 5101 - DNA, 724 bp, Zea mays
agcaagtaaattgtttgaagatcaaataataacacgcttttgtaatttctgaggacttcaaactattgaacattctcttgttgatttttcaaaacctgtatggcaggttcaacataatagcaatcacgtttaagttgattttttttaaatgggatccttcaagtgtttccgtgtagatatgctaataaggcattatagaaacaataaaaggatatgaacgaaagatcccaatgcataataccaccagcttttacaggaaatcaaacgcacaaagtagaataaaaaatttcagtaagattatttagcagttcgtttggttaaatccgcggctgcatcgtctgtcacatttagcaccttcatcctttgatctatcaagttgagttgcctgattttcccaatgccagctgccagcctgccacagctcgcttgtgcgcactctcatggtctcatcccgcgcccctgttccacctacctgttgtcgaagagatggctcatggccgccgccgccccagctcgatgccagccaccctcgctagatcaagcagtagccgccacttcgtcgaaggccggtccctagtctcgctcgtcgtcgtcaacggcgaggaaatggatggcgcgacgatagggagagggggcagcagccggcgactcggtgcttgaccctaacgacggcagcggcaatcttcgccccgcgcaacatcaagattggagatttcgctacggt

SEQ ID NO: 5102 - DNA, 766 bp, Zea mays
aaggtgtaaatgcttgcccctgaaacagaatttctaactaagaaaccagtaatatgtttgatgcatttgtcagaatgaaactgaggctgatatcagaaatggggaatgtgcacctatcaggttatatagaggatttcaaggaaaaatattgaattagactaaaataagatttgcaacatcttattttctgaaataaaaaggggctgtattctgggccatacgagttcctcagtattgtttgattactacagaaatacatttcgacttcatttctttactcctaagtttggtaaacctttcagcatttttcctgactgttaagtattgctgatacatccatggtagtttgcaaagcaaaagtctgtccgaaggtttacttacaatatgagatcttcaggctggatctcagtttgatttagggccagctggtttagttcagacttcaaattcagccattctttactgaggcatgttcatctaaattcacttgggaactgcattatgtctaagttttcactgtgtggggaatttgttgttcatggttatctaataatcaattggcaacacatttattgtgctacgttccttatatcatagttgggcacatgccaccgggagatggctcggtggagtcagcttgtggggaggagaggttagactataaataagattgttgtgaatttgagagtggtttatttaacgtcttgtgaatgatactacaattctaatttgcctgttccagcctcaaaacacgattctcatgtct

SEQ ID NO: 5103 - DNA, 751 bp, Zea mays
atacgattttctggactcggctgggctaacatcctgggtagtaggcgctgatgaaaggacaagggatctgctcaaattaagtgttgtatttgtatcctccatattggtgaagactgatttacagtagtaagggaaaaggaaatggcagttgtgttgcatactatctagtcagacatagtagtctacgtgacttggaatgatgcggcgttaaactaaaaaggacagcgagagctgatgtaaattcggcagccgtataccgtaggcgcgtgcgttttctggtaagactctcttgcattgctagtgccctaagttgactcgagacatctgtacctcgaaatgttgctgtgttaggtgatacctaaccttaatacagtttagatcgttatccttaattctctcatccttttcctgaacccctgcatgtatcatcattgtgtgtgcatcgtatgcggcagcagctgtttacgaaaggaacagctagctactgcttttttctgttcctgcatgatgcaggccgtttacaagatcctgcctactgtacaaggctagatacttgctccttgccctcctggtggtgctgctggtggcgacggcgacgacgaagctacaagttcttgagcaatgcgtagaacagcagcatgacgaggaggccgatgacggcgcagaaaaccatcgtgctcctctgcttctcgtcgagggtgccttctggcagcaccttgtgcacgacggccaggactaccgcgtccaggtt

SEQ ID NO: 5104 - DNA, 789 bp, Zea mays
aacatagacattactatgaaatgggctatacaatagcacttatctaagactgaaatatatactttattgatcaagaactaatctgttttttctataaattgaaaaaaaaatctatgatgcttacaagtgcagttttcggcttccttatcctgcatgattcgtcaaaaggaagcactgttgggagcagccaaaactagttttcctctttcggaaaagctactgttagttcatctggtacggtcgtcatttggcactggcagtttgtgcaggtgattgaagtgatatatctagctctttgatgggattgttaagcttgcctttctcatttgctgaatccttcttagaagatttatcattttccagttctttcttacaagctttctcactgtcagatttcttctttattttctctgtttctgcttccttctgggttttcttcttttcaaggtccagttgtttactattgtcttctgcttccttcagagctttcttcttttcaagatccagttgcttacagttctcttcatgggaacgcgtgaacaatctcacaaaattttggagtgttgtaactactgtaaaaacacagggggggaagcatttgtgaaccaaaaagttgccaagagaagcaatctctaactcatagataacctaaacatattcgcggaacaatagctgagcaagttcaccttgctcaaatggacatcgtgctggatcttctccaaaataaagcgctaacgcatctgcatttcggccatgcaggtccactctaaaggatcagcgggcacgggc

SEQ ID NO: 5105 - DNA, 796 bp, Zea mays
atttgtccctggcccgtgcccacagcctgcctggtggactcgacgaccgatttcctccgcagcatccatgagggtctccactggaacttgaggaaatcccagtcatttgacggcccgcgtgattgatgcaacagctgttcagttatatttcagcccggtgccagaattcaagctgggaattctcaacaggaataactgtagctactccagggtgctctcacctttaccgttccatacttgcctatatacaaaggttgcgtgcgttagatgtgaggtatagatagatgtatagaatatggatggatgataacgactggacatgttgaataatacaacgccaacgtatgcacgtatacatgtgatgtgcccccgtgatctgaaagaaataatccgcgagccatacacgacgagatggcagcttctgtagctgttctggtacagctttgcagtcatgcggatctgggcactttaggcggatacccttttcagcttccatactggtggtaactgactgaactgacgaatggagtcatggactggggcatgctctgctgctcgtcctcccgtcctgtgacggccagatggatgggttcctgcctactgcctgctgcccgcttgggcatgggggcgatcggccacgcgttttgaatccgtgatcaggattaacaaaaaaaagctgagtacctttcgacgtgattctggcggctgccttttgttctgctgcgtgaattgaaggccgagtatggaaacggccggcgcatatgattctttaacacactatcattccctttccaca

SEQ ID NO: 5106 - DNA, 748 bp, Zea mays
cttgcatgcctgcagtgacggccagcaagcatcgcgaggaccaggaggcgatgatggtggagctcaggagaggcccctggacgctcgaggaagacaacctcctcatgaactacattgcttgccacggcgagggccgctggaatctcctcgcccgctgctccggtgagtacgtagtgtagtccgactattccatttcgccggcggtttctatgtattacttacttgcatctcgatcagtctcgactaattaagctatcgatgatcgatctcgtcttgatgtgctatccatgcttgaattagggttgaagaggaccggcaagagctgccggctcaggtggctcaactacctgaagcccgacatcaagcgcggcaacctgacgcctgaggagcagctgctcatcctcgagctccactccaagtgggggaacaggtggtcgaggatagcgcagcacctgccggggcgcaccgacaacgagatcaagaactactggcggacgcgcgtgcagaagcaggcgcggcagctgcgggtggacgccaacagcgccgtcttccgcgacgccgtccgctgctactggatgccgcgcctgctggagaagatggccgcgcaccaccacggcgacggcgagctgccgccgccactgcacccctcgcacaacatcgccggcacggcctcctcgcgctcgccgccggcccacggcagccagcaggaggacccgagtagtagcgcgccggcggccagcggccacta

SEQ ID NO: 5107 - DNA, 722 bp, Zea mays
actttccgcttgcggggcaccttcggatgagttggacacggagtaagatttttctggactagtcggccttggaagcagttgttgacgatcagaggacctggcaaatggatcgccacgtccatagtttgggcacggttgcatcagcttgaattgccatggttcggagctcatcatcaagctgggggcaaaggagccggagattgaagaagcgtctggagagttagtagcctgtggggagaagctcagtgtgatctccgacgtgtggtaagctgctccattagagttggggtcccaatcttgcatctgcgcggaagaaaattggtagttttagaaacaaaagtattgctatatggagtattttgaagtttgaactgtgcaaaatctgaagacaggaggtggggtatcaacaataaaggatctttcagacatgcatcttacttaggaagaaatggctgaattattgttaatttgctaagttggttaagcatgtatgaggtgtctttaattatcttaatatagcccctcttgctaagttgtttaaacttgtttttgctggattgagcggtttgagcccaggaatgtagtgtacctgaaaactggtgctgcggctcgccagtctggtcgtatcttgaacttggtagccctgaagccatggcggcacatttggagttgtcgccgccaccttggcgcaggacaaagtgatgagctcactgtcgccggtt

SEQ ID NO: 5108 - DNA, 774 bp, Zea mays
ttgcaatgctctttatctctgactcagagggtgttgatccaagcaccaaaagctggttctggtaatacaatgcagctccatcgcactttactagatccatcacattaggtgaccgagtaaatatcccaacaggagcatcccgcaggagcatatcacaaagaagggtttgcgttctgaggatgtgcctctcctttgcctgagcagccagttccacctccttgttgagctgtatgccaaatacttgcaagagaaactcacaagcataccttagtgggaaagggacaaacctcgggcttgtatgatggcagacgacaagcccccacagcttcctgcctttcggttgttggtcactcccggtatccccatcttcctcctcatcctcgtttatagtgactgacatcgcaagtgatgcaacagaacccatgtttgccatgtactgtgcatggcaaccatgggaagccctgagtgtggaaccacagaggctgaggggctgtgcaaggctatcatcctgaatgaccttcactggagtggcagagaaatcacatatcatccgcattttgttcttcataaacagaaacctggacgcctgcgggatgtcggtggctgggtagtgcagtccaagatacggctccagatcggacctcctgcattcggaaatgacctcgccatgctcatcctcatggaacttgtaggccatgacccggtcatagcccgtgagctcgctcacctcacggacaagcacatcgcacagcaacgacaggttcccgctgggca

SEQ ID NO: 5109 - DNA, 794 bp, Zea mays
agcagccgtagtacacacgcacaccgcctcgactcgactcgactcccacctcccctgttctcaccgtgcttgccctgtttcgacctctgcccatccgcgctcgcgtgcccgccgtacagtacaggccagacagccatggtggtgctcgccaaaccgcctgtcgtcgaccagatcccgctcctgcggtccccgggccccagggacagcttctcgggagtgccggtcgtcgacctgtccagccacggcgcggcgcgggcgatcgtcgacgcctgcgagcgcttcgggttcttcaaggtcgtcaaccacggcgtggccgcggccaccatggacagggccgagtccgaggccgtcaggttcttcgcgcaggcgcaggcggacaaggaccgcgcggggccggcgtacccgttcgggtacggcagcaagcggatcgggctcaatggcgacatggggtggctcgagtacctcctcctcgccgtcgacgccgcgtcgctctccgacgcctgccccgtgccctccagcgccgcgttccggtgagtatatatttatatacacatgcgactgcgagtttgttccgttctgccatggccatgccagccaattgaccgctactctccacccgcatgcaggagcgcgctgaacgagtacgtcgcggccgtgcggaaggtggcggcgcgtgtgctggaggcgatggcggagggcctgggcattgcggacgcggacgcgctgagctccatggtgagaggcgccgggagcgaccaggtgttccgcgtgaaccactacccgccttgctccgc

SEQ ID NO: 5110 - DNA, 741 bp, Zea mays
tccagcggcggcggcgccggcgggagcgtcttctgggagaccaccatggagtcccgcctcggcgactaccgcgccgtcgacggcgtcaacatcgcccacgccggccgcaccgccgtctcgctcgtcaggttcggcgactgccaggacggcaacaccaggacgcgcatggaggaggagtggaacatcgaggaggtggacttcaacatctggggcctctccatggactgcttcctgccgcccagcgacctcagggagggcaaggagagccaggacgtcgccgtcgtcaaggccgacgcgcgcccgccgccgctgaggataccggcggtcaccgtgcgcgtcgggccctcgcaggtggctgccgtcaacatggacgactcggactcgctcgtcgcgaggtcatgactactcgtcacgtaccgtacgtacgtacgtacgtacttgcagtgctgagtgaagagcatgtatttgtacgtgacacttgtgttactataagatcatacatgtcgcaagatctgtaaatatattggaggttgagatctttttttccccgcttcgagaggtgtgtgtttacctcagctagaattgaggccagaaatagtgcgatcgataatccgagctacatattccgcgtagctgtgttgtaaattctaatgaactagtaatacctgtaactctgaaagagcatcccagttctgtccagtcacaatactagagtacgtaatgtatttttccggctcatat

SEQ ID NO: 5111 - DNA, 666 bp, Zea mays
acgctgtccttcacagatgctcaagacttattccatcatccaatgtgataggcgcagctctagcttaaaccctgactagaacattcatttggatggaactatttactgggtttgacttcttgctggaaaaaaaatagaaagaaaacagtcactcggatgttattgtcaggtgactcatttcattaatatttattacgtgcattttcaagaagcttctaaagcagatcttgtaattggcttttgagctcaattatgtatatcacaaactactgttcctcatatgccattttccaatgtttcctcctcgaaggatactgcacataatcacgtattaacagaaggtgtgtgccttgcatatatgttaaggtccaatgatcacaatatgtgtgcagctcctaagatgataaacaaaacgatacaccaaagaaggccattataatggaataaataaggttaacgtttctgattgtccaatgagcaaaattcatgaactagtcaattattttggtgacccttagcatgggtgatggttaaaacttaaaagaggataggctggtgcataagtttataggaggaagcaactcagtaaagctacagcagtagtagtgacttacttctcatacgtatcgcgtgctacagtaacaatcttcttgacgtttgcttcca

SEQ ID NO: 5112 - DNA, 782 bp, Zea mays
tcaatgaagactcaaagagatgcatttatcacttcacttgccaagtttacatcacttcactctgctgctgatattaagcagaaaaatgttgaagccattaaggtttgctctgtttattaagacataactgttaagccatctgctcttcacttggttggaccattctcaatcttcttaatgcttgttgaaaagatcataacaaatattaaatcgaaccatgatgcttagaagtttgcttccttttcaagtttaaaattcaacccatttatacgacatgtgggtccaggctaaatttggaaaagtacttttgataccttgattgatgtagtgagtagtgatactcatataagactggagttggttccgagttagagctgcttggtttaataatgggatgaactgaacatttagtaatattgcattatcacattgagcaaaatattctaatcaaggagcaaatttccgaattccctgtttgcggattctatccttcatccattcttgtcatttgaatgccttattgtagattgagtgatatgcatgccttatgtcgtgctgctagttgcagtcttccatattttagtttgagaatcatgataaaatcttttatcattcttatgttctcttcttatggtggtggattgcctcacaggcaattctattaattgcagatgaagatggaaattacttgcaagaagcatgggagcatatattgacatgtgtttctcgttttgaaaatctacatcttgttggagagggagcacctccagatgccactttct

SEQ ID NO: 5113 - DNA, 1402 bp, Zea mays
acagtatttcgagtccgtcggccatgaggaggaggaggaggacgacgacgccgcctgtaaagcagacgaagtttggaagccctacaacctgtgcgtggacctggcgcccccctactccggccggctgagctgcctgaaacacctggcgcgcagcccagcggacgaagcccatcgcctggtgaaatccagcctctccgcgacgttccaccagctctacaccaaggaatccctgaagctgcacgacatgtcgcacattgtccttacagacaaccgcgccttgaaccgcttgaagctggtcacctcggctcgagggctccggacggtagccgcggccacactgcttggggcgatcgcggcgttctacggagaaggcgacgttgaccaggacccgacggacgtcaccatcacgtacgccctgctgtggtctgctttcgtgatggagtgcgtcttgcccaccgtgatccaccacacgttcgcctggatagagcggctgttcaccgggcaccggacgtggccggaccaggtcgcgcagtacagcctcatggggtacgtggcacgcggccggagccactcgtggctcatgaaggcggtggcctgcctcggctgcggggacctggtcgaccagctctggaccatgaagccgcgcatgggtgcttcgtccagggagatcaccggcctggtccacgcccacgtcgccggagcgtggatgcagggccacatagccggcgcggactcgttccgggcgttcaacgactaccggggacagtggactctcaacaacagcagcgtgccatccatggtactgatgagcgtgtcgaggccgttcgacgagagcgtcctcgtctggcacctcgccaccgacttctgcttccacctcctccaggaggacccgtccccctccagcgccaccgcccgccgttgcagggagatgtccaactacatggcgtacctcctcttcgtcaagccggagatgctgatgcccggtgcccgacgcagcctgttcagggacacctgcggcgagctcgtgggcctgctcggggaggaccgtcctggcgcgccgcgggcacggggaaagagaggcctcgcgcacaaggtcgtccagctgctcaagagggacgacggcggcggcgtcctgggctcagcaggcgtcggcgtcgttcgccgggcttggtgcgtagccgaggatctcatggactcgcacaggggcagcgaggagaagatgtgggccgtgatccagggcgtgtgggtggagatgctctgcttctcggccagcaggtgcaaaggctacctgcacgccaaaggcttgggaacgggcggggagtacctgtcctacgtatggctcctgctcttgtacatggggatggagaccttggcggagaagatgcagaggacggagctgtat

SEQ ID NO: 5114 - DNA, 756 bp, Zea mays
atcaaccaaagacacatcaggtttacctttctccatcaccacattgttttgaaaacaatccttaaattatgtgcgtcacttaaagcgtgctcaaataaacccacgcaaacaatcttataatcacgctctctccaattgtttcaagcagttaaactagtatgcggcttagatttttattctctttcagcttctacaagctccaaagtttaacccatacctacactgaaatgttgattgcgagctacatcatcgtactatagacgaaacagaaggaatgacttacttactaagcaagaaaacaaacctttgaaatgtttcttccaaaagcatatgttcgaaagtttacatgttttacagtattgaattgcttgtcctgatgagccacttcacaatcctcacaggcttagtaacgaaagactgcaaaagaaagaaaaaaaaacaagtaagatcagagcgccatcagcagaaaaaaaaattgacctaagagaagctgtacttcgttgaatcacaatgattttggttgaaggaattttcagagtcaagcatatctttgtaattttctactcgttattaatataagacggggttcactggatcttcaaaaaaaaaagtattcacacccaaaaccatggaggcatcacacctgcaattttgtggtactctccacgacagtgccctgaattgttttaagctcggtggcatcgacatatagttactccagtcttccatcatgattcttaggtcatgaattttgct

SEQ ID NO: 5115 - DNA, 748 bp, Zea mays
aaacttcacagggtcaggcagggtttcttgaaaacacaataaggttctgagtaagaggccacatgagacaaagggtttgcataggcgtgctccaaattctcattgccaagcatgagaaataactaataaccaagacaatcgcacataatttcttatacaatgcaactgataaaatagcattattcattatctaagggaattcatatttagagtaatgtcataaatgtatgcagagtatggaagttcctgatgaattgcttcagtgcagagtacaacatgaaagtaggcagaaagccagaaacacctacctgctgttgcagcaattttagagagataaagaagacgtcttctttcagcaaaggatagtggctttctgctggttgtgaagctggcatctccatcaggactacgacgcagagcataggtatgaagggtgtcggaagcagatgagaactggtttaagcatatctcatgaacccacagcagatcactccgctctttcagaaagcttgcaagctcttcctggaattcttcacctagccttaacagattagagtagtctcctctgttgactaactccttaaagacaaagaaactgaatcccccatgaggccctacgctatcatgctgcaacaagatgaacattttaagttacaaccatgccttaatagaaggttgaaactgaatgaccaaaatattcgatgataaactattgaaaaaaattgaactaggatcgcctgctgtcacc

SEQ ID NO: 5116 - DNA, 731 bp, Zea mays
actactgagttggtaaatcagaagttcattatctatctgaatattttctctactctccataaaagttacttgtaagtttagcattcatacaaacattttgtcgacctgttgaatgttgatcacagtttggtagatgatacttgttgaagtgtataggttgaattggctaacttctcccatcaacttaagcttttgggttgaattggttagtacgtccactctaacatggtatcaaagccagaggtctcgagttcgaatcatgacagaggctttatttgtgcctccacccatttatttccacgtttgcgtttttctctctggctgcacgtgagtggaggtgttgaagtgtataagtgaattgactaccttcttccatcagcttaagcttttggattgaactggttagtgcgtccacttcaacaatattgtctttcattctaatagaaatttaacttgtagcaaacatttgaatattatagtgttacacaattagtaataagcattacatgagtcatctaacataagcaactgcataatataacatggcgtatcagttgaatatatttaagtaccgtcttgttttgacattctgtgtgctatatatgcaatgttgccatttctggtattctaaacaaatagctcctttatcttttaccctagctcctatgcaatattgcacttttagttcagtatttttttgctgaaaaacatgatgctaattcaaattgtat

SEQ ID NO: 5117 - DNA, 713 bp, Zea mays
tttgcatgcctgcagcgaccagccagtcaagcgggaggaagaggagcggctcgatggccctggctacgacgacgtgggcggcgtccgcaagcagctggcccagatccgcgagctggtcgagctgccactgcgccaccccaagctgttccagacgctcggcgtcaagccgcccaaagggatcctgctttacggcccgcccggcaccggcaagacgcttctggcgcgcgccatcgcgtcggagtccggcgcacacttcgtggttgtcaacggcccagagattatgtccatgattgccggccagagcgaggctaacctgcgcaaggttttcgaggacgccgaaaagttcgcgccttccgtcatcttcatggacgagatcgacgccatcgcccccaaccgcgacaagacgcacggcgaggtggagcgccgcgtggtctcgcagcttctcacgctcatggacggcctccggccgcgcgcgcaggtcgtggtgatcggtgcaaccaaccgccccaacagcctggacccggcgctccggcgctttggccgttttgaccgggagcttgacatcggcgtgcccgacgaggtcggccgcctcgagatcctccgcatccacaccaaggacatgccgctagccgaggacgtcgacctcgagcgcatcggcaaggacactcacggcttcgtcggcgccgacctcgcggcgctctgctccgaggcgg

SEQ ID NO: 5118 - DNA, 758 bp, Zea mays
tttgtttgtgcttgggcttgtccgtcttgtaggccgaacgggcctaaaacagcccatgcgcgacttgtcgacaaggtccacacggcccactgtgtctatactctatactgtacggcgggacgcagctggagcgacgggacgagccgcacccgcacctccccgcggacagatcgatccgtccgtcctccgtcgtgttcgttcaggccgagcgagatccactgctgactgctcactgcaccgaaccgagagagcgtggcaggcaggcgggcgggcgatcaccgacgccgacgccgacgcggcgtccccacgcgccaacggccgaacgcactctctcccacccctccgtcgtgctccacggcccaacccagccctacgcactcccctcccccctccccccccgcagctacatctcccctcccgcttcgccagtcgccaccgcgcggcgggagctcgctgaagagcttcccccctctccccccaggcccgcggcggcgccggctcggcccccgtcatcgcgctatcgtaggctcgcgggctcagctgatctggtcagcgaggcgaggttgccggggggccagatcccgcttccgcccgcgcgtggtctggggtgtgggcggtggatcggctgcgcgggtcattagatctatgcccgagatctaaggcgccagcgccaggtgcggaggcggaggccgtgagccggtggcggtcggaggccggggacagggatggcgtggtggtccgggaaggtgtcgctcagc

SEQ ID NO: 5119 - DNA, 796 bp, Zea mays
acgacatttgggtggtcgatcccgccgatggccgcgaccttgtcccggaactcgcgttcgggcaacgaggtctccttgaggcgcttcaccgccatgaccggcccagactcgatcgcggccttgtacgtggtcccgtgcgtgcccttgccaagaacctcggcggacgcgcggagcaggtcctcgaggtcgtagggccggggaatcctaccgaagaagaagagcttcttccgccccacggctgcggcggagacggctggcggtggcgggactgaaggcgggggcggcggtcgcgcgtctgagacacgtggggtgtagccgttggggctcattgcctctttgctgtgcagggccagctccgccgcaacggcgtcacggctgcggtatgtcggtctcggctcccgccgcagcgcgccacacacgaggacgaggacggccgcgatcaggaggaagccaaacgcgcagccaaccacaatgccagcgatggcgccgccggcgaggtgatgcctgccccgtccgcggttgtcagtcggggccggtgcctcgggccggagcgtgggagtgggaggctgagacggcgatgcttccgaacccggcgctcggcacggcgggaggggcttgccgcacaacggcatgccgaggaaagacgtggccggcatgccgccgaagctcttgggtatctcgccgctgaggttgttgaaggagacgtttagcgcggtgagcgacggcatgctgacgttcggtagctctccggtaaggcggttgccgttcaggaagagcagctgcaggcatgcaaaat

SEQ ID NO: 5120 - DNA, 745 bp, Zea mays
gaacggaacaatgccttgttgccttccttctcccccagcctcacaatggagtcgccccccctcccctttgcagattcttcgagcaacatggcaggatcattcattattcgaatcagtaaccgtaagggcaattctgtggtggttggtgcaggttctggagctgggaatcctggtgcactcggtgatcatcggcgtgtccctgggcgcctccctgcggccgtccaccatcaggcccctcgtcggagccctcagcttccaccagttcttcgagggcattggccttggcggctgcattgttcaggtacgtacggcatgtagtatctgtttatacacttcacactgaagtgaagagtgacatgacatccgaacagaaggtgacaaatagaccgagatatttgtagcgaagagctagctcgtcactatcactagctacatcgcacagatcagtgaggagaggaccaagaactaggaccccgtcaatcattgatgcaatcatggttcatataactcctaaccgagaacttactccaggcagagttcaaggcgagggcggccgtggtcatggcggccttcttctcgctcaccgctcccgcgggcatcgcgctgggcatcgccatcgcttccggctacagcaggcacggcgccaccgccctggtcgtggagggcgtcttcaacgcggccgccgcagggatcctggtgtacatgtccctggtcgatctcctcgccgcggacttcagcaacccga

SEQ ID NO: 5121 - DNA, 805 bp, Zea mays
ctccccgacctactcggcgccggccttccgggccccgtgggctcggccgccatgcgcttgcccatgggcattggcgccctcgacgttgcgctgcacggggcggccgccgacggcatcgaccgcaccgtcctcctcgagctggcgctcgccgcgatggaggagctcatgaaagtggcgcagatggacgagccgctctggctccgcagtcccgacggcagcggcttggaggcgctcaacctcgacgagtaccaccgagcgttcgccagggtgttcgggccgagccccgcgggctacgtcaccgaggctacccgcgaggccggcgtcgccataaccagcagcgtagacctcgtagacagcctcatggacgcggtacgtacgcacgcacctcctcctatatactagacacgtgtacgtgtcagttccattccgtacgtgccgctgcgccatgcactggcacgacggtgacatacatacatacacatgtttcgtgcaggctcggtggtcggagatgttcccgtgcatcgtggcgagggcgagcacgacggacatcatctcgagcggcatgggcggcacgcgcagcgggtcaatccagctggtgagctagtcccactcgtcgcccacacgggtcacacgtactatgcacgcactttggtgacgcgcagtaccaccatgctctcgcacgcacacgcctgtgctagtaataataaaaaaatagcctgtgctagtaataataataataaaaatatgcatgtatacgacgtatacgtgcgtgcttctgggatgcatccatgcagatgcacgcgga

SEQ ID NO: 5122 - DNA, 708 bp, Zea mays
agggtagagtggcctagggctgtcacatttaatgatctcgcgtcgagtgggcaaatccttcacagaacaaccaaacggatcaaattcaacagagaacaattattgtcggtggtaagttgacgaacagaaatcaaatctttaataagagatggagagaatcagatgtcatgtgactagaggcaccggtgtcaaagcgtcaatgtgtcattcttgctgggacggctattggagatgggcaaattgaaagttggcggcgagagcctgcctgatcccagaccggagcaggcgaaggcgagtcggtgtagccaggcgaagggacccccacacacacacgcgcgcgcgcgcgctgccctgccaactgaccggaaggcccagcgatggaggcgtgtggttgctaggtcagtcaaggaggcaggcaaggtgcagaaggcagacgttggccaggccacatgtaaatggccctcgtacagggattgtagttgtagaccacgaagttggaagagtgcctagggccaatgtcgtcgctgctattgttgtcggaattctttttgctgctcttgcacctcttgccgcgcgtcgtgaccagagtcacccttgactgctgcgtgcggagcgttgtggctgctgctgcgaagggcgagaggtggccagggggaagcagacatcttggagccacccgcctcgcctatcccaaagaggacagcaaga

SEQ ID NO: 5123 - DNA, 772 bp, Zea mays
ctcatctggattttagccaggcagtgtcaccatttgcatataattcacacatgagacatctgtctcccggtgttgccccctggtatactcagagccctggtccacgttctgcaccctggttgatttcaccacaaaacttaatatttgattcatcgatgcaaccggttattcctacaaatgaaactgcgaagggtgcatcatccaaaaatatatccatttcacatactgtttcatctggtgtagttcttcccagtccagcaccttctattgtttcttctccaacagcagttgtgaatgatggaaaacagaaggctgcttctagctctaagtgtggcaccacatcacaaaagccaagaaaaagaaagaaagcttcagtaagtccagaacagcaacctgtcattgcttctcctcagctcaaaatggacatgccgtcttttactcctgccattaagcacacagcaggatttgccttatccggtagcaagcttgttcctaacatgggccagattgcctctgaacataactaccagatcactggtggtatggatagtgatcaaagaatcatcttttcagaacagatccgttgtgcagtagaacaatcagctgcacaggctaaaggtgcaagccttgactcaatggaggcagttaagcacaaggaaggcgtatggagcaatctatccacaatctcaagaaacaagttatctccagaggtcgaagagaagcttacctcagttgcagcagctgctgaagcagcagtttctgttggctaggc

SEQ ID NO: 5124 - DNA, 755 bp, Zea mays
attattggttgggcactaagctactctgggcagatgttagaatctcatcaaggctgttagttaaacttgctagtggaaagagcctcacaagacgagagaggcagcagctcacacgcacaacagcagatctattcaggctagtaccttttgcagtttttattatcgttccattcatggagctcttgctgccagtgttcctcaagttgttcccaaacatgttgccatccactttccaggacaaaatgaaagaagaggtttgacctagaacaattaatctgtcttgtcaatagaattactaaatgctaacatggctcatactgcattcgtcttgctccatacaggaggccctaaaaaggaaactgaaagcaaggatggaatatgcaaagtttttacaagacactgctaaagaaatggcgaaggaagttcaaacatcacgcagtggagaaatgaaacagactgctgaagatctggatgagttcttgaataaggtgtcatcttcttgcatgcttagtatgttcactatgttgtatgtagcttcaagtttagaacaaataccagtaaacacttcaaaattttgcctattggtgatatactcaaatttcctactaggttaggaaaggtgggcatgcctccaatgacgaaattttgagctttgcaaagctatttaatgacgagctgactttggataacatgagcaggtttgcgcttcatatgcttaatcccttgatcataccagttggctgatcatccgtatt

SEQ ID NO: 5125 - DNA, 697 bp, Zea mays
tcatatcgttcggcgacgctatctcttcctcaagccgcgcgccggagcgccttttccgcgtcgttgacatgtacgaggctgtgcgtgacattctccctgaccttgatcctgtgttctctgacccatactccgctgcactccgtgcggaggtctcctcgatgtgcaacacactgggatcctctatcaagggtatatttatggaattggaaaatctcatccgccgtgaccctgcccgaattgctgcccaaggtggcgtcatacatcctatcactcggtatgttatgaactatctccgagctgcgtgtgggtcgcggcagacattggaagaggtgatggaaggtgattttggggctaatggaggtgcgcctgttgctgttgatcctgaccgttccacatcatcccttgctgtgcacattgcttggatcatggatgttcttcaaaagaatctggatatgaagtctaagatataccgtgatccatctcttgcttctatcttcttgatgaataatggcaagtacatcatacacaaggtgaatgacagtgagttgggtgttttactcggtgatgagtggatcaagcagatgacaaatagagttcgacgctggagcatggattatcagcggacaacatggggcaaggttacaactgtgctgcaaagtggtactccaggcattggtggactcccagccaaggcaat

SEQ ID NO: 5126 - DNA, 757 bp, Zea mays
tctcgcgggccgtatgtaaaaagctcgcgtttgttgtgtgtatcgttttgggccttgaggtcctggtcctggtcctggacgccttgttgtatcttgattgcttcgacaccatctcatgtccggtccgtggttaagccgtcactttggcccatccctctctccgctccgaagtcccaattgccaccactctgacgatgtgatgattattttcagtccgtcgtatactcagatcgctacagaaattgattgccacccatgggcgtacgcgtagcaatgcatggcaagtcgttctgcctacggtcgacctccggctatatgtaatgttcgatcttccgtgacatagccacatagggcactgtagcattaataggagcggcgaaccggcagcggtggcggacggccggtctacacctctagctagctggctagtgcgcatcacgatttcaatggagacgtgtacgtacgacctgactgaataccacacgcgcccgcctgtgatcgtgctgagtagagagtagcatagtacactttacccgccgccgagggcatgaggccgtgaaccgccgcgcgacggcacggcacgggtccccggtgcggcggcggcggcggctgccccgtgtggccttccgttgcctgcctgacctgccctgaccaacccgaacgccctgtggcggtgtggcctgtggcttcgtggtattgaagcgcccttcactggtcaccaactctccagtggcatcgttcgattcatcgctgcaca

SEQ ID NO: 5127 - DNA, 796 bp, Zea mays
tcagcagcagcagcagcacagcccaggaacggagaaacccagacccagacgtgcgcaccttcttctgctgctacaacaccatcagatggtccagggaatggatcgcagaaaggagcagagagcgcacaccaaaaccaaaaccaaaaccaaaacggaatcattgggcacagcaacggagtcactccagtgcatcctataccgttcttccccggaccgcctttcgtgtacccctggagtccagcatggaacggcattcccgccatggcagcggcggtgtgcgcagccccagcgacagccgaagcagcgatttcatcagaacacggcacagcgagcagcgccgtccagtggaacgtgccaccagcgatcgtgcccgtgctgccaccgggattctgcggcccgatcccagtcccggtaatcccgccgccttccgtctggccactgatcactccctggcccaacgcagcatggagcgcgccgtggctcgggcctagcgctagcgtgccgccggggtcatctcggagcagcggcagcagcacgtgctccgacagcggctgcggctccggctcccccgtcctgggaaagcactcgagggagtcgaggccgcagggcgacgagaaggcggaacgacggtgcctgtggatccccaagacgctccggatcgacgaccctgtcgaggccgccaagagctcgatctggacgacgctcgggatcgagcctggcgaccggggcatgttcaggccgttccagtcgaagcatgcacggcagcaggagctgcaagcgtccggcgccgctcgcg

SEQ ID NO: 5128 - DNA, 810 bp, Zea mays
tgcaggcgcgctccagctccccctcgaccacatcgccgcgcagccgcgggtccgccaccgcggccatgtcccctgccacgaccctggatgctgcccagaccgggaagaacgtggacggcggacgctgctgaccgcctgcatccccttcatccgcgtcgctgccgtggcccgcgtcggcattgcggcgccccgagatgagctcgaagagcagcatcccgaagctgtacacgtcggccttggcgctgatgggcagcccggagatccactccggcgcgaggtacccaatggtgccccgcatcgtggtcagcacacggctgaagtccctacccacgagcttcgccatcccgaagtcggcgatcttggggcacaggtccccatcgagcagtatgttctcgggcttcacgtcgcagtggatgatgcactcgcggcagccctcgtgcaggtaggccagccccctggcgatgccgaccatgatgccgcagcggtcgcgccagctcggccgctgccgtccgctgccgccgaagaggtaggcgtccagcgagccgttgcgcatgtactcgtacgtacacgagcatcttctcgtcgccggaggagcagaagccgaggagctggacgaggttgacgtgcttgatgagccccagcgtgctcacctccgtccggaactgcttgtcaccctgccggagcccctccagcttcttgacggccacctcggtgccaccgttcaagacgccgcggtacaccgtgccgaagcctccgccgcccagcatctccgagaagttcttcgtggcggcgcggaggtcgccgcagctg

SEQ ID NO: 5129 - DNA, 689 bp, Zea mays
aggcccaccgtggaggtgggcgtcgcgcacgtcgggtgcgccgaggacgctgcggccttcgtcgccctcgccgccgccgtcgacctcagcatggacgcgtgccgcctcttctcgtgcaagctgcgcagggagctgtcggcggcgtcccgcgccgagtttctccggtgaccgggcttctaggtgctttttagagtctagaagcggtggaactcgggtttctgtgcctactgcggaaggattctcaagcgttctctggactctggtggaggagaaagaaacaccgctgatgtgaaccatgtgatgtcttcgtgttctgctcttgttttgttccttttgcgtggagcgaaggcttctgccggagctagctgctatatggaacgaagaagaggccggcatcctaatgtccgtccaccgtccatttcccggcccagcgtctcgttctcgacgacgaagggggagggggagtcagaaaagggtatggagagacggggtggagacccacaaagacagatcaaaatttacaaaataaccctttagtaattcattttttttctatttgtatggaccagcagtaagagtatatgaggggctgtaaaaggtgggctttgcatccggtatgcaaagaattttttttcccacgtggggcccaaagccacatggggtgttgagactgcctctgcaggcatgca

SEQ ID NO: 5130 - DNA, 779 bp, Zea mays
tcctgtatacagtatacataagactgacagtggccacggttccttcggcgcatgaagaagggcaataccctttcagcgattcaaacagcctattgtgctgcaattgcaaactggtacaggcaaagctgaactggtctatacacaaacgctagctacctatccccagccacctcgctatttcccttacaaagacggagagaccagatgccacacaataatccaacacatgcaagcaccgcaaccacaccccaaatcctctcgtagtcgtagctctgaatcttctcctatacaaggacctccgttgcttgctttcctgcctgcttctcaatatctacagctagtgatgagctactactgaactataattcctactaaaagactgtccctggacgctagctatacttcaccgtcatccttgcttctagatctctggagcgcgtaccggcacgccgtgatggcgtccttcaccgtgaggaacacccactcctcccctatgatgtccttgatgtacccagacagcaccagcttctccgtcacctccagcctggggttcgtcagcgctatctgcaaggagcaaccatctgttagtctgtcacgagtactcgtcaattcagtgaacaaaattccggtgattaccctgatccctttacgatcaaggctcttgtgaacctcgactagcatcccaatccccgtgttgtcgatggaagtcacacctgcaatgttcatgaggcaaagtgtcaccggtggactgaaaactcgaggtgaggacgggacgaaaa

SEQ ID NO: 5131 - DNA, 770 bp, Zea mays
tggtgtggcggctgccttccgtgcacctgttggtggtgttctgtttgctcttgaagaagcagcatcatggtagcacctctttgtaggaaagttagcatttgttttttcagctaactaatttaactatttgatatcttgcatacttggattgtcacaatattgcaggtgcaatatctatcaactttcaatgtctatccgttttcacctaacattgatttggtgtatgcttttttattgttcgacaaataatcatgagttgggcatgtggctacaactacaatagattaaacaattgatgaaattggaaaaatgatattagcgtagttatctattatctactattagtctgtgtacatttctttttcagtttttcatatgatgaaagactatgtttctatacatcgttttacaggtggcgaagtgctcttttgtggagaacattctttacaactgctgttgttgcggtggtattgagggggctgattgagttctgtcgtagtggaaaatgtggtctctttgggcaaggtggattgatcatgtttgatctcagttcaactgttgcagtctacagtactccagatctaattgcaattatagtccttgggataattggtggaatctttggaggcctcttcaactatctgttggacaagatcctccgagtttatagtattatcaacgagtaagcactcaactgtagttaacatgtttgccgaactttctggttcactgtgcttattttaagacatgatagcgtctattatttaatc

SEQ ID NO: 5132 - DNA, 803 bp, Zea mays
tggactgtgaggagcctatatattctatattttcccccatcatgcagtcttgacataaggttggagagttggaatgactactcaagacgtcggttagcaatggactgttcggttagcactggattaaaaaggattgaaggaaattaaattactaacaaaataaatttcttgttagtaaaaaataattagaagaggatttaatcacttaaccttaatcctcttcgatctaagaatttactgtccatgatcttcacgcgatgcttgtgttgatgccctcagtctcagctacgtacttcccttattctttgaccaagcctactgaggagaggaaagagcatgatcgcaagagcccggtgacagcattggaggtctatcccagcaaaaaaacaggcaggtccctaacctacccatctcaatcagtaactaatgtcaatatattagttagttacttccttcatctcacatcataattggtttgacttttttataccatgattgactggcttatcctattcattttttttacgagaaatgaaaaattggaagccacatttaaaatatattatatatgctaaacaatatcacaacaaaaattagatgagctggtcaaacttaggataaaaaagtcaaataatttataaatttgaactgacggagtattgtactattcgtttattcagaaaatggacatgcagtttgtttgtttactgatttagctcattattaagctagctccgatctgtagttgaaatatattgaccttcattttatattattgttattaatattactactattattat

SEQ ID NO: 5133 - DNA, 787 bp, Zea mays
acagttgccgctcctccgtctcatggactgcggcaacagcatatgcgccaacccccagcctgaagctgggagatcctacttcggcgacctgaccggcgggatcaagttctgctcgaagttacctgtccaaaagaagcagcagcagcagcaggctgcctgccagaagctgatcataaagcacggcgccctgaagaagctcagcctgtggggctgttcagcgatcgacgtgagtgtcaaatagctgcgtctggctacgtgatccttaacacaccgttgctccggttcatctccattgcacagctccgtgctcattgccgcttctccacctgtgacaggccttgtacgtgaactgcccggagctggttgatctgaacctcaacgcgtgcacgaaccttcatccaggtgcgatgcccattctctcgtcgtcttcaggatcctgaagctcaggctgcgcgtaacaagtaaatttccatgcacttaacgtcgttatgtaacgattctgtttcagagcggctgctgatccagtgccccaagctgaaggacgtgcacgtcagcgggtgccgcgacatgctgatcggcgccgtcaggaaccaggtcctgaacgagttcgcggccgccgagccccggctgccctgcaagcggctggccgacgggtcgaagcgcgtgcacgtgccccacttcatgatcgagcaggtttgcgagcgaacccccttctgctcttgaaccttgagtccgtcgtccgtcttgtctgtcatctcaccgccgggggtcggttcttccactgtct

SEQ ID NO: 5134 - DNA, 745 bp, Zea mays
agagcatggcgctcgctcgcctcctcgggacagcatttctgctgctcctgttttctcatgcaggtaatccgacacgtgatgggattatataagtacacgtcagttcacttttgtgcatgtacacgtctgttttctcgtcagttcacccacgcacacgtcatgcgaaaatatatgctgatgctgatgctgtgtccactactcactcacttaacggtacgctgtgtatatatataatttcatcagaggccgctggcgaggtaggcgtgaactatgggacggtggcgaacgacctgccgaacccggcgtcggtggtgcagctgctgaagcagaacggcatcaccatggtgaagatatacgacgccaacgcaaacgcgctgacgtcgctggcgaacacgggcatcaaggcgatggtgatgatgcccaacgcgaacctggcccgcgcggcctcggacccaacctacgcggcgcagtgggtgcaggacaacgtgatgccctactacccggccacgcagatcaacgccgtcgccgtggggaacgaggtgttcgacgaccccagcgtcgacaagatggacctcgtcccggccatgaccaacgtgcaggcggggctggcggggctgggcgtcgccggcgacatcaaggtgtcctcgccgatcaagttcgacgcgctccaggtgtcgtggccgccgtcctcgggcaggttccgcgacgacatcgcgcagccggtgatgaagcccatgctggacct

SEQ ID NO: 5135 - DNA, 785 bp, Zea mays
tgcatgcctgcagcgccgcgctttgtccgcttctcgggacgggatgagagagagagagagagagagggcgaggagtggaggaggggagggctgtgcctgtttgctgtttcttgcggggaatggtttgtttatcacggggcatgtacggacaaagaagcaattaaagtgacggtctgcggtgtacggctcacgaggcccgtgcagatagatgaagcgaaatctcatcaccccaaatccggtggcgggggctttgttgctgggcctacagctctcctaactctaatccaaggaaaaaaaacggatccaggtttttttttctttcagagaaaactgtgttcttttttttcattttgcaccctaacgtatggggcccaggtggcaatgagacaagaagcgaggtggattcacagcttctgtatcgaagaggatcctggctttacttgggaattgctcccgctttgtcgacgattaaacgggcgtaattgcgcaggaacgcaggggtgcatgtgcaaaccgcaggctttaatcggcggtccggcgcccccgtccttgggtgggcacggcgctttaattcgaaaggagacgtggtcacgggcggggagggattatcccggccgtccgtcggccgggtgcggggacggagggggcagatgggtcggccgcgcccgcgtaccgtgtgacctcagcggcggccgtgcggtgggccggaccagcagccccggctggccggctccgtcgctgtcccgccgcagggggcctgccggccgcgctgcaggcatgcaagc

SEQ ID NO: 5136 - DNA, 749 bp, Zea mays
tgtgggtgcccctcgccgccgccggctgctgcctaccagtaccagtaccagggctgcggacgacgacgcggcagagacgtcagcgcgtcagcatggccgccgcccagacgcttcggacgccgactgctcatcgtcgtcctctggcttcatcactatcgagaaaggcaccatctccagacggcgcccgccgtccgactacctgctcaccaccgacgacgacgagcgagatggacatgaacagcaagcggccgggctgcccccaaccacgacaacgcccacctgctgctggtccttggacgacgatgacgacaccaaggtggaagacgacttcttggccatgctagtgctagaatacgacgacgacgtggaccagctggacgcgctcatcaaggacgccgaggccgaactcgctgccgtatccatcacctagctagctagcgcctagcgagctgcctccacgtgccacgtgtgcctacatactcccatagaccatcataggccgtagtagcagatgatagattcatgcacccacccagaccaaaatccccatttccaacagcactcctacaaaccaacgcaagctcctcgattgaaggagctagaggggtaggcgggtagccagcattccacgtgtcgtctcagcgatctactagaactggatcagaatcagatgatgtgatcggatcgagtaggagtggactacgtgtactgtaccattccatcccattaccgcatctgcaggcatgcaa

SEQ ID NO: 5137 - DNA, 745 bp, Zea mays
aaccatctaccagcgactcagcgagcgagagcagcacacactgcacgcagctagctaggagcagcagcagcagcggcggcgatggcggcctccatgatctcctcgtcagctctggcggtggcgcctcagggcctgccgcccctcggccgccgcgcctcctccttcgccgtcgtctgctccaagaagaagatcaagaccgacaagccctacggtgcgtgccacctagcctgctgccgcggcctgtgtgtagatcactgtcagcttagctagctgcttttcgtccggccccggtggccgggtgtggttctgacttctgagctgagtcgtcgtcgtgatcgttcgtgcatgcatgtccgcagggattgggggtggcctgaccgtcgacgtcgacgccaacgggagaaagggcaaggtgagcacttgttgtttctagctagctagcagctatatagttttttagttatccacgcatgcatgctgcgtacgtgatagatcgatcgatggagctgaaattacgtggtggggatgcgattatgcagggcaagggcgtgtaccagttcgtcgacaagtacggcgcgaacgtcgacggatacaggtgatgagcttattgcttgcccatcagcgcccccccaaaaaaagtgaaatttgtgtgtgatgacccatgcaattgttgacgaccatgcattattttgatcagtcgtagttgttcgactgtactgtgtttttaattaatttggcaatgaat

SEQ ID NO: 5138 - DNA, 726 bp, Zea mays
aacagacaccgccccggccccgtccagcggcgcaacatgcataggcagacatgcacgcaccggccgctcggccgccggcacccggccagacgagacggccagcttttacgttcgtccgctgttccggctccggcctccgggccacacaccgcggcccgggcagccgatgatggagctttccatgcatgagcgcatgtgccggggatgcatggcgccatcatcgatctcttcctccctccctggctccctgcacgcactgccgccggccgggcggctgggcaggcggccaggcgcagcggcccggcgacggtgagcaccgcctgcgcgcatgcagttcgaatattacgagagttggcgccaatggtaggggcgcgtatgtgccgcgcttttgttcccttccgcgcttgtcccccccggcccacctgacatacgggtgcaaacgcatggccggccgcgccctgaccctgacctgcccgctgcctcggtccgtctccatgcatgcatgcaccattccggtgccttgtcgcatggcatacgatgcacgagaacgtgacccgtcttttcaggctctgctgcatggccactgccggtgccgctgcatgcacaatcgtctggccatatgcccatgcgtgagcacgagtgatggtgtgtgtgatcctgttggctgccgctgccggccgtggaagagatagagggagagatcgtgccctttaattacctgcaggt

SEQ ID NO: 5139 - DNA, 980 bp, Zea mays
  unsure (1)..(980): unsure at all n locations
gttatggaagctatattagcacttacctagttggttagattgattaagtcctaattttttttagctctgactctctgagtccttgtctatatcttagttaacttcatgttttctaaattatttagatgactccactgtaaaggtagcattattcatgtttatgaatcaacgaagaaataatctagtaaatggtttttccaaacaacttggctatgataagagcctcttcttgatgggagaagactatagattagagggcaattgacccttacctcatgttaatctgttgccattttatgcagatactcagctattgcaatttatgattttttcacaaatttgattttacaccaaagctttcctgttgtagagggttactacataacataaaattccattgcatttaacaggtacgtcgaatctctcaagttgatatagaaacagaaattgtgtttaactgccaaatggggagggggcggacaactactggtatggttatagctacattggtttacctaaaccgaattggagcttcaggtgagaacaaaatttactctggttcctgcttctgttatctgtgtgcttctgttatctgtgtagatctgactgaaaaacagtagcatgagtgcatgaacacagacagtcgtgttgggaactgtcatgtggttgtggtcttttagtattacaaactgatggcagctgattctacggagtacggactgcacattgtatcttaatatatgtttgctgcattatgtgctcacaatcatgcctgtacttggagtttttagatgtttgattgttagaacctttnnnnnnnnnnnnnagaatatattatgaatatgtatatttatatatattatatataataaattagataatattataattataagattattattatggtgaatatatttcataatatatatagtatatagatataataacatataatatattaattgattattatatat

SEQ ID NO: 5140 - DNA, 784 bp, Zea mays
aaaggaaaagactaggtatatatattttaaaacaatccacacagttgacgtacggcactgtagaacttcaggttggctaggctagctcgtgaaccatgcgagcttttttgttttgtttttgtcccttgaacttgtttcctcgacatgacatgagcatgagccagcagcacaggctagtgagcagtgactagctagttgtgcttcccctgggtgtagatgtagtcggtgtgagcgagcaacgtcctcctcatcaggcactccgcctgttcgtcgtctccgtcgtcgtcctcacattctctcgccgcctgatccggatcttgctgcgacgcatttccaccacggccactgatgagccactcttcttctcatgaccagcaacgacggagatggatacatcagcgcgctgcaagtagcacaacgacgaaagatttgtaagagagatgcacatgacatgatgcatcatgggcaaccaacaaggaataatatttggtgaacacaggagtggaacaagcaacgactgccggccgaatggtaccagctgctgtggcgtgtggccctcggatcctggctccggccttgccgcttgccccctggtagtgcaggtgcagatgaggaggagcagagctgctaccaccatgagaagactagccttcagctgcttggagccaccgccggaggccatctctgtataggtctctctctctctttcttcgatctctctgtatacctgatgatgagcggtaatgttcagtagagctgttgttgtggcattaggtgaggataa

SEQ ID NO: 5141 - DNA, 794 bp, Zea mays
ccctgattttaaaagaggggtcaggctaacagtcatcatacctgatagtagtaaaacatacggggagtatactgcaatgaaagctcaaccatgttactagctgctgtataagcctgaaaatattaggaggacaatcaaactaaaatacagttaaacatagcacaaccagagacataaaactggaggacatatacagagaaatttttagcagagttgcatcgggtaagaatccacgtaccagggatgcagtgaacacacatccaaaaatcaaacccagagcacggactactctttttgccattcttattcctcgtccttcaacctcgccatattcctgttatgaacaccagatgcaactatcttactaatcatttcaaaaaacctaaatgccagcctaggtcccattatcaataagaaccatcctatgtaaatttgtataggcttttagttgggcagataattagttgccagaagaaaaacaataagctgagttcaaattaactttatatttggatgcccgtcatcaaagtgataaggcataagaaaatgaaataaagccaatacagtgtcatgctatgtgaatacatattatttctgcatcaatagaattaccataacgagaagagaaaacttggataagcaaataatgtctgatagctcagcattagatgatacaaccacaaaattgtacaaactataagctcgttagataacaaacatggagcatcacaaacagtctcacattgtatattggagttattagtggttcagtagctcttagcttctgtagtatt

SEQ ID NO: 5142 - DNA, 595 bp, Zea mays
agcttgcatgcctgcagctcggattaattgctaccatccggacatcgggagccttccgtttgagctcgcggggctcacgtacactcattcacccaccgctcacctctggtcggtccatccattcaacacccacggccggcgcgcggcctccgagtccgagccgagtccggcgaatgggcaggaagggaggcctggcctccatcttctcctcctccaagcactccaagcccagcgccggctcctcggcgagcgcgccctccccgccgtggccgtggccgtcctgcgcgaccaagccgcagacggcgtccttccgcgggcatgccggcggcggcgacgaccggccgtgcaccacgtccgccgcggggcgcttcgaggaagcggcagcagcaccgtgcggcggcgggaggctgcggccgcggccgtggcgcggggccgcgccgggcgacgagatgtacaagaccgtcaactcggtctacttcgacgccgccgactcccgccgcttcttcttcttcgacgacgacgacgacggaggggacgatgacgcggcggacgacttgctcgacctcgaagtcgggagcttctgcacgacaacggg

SEQ ID NO: 5143 - DNA, 694 bp, Zea mays
aacatttccagcggtagcggccaaggctcggatgttctcttgtgtgtcaaagaaacccatttcttggagctgagctaattgtgtggcgtacagttcttctggcggcactgcaaattttgacattactttgttgatgagaaaacttcaaaaaaacatctaaagagaaaagcttcatgagatcattcatactcagtggaaatgcaggattaattttttcatcaacagaacagactatgtactactaaccattaggagcatttggaacacctaggccaccaccagcaccaagcccgctgaacatgttcatcaaggtgttgaggttcacattgcctaggattcaagttttccaaaagttgttaaacaagcaagggaatatgtaaatctacatagaaaggcagtcaactgtctaaacaagtttaattagatcaagttctggcaaagatttgggaccccaacagagttgaattagctcaaaaaatcaggaaaaccacacaggcttcttccaagtatagtcactagtcacttggacagagaatattactcttctcgtgtgaaaattttcactcaggataaatatttaaatgacctttggaaacaatgctcaaactgatcttgtgatttatccatacagaatgtaaagaaacaaacatcaataagtcctactgcaaataaattctgggtaagtccatttaga

SEQ ID NO: 5144 - DNA, 793 bp, Zea mays
gcagagcaagcgaagcaaccatcggcggtgccattacgttttcctgactgcattcactagggagggcatactgcgcgataaggccatgggcgagggacccacgacgaaaccactcccactccggggttgcgcttgcgggtggggagaggagccgtgccgtgccgtcgaaaagactccggccggccagccaggccgttggggggggcggcggcactaagttgacacggcaccggcaggcacgatcgctagctatactaaaccgtgtgtgcctggcagcgagcgccagaaaaagcttgcgcgctcgtgttgtgattgcgatccctgcaaggccattgacaacgccggagcagcgaccaaatcagcacacaggatcctggaaagcatcagaaccacgcacgacacgatccgagtccaccaccggcagcggcagcggcagcggcaccgacagaaccatctccggtggccacgcacaaagccgtgcggtgagacccagtgcacacagcaaggcagcattaccggcatcgacaccggaaccgagagtaataaaccagagatgcaacacatactacagccttcaggaaagcaagcacgtagtcacaccatcgactcaagggctccacttgggaccaaattacatataagtatatttactggatcgcgcaatagtattgacgttaacattgggaatccacatctattttcagaacacacggcggcatgttttgtcatacaaatcttgtcaataaattacaactcctaaaaatcaaagaccgcttgggatgtaaatgaacct

SEQ ID NO: 5145 - DNA, 698 bp, Zea mays
tacgcggcacgcgcagtgatgtcctctgatgccattgatttgtgactggctgggtgcagagcgagtatggcggacgggtgaagcagctggaatcggacatcacgttccacatcgggaagcaggaggcggagctcaccctgcgggtcaacagcgccgctttctacggcgacctgcaccagctgaaaagcctgatccgggcaggggctgatcccaagaacaccgactatgacggccgctcccctctggtacccgcagaatgccttccgtcgatctgtcatcatcggcaggcagtaaactgagataagctgatctttttcctcgcagcatctggcggcttccagagggtacgaggacgtcgtgcaattcctcgtcaacgaaggcgtcgacatggaccttaccggtacgccgccacacgcgatccactgccattgtcatgacatccctgctgtcttcttgtttcctttctaggactattgctaccactctgatcatgtcatgttggtgttctcgattcaccagaccaatttgggaacacgccgttgctggaggcagtgaagcaggggcaagaacgggtggcagcgctgctcttcgccaagggcgccaagctgagcctcaagaacgccggcagccacctgtgcacggcagtcgccaagggagactcggacttcattcggcgcaccctggcctacggcgccgac

SEQ ID NO: 5146 - DNA, 784 bp, Zea mays
tatcatgcggatgcggatgcattctttcagcattgcctatctataacttgaagagatcctgttttcatataccaaacagaataagtttcatatcatacctcaattatgcagtaaaaaagcggtactatagttcttttatgggatattgtgcttcaatgctctttttgtgaaaagcaacaggtttatttttctgggaaagcatattgtttattggcacttgttgtgcctatgaaatctttctctgttgttcattgtataatgatgaatcgctctccattgtcgagaatgaagtttagctatacctatacatagttttatgaacacccttcatctttaccttctctgtcttgagaataaatttttactgtcatgcatttctggtccttgagttaatcacataattgaatattttttggtaggccatacatgatattctttatcacacttatcacatcgagaaggtaacttactgacttactctccaaatttcctctagtataatatcctggtattaattgagttctactatgtttttttctggtttatgcagtatgatcatttggaatttcctggagttgttcctcgaacgtttataggtaaaattcatgatggcatgaaacccacccttaatttgtgcagcacgaaacagtattttcttaatgatcaatttttgggctaatgtttcttatagcctaccatacaatatttttagattgtatagtcaccctagtcgccttagtagtaccatctatacttttagctccaagacaaaacattggtgttt

SEQ ID NO: 5147 - DNA, 688 bp, Zea mays
tggttagtgcctgttaattaccacgggaaatggaccacaaaagcttctttgcattgtacatgcccgctccttgcgcatttgcaattcctttattttcctgattttgtttatgtacaagactgggagtgccatgatcttcgttgctactttgactgctctgagtaaaaaaggttactgaaagcatgtgtctggcagggaacgcagcaagaattactgtatagttcattttagttcctgtaaccatacaatgcagttgctttctcaacatatttgttcattttggttgctgcctgctattctgctaaggaatgcgaaaagatgatagcttcaactatttgaagtgtgcattcttgcttcaaagttcaaacaaggattaggctgtcagttacacggcaaaatttgggccactgaaaccttgtttactgtgtagacggtcagttcacaaatctttgttttttttattttatatatagaactatgggaacactattatcattgttaggttggagtagaaagaaattactatggacaaagccttgtattgttacactggtgttacctgaattttttttttgaattggtcattctttgaggtagttatgttattgacaattttaaaccgaacatttctgaaactcacattactgctactctgtttaacagcttctgcatgagatgcttaagacac

SEQ ID NO: 5148 - DNA, 796 bp, Zea mays
tgcatccctgcagagaactttcaaatgtccgtgacacatgcacaggcgtacgaatgacatcttcatcttctggtgggctccatgcttccaagggatgttcaggctcactagtttctaatgaggttcctctagttccttcaagcagatctaattctacttttgcagctgagcaatcatgtaaatcttccccttggatagaaaattcaggttctgaaatatttgggtggctaccatcagaatcagactcatttggacccagcaactccttggagtctttgtcaacaaccatttgttcaaaatgatctgcttctgtatcatcttgggtgatgatggtatcgacaattgatatgtctccacccaggtaaccccgacatttggcagtaccacagaagcatttttgaggagcagcaccagatacacgaacataattgtaatcaaatgtcaattcttcaccctatattacaagaacagaacatacccattacacactgacagttgaccagtgtcattatgcattatgtataattcactgggactataaatgaagcaaaccaaccctcactctttctagccctaccttcttgatgctcctcaaagcaaatattccaatgcagacttccccattgaccatccactataaacaataaagaacataatttagcaagctctgcatgagaacacaactatagatcattatatcaagagaaccgaatatattttaatggataaaattaaatggcaataaacatagtagacaatacacgcaaaaatggaagagataaagtcaaccttctct

SEQ ID NO: 5149 - DNA, 730 bp, Zea mays
  unsure (1)..(730): unsure at all n locations
caaccttgccgccgtttgaaaacctgagattacaaagtagtgcatcacgccctgtaagcacaatatggaagaagtcatccacccgcttcgacagcgagtccaaccccaactggagcctttcagcacttttcgacatctgggagatgcagttcagcagttcctctctcctttccaagcaactgatatcagtgacaacaccagtgtcctgctttgtgttatcatcttggtgtcctctgtcaattattttctcaggcgccatcacttcctttgtatggccaatggtctcggtatcctccttgatatcagctgtatccattcctccttctgtagtaatactttgcagcatgatcacttcatgctgacagctactatcatcagccaacttgagattatccgcatggcctcttccctgggctgtagtatctgccaggaccacttcctttgaacggctaaatgaatgagccaggctggcattctcctcttcaagctgagcagtgcaagtcaatgtatgcagctgtttagcacatacatcaacatcctccagctcttttacagctgcaacactagctctgcacagctgcctgctaagttcaccgcccatggccctcaaaagatcaaaaaaggccgtagaccaaccaaatctctcagggacatcacagtccaccagtggcttacaggtcccccagagcacatcggcaanggctcatcgatggcatccagcccccccccc

SEQ ID NO: 5150 - DNA, 814 bp, Zea mays
tgcgaagaacaagaaactgacctggtggcgtgccgcagcacatgtccctgtcgtcgatgtgctccacgtctaggccgatgaaccacgcgccgagcgacacgtcttcgttcgcgtatttatgcagtatgggcctgggcggtgggtggtatatggtgaacgcatatgcatcagctgcctgccagtgccactgaagagagagagaaaaaaaaaagaaggttttgtcttactggttgatggagatgtaggtcgcgaggtccttggatatggcgtatatctgccccgtggcgtggcggaagtacttgttcccgtcctctccgaacttccagaactcaggctcatggtatttcgcattcctgatgtgggggaaaaagaaaacatgtatgtgaaaacgaaacgctggtatttcgacgattcaattcgaatgctgcgctgcttttttttttacagaagaatttatatacttgtcggagaggaccggtcccgacttcatgcagccaatgtacacccgtggcttcagcttgtgccggccgagggtggcgacgagcatccctgcacattttacgccatgaagatttctggacagctggtttctgtcttctctaaacgaacactgaactcttggaggtgcgttttgttaccggatcggagcaagggagcacgtagtttacctaggttcaggtgaacatcgtcgtccaccttgacatagaaatccgcgtcccataaggccacggcagttgagaagaatgtcttggtcttcgcagacagcttgtggtacccttcgacatggtcctgcgaagcatatatgcacagttca

SEQ ID NO: 5151 - DNA, 771 bp, Zea mays
gttgctgatttcgttctataagaggactggcaaaaagcccaaaaggattatattttacaggtatgtgcttgacttaactatctagataactcttggatgaagccttcatttcgtgacttcctttgcttttgttttgtttatttagggatggaataagtgaaggacaattcaaccatgttttgctccttgaaatggacgcgataaggaaggcttgtgcctctctggaagatgggtatctacccccagtgacatttgtcgtaatacagaaaaggcaccacacaaggctcttccctggagttcatggaaggagagatgttactgacagaagtgggaacattcttcctggttagtaccgcgatgttcatccttgtttaatgacaaccttagcattagcatttgcttgtcactgagattggaccctggttggtttaatgacaaccgccacattagccatactatatctttgggagatctccacttctaacacaagcatgatactattttgaacacatacatgcatgttggctgtaatttgtgactcttttcttcctgttaaaatatacaggaactgtggttgataccgagatttgtcatccgcgggagtttgatttctacctttgtagccatgctggaattcaggtatgttttagcagatacttggcttcttgagtgtgttatattcgtccccctgaatgtagattcatttctccagggaaccagcaggccaatacactatcatgtcctctacgatgaaaaccatttctcggctga

SEQ ID NO: 5152 - DNA, 721 bp, Zea mays
cagcttggcattgcctgccagggcttcattccaggacatgatattgaggattttgatctctggtggtgttccaatagtgctcggctagatgggctgagtaagaagggttttgactctttggtcgctctgggtgcttggatgctgtggaagcatagaaatggcgtggtctttaatggttcatccccaagcttggtggtggtcgttcagctggccggggaggaagctcttctgtggtccttggctggagctaaggggtttccttcctccaagctcaaagtcatgtgggatagtttctctgttgttattgttggggtgtctgccagctgacaggcactttgcccctgctctggctgggtggggttttcttgtgtgcatgtgtgggtgggtgttttccctttgtaatgttagttctggggtttttccccttttcttcttaatacaaggatacgcagttctcctgtatgttcgacaaaaaaactgttacagagataacagaaacattccactctgaaaacacataaagaagaaaccaattatttttaaaatggtattcaaaattttatcaacaaaaaacaaatgcagcatatgctgtaaaattgaacaagctgaaataaaacaaataaaaagaaatacagtattaaagttagctcttataggtcctaaggctcagcagatacctttatccggtacatcccaaggagttttgctaaaggggcaaaga

SEQ ID NO: 5153 - DNA, 783 bp, Zea mays
gaccccctatagtcgacctgcagtttgcagtttcatcaattgatcaatcttcaagcacatgctaggtccgtgtctgtgcgttgccacgagagtaaaaaaattagtatgaaacatatatatgaaacaataaacatcatcatgatatataaaatccgtgtaataaaatatcatcgtaatgttaatattgatgatattattattgctacatggaatagatattgaaacatgttccaaatcacaaacaaaatcaatggagaagagtcttggacaaccaagtccatttcaaaaaagatacaactgctgtcgactgtcgacggcaacacagagtgaaataaactacgacatcattataacagtagtaatatacggtgttggtgttgcttagcgtagattgatacagttggagtagggcttgggaggcggcgtgtgtcagtcactcacctcaaccaattggtagctagacctgacataattgtatagtgtaactatagaaaatcacctgacaggggtataaatttggttgtgcattaattttctaaatgacaccatgttacctcaaaccaataaaagaagtttcataaatcacaaaataaaatcaatacacaaaccagagaagattagatatgttcacagaacaaatcaaaaaatacctttatcgatgcaccactcagactgcttcattagctccccaacaaaaaacacagtggaggttatgccaacaccacttgtgtcatcctatgccaaagttgtcctcgcaatcatgattgcatttgggttttgaat

SEQ ID NO: 5154 - DNA, 703 bp, Zea mays
tccggttctcctgcgctagcttctcgcaccaacgcttcaggtactcgcagtccacctccgtctgctttagcttacttctgcatgcatgcccgcagtcgtcgcacatacaattaagcttaatatgtattgatggtatacaactatacatggatcgtcgtcggagtaccttgctcttctgttctggaaccagacctccacctggcgcggtcgaagtttcagccgcttcgctaaatcactcttctgtttctgtgccaaaaaagaaaaaaaaaaccccacttttctcatctagctagatgtattatttgacgaataattctttgctcatacatgcaagagctagtgcaagcccttgattcttacaaaaaacttcccatcaaggaccgttatatactaggccttcgtttgctctcaatctatttagattagatgagattaaatggatttcaattccaaacaagtcaaaatcttcttttataatttttttaattccatcaaatctatatagaatatgaataaccgagctatagctatgtcgatatctctaatctgcaatcaaaaagaactgaatactgttccttggtgaccatatatataagatcaacggtcatgcagcaatcacaagaacaatctgtacgtggtggtgtacatgcacagctaccaattaatctttcaagtcctactctataattactttcctcgttat

SEQ ID NO: 5155 - DNA, 781 bp, Zea mays
aaaaccatatttgcagttcaaatgaaatccagcaaagtgaatagagttctcatactaaagcggaacatgtaaaattaaaatcagataacaaacctcttccagttttcccttcttcagctgctccactatactttcaaaagcaccagaagctgctatggcatcccttatattgttaataacatggttgagatttcgttccaaaatcgaatttcttgatttaatcattcttttcaacttcccacttgtcacaggcatctcctttgctataagcacaaaaaatcaagggcaaagttattatccaaggaaagcaaaaaaaaaattacagctaaataagttgagtaataaacctatctcaagtagagtcttattgggtaatatatagccagtgctctcatcctcagcacgggcaatgccatctctccatcgatatagactctgggagggaagaattagatgaagagtaatagaatgtttttttgcaagtaaattgtttaaacttgcagtgttgcggcctggttaacgccctgaaaaggagggataatgtacttacggaaagaactgacagctgcgttgcattcagctcgttttctttcaacctgcaattgaataaactaatattacaaaccttcaacagatttttgcaatctattgaatagtcacattaatgcaagcacaatacagacccatgtatatgtagatatgatgtatcagtcagctgctccttctcatacagttgcaagcaaatttcgttgctgcgcttgcaaacctgcaggcatgcaag

SEQ ID NO: 5156 - DNA, 792 bp, Zea mays
aaggcaacaagccaacaaccatcccgctcctcctccctccgtcaggctgtcactgtccccctcaccgccgccgtcctcgtcaccacacctcacccgttgctcccactccttccagaaccacctcctcgccaccgtggctgcctgccctgcccgctataagactcttcactcccgctgcgacgcagtcctcacaagcaccagaccaattaactagcttcttctagctctagctaggctcgtctgctgcaagaaggtaacagcgcaggcatggaggggaaggaggaggacgtccgcctgggcgccaacaagttctcggagcgccagcccatcggcacggcggcgcagggcacggacgacaaggactacaaggagcccccgccggcgccgctcttcgagcccggggagctcaagtcctggtccttctaccgcgccggcatcgccgagttcgtcgccaccttcctcttcctctacatctccatcctcaccgtcatgggcgtctccaagtccacctccaagtgcgccaccgtcggcatccagggcatcgcctggtccttcggcggcatgatcttcgccctcgtctactgcaccgccggcatctccggtaccgtacacgccgcccgcccgcccgcccgcctctttggcttcgtcctctgtttctttcttcctctgcttgccttgcctcgtcgtttgtgcaaactggtttgctgatgtttctctctctctctctctctctctctctctctctctctctctctctctctctctcttctcgcaactgcaggcatgcaagct

SEQ ID NO: 5157 - DNA, 626 bp, Zea mays
acaacgtgagctggtccgtgggctacggcatccccacgctgggcctcatggtctccatctccgtcttcctcgccggcaccaggctgtaccgccacagggtgccgcagggcagcccgttcacgagcatgggcagggtcctggccgccgcgctctggaagtggagcgtcccggtcccggccgacgccaaggagctgcacgagctggacgtcgaggagtacgccaggaagcgtaagttcaggatggactccaccgacgccatggccttcctcaacaaggccgccgccgtggccgtgcccagcggcgggccggcgtcgacgccggcgtggagcctctgcacggtgacccaggtggaggagacgaagcagatcctgaggctggtgcccctcctggtggccatgatcgtgccctgcacgctcatcgcgcagaccaacacgctgttcgtgaagcagggcacgacgatggaccggcacatgggcccgcgcttcgagatcccggcggcgagcctgggcgcgttcgtgacgctgaccatgctggtggctgtggtggtgtacgaccgggtgttcgtgagggccgtgcggcggtacaccaaggacccgcgcgggatcacgatcctgaggcggatgggc

SEQ ID NO: 5158 - DNA, 732 bp, Zea mays
aaggcccactcagcccgttattcttcagccgccagcgatccagctctagcgtttcttttttccagccccagaagctcgacgccggcggtgctccacgggagccaccagccccacctccatcggaggcagccaccggccacgggagcagcacgcctcctgcatcaactgctggcagccaccagccacctccatcgttggctacttggctccctcctccttggtagaagatggccccatcctcgtcctccagctccggtaatccctgtgaggctgtgcctgtgaccctgtctatttattccctttcgaatctgctttgctccgcttcggtactgtgcttgactgcttgctgcgtggctgccggccgtggtgatgtgatgttacattgtagatggacatggccatgctgctccgcgccctgggactggtagagttcaagtggcgttgcctaacgcagatgctgctgctgaagctgatgcagaggttagtggtggttatgctgaatctaacgagccaaattctactggtgctccatcatgtgggtctggtgtcgttcccaatgattctgagtctatagttgccaaaacattagagaagttgccaccagagcttgctgcactagctaaagatcctaagaggcatgctaaatctaaggaccctgggtggaagtatgggttctggccatatgaagggaagaaggatatggttcaatgcatattttgcaaaaaggtggtt

SEQ ID NO: 5159 - DNA, 736 bp, Zea mays
tgcggcggcaggagcggcggtggacatgggtgagctgctcggctcgtacgccaacgacctggcgtgccgcgcagtcatgggcaagtccttccggggcgagggccgcaacaagctgttccgggagctcgtcagcgacacctcgccgctgctgggcggcttcaacgttgaggagttcttcccgttcctggctcgcttcggcgtgctcagtcgggcggtccgcgccaaatccgaggggttgaggaggcggtgggacgagcagctggacaggattattcaggaccacgagtcaacggcgacggcgagaagacctagcaacgacgacgaggatgatgacttcatacataccttgctctccgttcgacacgagtacggcctcaccagagatcagatgaaagctatcctgcttgtatgtagaagtatcatggtcgtcgatcgcctcctctcgcgtacatgaaaaataaatgtctgacagaaacatgtcaatctttgcaggacgtgttcttcgggggaataggcacagcagccacggcactcgaattcaccgtcgctgagctcatgcggaacccagacgtaatgaggaaactacaagccgaggtacggagcgtagtacccaagggacaaggtcccgtcagcgacgacagcctgcgcgacatggcctacctgaaagcggtgataaaggagtcgctccggctacacccgccgacgccgatcctgacggcgcacttcaccatggcca

SEQ ID NO: 5160 - DNA, 769 bp, Zea mays
tcttgcatgcctgcagtaaagtcaagcagacaacagcaccatcagtaaatcatgaatagaataaaacacaaaggatgtcataatgagaccaatgctggctgctagcatcagaaaaggaattcatgaatccacatagtagatttctcttcttaacttggtagtttttaataaactaaagaaaacatcatgaaaaacagatacagtcatactacaaaaatccaaccaaaacaagaagacctgaacaataatccttctcaatccactaatcacaactcaagatgctacaaccttgatctaggaatacataataaaatatgagactaaaaatacatcctccaagctagatttaataactagaacctatagtccaaggctcagtttcaacataaattcgagcagaattacaatggtccaagccctagtagataaaaaaagttatatcactggggttccattacaagttcatgaacttataaatatctttacactatcaagtatagcagcattttcttattgcaatttaactatatgaaatctgaatataatataatataatacatgaaacaggaaagaccataagctctcaatactaaaacgcaacctcaaacatcagaactattaatcgcacaagtcacagctgcatcatatacaagtcacacaaaaatcaggtcgcactagaagcgcaaatcttaccttgtcattcacatcacagaacttcaacctctccgtgaagatggagtcgccattgctcaccttgaattggtgcgag

SEQ ID NO: 5161 - DNA, 710 bp, Zea mays
gtaaactgaacaatgtagactgtattgttcgtatagtaaagtttgaatatgagtaacagttatagataacctaaggacacctcacatttgcatgcagaataagggagtagttgattcgacagttcatgcatttgactagcctctgaccttcaaacaaagtccatccatccatccatgagtaaaaaaatcatggatcagaatatgcatcaggagaacgcctatacctttcttgccataagcccataaccatgatacccccactgacatatacagcgtcaaatgctaggaccctaaaccaccatacaggccgaaatcgcatggcacaagatgatagaacaagttctacgtacattcagtgtatacaaattagcctcctcggctcccaggccagttgcttcgaaactctttaaaaaaaaggcacaacagcaccagaggcccaggaatcagcaccagtagacgtagcaaatacataaaacaactggcagacgtgctcaactgcgtcactttacatgggagtcgtagacgtcaaatacagattctgggatgacggtgggcagcttgtctatgtacatgaagagtcgcctcaggttctctcttcggactgtcgccatatccacgatgtccttgctgtccgtgtatatccacaggtcagcagagtttaccctcttgaggctgtcgcggcagaacggacaggactgggaccttgacct

SEQ ID NO: 5162 - DNA, 762 bp, Zea mays
ccctgtttctaattgatggggagaagtaggaactaattcagtcttgtctgcatctgcatcaagtgaaggtgtcatcaacctttggcatcaagctaaggggtaaaaaagaaataatcacagaattctcctaggttcacttactttcttgcagttactaagcgaatcctattcactattgataagtaacattcaagtaactaagggggtgtttgggtcccacctcctaaactttagtcacttttagtacctaaaataccaaacgggtaactaaaataagtctttcaaatatgatttacagtttaggagggtgactaaaggaaccaaacaccccctaaacataggcaacaagcttaaacacatcctagatccattttactcttccagggaaaaaacaaaaggacacgatttggatatttctacaaaagaaataacgatgcaacatggctgtgctaaaaatatccaatattatttaccagaattaccaacatcacaggaacaatatcggtgggagcttgagtcatggttctatttatgttatcattctaaagaaatatgtcactcaaattttgcaaaactagatagctagttcgtttccatcacattcgaatgaactagctatctaattttgtaaaagttgagtgacatatatacaattaatcccctaaagaaaagatgaaacttcaaatcaaatttaggctggtatgtctaacctgctgttggggacgacctactgggcgggggctataagatccctctgcaggc

SEQ ID NO: 5163 - DNA, 761 bp, Zea mays
cttgcatgcctgcagttgctcaatgtagtactcgcaggtaagcatggtggctgaaacactagccacaaggatgcagatgaaccaccactcggggacctgcctgtatctcctcataagcttggtatgtatgtccatcttcttatcctcgaaagctgatttgcttagctgccatatttcactgtgagaaaaaaaaaagcctgcaattttagcttcatgtgtacttcagcagagtggaccaagatgggcaattgacagcaaaaaaagaaaataccttccatggaaaaggagaacgtgggaaaccgtcgcggtaaggcatgcaaaactaagaccgtagctggaagcgaagaacgtgctgatgtacagtggcccactcttctcataggcgtctgtatcgaagtagaaatgggagtccatgatgctagagatgttgtacttctgcccagccaccgtgtagaggccatctgagtagatggggaagttgcgtgccttgtaaacattgaaccagtagttgatcggtgtgattatgtacacgacaatgaagaaggcagccgcgatgttggcggtggcaaaccaggggctagcaagggggcttccgaggtaggaggagatggacgaccagtcgagtccaactgcaccgatgccaaggccatggaggcctgagccgagctgctgggcaatcacagagctgggaaacacccagcagatccaggagagggaggtgagcatctggaacaggtagcccgggaagatgtagtaggcga

SEQ ID NO: 5164 - DNA, 707 bp, Zea mays
cttgcatgcctgcagccccaccttgcttagaactttaacttgcttaagggatactgacttactgaattcctgagcacaatgctccagatcagcagaagaaagtgagccatgcttattcttcaacccaaacttcatgcagatagtgtaagcagcaaaattaccactaaagggtgtaacttggccacacgcctggatcttcttggaacaaaatttggtgaaatattctttctggtcttcggcttaggagatgctggtgtcgacaaaatagttgataggggtttggtgaccatctcgataaagttgttagctatgtcacaggtattaacctcctgaagctgaagcttgggccgaatccttctgtgatagactttcagtattttgctagatccagatcgggagacctgaacagaaggtaatgctggggagtgaagaaccactgcacccacagcacccaaaccatcaacgcacttctcaatctgaggcattccgaagtcctgagctgacacggtcaaatttcccaacaagtgctcgaccaatgcattagaagaaacaccaggagcctggaaccatgcagacttaactgaggcatggacctcaaccgcagcatgaaccggtgtaggagttatgaacgaaatgaatggcgccattactgtagcaacagttaaagaacatgccaggatgtcacaattcaaaaaatctggtgacat

SEQ ID NO: 5165 - DNA, 767 bp, Zea mays
aggtctggaatcagatccagaggaggcgcttgcgttcttgggcaagtattgcaaatgggctgtggtcacacttgcttcaaagggatgcatggcaaagcatggcaaacaggtgagttttaattgttgaccagttgtagtctgcatggtccgtcagtagtgttcgcacacaatttagatgatgatcttcttaaagaatggcattttagtggttgtaacttctggagagtgacagcaagtcttttcagttgatatacgacgcacaataccaaaatggtggcaaatgagcagcaggatgagtatttaatactagaacctaataaaaataggaataccataacaaaaatgttcagagattagttccagatgcattcttttagattttcaactggtgtcaagtattgagcactgagcgcgtgtccttgttttttggcggtgaagagaaattgatcacaagtatgtaacagcacttaatgatggatggatggatgcaggtcgttcaagtgccggccatcggggagagcaacgcggtcgcggtggacacaactggagcgggcgacctgttcgcgagcgggttcctgtacgggctggtgaaggggttgccgctggaggagtgctgcatggttggggcgtgcagcggcgggtcggtgacgcgggcgctcggcggagaggtgcggccggagaactggcagtggatgtacaagcagatgcacgccaggggcatgctgctccctgagctcaagaactgaactaatcatgctgcaggtcga

SEQ ID NO: 5166 - DNA, 728 bp, Zea mays
tatgctttggttgcatcataatgaaatgttatagagcaatgccagcacttgatacacatcggatttttttcttctgatttctactttcatgggacgaagtttaacacagctttgattggttgatttctgttaggttcatgtttcatcataaggaatgaacagtagtcgacaaatggaactccactacataaacactggatttccatacacaatcaccgagagcttcatggatttctttgagggtctcacttatgctcatgctgactttgctctcacggatggctttcaagatcaggtatgcaaaacataactgccatgtttctcaaataatcttatacagcagccgtcaatcccaactcattatgaccttacctgtaaacttttattttgtcaccctgtgttttgctacatctctgaaattacttttggcatagcactgaactctcaggaagaaaaaggcaaaatccagatggctggaattgactgcctcagctttcaattctttatttccttatcattgtctgctttgattcacaaagttttgctactactgtgcagggtaatccatactgggcaatgatgcatacaaactcgtacaagtatggatactctggtcctgggaactattacagttatgctcatgtctatgacatagacgattacatgcgtagagcggatggtgggcgcagaatatgggataacactacacctgtaaacaatgtcgattc

SEQ ID NO: 5167 - DNA, 590 bp, Zea mays
catcttgcatgcctgcagtccagtcactcaaggcagagcccaaacctatgatggaatgtctgctacaacagcttcaggaagtgtttgagacacctagtggccttcccccagctaggtgccgtgatcatcggattcatctcctcccaggaacagcaccagtagcagtacgaccttacagatatccacagctccagaaagatgaacttgaagcccagtgtaaggccatgctccaacaaggcatcatccgtcacagcacatcggctttctcagccccagtattgttagtaaataaaagtgacaattcttggcgcttttgcattgactacagagccttgaatgagaagacagtaaaggataaatatcctatacctgtagtggatgaattgttggacgaacttcagggtgcaagattcttcaccaaattggatctgcgttcaggttatcaccaggtccgtgttcaccccgatgatgtgcacaaaacagccttccggacacatcatggtcattgtgaatccttggtcatgccatatggtctctccaatgacccggcaacattccaggccctcatgaatgaagtgtagggacagttc

SEQ ID NO: 5168 - DNA, 771 bp, Zea mays
aacaagaaacggaagttaaaggttctcacttagtactattaagttcgaccaccctcctttatcgagtgtacgtttcatccttttttctgtgcatccattgcaggtaagttcagtaacatgggctgagtatctatgtgatttcttggaaatgacaaaaaatgaagaacgttccacaaacattgcaacagtaataaggggttattatggtcttattgacactgatataaagcttaagatcctccgggaactagtggaagaagctattcaaacctctgccataaaggagatactaagtgaccgtgtggaccagaaacaagtcctcaatgcaacaaaaagagagaacaccagaaaggacaaacaagagaaaaatcttaacactgaaattgccatgaaaagtcaggagaatcagacagatgatgtgcaagttggtcatgggggtgtagatgagctggttaggagaaaagaagaaaatgacaagagcaatatttctcggagtagaacagaagggaaacgacacttggtgagcacctgactcttgtatttgcatttgcatttgcagatgcatcaatatatgtattctagtcatgttcggttgtatgtggcaatgttgggtattgagccttacagttttgattggattttgaatgttttgaaggtacagcaccttgagacggagattgagaaattatccatccgatccagcccacttggtaaagacaggcagtacaataggtactggtttttcaagcgtgaaggaaggctttttgttga

SEQ ID NO: 5169 - DNA, 776 bp, Zea mays
ttggagatcaaggtagcctcgttcttgaactcctccgtcccttgctcggagtccctgctcagcctcttgacggcgacttcacggccacccaacagtgtccccttcagaacagtagtagtagagcaataactgggtgttgttggttcgtgagttcagattcgcggaaaaaaggacaggacacgacacgcggaatgttaccttgtacactttcccgaagcctccgcgcccgaccatacattccctcgagaagttcttcgtcgccgcgacgatgtcgctcaactgtatggaaggcagctccttttcgaaagaccgtatggaagcgaactcgaggtcttcggtagggtttcgttctgcgaggtcgcttgaagtctgcacgctaccgggaactaacttcttgtcactttcactgctgcttgtcttatctgaggaaaaaaaatgatttgactagcatttgatcttgtgataacatgcatgatggcaaaataataataataataataatacaaatatgtaaatgtacctctggtcttgcaaaaccaaacaaggaaaatgcaagagagcaaaaaaatgcttgccaacaccggtagcacaatttttacaatttttgtcctcgtcgtctttctgcctacataaatacatacagggtagctaggtttggtgagcagttgcaacttgcaagacgacgacgcatgggggcgggaaacgaagaataatgatcgggggcgaaaaaaaaaggaaaaggataatattgaaacgaagatactggaccagtgaat

SEQ ID NO: 5170 - DNA, 720 bp, Zea mays
attatttcatttcatccttgcatgtgcctttcctttccatccacccacttgatggctgtagtctcgatcgagttcgttcgttcgtacttcgtaccagacgatgaactcccacgcacatgatttagtactagttttaccatgcattgttcagtaaaagtatatgcttgcttgatcagtggttgtttcaatcagaagattaaaaaaacggaatataatattaaaaaaaaggggaagtggctagggaattcctcagtcctagctagctagctcaccggtgggaacgccatgcttggcttgggtgcaggtacatatatcttgggctattcgacagcgaagtagaggctgcaaggttgttcacctcggacgattctgccatttgttcatacacaccatgccttttgatttctctcttgcaatttctcttcttcttttatcatggcttttgattcccaaagggttgagtaccgactcgatattcgattctccctgccgtttcgtgaccccagggcgtacgacaaggccgcgatcaaatgcaacggcagagaggccgtgacgaacttcgagcccagcacgtacgacggggagctgctgctgactgctgaagctagcgctgaaggtaattaagtagctgctcgctgccatgtaatcttcagatgacgccgctgttaattattagctcatcagctttctgacgatcagcccttgtttttgtttctgctt

SEQ ID NO: 5171 - DNA, 733 bp, Zea mays
cctgcagtaaacggaaaggacattttgattacgttgaaacggtacttccagcgctcttggagcatcaatacatctcattgacacctgccatgaatcaaagaagggataggtagtgctccttatctcatagatctttagcattcaccgtccatttctataatactattgctcttattcattcttacaagcaatttgtctcaaaatatattgagctttgcatgacgtcgaatagaatatgttattttatgttcattgtattagtatgttggaaggggtgataataaatcagttagcaataaagttttgtagggctacaagattggcatctttggtgcactatattatagtgtatatatagtttatatttcctaccaaaggaaaattagtttatgaaatataatagttttatcactgctgaattcctgagtggtatatgtgaaagtactacaactaagccgtgatgaagtatgaatcagtattttttttgtcatttatgctttagactttaacatttgatatgaccaagcagttggtaattgctactttccatggacgggtgtgttcattgatttcattatttaaatataactttcttacttttactaacaactatcagcatagaatatttttgtaaaccttcaaaatttgttagctactggatttccttaatttcacaagttactgtaaaaagctgtggtgatctgcattctgcatttgtactctctttatccct

SEQ ID NO: 5172 - DNA, 787 bp, Zea mays
atattccacaacagccttggtcagagtatagttaaaaacaaaactccgtccattgttgttgacatcgggttctgtgataattagagcagttggtttacacaaggcagttcttacttatctttagttaacattaaaaacacacggtagcaagatacgactgggaaagcagagaggcaaatgggggaatccggggatggaaacccccaatctgggagcaaaataactagtcagagcccgtccggactccggagcgcgtggattccgctgcgcatccataggattctggcacgagtgagatcgaagtacctctccgtgctcctccgggaagagcggtcgacaggagcaagagcgccacaacagcagcagccgccactttaccgacccagcgctgcccagccatgcggtccggctgtatgggagccaacaggacgacgattcgatcgatcaggagcccaaaactggcgaattgcagagcaagaaactactaggctggaccgctggaggaacataggaaagggacggaacgcaagggtgaaattgagttctacaagttaccccgaggtagaggtagaggaagaggaagtggaaaatcgaaacagcatctcgtccgctcgctccgtagttgttgcccggttcatgagcggggacagcgacaggaggacggacttacggaggacgagcctgtggggtcgctgtcagactgtaatggcgcgcggagcgtcttgatgattcctgcttccaggacccgcgaaccgcaacgaggaattgagtgatctgggaaactgca

SEQ ID NO: 5173 - DNA, 727 bp, Zea mays
tgggagctgctatctatctatcgtcttttgcattatactttcaccgacgaataataagcttttggccatgggagctgcaatttatctagctaggctctatcctattcaaacaaaccctgtatatatacgcgtatatatcctttagagagagagagagagagagagagagagagagagagagaggctcaaacaaagagtcttattcatgcacttcgggtggtcaactttgtatgtaggtactaggtagatagggctactactacgtactctatccattctagatgataattaagtcgttttttttcttaatacacatggttttgcacttttgctatatatccacgtagaatatgttatgtcgtcgtcgtctttctctctctctctctctatatatgctatccatgaagaatatatgtccataatatagatatctaaatatatgctatgcctagaatatgctgtccacgcgtagaatacgcagcacgcagacgcagtggaccatgcatgcacaaaagacctacgctttgtctagtgacgccgcgagcagatgagccagccaagccaaaggaacctcaagcgcatgcattcgcacgccatccgggggcggcgcggcgcctctgctctgcctctgcgtggccgaaactgtagtggaatcgatcgccaggtgcacccggccgggcgatctggacgcagtgggggcagatggataagggaggcagcaggcact

SEQ ID NO: 5174 - DNA, 781 bp, Zea mays
agggatgctgaaagtaattccatacctagaaacactttcatacactcatttgcctcaacaccagcatctgcacaacaataggaaatagaaagtggcttaaccagttcatctgtatgtcggaaataaacaaaaacggatgaaggcacagaaacgtgcaagggacatccacacagatgaacacacagcgcaattaacttgtatgattgtatctcatagagcaatccttatgggactgatagaaccccaaaagcatgatatctcttcaggtttgcagaaaccaaaacaggtctacagtttgaattatgtcaagtgcactccacaaagaaagcaaaatgaaggaaaatgtaagatgaatagaatgaggttcaccatttccttatcacactttaacctgtgtgactatccaaatcctctaaagacagtgcattaggggcttaaccaaacaaaaggttagatccaatgctccacaagcagacaagcaataaattacagacaatgcacagcctcgatccagaaaacagggcaaagcctaacaatttagcaacttctttccacctcctttttactaatagagaataaactccccacgcttcaatgtcgcaaccaccaaattaagcaaggcagacacatctaaatgagaagcagcagcctctcggctacgctccacaggcatatccggcggaagccgccaggtcaaaataaacataaaaatgaacacacgccggaacccaacaagacagcaggcgcgtcacaacacgaatgggatctgcaggcatgcaag

SEQ ID NO: 5175 - DNA, 779 bp, Zea mays
tgggacttcacttatgcagagtacgttgtagctgttggacatcatcatcgctcaattgtgtggcaggtaccttactcacatagttcgtgaattgtgacacctacgtaagatggttgggctggtgggatgtaaagcagcacaaatgataaaatttagatccaagcttctctctgggagcaaatttaaaaacgcatgggttaaaaggcacactttttcagtagtgaatctgagttatacatgtaaatcacctaatgcgctttccacgagatgcacatggtcacagacatgtgttctgcccttctgggtgctcagtggccgaccttccggtgtttcacggcctgtgtgtgagaagtatcttcttagtgcaatgcagctgaagctgttttctccctccgtaggtttttttatagttaaagcaagattgctggctacaattgcctaaccttgctaaattccaacattcatgaacatagaaattttttttggaagaaagaattgcagatagttcttgtttagcatctggtttgttcgataatgtcgctttgattatagtgcagctttagcccattcatttgagcatggtggatctgtttctctggcaacatgacagtatgcaacagcatccaaaatttcaggaagccaaaaggcttacgtactcaatccattttctgctatcccaagttcagccaatgtatatgtgcagtcagctgggaaaaccagtcaaatatcataacctccaatgcaagcattttcatttggttagatgctctaaatcagtg

SEQ ID NO: 5176 - DNA, 695 bp, Zea mays
aactgtgctaacgtgtgttctaaggtcttccaaatcgaggaagatttcggacgggcaagagtttacgaccaatcaggcagcacagaactgattcaagaagctattgatagctggtgagaatggaaaaaatgtttatatcttttttttgtttttgtttgttaatttaccaatgatccaagcatccctaccgaaaatttggtatgaagtggggctaaacaaacatttcttttggtttcaagtcatgaattttgactacatgttctgataatctttcgtttttgttcagcccagttgactgcattcattggactttagctgcgcaactttcgctcctcgaggatgaaatgcgcagagtagagagagtaaatgtaagattgtgttttctgataatttcgatgacatggtcatgcctcatgtttctgagtttctagctctgattgcagctagtcatcaatagaaccaagctagtatatccaaaccaacaatagatgccatcctacctgcttgtactagtatatgaagctttttcaatttcaacaggttggattaatgcttgctgggtgggaggctcaattgatgtgtttcggatggtaatatatcagtgcatctttttttttacataccctaatcttatcctgttgaaatggatcatcctcttttctgcaacagttgttgtgttgatgatgcaatcgctt

SEQ ID NO: 5177 - DNA, 776 bp, Zea mays
aagaaaatcttaactgctaacatttaatattgaaccagattcgcctactcatctctgcaagaattgttttttcttaaggcaagtttggaacatgttagcaagttagttaggccttaatcatttgcgtaatgttcgtcgggagattcccttatcagctgctggtggaaatgcaggcgaagaatccataggatcgatagaagggactttgacggtctaatatgttatttttttgtgtaatatttggaaggaaaggaatagaagaatttttcaacatacaagatgtcaccctttcaatattgtgttcctagtcaaagaggatgttgatcactgttggcttcgggcccctaggttgttagtgggtgcttttagtggctttttaattttgtctcttttgttttgtaagagtttttctctctgttggtgtggtcaagtgtctcgagcagagcggtggtctctgctaactgtatgtttggtactgtttttcttttcccttctaatattaatttcggcagctctctttcaataaaaacagtagacatgtttttatagtttttttttttctaaaatcgttatacgggtggaacacaacttggaagcttttgtatagttttttattattatatttcgtacaaaaatgacatcagggaaacgttagatgtgtagccttgtaggcaacttcttttacacgacaacgtccaataatcaaatagttggagttcaataagaaatcaataatcgacaaccacatccagtaaccacacatttctatggaaaac

SEQ ID NO: 5178 - DNA, 727 bp, Zea mays
tgatgatagcaaatgtcaccctgcacagaagccagaggctcctctttggctggtactacacttttatctgtctgaaagtacaggtgttactacaccttcgtttggtcctaatgcttcatggttccctcaaatatgtttttttcttttctacaggtaaattctgatcaatctgagggtgtgctgctacatgagagggagaaggccaagaacaacagtgcacaaggtactcctacagatccagaacgcgccatgacagctgaagttcattatactaaatacttgttcttgctacctatctgctaatatgtttctacttctatcagaaattgtgcctctggtccagactctgttgccttgtaccccagctgggtacttagtaaagtaagtttttgttcaaactagttgtgtattttgttttcttatgaagacattgttagttggggttgttaagaagatggtaaatgcatgtctgttttcagaccctcttcaagcaaactggcagctcccgccaatacaatttctgaatccgctaacttcaccacgcctggaaatcagaacaaggcatgttctatctactccactcttaacattcaacaagtggaataggaatgtcctctggttcatcgttaaaataataaaattcatcttatcgaagacggctgtgctgcggatgttttccctggccaagctcctgagaaaactctgaacgtttatttgacactgttat

SEQ ID NO: 5179 - DNA, 785 bp, Zea mays
tagcgagaggggacgacagcagcactagggatagatagggagggacccctgctgctagtgctagctgggcctgatcttgaaagcgcgggcatctagctagctacgcgcgccgtgtcgcgatagatatattgccggcacgtactgttgccatggtggtgacgtgtggttggccgttgccccgcgcgctgttctttggttgggtgggtcacgcacgcaccctgtcatgggcacgcacgcgcgcgtacgagcaggccattaaccccgtgacgtgaccgtccacaccgaccgaccgaccgaccgaccgaccgggacgctggctcgtgtcgtcgcggtcgccctctcgctgcctttttttaacttttgcgcggtcaaaactcaaaagcgcggccgccggtgtggtacctggtgcggtgtccgtgcctgctttctccatatccgacggtgtccgtgcacgacgcgagcgtgtgtccaagtggcccagttgctccggacgacggacagctctgcactggagaattgcttttcacggttgggttgggctgggtttagtcctcctccgatccggtttaatgcatgacgatgccctactgcctgcatacccgggcacccggccctgctgacaattaagcaacagcacgccgcacgacaggtggactcgtgggctgccgacaccagctgcactctagtatagcgagacaagacagcgatcccgatccgtcgtcggcggccgcccgcccggccgggagaagttagaacagctagcgacgcgactgcaagtcgactct

SEQ ID NO: 5180 - DNA, 718 bp, Zea mays
aaacaaaaaaaaaccacagcacaagcactagcagtggttggagactcgatgtaaacacaaggagacacgacgcgtaggtacatgtgcaagaacaaaacgtactgcaaagttgctacgacgacacaaacatcaaacaagcagtgaacggacggcccagataaaagtttgggtcgtcgagagccgatcgccaccgcagagtgagtgcgcagataaaccccaccagcacccacctacttcccctgctccgcgccatcatcactttcacccccttctccgggcgcgggcggcggcgccgggcgcacgcggtggccgccggagttcgccggcgcgctgatcagagtgaagacgaggcccagcacgcctcgaacgatccccttcagcaccgaccctctcctggggacgtagcgcggatgtgctcccggtcccggagtcggcttcttgctgccgacgtcccccacgcgcccacctttaggggtcatggcgctggcgaccttggagagcggcgggctgaagctgagctgaggtggggagcgcgagcgcagggaaagtgaggccgcggctgctgccgtgcgcgtgcgtgcccattttatagacagaagataagcactgcgctaccctaccgctgctgctggctcccgccctggcgtagtggcgtgcgcgccgagggtgcacatcgaggccgagccggcagcgggcgaaaggagggagaaaagggcga

SEQ ID NO: 5181 - DNA, 767 bp, Zea mays
ccccgcgctgaaggcgctggtatcctatgaaacaagattcagatatcacttccaggtcgccaatgcggtgtatcaatctagtttggcaaaatttgagctgtgcaggcggcttctgcgggaggggcaggtccaggagcgagcgctggacacagcagggagcaacctagagcacacattccggaaactctcacagaggtattcagaatttttgcggtgcttcacacaacagcaccgttcacatgttgagatgctggccaatttcgagagagatgtgcagaagctgcgtgctgttaggctgcacccagccctgcaaagtgaggggcggcattgcttgatggaccttctcaaggaaaatgacctgaggaaattggctgacgaatgcttctgctcacataagaagtttgaggttaaggtgtcacagctgaaggcaaacttcttggagctgaagaagagggtggaaggcttattccatgccatgagctcaggtgggtgcaaggatgttgagaagctgataaaggagcaccagggagtcattggtgaccagaagatcatcatgcaagctctaaggttagacttagcatttgttactctgggaattatttatttgtactataagaggtttggcctgaataatctaaatggattcactatactaattttttttttgaaagaaaggaaaatggtttagcttggttgtctgactaatctattatcatggagatagcaggcttagaacttaacagtgccatttttatgattttctgttt

SEQ ID NO: 5182 - DNA, 804 bp, Zea mays
agctggaaggattaatatatgctcaatgcaatgagttcagctagccatcaatttaacagttcagggatgatattttttttcacaaaacagcatgccattgaaaagaaacgctataatcaaggcaactcaatctgatatcataatggtgattcccctaaacaatgtatccttaaacgggagttacatccttcgacctgagaacagttattttgtatgagtgattcctgcattgaacctaattaactgctcgtataaaccttaatcatgttaatactacatgctgattaagtccgaaatctaaacctaccacacagtttaataattcagcaacaaatcatcgcaatcgcctggcctttttgcacattcattcagattccctcagatccacaggatgccacaagaaaactttatccaattcaccatgatttcggctaaacgtctagcatgttaattgaaagaggaacatcgaacgcacccggcgagcgagatcgaactgggagaggatgccgtcggcggccttgatggtccggtcgatattctcatgcgctgtccggatcgcgtgcgtcctcacctgcaactccaccaatcatacccgcctcaaattccatccaacgaaggcgtgacgcgtccaaaatggtggggcatgatacggggcgggcgaacctgggtggggcgcattgcggcctcgagcgcggagaggcggtggtcgaaggagccgaggatggtgaccatgccgtccgtgttcccctggcttcgccgcagagagtcccgcagcatggtcgcccgccgcgacagcgcgtccat

SEQ ID NO: 5183 - DNA, 765 bp, Zea mays
tgatcaaggagaggttctccaagcttctcttgggcgaggacatgtcggggagcggcaagggggtctcgacctccgtggccatctccaacgccatcaccaacctctacggtcagcggccttattacccttcttccaacctcccatattcagatcgataggttaatgctaatgctcgtcgtcgcctcctctgcttacagcgactgtctttgggagctgccacaggctgaagcccctgccgccggagaagaagtccatgtggcggcgggagatggactgcctcctctccgtctgcgactacatcgttgagttcttcccttccaaggagatcttgcccgacggcagcatacgagaggtgaaaacaggttaaaggggttgattgcctgaagaggaaatttccgcggggcgggccattcagtcactgacgcgttttgattctgtcaggtgatggcgacccgaccgcgatccgacatctacgtcaacctccccgccctcgagaagctggacgacatgttgctcgtaaagatcaaagattcttcgtactacgccatgacatgagcttgagctaataagctgttcttctgcaccttcgcaggagattctgtacagctttcagaagactgaattctggtacgtcaatgacaaagggcagaaagacgattccgtcgcgacgccgtgccgtccggtgagccaccgcggcgaggagaagtggtggctgcccgtgccgtgcgtcgccaagcccgggctgacggagacggcgcggcgaga

SEQ ID NO: 5184 - DNA, 763 bp, Zea mays
aattccacatggctcttactcattcatccaacctttttaaggtagaaaaaggtaaaaaaaagaaagaaagaaagaacactgcttacccagccaacaatgttcagtcccttcttgatgaagcatgaatcggttggcctctttcccgtcactagctccagcaaaagcactccaaagctatacacgtctgatttctcagtagcatgcccgttttgcaagtactctgttgccagccaccaaagccaaagcaaccagccagttttagtttcaccaacttcatagctactagatgccttgtttttttttcccactacaacgatatcatctggcaagaagataggcaggagatgtacctggtgctaggtatccaaaggtgcccgccacaacagtggtaacatgggcggcggcattgtctacaagcagctttgcaagtccaaaatcagagacacgaggctccaagcttctgtccagcaggatattgctggccttgatgtccctgtgcacgatcccaggcgagcaatcatggtgcagatatgccaggcctcgagccgagccaagggcgatcttcatacgcgcgttccagttcaacggctggtcctcttgtccatctcctgccataggcaccgacccacatcatgtaagcatcaggtaggaaggcacacacaagagatgcagcaagaatgtaggcatccttaccatgaaggtagcagtccaagctgcccagctcaacgaaatcgtatacgagtagctttgctgcaggcatgca

SEQ ID NO: 5185 - DNA, 696 bp, Zea mays
ggtgatgcgatctttttcacttcattagtgtcggctgctactgctgctggtgatgtacttatgaaattacaagggcttctcatggtggtgtcgacagaaagtataaatcttgaacttattggggatgaagcccccagaaagaaagatgttgaaaagaccagtggaggttctcggaaaggaaagaagaagtctaacaccttgaaaaagctaacgacatctgctaagccatctaaggtatagtttatttgttgctcagcttgctttagtatttccatagataggataggactttatgcttcactgagtatattaagttatctatagttaacctttttccaggataatggatgcagtagttcagataatcgcaattgtagtcctttaccaaaccattgtgctccatctgttgaaggcactgctgctggacctccatctgaaaaaactccttacaaggaaattgtaccaacaacgaaggttgtaagcattactttgccaatctgttttgtttggttgttcatttattcatgacttatgagggacatctcgatattttaggagcaaactgtctcgttggatggttgcaaaaatcaatgtaacaaaaagaagaacaagcggaaagggaaaacaaaactatcaaatccgatgaggcctgagagcccaagatctaccaaattaaaaacagttgttccccatagt

SEQ ID NO: 5186 - DNA, 751 bp, Zea mays
tgcatgcctgcagcgcggtgaggttcccgaccgtgcctagcggtatggtcccgatcagccgcttcccgggcagccgcagctcgacgacgcggcgcggtgcctgggtctggttgctgcacacgacgccgagccatccgcacggcgacagcgccgcggtgttccacgggaggaggccccggctgtcaagcgcgttccgcagcgccagcagcgccgcgcggtcccccgccaggtcctgcgccacgagcccaggcagcgcggcggcgagcagcgccaccacaacgaacgggaccgccgccacgcggaaaccgccgatcggccgccgctggcgcgtcatactcataccccggcgccgctgcgaggtccgcagcttccaggcaagaaaggcactcggaagtcggaactggagtaagaatcaacgatgccaatggcaattgtaattaactaataacgcagccggctgggcacgcgcaacaaggggacgacggcgggcgagaacacgtcgccgcgtgtgtcaatagcggggatggagctttggaggcagcctagagttcatcagcggcgacggaggaatcggtgtggtgcgaacgcgttcgtatgttcttccgctggctttatctctacgtgtgctgtgcaaaatgaagatggtggggtgagctcgtccagctgcgccaatgcaagtatgcggcacagctttgtttaccacatgtaattaccttgactagtttagccataaacaaaaggcatggtgagt

SEQ ID NO: 5187 - DNA, 703 bp, Zea mays
tgcggttcttttttctgcagcgtctccttcacctacagcccagacatctgatgctactgggcctcctgatgattcaggaactactccaactgtccttgccggcgctgttgttgtcccccctgtggtcaaccaccaccgtatgaccactcggggcaagcgtggccttcggttccccgctctgtttgaagcttcagcactgtctccaattcctcgcagctatcgcgctgcactagccgatccccactggcgtctgctatggaacaggagtatgcaactctggttggaaacaacacctgggatctcgttcctcggccacctcactccaatgttgtgacaggcaagtggatattcaagcataagttcaacgccgatggttctcttgaacggtataaggcacgctgggtccttcgcgggttcacacaacgccctggcatcgacttctctgagacttttagtcatgtggtcaaacctgctacagttcggacagtcctctcattggctctttcacgaggttggcctattcatcagttggatgtcaataatgcctttcttcacggcacgttgtctgaaactgtcatctgtgctcagcccactggtttcgaagactccactcatccggattatgtatgtcgtctcaaccgctctttttatggactcaagcaagcccccccgtgcatggtacaacagattcgcttctcacctt

SEQ ID NO: 5188 - DNA, 820 bp, Zea mays
tcggtgcctcccgatcatctacctgaggggagcccggtgtcacggagtgccctgatggcccagatcaacaccaaagtcggcgacagctttgtccggtcgctggagtccgacagcgacgggtccgaaaccgtggaagcggaagagaagcctgcgaggaaccgtgtggcgaggttccttgtgcttggaggggcagttgctctggcctgtactcttgaccaagggctcctgacgaaggctctcatcttcggcgtcgcgcggaaattcgtcgggcagaggaaggcactgtagcatctctggcatttatttctcagcgtcgtccgcttggcccgtggtccgcactaaccggacctgtcctttcactgtcgtagagtggaggatagaggtggttcagtgtctgcctaattggggcaaatgccattgaccattgtggctgaaagagaacagagctgatgaaaaacattttggtgtacagatatgctgccggctgttggatagcgaggaatggggaatagagcaaacaatgtacttctcgtttggagaacggaactcctacgatatatataaatgtgtttcatctaatcttgtatctcagacaagaacagatcagatgactgtgcagatgagaacaagcatttttctatgtagcttactgcggctacggcttctacaatattttgtttctatggattgcaggattgcagccgcagccacttgcagccgcagcagtggctgtcagccaactgaacaataatttgaatctagaatttgaattccattctatatatgacgacgctcgaattttttaatctagaatttgaat

SEQ ID NO: 5189 - DNA, 894 bp, Zea mays
  unsure (1)..(894): unsure at all n locations
acaatactcgtggagaacatgaacgcgagtgcagcaagcctgcaacaggagaaatcagtcgaacaaaactagaaagccaaagttagaaaatactgaggacaatgagcttacactgtagagagaaacatcagcagtacgtgagcagcagcatccagcacagcggcacggagggcaagcagacaagtaacagataaacagaatcagtaaaaggaactcctgaagctatttgaagaagaaaggtattggtagtctaatacggtacgagccaatcggagcactttaatctaaacataatctctttcggaaaaaatgaactcgtcaaaacagaaggtgaaaatcacgacgaaagcactatgagctaactgcgtgcatttcacgaggtttttgcagaaatcggattcaaaaactgctgcaaagtggcaacacaagctccgcctctgatccaaaatgagcacctgcaaaccaacctcgaccgaacgagcaatccagtgctggcgctggcgctgccagaggtaacttacagcgcaccatccttttccatccataatctattcgggatctccaaagccctgattccgaagagagcaaccgagtccatccatcggactggaacggaaccctagcaacaacccaatcggcctgactccatgcacgaatcggcgtcccaaacgacgggaatcgaagctggactacaggaaaatgttggaagttcggggggagaagggtctaggcgcactcaccttcgacggtcatcgccaactcgccttcccgacaggcagcgacaggcaaagggtggccgangcctctggggattgaatgagtatgttcagagatatatgccacgccctgttgatgtctgcgagacctagtgagtccaatgtacgaatatgtcag

SEQ ID NO: 5190 - DNA, 721 bp, Zea mays
tcggtacccgggttatcctgctaataccgacctgcagaagcaaccttcaattcaaaatgcttaagcaattttcagcgatagattcacttgtacttcatgcgcgcaaaatggagagaaaaatagttaaaataattgttcctacagcactaacaggtgaggaagcaacccacaaagcattgcctctgattgcagaacacgtaggctttcgaagcgcttcaaacttcgcgatcggtcttaaacaggacataactaatagacatcatttcggtgccccccgcaataacgtctatccattccaaacaaaacaaaatcacaaagaaaacaatcgctttcaataaaagtaacagccaacagacctgtcgctctccactgtcagcgccactgcgacgcctcttctccacgtgatccaacgaaggcagaacgacctcctgaatccagcgcggagaaggaaaacatgggtgagaaataaaaatagcggaaatcagcgagccgtccccgctcgcacatggtgacgtccaaatcaatcaccatcaaggactgctgcgggcaggagagagggttggaaacagcggggtacctgtcggtgccgctcctccgtcgtcacgtaccctgcatcgcgcgcacaagcacaagcacaagcaccaatcgggaagtaagccaaccgaagccaatcccgaaagtaaccaacacggccgcgcagtagccggacggacgagcaacc

SEQ ID NO: 5191 - DNA, 670 bp, Zea mays
aatgtcaccgaggtaattaaaaaaaccagcgacccggccgcttgcattatattgggtttacccgccgcgcgcacgtgttaccagtgtttaaattttacatgcacggtcggtgtgtcactggaacaatgcaggagttcgtcatcaagaaaagcaacagggtggagctgatggcgatgctggggcttttcggagcgcttatcagcgccatacaaatgtatcctctgaaagtagctctagcccatttttttttgccatatcctacaccctcctcctgtccaagggaaatttttcttcttcttcttctttgctgttgtttccttgacatgatggcaacagtagtgtacttgagcgagaagagcttcactccattacatggactagtggtgctgtaagtacttccccccacccatcccatccttcttgtcttcttgctaatggttctcccttcttgtcatgcatggccttctctctctgctggctggctgctgctgctgctgctgtttcaggtgctcccttttctcgggttcgcggtagcaatgttcctgttctactcggctgtgccagtaatattgaaggtaggtactgtgggactgctgagctagcttcaccgatggccctcctgagtcctgactgccggtttgtatttttttcatgcatggttttttttctg

SEQ ID NO: 5192 - DNA, 788 bp, Zea mays
agtttattttagggtccccttaatcccctctaatacccatggagaatgattgatccaaaagagccattgaagtttttgtcgatgggacaagattcaagatgtgaagaccggttgagatttgtgtttgcagataagcaacagtcttacacttagagcatgtataatatgtttgcagcacaataatatacagttgaaacaacttaaattagttctttttaaacaacttaaactagttctttcgaaacatacccactgattttaatattactaaggcacacttatgatttgcaaaaggtagttgtctccctactagctaataagagaaaacatatcttaagcaaatagaaaatacctgacttcttgttaacccagtttgtctcgataacattagcttttcagagtcttttggatacctaaaagtgtcagtgtgtcatgagaacaaatgaaaaaaggggggtgagcgaacatatctctaagttaaacagaaaaaacttacgggtgaaggaagtgttcaaaaagccaagcccggagaatcgagactgaattttcaggtagccccctctgtggcctccaagcattttgctgtagcataccatactgttggaaagctcgctgttgccttatttgctgatcgatataacgaaggcgaattagtttgccctctttgccagatgcatcgtcatcctctccaagtttcttcctgataacactaatttgatcattgatagcatcctttagacatcggaaatgccgtgagattgtctggagggcaactgcaggcatgcaaa

SEQ ID NO: 5193 - DNA, 793 bp, Zea mays
aactgatcgatggagagactgactaacgcgcagcgcacgcgatgagctgcttcgccgttcgcgatgtgcaatggcgatagatagggccagccatgtgtggctctttacgtactgcttgtgttcttccttcctcctcgaatgtgtggctctcgatcgatatttgccgtggcaggcagtgctcgagatctctctactcgggcatgtgttatgtttgttattcataaatacaatagcacaactgaacgcatgcaaccaagcaggaaaggtcgggaaaacagtgtcgtagtagaagaagaagagtatactcgacaaactgctaacttttgctgacagtttgacacgccatgagatgataaagaaagaaatagtgacacagccatgtagccatgtagtgtaaaggaccggacccccgccccctacctaccacctctcctatgcacctactcaccaagtcaccagcactgtaacttgtttcaccgagagcagagcagagtgaaaacgaaaccactgcatgctggaatgaaacttttcaacaggtagctagcagctctagataaggccaccacactagtaggcacggcacgggctggattagaggcgaggcgtccgtttaaccatttatctacactaacagcagagacggggatgacgatcactcccaagtccaaactctggagcagtttctattcgaattctagaccatggtagtagagcagggacctggacctccgtggtctgtttatatatagcacggcagaatcccaactgaaagttgtgcgtgacctgtggagca

SEQ ID NO: 5194 - DNA, 761 bp, Zea mays
cttgcatgcctgcagagcaacatgggcatatgccaaaagtgcttctttgtactgcacaaaaagcaaatcatttgcctcagacagcaagccgaaaaaacctgaaaatcttcacttcaaaagctcaaaaagcatgctttgcctgctcagtgatgaatataacctgctgttgctcagaagcatcgagaaggaagtaaaccgagccgaacccacttgccaatgtcttctcatagagggttttattcaccagaagctggaattgattgatatacagtcaaccaaaggatctgctgcgttagtaacaataggaaaaacaaatgatttacctggtacctatcccgggtctgtttgtagcccagtgctacacggaaaacaagtatgacgagtgcagtaccagcaactatatcaagaagaaaagctgacctgcattaccatgcaaggaaagagaccactacatatgatttcattaactaaaactgtagctccaccagcttttactgatacaaattacatacttacggagatgaggctaaactctcaaatttgtagttcaccacatatgccaatagacctattacagtagcaatatctagccttacctgcattaaaagcaaactatcaacaagcctatgtgcaggaacagaaaagaatcatatagtaagggtccacacagacaacaggtgactagactgaaaaggataaggttagacagagaattactgtatctaggatgcggaaggacaatttcttgtgggggaaaacta

SEQ ID NO: 5195 - DNA, 762 bp, Zea mays
catagacatgaagctcacgaacaattgaacacctccctacaagttcagggcatgtaacattacagccacatttacgcaagcgcaacaggccgatcaggatatcctgtaaaattcatgaaaagtaaattgtgagtatattgctaagctcaagaagctacgacattatggttagctagacccattcattgagcaaaaggaatatcaagagaacccattggaagacagaataaaaagatctcaaactatggagaacaggtgtatactataatcacatcagaaataccacctatacaggaagacactatattccagaattgtcatccctatgatcaaattggctagtcagcttaagtacctgtcgtgtatcctcataagagaggaacgtctcccagccctcatttgcagcatagtcacgtctaacaagctctacttcatcaggcctgatcttgtgatggatatcctacatacagatgcacagttagaataataaaaggacatccattttaggccgtgaaagtgattttactgtattttttatttacctgaatccctgcttcacgggttctgacatctcggcattttaggcccagatcatccattcgagccaaagctagctcacgaaggttacctttctcaacaccagaagtgacaagaggcataggaatatctctctggacccgatacactcgtgtccatggtggaaccatagacagaattcttgccacgatatccaccaagagctcaggtggataatttctatat

SEQ ID NO: 5196 - DNA, 769 bp, Zea mays
tccttcctcttcaatagaagtaagctgtgctccatcctttcgatgaatatcgtttgcaccattaccacccttcactacccgagagctcatcattttgtcaatgatgctaagcgctgcacgcacccgccactgggactcaacttttatgggcttcagttcatccaacaaccccttatccaagaagagctctaccagcttttccatgttgccattattctcttcttccaattcttctgggattccattcaaatctcttagttcttcaaagtccccgcttgcttccatcaagccctctaaggctttgattgcttctgtatagctgctgctaccagtctcctcttgcactttgtccaacttagttacatctttcagatcttctgatttaccatttgcttctcgtgattcagcacttgcatcggcttcctttgggctttcaaatttgttgttatgttctgcattctcggatccctcctcttcatcatcacaatgtattccgatgccgctattctcttgtgcctgtcctgcacctgacgcaggatccccagtagctgcatatggagaaacactgggtgtggtgggcacattcgctgcatcagccaacctgtccaagaagtccctccatctgtgcgccctctcctcctcctcttcctaacaaacaaccataaaaaggcaaaataaaaattttcccataaacagacaaggaaacataacatttccagcacggcaaagtaaatcactaccttgtaaatcttggcgtactcgcgcaaac

SEQ ID NO: 5197 - DNA, 750 bp, Zea mays
aaagattacatcatttcagcatgtccacaaatcagctgaaatgaaaaataaagtgctgcttcaaataaagatgtgaaatcaggtcaaaagcgtgaatagttacatagcgacatgtgtaaattgtaaataaattagcatgtccgtcatgaccatcaacaaaagcaacaatagtgaaacaagaaccagaccatgaacgatagtagctaacttctttattttgctagatacctcagcaggagtttcaacaacatggcatatgttttccctgaaggttcacaaacattctttgtattttcgaaatttaaaagtacagagaaaactgtaatttaaaaagaaacaagaataagtaacaaattatcataacaaaaaatagtcttacttatgaattgttttcgcaacaagatagcagataatagagttgtcactgccctttgccacgattataaaaagctcctaaatacaaaaggatataaaatacaataaaatgtaattgtaattaaaagtcctcgtaatataacgaaaattgttgtcggctatgaaccatgattaagagaaggcattacaccacattcacaacactatcatatattgacaatttagtttcatcttcgtatttcttgaatcttactcggatacatggagtaattgttgagtgccttgtagatatcggcaatactgctccttagcttgaagtggtggctcattataactggaaaattgtcaagagaagtaagagcattctgcaggcag

SEQ ID NO: 5198 - DNA, 741 bp, Zea mays
tttgcatgcctgcagctttgaaaactgacgcagcgctgttgacccccaaccccaacggttccagggttcagaggagcactgtatctctgtcaggaattggacatgtttggcggcactagagctagagctggagctccgcaaacctcggttcgcagcggacaaaaagttcgtgcagaaacggcaggataactgaaactcatttcacctcgctcgttcgttggctcacaatcatgtgatgcacctgtagactagaatgacttgagtcagagctccacgaacgaacgaacgccaacaccgcaatctcgtgaactcacaaaccaacaggaccagcgtcctctggtatcacagacgctgccgatgccgtgagcgtgtgatggtgcctgcatggcgccctctctgtttcgtgggacgggagctgggagcacgcgcacggacgtcggacaaagggcgccgctgcgcccacttccggcgccccggcggccaggggacagatgggatcgccgtctctttgctactgggcggcagcaggctttcaccgccgaggaacgcagacacgaaccactgccgctgccgagtgcccggccactccgcacttggggcactccgcactccgacagaccacgcaccagcagcagggagggcgggcaagcacgcagtttttttaccaccctgctccgggcgtggtggacggatccgggatggccgaacggccgccagatcctccgcgcggtcgaaacgagg

SEQ ID NO: 5199 - DNA, 777 bp, Zea mays
aggtgtacgtaggttccggccacatcatcacgttcttctcccttatcctgtccgttcgtccacggcgcatcggaccccggccggcgcatcggatctccgccctatagttccctctctctgcaagtctcaacaaagagtgcacatgttgattgatatccactgcgagctagctagatatgcggatatatacccattccatctggctgcgatgcgatgcatgcgtccgtgtgcgttggatggatagatagatagaagatagatacgtagatcatatctctctctctctaagctagatgcttcccggcccaggacagctagcagacgcacgccagtgttggttctcaaactcagagctcggccgggcatcctagatacacatatatctccagcgacacagctactaaacagggttttcagaaaggaccacaccagaaacgcaatcgctgcgagtggtccaactaacgagaacggagctcgatctgaaccacctattggaattggaaccgacagggttggtgtgcgtccaaaagacagcgagggagacgatcccaagtgcgtgtccattacaccgcattcgatacctcttcttcggggatgcctgttgcagatgtccattacacgtacggtgcctgagtgctgtagtaccactcgcccgccggccactcgaaaggatgccttgccttgcctctaaggttcgctgccagctgcgctcaaggcttcagagacgaccatgcatgctgcctcgatctgcgtcagacgattcctccaactgatcaa

SEQ ID NO: 5200 - DNA, 633 bp, Zea mays
gttctctgtattccttcacactctcctccagcaacatagagacaattgtttattacacaagaaccaaaaaagtgacgtttcctcatcatatccggagcccggtgccatttgtttgtacgagcattgtagaatacaacacgcctcatagaacccctcaaaggatctttcccgccaaacaagtacagatagcaaccactcagaacggcacacccaaagcccaatgcttctgaatactcttgtggaactggtgggagtgacttccatagctggtggagtggatcaaaggcataccaggatatcttcccttcacggtcccttttaaagacatacacccattcttctgccactccaattttcttacgcaaggagtaaaagtaattcccagacaaaagacggttccatcttttgcaaaccatcctgagtttgggctgttcaagtcgaggaactcgtataaggcaggcaatagcaagatcatcaggaaggccaggtaaaagtggtgcttgagtcctgcacctttccttttttgagccccttgacttgcgcttgttttgtttgacttcaggttgcatgcacattttcgcgccaggaacaaacttcctggcctcaacaacagttttaaggcctgtatctaat

SEQ ID NO: 5201 - DNA, 730 bp, Zea mays
tttgagacggaagcaaacagctccgcgcaaagggcagagcttatgttgtcgatcgatacgcttctcagctgcatcatcctcgctagcttcatcgccatgtccttgttagcctgcacagtctcgagggtttgcagctctccaaaactcgtcagcgcttttgggggctccaacgcagtgaagcttcgaaattctgactgctggctgccatcgggacaacaagcgtctgccaagatgtggcgtagcttcctggccttgccgacaccctgtggcagcctctgtactctggtttgcctgacgtccagcgtgtcaaggtacgcgagcctttggacggattccgggagggatttgacctgggtgtaccgtaagctgatgtagcgcaggttgaacaagctcccgatagacgcgggcacttcggagatgccggagtcttgcagcaccagaacagtgaggaagctcgatccagagaaaatcgcgggtagcagtttcgtcaggcatgagttcgctccgagtgccactagacgtcgaagacgagggaacttgactggtggtgtgttcgtgtccttccacccatgcaatgccaggtgacgaacgtccttaccggtgtgcgacactgtgctgtaatcggtggcagaagcgaacctctcctctttggcaaccacgaggaccatcttgcgcacgatgtcgtgcatcttgcaggtactcaccctgccaaccacgtcgttgtccacta

SEQ ID NO: 5202 - DNA, 705 bp, Zea mays
tgcaccggcgcggccacaacctgccgtggaagctgaagcagaagaaccccagggaggcccggcgccgggtgtacctgtgcccggagccgacgtgcgtgcaccacgacccgtcccgggcgctgggcgacctcacggggatcaagaagcactactgccgcaagcacggcgagaagaagtggaagtgcgacaagtgcagcaagcgctacgccgtgcagtccgactggaaggcgcactccaagacctgcggcacccgcgagtaccgatgcgactgcggcaccctcttctccaggtccgttaattaattcagttcatagctagctagctagctcgttttcccggccggccgccggtgccgccccgccggcatgcatgagctgctgcttcttggaattcggattctctatagctagcttttcagctgcttgccgtttctttatggattcttttttgaacgcatgattgagtcatgatgagactgagaggcggtcgatgatgtgatgcgttagggtttgggctgtcaagatgctgtggtggtgtgcgtagcttgcataggattccagttcaggagtgctgctggaggaggaggagctgctgctctcccactgcacgtgagcttctcttgtccggacgggactggagatatgcacgcagcaatcttcctgactgacacggtcatttgacggcagttcctcttttcgcctcgta

SEQ ID NO: 5203 - DNA, 737 bp, Zea mays
tgcaggtccagagacggaggaacgtaggtctcctccatcttggcagccagggacaagcacgccacggacagcagctgcgtcgtccaagacttgccttcctgaaacggtgatcgagacaggcgtcattaccggcactgataagtgataacactggaacatacgctctgatttctgaacgccatttttgttccaagcaccaagaagtaaacagtgccactccaccatcacttcgtaggctttgatgattcttaccggaagctggtagagcgagaggaagcggtccaggtagttgacggccaagcaggcggtgagagggccgaaaccgtagtacgcgtgaacctgtcgagaggcgaaactgtcagattcatagcccggaatccggatggacgggcacaaggactcgagagatcagcgaagactgcattgaccgaggagagcagcacctcaccttccaaatccagtcgatggcgtccgtccggacgcggagatccgtgcccccgccgcgcagcctctcggcgtagtcctcccgcggcatgtgcgccgcctccgcctccacgaaaccggcgacgcattcctcggacggcacggggaagaccacgctgggctccccgcgcgtcctgctccgcgccagcagcacctactccttcttcttctgggtccccgcttcgaggtccaggatgctgctgctgtcctcgccgcacagcagggtggaagccgccatctcgtagctgctcggg

SEQ ID NO: 5204 - DNA, 1469 bp, Zea mays
aatgccagattaaactcacaataaatcaaacgctaaaccacaatgctcgacataccatgaaaaatggattgtgccgtagtgaaaagcatattgaaagcagcagccaaggattatgcatgatattccaaatccaacaagataatctaataccttctgtgctgattttgaaccaaaccagtgatatatggaaggtgcttgtgcctgagtggtgcctgaagagcagacatagccatataggtaagtgatatcaaagacgattcaaccacatgggtataactagggttaaacatatgggataccattgtcatctgggtgaactctcttgacaacagccttggatctctggaaagaaacaatccatcattacatcacaacaatccatcatagtatcgtgttgaaaggggtaaatacattctgaatgacacagaatctgaagatttcagacttacagccagtagctaatgaacaccttccatcacaggcggatccaaggtgctcatgtctccacgaaccaccataaacaaaagatttaacatgcacgtccaaatgaactcacaaaaggggaaaaggaaggtcaagttcagatcacagtcgactaccttcacgtttcagactgtcctgtgtgatctcgttccctgcttgagccaaagacacgagctgcagttcatggcctccgtgtgccggcgccgcgacgacgatccactcatctcgagaggtgaggtgcggagaagcatcaacgccatcgtgcgggacgtgatgctgctggagaaccagatcccctggcttgtgctgagctccctcatgcagttgatgccgccgcccgccgggtctgtcgtcaatgacttccttcttctcatggcctccgccttccacatcgtcggcgacatcagcaatgccaacagccagaccggcctgcttgccaccggagaactagaccagtcggcgccgccacatctccttggcctcttccatcgccgtcaaatggatatgggcgcggtgcgcacccagcagcaccagagcggaatcctccgcgtcccggtccagctggcttccctgtccagcactgcggtggagctcgcggagatgggcgtcaaacttgcccccagtaagaccaagacatttggggacatggccatgtccaagcgggggcgccgctggcccctcggcctcttcggcgagctctccctggcgccgctggtcttgaaccgactcaccgagtgctggctcctgaacatggcagcctacgaatcatgccagccgcaacagcaaggcgacgctaccgacagcttccctgtgagctcttacgtcacgctcgtgtcgctccttgtgaaccggccggaggacgtgcaggagatgcgtgccaagggcctcgtcgtcagcgtgttcgacgacgcggaaacgctcgccttcttcaaggcgctagcgccgcacctgagcgtcggttgccgctactacgaggtcttccagtt

SEQ ID NO: 5205 - DNA, 748 bp, Zea mays
catcttgcatgcctgcagcagcctccaagtgctcaccctcagcgacaactacttcagcgggcagctgccgcgggcagtaggcaacctgtcgacgacgcttcagcagctctacctccacaacaacagcatctccgggagcattccggagggcatcggcaacctggtcggcttggacctgctctctctggggataaaccccatatctggcgtgataccggaaagcttgggcaggctgacgaacctggtcacgcttggcctgtacagcactagcttggcaggccacatcccggcttctcttgggaaccttaccgatctggtttacctagatgcacacaactcagatctgggaggcctcatcccagccagccttgggaagctgcacaaactagtcctgctggatctgtcacacaaccgtctcaacggctcggtccccagggaaatcctcgagttgtcctcgctttctttgtcactggacctgtccaacaatttcctctccggacccattccatcagaggtcggcgccctggccaacctcaacaccttgagcctgtcagggaaccagttcaccggcaacatacctgacagcataggaggctgcgaggtgctggagttcctctcgcttgacaggaacacgttagacggaggcctgcctcaatccttgggcaagctgaaagggctcaacgtactcaacctaaccatgaacagcctatccggtaggatccctgacgccctgggcagcatcggcaat

SEQ ID NO: 5206 - DNA, 763 bp, Zea mays
aggaccggcagaggcagatggtctctttcctggccaagctccttcagaacccgagtttcgtgaggaagctgaagctgcacagggagaagaaggagatcgactccaccagggtgaaaagaaagtttctcaaacatgttcctcatggcagcgtagagtcaggtgaatccagctcacagcacgccggagagagtggttcgtatttcgctgtgagttcccccatggctacaactacaagcgtgcatgacgacatcacagaacttcagaacttccttttggaagatgatgacctcaacttcggcatggattcagaaaacaccgggcttgaaggcaccgatgcagcagatgatattggagaactgattcaggggttcgacacacaagaggaacttgacctcggcagtggagctgagctacaggagatgcctccagcttctggccctcttgctcgagatcccacaatcggcagttcaagggaaagaatgtgctgtgtccaggactggacgctacctcctccgaaggcgactgcctcagtccattgcctgacaacatggggctgctttcaggcaccatgctagggacggcaggcagcatgatggccgctgacgatgagcaaatatggggcgttgatgcttcggcagccctgcaaagctcttgcagtggcactagccaacaagctttcggtagccatgctagtgatccctatctgatggacatcgccaacaggcctgagagattctgggagcttgatttccaggcactggat

SEQ ID NO: 5207 - DNA, 738 bp, Zea mays
agataattggtattttccatagcaagtaaaaattggttgcaaacaatgagaaagtggttaaatatcctaagtgaatatggctgcttacttaagcaactcaaggcatgaagaagctctttgttgattcagtggcagagacaagaagcaggaagcctcagcctcattttataatctgaaacaacatcaatcctcccaatacttgtcagcagaaaatagccacaagtatttcactacagtgcccagaaattgaaaacctattgttgaattagggcactcagcatcaccgtaaatccattgtgctacatcattgagcaatgcatacaatgcactcactatgagagaagataattttccatttcaaagatatcattttcaacggcccacattgtcaagaatttctaggttaagataaagtttagataatgcatccatggatccacaagtagcaaagccaaactaaagaggacatacctctctcagaatctctggagggaatccagtggcctcaaatgtcataaacggagcaggaacgttctcaccctgaatattttttaaaaaataaaagtcgaaaaataagtaatcaacagatagcagtacaaaagaataatgaacagatagcagcctaactaaagaagaaaatgagcttgtacacctagagaaatattctaaaataccctgttaccaagctatacacaagggaatagggcatagtaaagtatggccaactgcaggcatgca

SEQ ID NO: 5208 - DNA, 774 bp, Zea mays
ttaattccaactttttagaacagcttcgaaggctagacgacatgtatctcgtcataatgaaagaatgagcggaagtcgcacacaataacaacaagaaaaaggtgatgctgattatcgcaaggggagagaagaagaagaagcatgggcggcggcgggcgtgccttggcctgagaatagttgtcccatggtcgcgtctcactggccggcggcgggagtgcctcaccggctgatcccatggcagaggctggagccggacgcgcgggcggctagcgcagagccttgagcagtaacggattggagaggtcagaggtagcggaggcggaggcagggactagctcgcccgtctcttctttatggagcaccagcagctagtgaaagcgatgattttacgtggttcgtcagtgattcatgttaacgtcagatcgatgtcacgcgttaacatgaatagtcagtcatatatgttgtcttcttcatgaaatacatgcacatattgctcatactagagagagagagagagagagagagagagagagagagagagagagagagagagagagagagagagagagagtccttttcaggcttagctgaacggagttccggtcagaacagtgacagactgacagttgatcgacggccatggcgtccgatttttcccggaggcttccggatcgacgctgacaagtcttgttagctgctagtaccttgttccatggatacatcgtcgacttgactcgctaatgtcctggttgacgatccattaacacggtttaa

SEQ ID NO: 5209 - DNA, 760 bp, Zea mays
ccagggcggacgtcgatgccgccagctgctgccgcctgctcccgccgccgccacccgaggaggaggaggacgtagcggccatccaggtcgtcgtcgtcgtccccggcgcagaggaagacgaccgccaaggcacggtgccacagcggcagcgagaaaccaccgtggctcctgctgctgctgccgaggttgaaggagaagatcctcctcaggtcggtggtgaaaaggagaggaggaaggatggagatgttgcaccgaggacgaggtccttctccacggacggtgacggtggcgaggaggttcagagcatcttgcagaggaacggacagggactcccgtagccgtaggtagagatgatcatgacagcgacagcagtgtacgagtagtaggcaattgaagggagcgtcgatcgtgatttctcaggcagcagtggcgactagacggcgcagctcgacgagcagtaggcggcggtctttccttccgcctgagaagcccgctttggatcttgtcgggcgcgaactgggggtgcagcggagaagaccatgaccggccggtgcgctggaatactagcctgcctatcctgtttaagaatgtatcgctgaaagtctgtaccaaaatttgaaaaaaaaaaatgcttaacactatacctaaatgcctcaccagaccaaatactggttcattaaaacacacacacacacatggcacgcggacatttctgccttgatgaacacatcatatcttgactaatcaggtctttcctttc

SEQ ID NO: 5210 - DNA, 747 bp, Zea mays
gaacccaaaaccatgtccatgaagcaacgggcctcattttatttcctgttcccctctccacttcttgtcgggccctgccgttttttttttcctactccatccgcaatcctccttgccatggcaaatggccaaaggccaaattggcagcacgagccatggcaggcgaatattctctgagaaagatggccagcttcgaattcagacatctaccttaacatcattcttatcctctgctttctatcattattcccccattcagacgtctagacgctgtacaaagagagagagagaggcatcatcaactcacggcacaaaggaaggatcgtcggataataatcgaagataaggttaagaaaaggacccccaccactttgccaactgaattacctttcatctttttttatttacgtctacgcgctttcagccctgaaagaagacgatgctggaagaaattacagcgaaatcctgacgtgacgatagatgccgcgggaccatcgagactctgtaaaaaaaacaacaacagcaaccactccgatggggactgtgcttttcttgaaggaaaattcgcttcttttttcgctgtcgctgttcttcacacaggtcaggttttgcgtttagataaaaaataaaataaaaataatttacacctccacgcgttttcagccggcgacaagagtgttcggcgtcgtcgaggacttccttccgcgtcggcgaaccgaagggctgaggagtagaggccgtgtgggt

SEQ ID NO: 5211 - DNA, 770 bp, Zea mays
agcagcagccgagaacatcgccgctggcctctctgggctgccccaccgcctcctcgcccgcgactgcggcgaggccagcgccgcggtgtcgaacggcagctcagacagggaccggacgtggcgcggcgcatgggcatgggtgtgcgcatgcacgtgaggcagcggcctcggggtgacggccacgtcgatggacggcaggtcgtaaacccgcgtcgtccgcagcctgacgggcgccgcggcgccgcccgtgcccgtgccgcgtttcaggaacggcctcggcgtggcgcactcaccgaactccgcgagcacgccgaggctgctccgcctctggtggtgcgacgaccgcgcggggctcaccgtcgtgccgccgccgccgctcaccgccctgctcctcggcagcacggtgccgtcccttctcggggtgctcgggacggacgcggccggcgtcctcttcgccggggtgacgaccagccgcggcgtggcgcccgcctcttgcgtactccgagccgcgcacctgagcgcacgcgggctcatcggcgtggcgcgcacgccccgaggtcgctgagccttattgttcgccggctgcggctgcggctgctgctgctgcgcgagcgcggccacgcgcctggcgtcgcgctggcgcatgtaggcgtcgtactgcctgccgcggcaggagctgccccccggcgtgtcggccccgtccgcggaagcgaagcccacggcagccgcgtggtcgtccccgcgcgcggcgcgcaggagcttgtacgccg

SEQ ID NO: 5212 - DNA, 751 bp, Zea mays
tgcctgcaggttccataaatactcgttgttaggaacctgaagctagtgaagcacattatgattgaaattgcaatcattctttacatgtaatgagaaaatataagctactcatgacaagtggaaaagaagctattgcagctaaactaagctgtaagctgaggtttataatagtataagtaacaactgggaactaaactgctgtgtaagtgcttatgcaatccttatcacagaggactaaggccctatttgggactgctttagcttcacaaaatttggtaaaattgatgaagcagatcattaggagcttcagaaaattgtgaagctgaagttgcaaacttttagaatacatttagataagtcattttatttcttatttagattaaaaaaaataaaactatttaaatttatattatacactacagcttcacgctgaagctggaacccagagctgtcccaaacaccccctaaagataaaatgtttgattgaatgacgcaactgaaagaggcccatacgataccaataagatgtcaagaaaaccatattacaggcttgcagctaacaacaatctggctcagtagaagacatcaaacgatttctttccactaaagattgagtcacataagctaataatatttaccctgaagtaaaaggtaaagagatggtaaaactgtaataaatggcatgcaacatttctgaaatgtcagccctgaacctaaaagtggtaagaataccataattctcacacacttc

SEQ ID NO: 5213 - DNA, 706 bp, Zea mays
aaggggaggacattttgtcaggttgaaccagcttggccttcttttgctgcctcttgctgctgcttctctgcccagtacttctgaagcggtggcccaaatataacattcccagaaatcactccgatcctgtaacaattgtatatgaaagaataactaacaacatcaacacaagattatgctgccaacataataagtagatatgcaactgcgactgtagccagcgagcacataagaaacaggacttcctttgacaaagacaactcaggaaataaaacagaaatgggcagtgggcacaaaacaataatttccatgtacaatcagcacaaggaaacaccacttgcaagataaattatatatttatgtggatgcaaaagccaaaaaaaaatcttcatgttattgtcgcaggagtacaaatgttactgcaagctgggtgctggacttcatgagttgccaactcccaaatttatatatgatggcgactctgttacccttagtttcagattccaagagaagttttcatcaaatgatctactgaaaaaacccgtgtccacactacacgcttagtctttataatcaataacaactacatgaagtaatcgaaggaccatgcactgttcgatcatgttgcagtccacaaagttctttaatgtcgaaaggctctcaacttttacaatatctagattgaaatcaaatataaatgatgcat

SEQ ID NO: 5214 - DNA, 720 bp, Zea mays
atgcagagcgcgtccgatctcgtaagacagttcggcttcctgttgtaccttgtgttagagttgtgtactctggatgggatgctgattgtgtttttgcaaatgcaggatcttaagtcccagttgcaggaattgattccggaacagcaggtttgctactcgtagaccttctgtgacgaaccttgtaaagtcgagggtatctgatgccttatctgctgttcttttggccaatgctagcaaatagtgtcaatcccttttcttttagctcatgtatttatacattttcatctcaaacatgtggtggaacataaaagcaattgcttgtctgaaagttttcatctcaaacatgtggtggctgaaagtagcagctactgttacatcaattctccctcttatgcgggaggcaattagtttttcacctagatgtagttggcagatttagaatactataagtttattaagagaatctacttagcacatggtttatctaaccacctgtcttcgtggaatatgaatgcctgttcatctggccttgctgttctcagaaattagtatgccttgttacaggatcgcctaaagaagcttaaatcagagcatgggaaggttcagcttggaaacataactgtggatatggtataatatactgcttatcagttgcctatggatagttatgttgcttttctagagcatgtattaactcatcatgtgaaaatccttaatgtt

SEQ ID NO: 5215 - DNA, 698 bp, Zea mays
agccgacaacgcgaatgtcaacgctagccaatatacagtactgtactagtacaaattacaatacacatcagcagcagtaaattaattaataataataatacagatgaagcatcaaccaaacaaggtcaggtgcattgcatatgaatcgccggcaaacccgcggtctcgggacagacagattcgatcccgcgcaccggagttcattctctccgtcgacaccaacattgcacagcacagggggacatgcctcccccccatcccgtggagtgtggttgcggtgaattagtaattaacattctctccgcctccgcctctaaacaaaggacatgggtgggtgacgctatttgcctatcgctaacgaagcttagcgaacatgcagacgcggcagagcaagaaacggagggcagttttggactgaatactcactggtcgaggttgatcaccgagtccggcgtcaccggcggcttgccggtggacggcgccccggcggccttgggcacggacgccgccgacgccgccgcctccacctcctgcctccccctactgctgcggctgacgccgccaccgtctagatgcgtcgggcaggcctggtgctcctgccggtgcccgtggtcgtggtcgtggtgcgacggagctgtgctgttgacgtggtgctggaggaggaggccgacgttgaggacgacagagacgaagacggc

SEQ ID NO: 5216 - DNA, 728 bp, Zea mays
gaccgcccccgtcgcatggcgctctccgtcattggcccccacgtcttcaccgacagctccacagtctcgtgctcctggctccaatctggtgaaagacaaggctgtgaagagagacgtgggtgctgctgcggctgcggctgcgccttccccgaagaaagagttcacctacgacatatggggagaccatttcccaggaaacctgctggtggtcgcaagggaggccgcgccacgcaagatgcctgacgcttctgaaggcgcctcctatagcttgtttgctagagagccccagaccctcatgatgaagccatcatcatctgcaccgccgcccatgtctcgcggccgcggttcgccgccgtctcatgtagcatctggttacggaataaaatgaccctgaaagcttaaaataatttgaccctgcgtcttgcatgcattcatgcgcgctccgtttctactaaccgtgcatcctatcctaacacgaggcaggctgacggcgcacatgtaaaaaaaaaattatataaaagctgaataaagtgaagcacgttaaaactgcactgaattaaacggtgtgaattgagcagtaaagatctgattgcaacgtcgagaaaccaaaggtctgattacattttgcttcaggtgaacgcgattcaaagaacggaaccgaccacacatgattaggcttttcagcctaaaagattctaaagtgtcatcatgtctcatctcgctatcat

SEQ ID NO: 5217 - DNA, 643 bp, Zea mays
aagcaggtttcccgtctcgtcttggacaacgggtatatgaagaatcgactccacagtgtgagctacttttctcttttcaaatatacatgggcttgaactaaaaatgggttggtttcatgatgcatggcttgctgcattttaacaaagtctgttacagtattgtttacatgcctactgtaattttttcccctgcttatgcattatcttattctgcttgctataacatttgcttgtaaatttgcagccttctgtagccaccaccgacacaacctgtgagtccgtggtgacaagtggtcagcacaaccaacaacccagcagttctgcatcctccacaaagggatgcgaacaacccagcagggtaagcctgaaacctggttacatttcaaaccttatccttgctgtaatgctaattttccttttgtccagtctactcgctattgctgaggagacattggcagagttcatgtccaaggcgactggaactgctgtcaactgggtgcaaatggttgggatggaggtaatgtacttgtttttctagatagtgtgctaccctaatatggtgatgcacctgatgttgatatctctgaccgtttcaaacgtgatactgattgcagcgtggtccggattccgcgctgtttcgcgc

SEQ ID NO: 5218 - DNA, 711 bp, Zea mays
cgcaggcgtgggcagtcgccacctccctcctggccaccccagacccgctcccgcccgccgatctcctcttcttcgccgcgcagatgctccgccggaagatccagtctccgggacccgcgctcctcgggctcggcctggcgtcgcagctcctcgatgcgctgctcctggccgcgcggcggttctgcgccgccccggcaccgcgccagctgctcacgcagatctgcctggcgctcgccgcgttggcgctccgcgccgagggcggcgtcgacggcctcttcgcgcgtatgccgcacctgccgccccccgccgtgctggagctgctcaccgtgctccccgaggaggctgcgcaggaccagggcggcgacacgggggttgacgccgccgcgcggtgccggtttacgcgcgagctgctcgcgcacgcgccatcggtgcttgagttcctccaccggcaatccgagaaggcacccaccgatgacgacggggttcccctcgacgagcgcaaccgcagaatcctccggtgcctactgagctgggtacgtaagtacgcgccctgcacttcgcttcgcgctcggctgctttcttctctagcgcgcttgctgacaaaaacgacaatgccgtaggtccgcgtgaggtgcttctcagagacgccggcagcctcgcttgccaggcacccacttctcacttttgcgttcaactcgctgcaggcatgca

SEQ ID NO: 5219 - DNA, 705 bp, Zea mays
aagaggcagcgggcgaaacgcgtcagggcttgtcacttaggaatggcttcaagttcagaacagtttcagtcaaggcatgggcagaagtgcttgccaagctcgcatttatcagggtttatatccacgccgattatcttcgacgccccacaaatcctggctccttcagccacctgcatgtcagaatctcaaatattagtgttcagcatatcgtagtgccctggaatttcagtagagtgttggtgtcactctgaattcctgacaaagtgtggtaatagaatgaagaaaagcgtggtgctctgaatgtgtcacttaaccgccaatcctacagcgccgaggccgaagatagcgaccgaagatccaggctcaactttcgcctgcttccatgcggctccgacccctgcggttttcttgggccagagttaaaaatcatcaccatacgaaaccggagctgaacctgaacagtagcatataaacaaacaaacccgtggaggcgccgcagctgagcaggcaggcgagtgccggcggcacggcggggttgagcttgacgacctggttcacgtccaccacggtgtactcggcgaagctggacacgccgaagaagtggtggactgggcgcccctggccgtcggtgaaccgggtggtgccgtcgcgcggcatccccgggcgcaccgcgaaccggtacttggagcacatgttgcttccccc

SEQ ID NO: 5220 - DNA, 692 bp, Zea mays
agtgctgcttcccaggattctgaccactgccccttgctattggggcttagggataataaatctggaaaaagaagatttcactttgagtccttttggaccaagctggaaggatttcaggatgttgtgcaatctgggtggaatgctgtggagccggtcctttgccccttttaaaactgtagaaaggaagctcaaagagactgccaaaaggttacaagcttggagcgaaaagaaggttggtcatgtgcgatcccagctatctttgaccaaggaagtcctccacaggctagaaatggctcaggatgttagagtgctcaaccaggctgaggtatggctcaaaaaccgacttaaaaagcaagccttactgttatcctctttccagcgcaccatggcaaggctaagatctagaattttctggctaaaggagggagatgctaatacaaaactgtttcaccttcatgctcgacattgcaagaggaagatttttgtgtccaagctggtggatggggatcataccctcaccagccatgatgaaaaggctgcctgtgtggatctcttttcaccaacctcattggaaaatgtgttgctcgagatagggtgattgatctcgaagcccttgggttgcctacttttgagctgtctgagcttgatgcccccttttctgaacaagaagttgaggatatcatcaaaagcct

SEQ ID NO: 5221 - DNA, 796 bp, Zea mays
ctgacttgctgggagtcaaaatgtctgtctggccgggcagggggtggaaacttggaggcgctgtcgtggagccggaggctcaagatcgccacgggcgcggcgcgcggcctcgccttcctgcactcgtcggagaaacaggtcatccacagggacttcaaggcgtccaacatcctcctcgactcggtaatcttcagcaaaagcaagcatgcgatatgaaggtcttctccttagctaccatgtccactaaccaaagacatgccaggatttcaccgcgaagctgtcggacttcgggctcgccaagaacgggccctccgcggggacgtcgcacgtcacgacccgggtcatggtcgcctacggctacgcggcgccggagtacgtcgccaccggtatgtaggttcctgcacccgcacgagcgtgacggcggtgatgatgcacggcgcggccaccaggcgcagccgccccacgtacgtacgttgacgccgtgcatgcagggcaactgtacgtcaagagcgacgtgtacggcttcagcgtggtgctgctggagctgctgacgggactgcgcgcgcacgacctgaaccggccgacccaccagcacagcctggtggagtgggcgcggccttatctctccgccggcgccggcaagctcaagagcctcatggacgagcggatggacggccagtaccacaccaaggccgcgctctcggggtcgccaggctcgccggcaagtgcctcaacagcgaccgcaagagccgcccttccatggacgacgtcgtcgccgcgctcgaggacatcgagg

SEQ ID NO: 5222 - DNA, 765 bp, Zea mays
ggtaccggggcacctctttagtcgacctgcagaaacctcaaatagccggagcactttataacttcacaattgttctttaatcattagcaaagacctggttgttactttggtatttgctataaaaaccttgttgaaagaagatcatacatcgtttcataatgaggttgaaaccccttccatgtttaaacaaatttcggttggaaatttgcattagcaccattaaaaccacttaaaacccataagatgtgtgtcggttctccaaatatacactgtacaataaaaaatgcatgtggattccacaactaaataagaccaacgatccatcactgtgctgagcataaacccatactgatgatgcaggtatgcctacaacattcagtccgggatctgacataataacataataatagcggtaagcagccagaagcacaagagcaagaggccagaggtgagagtcagatatataatatattcatgtatgacgataaattacaaatcaccaggtgagcagagcacaggcgtaccaaaactgaatccatacgtagccatcaacgccttgttgaccatgatgagtccgaccgacgtggtgacattgaagctccatgccgcgaagtcgagggcggctttcttgtcggatttcttcagagcactcatctcccgctctcacggctaaaaccgagcgctcgctcgctggattacacactcgccgagaggccggtggtatcggatccgggaacccagagcttgcactgcaggtcgactcta

SEQ ID NO: 5223 - DNA, 751 bp, Zea mays
acgtcgtcaacttcctcaacgtcgtcgtcgacaacttccgcgcggccatcgtgccgcagatcgtcgccgagttcgagaacgtctacaactcgctcacgggcaccgaggtcgccaccgtcacctccgtcgtgcagctcgagtcgcaggacctggcgcagatcgcgcagcacgtccagaagatgaccggcgcccagaacgtccgcatcaagacgcagctcgacccggagctcatcgccggcttcaccgtgcagtacggccgtgacggctccagcttaatcgacatgagcgtccggaagcagatcgaggagatcgcgtccgagttcgagttgcccgccgtcccgctcgaagtctgaccggcccgaggcgtcctccatcctcgcccatgagatgctttggtgcttcctgctgcctctctctcctgctcttcatgtgtaccattctctgattgaatatttgagtgaatggtgaatactgcatacctggatttcaggattcatatttgaatgaatggtggatacaccgcatacctggattccaggatcgtattgagtggctgtcttggcttattaccattgtgcataatttaaagacaactgcgtagcttagattcacgttattcccacggtttacagagggttttttttttgaagttgaaacttcgctggagcgtcccactgtcccagaaagaaaccatgtaggaatttcaagtagagaaactagtgtccaattctcaaaataaatagtctactat

SEQ ID NO: 5224 - DNA, 787 bp, Zea mays
tggctgaacggcaaaatgctcgggggtaatatacatctggaacgtcctcttcttgacaacctagttattgaatagacacgtagcagcatgtatgtcaaaataattttgatagctagcagttaaccttgcactgcatgttgggacatggcccatgggtattatacttcacatgaatgatgaagcagcagtgagcggataatgcagcatggttttggattctgccgactgttgcgcatggatgttggcgttgcgcatcattttttgctccgtcagcagtggctagggaggcgattccccggtgccgtgtgtttagaactttagattaggtgattgtaacttacaaaggcgtccatacatacacaccatccatgtatcccacggaaaatttcgaagactgtatgtataagtacatatttgttatacgatggtaaagacaatagctatgtaggatttgcgtgctctcatgaaactatgatacgtggctataattacttccggttcccgctgaaatcgctagaattttccattgactacattccatcccggtatctcggtcggatcccatgtctcgatcgtttttacgtgattggaaaactgaagctgaagcggccagccccgatgccaaggctaatatgactttatttttctttaactgactgttacagagatgtataagattctttgacatgataacttttttaagaggagagagaaatgggtcatgataggggtgtttaggattgccctggatttcagctcttggagctgcagaaaaactaaacagggg

SEQ ID NO: 5225 - DNA, 807 bp, Zea mays
aaaccggcggatcagctcgacgcgaactctgtgcgagcgaagctggagctcgcgaagaacgccaagctcgaggcgaccaagaggaagctccaggaagggtaccaagaatccgataacggtatgcgtgctgctgctgctgctgctgctcctatgggtataggatatccatccttcattgtgctggtggtggttcatgcattgtgctgtgctgcttgatggaccgagaatctgatctccatttttttttcggttctctgcttcgcgccaccgcagcgaagaagcagaggaacgtacagatggtgggtccgcagaacctgcccaagcaagggaacacgaacaacaaccgtagtttccagcctagcggtagcggcaggccaaggagtagcggcaacgtcaatagcaacaggaactggtcaagatgagaggcaccgattccaattccgattccaattccttcaagagcggcaggatcccttttctttttctttttctttttacatcggctacaacaatttttagtctaggccagtagtacataaacagcaataaggcttgttttcggaattgcatgtttggcatgtcacaatgctcggctggctggctggtctttgccgatgaaacctgtaaagataacactaccaaattctgatcttgagcttactatccatgctaggagtctaggacgctgcctgtcatcggaatgaggatgttctctgcttgctttgtcgcgctgctgcacccggctttttcaggcgcgggcgccttttgggagtagggccttttcgctgaattcagcgtagcttgtct

SEQ ID NO: 5226 - DNA, 786 bp, Zea mays
  unsure (1)..(786): unsure at all n locations
tggacctccgcgatgtcgatggggtgcacctcggcgccgccgcagctggccttgccctcggccgcctcctccttggactgctccggtagtatcaccagcgccgccgcgggcttcctgttcctgctgtacgccatgtacagcgccatctgtgcgaggccgaagacgaagcccagcacgttggggaacgccacgaacacgtccttcttcagcgcgccgtacgcgaaccagaccaccgcgctgagcaccaggaagaaggagagcgagatgggcatgaactccacgctcttggtccggatcacctgccgctgcaagcaagcaggtagttagtttattgaacgattacaaaccatttaactaataacagacaaaggaaaccaaaaggcaacagaagaatgaaaccattatgctgagcggcgcggcgaagacgctgagcgagacgctgacgcagatccagccgagcacgtgcacgcggaggccggcgtcggagagaagcatggtgacgagcgcgacgaggccgaagacggcgacgttgagccccagcagcatcttggccgccagcacccgggcggccttgggcgcgtacaccaggtacatggccaggtacacggtctcgacgacgcagcccacgccgttgatggtgaccagcagctcggcgccgggcttgagcagggcgtacaagatccacagcatgcagctgaagagcgtcaccacgtacggcgtcgactggaacccctccgtcgacttgttgcggnacacgcggtagaacgtcggcctcaggcatcaagc

SEQ ID NO: 5227 - DNA, 726 bp, Zea mays
tgcatgcctgcagggcgcctgtttgtccccggatcctgtttcgctactgcgtgatacgatctattcgccctagctagagggctgacctctgaacaatctggcgagccactgagcttgccctgtaggagaaggaagaacgtcgtctgctgcgctgagagccacgttcagttcagtggcgtggcccgcagaaaactgcaataatacaagcccaaaagagagaaataatattcctcaagccgatccgattatctcaacacacactagctgctgtttcgctgatgatatgctgctcggcgtatctgaagacccaaaaaccctacactttatacacgtacattttagctgaaattaaacccctatatatcgcacatctctgtctttgctcaaagaatgtttctttggttcctttgttcttgacctgacgttgcatactctcagtctcaagttactacataccgcaacactttgctcattcatccgcatccggggaaggggctatactgtgtcgttttccgagtccaacactttctttgcccgtcttttacccgtctccactatggaaggctcgagtaaagctgatggtttcgctccaaatctgcaaccgcctcaaataaactttgtctcttcagggtcatgcatgcatcgccaaccaacgtagaatctgagcatgtttggtgggtgaagaaggaatgctccatttagctaatcacggctggagcttttcgt

SEQ ID NO: 5228 - DNA, 734 bp, Zea mays
ccagccgggggaagagggacagcagcgcgaaggaggcgtagaagtgcacgtcgtaggtgttgtacatgttgtactccatgccttccaggtacaggaactgccccacgttgtcctcgccgccgcgcagtagcgccgcgccgaacgccgccgcggagtgggaccgctccgtcgccgacgccaccgcgcgcacgacgccgtccaccgcgctgccgcccgctgcgactgggaggagcgtgtcgatggagaacggctcggtggccgtcaacgacgaagcgaagccggccctcttcggagcctgcccgtctgtgagcatctcttctactattagtcatctttccctttcttgagtggctgagcaaatcgtttgtccagcaggatgatttgattacctgtccagatggtgcctccagcgttgaggtagtagagctcgttgaacagagcaactggatacctgagcatgacgaattgacgatgaacgaagatggtagtagagctcgttctgcatggtgtcatgaaatggatctgactcaagttcttcttaccattcaggcagcctttggtcatgcaagattggcttctgccactcctcgatctgggactcccagttcatatgctctaatcatttcatacagtgaatgaattcaatctcttgaagataatcatttcgtccagtgatgagagagaaagagagaggttttagttctaaccaagaagggcatcatgagctaggtgct

SEQ ID NO: 5229 - DNA, 729 bp, Zea mays
gagcattgcattgcagcagaagaagccgagttagagttgtgtttccgtcgcatgctcgataaatttgtgtcgtcgtcagtctgtgtttcttcaggagagaaaaaaaaaacatcggtgtcgtcggtttctctgattaactttgttcccatctccgatgcaggtagatcgtaaaagaggaaacagtaatattagaagccaaaagatctgacaccacagttcacatatacagagtcctgctgggggagggacgtgtcattacctgggtggaggctgcccacggcctgggagatgagcttcttcttgatggtggagttccagaagttcttcacctcgttgtccgttctaccaggcagatgcttggcgatctgggcccacctgtgtgtgcagtggcacgcatttttagctagctgcatttttccattcgcgtctctttcctttgtcccaaactcccaagcaagttattaaggcgacatatgtgggcggcagttgcatgtagagataaaggaacaactgcgtcatgcagagggaaattaagcagcagagtggcatgcatgtatgcatagctgatttgcgtgtagtaggggccggccggcggcggcggcggcgacggacgaccaaggattgattacctgttcccaagcaccctgtggagctcgacgatgagggcctcctcctgctgcgagaagcttcccctcttcaggtccggcctcaggtagttgatccacctca

SEQ ID NO: 5230 - DNA, 771 bp, Zea mays
aaatcataatgatagataattaatctactgaaacatttgtatggagcgtaccgttttttatcactaaccacatgccttttgtttttagtcaggaaatagtttagaacgataggagttgttgtgttccttcccaattcaaaacaccaacacgatctctaatatagaattactttcatgatgacacagatcaaaccagattttctcaagttgttattttgaaatgattaatgagctctatgtatttaccatttgtcttacagagtagccattacaattcttttttgttcacaatataataaaagcatataagaactcttttaacttcaaattttattggctggagaaagttttcacaacaataagcatctcatttgtttttaatattctgatgctacaatattgagacgcttagctctctgctaaatgaaccatttctcttcattctttgttggttcattggatatggtcagttatgatttatgaagtcatattgatactggcgtgcaatctttgtcaaccatggtaccattgtcatagtccacactcctttgtgtccgtacaggtttggttactgatgatgatataaaccagagggagtctaaattgcgcgaatctctccgtaaagataccacatttagagtgaaagatgattcggtggtggaagtcgcacaggtaaagattctgaaatggttaaggtttatgagctgtagttttacctagcttattagaggaatgcttttcagtgcctgattctagattttgtcaatgtgc

SEQ ID NO: 5231 - DNA, 759 bp, Zea mays
tactttgatggttcccttgccgcgcctgaggagaagattcccaacaagtctgatgacaagaccacggaagagatcaatctggaatttatccggtggaccgcgcttgagcagcaggtcctaggcttcctcatgacgaccatgactccagaagtcatgtgtcaggttgcctcctgtaccacacccaaggatgtgtggtctctcctagagcaaacctacgtgtcacagtctcgcgcacgaactgtcaacacgcgaattgctctagctactactcggaaaggtaacatgactgtttctgagtatatcaccaagatgaaatctcttgcagatgagatgagatctgccaagcaggttattgatgatgaagaactagtctcgtatattctagcgggattagattcagaattcaatccagttgtctcagccattgttgctcgtgtggaacctgtctcagtcggggatgtccattctcagcttctcagctttgagaacaggatggaactgcttcacggaggaatacaagcctcagtcaatgctgctcgtcttggccgtggtagatctggacctagatatgaacctcgtggtcgtggtcgtaatggtcctggccgtggcagaggaggtcctggtcgtagtgcccagagaatggtgtcatcagatgccagaaagtctgacatcatatgtcaggtttgtgagaagactggacatactgctcttgattgctggtggagatttgatgagaactactagtccaacagcaagtct

SEQ ID NO: 5232 - DNA, 722 bp, Zea mays
ataccattccagccacaatcagaacacctaaacaagaagtagcactgggattcaccgcaaatactccttgctacaaaagtacctgaacccctcggtaggaaatccttcccaaccacgctctccaacacagatgatttaccagagctctgtcagcaaaattcaaacgtcaaactgcgacattatttgaatgcatgtagaaatcgaaacgagcttatagatgttcacgagagcacgaatccattttgaaaaatagcatcgaactacgattttcatcacgcaaacatccaatgaacatactcgcatccgtacttgatcacactaagtcactagtggactagcttcccaaccagacgggagtgcggaactcagcaattaatcaatcaagcgggtggctgggcctgggcgcatcaaaaccgctccagatgcaaacatgtaagcgacccaaatccaacttcctgcactcctagtccgagtattgcagatccaggcaccgccaagccgcatcaacaactaatcctcgcggttccaccagcaacccgcgagatccacacccacgaagctggggcgacagcaccagatccaatcagaaccaacgcgaaaaaacgtgcccgggaagggaagaagggcacctgtcctccaacgacggcgatagccggcagcgagtcccagagcgtcgggagggcgctctcctctccgtggtctccgagagccgtgcaagccct

SEQ ID NO: 5233 - DNA, 789 bp, Zea mays
ttgcatgcctgcagcgacagattacacggcctcacagacacaggatggttgccttggttcgaacatcaaaacaaacaaacaaacaaatgcagccttcaatcttatattacgcctatttacaaacaccgtgcattaacgaggaatcgtgcacggatccgatccatctctaatatcggaaactggggttcagctcgatggcctcgttgaatatcagctgcttcatctggtcttctgtcagagcctgccgctcgaagtcgaacgagaacggctccgtgcagacgggctcgtcgtcgacgtcgtgtagccgctccagatacgggtgcgccagcgcctccgcaactgcatggcagaacagatcccggtgactgtgagaagtgcgaggacaaaacctgccatggtgccattcgtgaactcttacagtcactgtatatctatacagattacaggcagcccatactacacatcatatatatgctagccttgtaatctagaaccataaaaacccaaaaaaaaaaaataaagtctgctaatctgaaaccaatagggggttgattggttgattctctgaagtaaactccgctggtctggacagctgcctgcctgccagtagaggaatctaatcttcaagattatctatagcctttgctgttttttttccatcttgagacatgtttattttgtacgcacatagccgtcatcgtcacttcggcaaaggcgatgtagaggaggctacgaagccgaggatgggtcaaaacagcagcagcgcttcaaccatcactccatcagtac

SEQ ID NO: 5234 - DNA, 741 bp, Zea mays
attttgcatgcctgcagatgccgaggaagttgttctcctcctccagcgacacgtcgctgacgctgctgccgttgctctccagcttgcgatgctgctgctgctgcttggacgcgccgtgcttctggttgtgccctcctcctccgccgccgccgccgccgccgaccgcgcccttctctaccgggatcacggccgcgatgttccacacctccttcagagccctcgccttcagcgtggccgcgcctctcaacgctaagacaaccaacccagcaagtccgtgttactgaacgcgcaagctcgcgccgggcctgctagagacgaatagtcacaacaaacacgacacacaccggtggccgcagcagcggtgacggtgacgatgtctccgggcgtcctgacgttgacggccgacccgaccacggcctccaggtgctcccgctcggcgccgatggactcggccgcctccacgcactgcgcggccacgagcgtcgccgccgacgccacggccatgtccgtgcgggcggcccgctcgtccttgccggacgccgaggctgcggccgtcgccgccgccacggcggccacggcggccgccactgccgctacggacaccgccgcgtgcacctgcgcgttgtgcgcccgcgtctcctctttcttcttctccttgcggtccttgagccaccgccccaccgtcttgttgcccgcccggtaggcctgcggcttcggcgtgctcaccgctctgcaggcatg

SEQ ID NO: 5235 - DNA, 713 bp, Zea mays
acaagaacaattttcggatggatacctgtcccatagcgccatgatcgtgccttcctgctcctgagggcagtgagtaaaaggccaaacgacaagacaattgcgaacatcccattggcgaaccgccatgatggaacaaactctagtgcctttgtgttttccctctcaggaacgcggaactcgtcgacaagtccctgcgaccatcacacatattggtgagctcgcacatccagatggccacagagaagtcagcttgcaaattacttcagtacacatgaatttatggtagttttttttttaaaaaaatatatattttgacaaacctttttgcaggaaaacaccgtttatttttataaacaagccttcttgattttatctaccttttcttttcttttgttcgaaactgaggacactgaaatatttggttgcactagtgaccaatggcacaaaaaaaaaaacagaagctagagacatctccattggcttccatgtgctttttttttccagcacttgcacatgcctttgagcaacctactagattctccactagttagtagcattcagattgactggagtactacacaatttcgagaggcaaggcaactggagtttggtataaagctctatggtccagcagcagcagcacgccttaaaaaaaggtttctgcatcagcacagggtttcattccaagcctggaaagcagcaacgggttcaaa

SEQ ID NO: 5236 - DNA, 750 bp, Zea mays
agcttgcatgcctgcagtttagaccatcattcaccattggccattgtcaaaaaatgaagaacacaggaagcacaataattgaaccacaaaggccattggccagttcataaaataaaaggctattcaatagcacatattacaaacaacaacagcccccatcagtgagggaatcatccacatgttgaactaaaataaacagcccacaggtctggctgtagatacacgaccctactttgtagctaaacaagagaatcatggccaacataaagaaaaggtaaaaaatcactgcacagcaccatgggaactacgtagcacgaaggtggacgccatggacaggcccctcggcgggatgtcacacacgctggacttcacgttgttggggatccactccacgaagtaggacgagttcttgttctgcacgttgatcatctgctcgtcgacctccttgatgctcatcttcccgcggaacatggccgaggcggtgaggtaacgcccgtggcgagggtcagcggcgcacatcatgttcttggcgtcccacatctgctgtgtgagctcggggactttgagtgctcgatactgctgggagccatgggacatcagcggcgcgaagccaaccatgaagaagtggaggcgggggaaggggattaggttcactgccagcttcctgaggtcggagttcagctgaccagggaaccttaggcagcaggtgactccactcatggttgcagagatcaaatgtttcaaatcacc

SEQ ID NO: 5237 - DNA, 729 bp, Zea mays
gatacatgttgcatatgcatcaacacctcaaattaaatctatacctacaaacttctctagaacgccaataaaaaaagtttcttaagatgaagaagtttcacctgcaaaagccttcttctgcctaaaacatacatcaaaagttttgcctgcttccctctcttccagcagctctcctatgtaggcaataaccttaacattttggctcaatgcatatgcagccttctttccaataaactacatttgaacaacttgttatattgtaatcagaaactgtgtttctccaagtttcaaactagtagcacatgcacataaaataatcacctcatcattttcaccaataatatgtctacgctcagagtgtccaagaataacccattgacagccgatgtccaccagttgttcggcactgtaattttaagggaaagataaaactctattagcaaaaccagaagtgaagaaatagctctcaatacctccttaactattatacaaagtccatccagtaaaaccaacagactggattttataaccgctttacagatagttgcaatctctatgtatatagttagcaaagaaaagggtgctcagtgtccagtgtacccaacctgatctctccagtgtaggctcctccttttccaatccacacattctgagcagaaacctcaatgcgaccagttagtgaattcttaacctgatcaatatagatgaatggaggtgccaccacaacat

SEQ ID NO: 5238 - DNA, 671 bp, Zea mays
agtacaccacgagctcctcatccgttgggtggaaccggaaccctggcggcaggttgagctccgcctcggcgtccctgcgcccgctcccctccgccgccgccaccattgccatccgcctcctccgcacagaattctcagcgcctggctagaggggttgctcgctggaacctgggttccagagaccgcgtctgctccctggtgctcggtttcgaaaggcggctggctggctggcaggcctgtttccttggccatcaaggcagttgggacttgggggtctcgtttatacgggctgtgcgcagccgcagcccagcttcgtgggcccagcgtgtccctgccccacctcgtgccttcgtgggctgcggatgaggatgggcgacgctgccgcgaaggttcccgcgtggaaaaggctctgaccctgttcaccgttggtggcccaactccaaaccccgcgcccgcaagggtcaaaaagagtagcgactagcgagggatctccgccagtttcgacccggaaaaatatatatacaaaaatccgagcgatctcaacgaatgggacgccccggtcgacgtgaagaacgaaagctccgtggttcaggttcagggcaggcgttcacgaaggccatgcgacgacctgttttctttttccaaggattgttttcgatccctatcggagg

SEQ ID NO: 5239 - DNA, 786 bp, Zea mays
  unsure (1)..(786): unsure at all n locations
gcttgcatgcctgcagcacgaacctacccagcctagcctcgtccgtccgcctctcctttccatgtggtgacgacgacgacggcgacagcgacagagagagaggtgaaagcaacgctcctactcgcgggacatgcctgcctgcccccatttccaacaaccaatgagctagattaattggcagccatggatcgcgacctcagctattgcagcacactagagtcgtcgtcgtccgccgtctctcaatcaactagctagctagctactagctactacgacgcgtacgatcgagaagaagcccgcttcttttcgtcggatcctcgtcgcggcgcgncgccgtcgtccaatataatattggacacagtcgcgcgcatgcaagtaggtacgtacctacgtatacgtatatgtacagtagatacatcatacaaacaatatatagcatgtttgcatgtatgtacgctaccgcagtaggaagaggaggcggcgaggggtagcagcatggatggtgatggtcggcgtcggcggcgtcgaggcggtactcgtgcatgatccagtcggacttgtgcccgtgcggcgcgcggccctggtagaagacgagcgtcttgcgcatgccgatgcggcgggcggcgccgccggccgcgtagatggccttgtcgcggccggtggccttccagaacccggccgccgtggcgcggttggtgcgcgtccccgtcgggtacttcctgtccttgtggctgaagaagtaccagtcgttctgagggcctgacgacgacccgacgcggcacttgt

SEQ ID NO: 5240 - DNA, 734 bp, Zea mays
tgtcaaaaggcggcccacaggccagagatatatgtggtggatctgtccgtgttgcgcgtcggcgtccgagacgggccgctgcaaaacgatccaaaacgaaacaccctcgctcgtacgcacgcacgtgactacaacgtgagagagacataagaaacagggacgagagaggcacagccgcacaggaagccgaccagtccgccggcgatggaccagctgccttcctcgagttatccccaaatcaaaggaaaattatctcctcttttggagacgactctatcccgttgtcattatcacgttttagttcaacaataaaatagccgacaacaaatacattttataaaataaaacaaagagaagatgaaaataatcatatactatattttcatattaaacctgtttggagacataaatgttgcctgttatttttctgtgaacttagttaaactcaagcatttctctgtgaactcaattctttttggatggatatgcagacggtgagacgcaagaagcaagaattgggtttgccggacaaggggaaacaatccccaaggcatcatcatgaattaacacccaatgatcaacaaatattccggagatcacagaataggagggacatcaacaatcagttggttgccttcaactaccaacatcacggagttctctacttatacaccgcatcagccttgatggataggaatcttgctcgtcagtggagttaactctgcaggcatgca

SEQ ID NO: 5241 - DNA, 757 bp, Zea mays
atcatggcgaccacggcctttgcctcgatcatggcgaagttctggccgatgcacgaccttggcccgctggagaaggacagcagcgcgttggggtgcttggccgccctcgtcaccccgttctcgaacctctccggcctgaactcgccggcgtcctcgccccagacctccttgtcgcggtggatcgtggcgatcggaatggtcaggatcgcgccctcgggtacccggatgcccccgaggtcgagatctgagcccgccttcctctggatcagggacaccgggccgtacagccgcagggtctccaggaggaacatgttgacaagcttcagcctgttgagcgcgtcgccggtggggacctcgtcgtcgtcgccgcactcccgcctgacctcgtcccggagcctgtgctgccactccgggtgcgtgctcagcaggaaggtggcccaggtgagcaggtgcgacgtggtgtcgtggccggcgaagaagaaggttttgcactcgtcgatgatctcgtccatgctcagcgtggtcagcgccatctcgccatggtgctccggtggcggcgcgcacgcctccagcatgagcccgagcaggtcgttcccgtaaccgccggcggtgtccttgctggcgaggcgagcctcgatgatgcccatgagcatggccctcacctgcctgtccagcttccgtgtcctgacattcttcttggtcgggaggtacttgagagctgggatctggacgttgaaaatggtcgagaacgcgattt

SEQ ID NO: 5242 - DNA, 772 bp, Zea mays
gacccagtccatgagcgcgtccacgtccttggcgaagtccagcaggtaccagtgcaggagcttcgggaccgccagcctccccgccgcccacacgcccgcggccgcctgtaggtactcccgcttcgccgcctccagctcctcctccacgcgcgccgccgtgtacaccctcacctgcatgcattgttccgttaatataaataattgcagcctagaccatatatatatgcaaataataaaagaaccctagtgtacggtgtaccgcgggggacgaccagctgccgcaggagagcgcgaaggtgacgaggggctcgggccactccagcccgaacgcgccgcgcgccgccgtcacgtcgccgtcgtcgcacttggccccttcccggctcaccttcacctgtgctcgatcgaccatatgcacacgagtaagtaagtagtacaacccccgcaagtcatgcatcactgccgtgcccatggcatggcccatgcatgcatgatgcatatggctgtatcgatcgcgacagacgacagggcagccggcctcacctgcttggcgctgtagggcagcctcaggatgaaatgctcgatggacatggcgctgtgcgtgcgcccaccaacgctcacggtggcctgaaacacgcataccggcccgtccgtcagtcaatgatcgagtcccctgcgcctgcgcgcgtatctgggagagctcgacctaaaagctcaccttgggcatcatcgccacgagcatttgcggggtggtaggtatcccatgctccaggaa

SEQ ID NO: 5243 - DNA, 787 bp, Zea mays
agcaaaaaaattaaaactaacgttctcatcttatttggcacatggcacttgttatggtggtggctagggttgagggagcacaggtgggccggtcgggggtcttgctcacgccgagcaaaacggaagggttttctttcttaattcttgcttgattaaattgatatatcttctcttcttatatggagaggcttatatgatccataagcaaatgatgcttatgtcttatttgacccctgaacaagcgaatcttttcttatctcttacttgacctctaagcaagtggtccttatctctaaccaaccctaacactaatgggatatattgtcaacctaggcctatgacatacgcctctaacactatacccctctagacaatcaagtcgtccttgagctacaaccacacaaatttaacatgtaaaaataagcctcttacatcttggtttattttattattcttaactcaaaatatatttagactattacttttttggcctcttcggttgaagatgggcaccatctgagctacgtagttgcatatgtacaaccacctagattccatggtgtagtccacatccaacagagaaaagaggaggcttcgatggagaacgacaaggaggggtgtgcctccccaaccgtagtcgttgtagactttgagttcaccatagcatgcccaccacccactgggggggtagcatgcccaagattcccgacaatgcgaatgagattgagatccctcgtgtagcaaagcgcaacttggaggtgttgcaaatgggtacgaggctgaatca

SEQ ID NO: 5244 - DNA, 803 bp, Zea mays
ccggttcagcttactgcacattagcatatcacgactgttaagactaattgctatcccaatgggctatattcatgatatgacttagtgagctgcactttgtgcccattctattgatcatatgatttgttgttggcatctttcatgaagcaatacattggttcatatgactgagcaaaatggcaagatgttacattgtatattaggatggactataaaatatatgtcactcctgctgctcttttggttcagctgcctgcacatgtgcacattacgttgaaaccacatttttggtaaagcaatacatcataccaactgtatgaccgagcaacatgcctgaatgttacataccatgcataatggccgtcttttgggatatgtccttcagtcattgcattttggaacctctagtagttacttcaattgtgaccttgatccttggtttgcttaacaactaactgtcctagccatatatcttgtcacaagcactgtgtgccattcaatttttttatttgccattcaatttttttgatttgccaaataattcttacgtacctaaatgctctattggtattaggtgtcaactcaccacatggacattgatagagctgttatgcagacaacagcttaccatattgggaaacaaatagagagcctaagcctataccctgcaagatgatcatattaatagcagataaccatgtgtcatgtgtgcttgtattagcatctttgccatcgtgttatatcagtttgggtgtccgtggcctaggtcatattaatctgtgaaaataattacaatctgttaa

SEQ ID NO: 5245 - DNA, 704 bp, Zea mays
agccatcaacacctgtttgcgatccaagggtatcatggcttcaagagtcatcaccctggtaactggggaaaaaccatacccctcgtaagcatggtggtgggtttttggatggggccttcgctttgatagaacatagcaactgtagtgtcaaaaataaacaagagaatacaacttgggtaggtatcgtgtcttcggtcattaaagtgaagtattctgtatcgccgccagtaatttttgtggcttttgatgttggaacgccgattttcaaatcaaagctgacgaccacttcttgatcatgaggcaatatagatagcgtcatgcccatatcaaatgacagatttctctgctctactggacatgcttttttggtggcatccgcggacacgatacgtgaaatttagttttatgttattgtacacctacccgaaattcatgattggtttaggaatcccataaagtcgacctttcccagaggacatctgggatataagggcactgacgcatgttgcgttttgcagcaatctcgtcactgcgttcgcaaaagggaatcgcgtcacatgcccctccttgcgacctgagacttggctgattgcatctgatcggccttcctaaaatgttaccatctcatgataggcaccaccgttactgttactaagtcctcgtttaataattgtttcgtccagcaaagagacgggaatttctga

SEQ ID NO: 5246 - DNA, 809 bp, Zea mays
ctggtctcgttccacctggaggcccctcctcggatcagagtggaccgtcctggtagggtggagaggagcatatctgctgaagggctcaatagcctcaggatactcctgggaaggcagtagctgcgttcttgtcgcgattttaggtgctgtgccgcattgccgagttgtaattgtatgtagtcatctcggctcctcattgtcgttagttgttacccgttgctgcgactgcgacacgtgttacgattcttgttggtgattgaaccaacaaacctgatactattcttgttggtgattgaaccaacaaacctgatactattcttgttggtgactgaaccaacagatttgagctccgtcctgtgagagattttaagcagacgaaagtatatctggcaaagaagctgtgagttcccagctcactgtgtaatgtttgccttccgttatgtaacaaaacaaaacaattcattgactgaaatgtgtcaggactgggtcaaatttcctgttctcgcacgactgttcactcgggtggtctttctcccatgatacaaaaactatgaagctggacacggttgagaacaatgtaagcaacagaatggttcggttgcggaaacaccggccgttgtcgcctgaccggtgtcgtcggtttgcaacgaggtcaaaacaatgccttttccacatgccagtgaaacaaccgaactgacaagttcgcctgtacagctgtactttactcgaggaatgcactggggggaaaaaatatgcgcgctcgtgtacattcctctgcaggtcggttctacaggatacccgggtaccga

SEQ ID NO: 5247 - DNA, 770 bp, Zea mays
tgcatgcctgcagacatacatgtctgtttttttgctagatccatgatattttggagaacattttggaaaaaaacataatgttccaaccaaaatgcatagcacactcgtcaaagcagttatgttttatgttattttctctatcattaacaatgatctgaaaggaaagatgacagcaataaaaactggaaccaaattgtgttgcaaaagataataagatcagagcaaaaacagcactaacagaaaagcattacttacacatcagcaaatttggtacccccttcacctcttatcctaatctgcctttcccatccatgagggggttgtgcaatattgggtttgtcaatagcccaaagcctgctaccgtcctgagatatatcttctgggtcattgcatgttatatcaggtctccattcacgagctcttttgcatacaaaaggttcctgtataatacgttcacgaatttcttcgtatttctcttttgttggaataagcctccatttaaaacatttagcacattggacagtgaatgctccaatagatggtgatatcccctttgttatcactgacttctgcaaacggttttctcccagttcatctgctgcttcagagttgaacacaaccatttgatttgatgcagtttctgaagaaaaaccgtcattgtcaaatcgggagcgattgctatcagaaggcaccacaatccgactgttttttgatgactgaggagatttagaactttccatcgattttgtaaaaatattagagcctgagta

SEQ ID NO: 5248 - DNA, 745 bp, Zea mays
acttctcatttctttcaagagggcaactggacagaagccccagaggatcatattctacaggttattatccttgaccggccgacttccctgatctgttgctcaatatactaaaacagtttttgagtttcagggatggtgtcagtgagggacagttctatcaagtattgctgtacgaacttgatgccattagaaaggtacatgtaatgtaatcacatagcgttcatttgatgttgttctcgttttttttctctctctgaccatcctcactaaaccatgggaatacaggcctgtgcgtccctggagcccaactaccagcctccagttacttttgtcgtggtacagaagcgccatcacactaggctgtttgcgaacaaccacagtgatcagcgcacagtcgatagaagcggaaacatactgcctggttagttcttggcgcgctctccttttgtgcttggtggcttagcatgcctaatctggatggatctgaccagaaacttccttttttcatctgaaatgtaggcaccgtggtcgattcgaagatttgccatcctactgagtttgacttctacctgtgtagccatgctggcattcaggttgatttcctttttttccattctccttttccattcacccctcgatggaacgggcagggctggttgctgacttgaagtatatgcatccattagggaacgagccgccctgctcactaccatgtcctgtgggacgagaacaagttcacagctga

SEQ ID NO: 5249 - DNA, 724 bp, Zea mays
acggatggaacactacgcatgcatggtggacttgctgggtagattcggaggcgtgcggcaggcctatgatttcgtccgaggtatgccggtgaggccaaactctgatgtgtgggctgcgctgctcggggcggctacactgcacggggatatggacatctgcaaagttgcatcgagggaggtcttcgagctgagccgcaaggggagaccgggcgcctacatggcattctccaacacacttgcggcagctggggagtgggacggcgtgcacgacgttagggagatgatgaaacagcgaggcgtgctgaaagacactgcttgcagttgggtcggttctgagaacccgccactcgtcgactgatgtacaggtagagtttttacctacccataccatgtaaagtttctcctgtaacagcttcattctagaacatgtctctgaattaaccaatagagttagcttattacagcttcattcttcacaacgctaataatgtgttcaatgcaatacaaatatcgaggacatcagtaactcttgttgcttttgtactagaatacacacatgtctctgagttaatcaatagagttagcttaagcatggcttctgtaggttttattgcccggaatactttagaggatcaaatttgcaagaaaccaggctcaaaatctccatgccacttatcagccatcatttgaattcctgaagtaatagtttttaggtgtaaaatca

SEQ ID NO: 5250 - DNA, 772 bp, Zea mays
cttgcatgcctgcaggagttcttctatgaccaggtgcccgacaggctgcgcagcgtcgggctggcgctgtacatcagcgtcttcggcgtcgggagcttcgtcagcagcgcgctcgtgtcgggcatccaccgggcgacggcggccaggggccagagctggttctcggataacatgaacggcggccacctcgactacttctactggctgctcgccgcgctcagcgccctccagttcttcgcctatgtcttcgttgcgtggaggtacaaatataaggacgctggagccgagcacacgtgacgtgacatcgtagtaggatctatcagatgtatgccgttgcacagcgacatcaaacagagggatagctaggagaggtatatataggctacacgcacattaattctgtgtacagtcctgtatctataaattagccacagtctcacgtgtgtctgcccagaccagcaaagctgcggaaaccaccacgagcagcagaccagtgcctacggcagccgtgtgacgagcaccagcagcaggagttccggcggcgtccgctggtcctgagaggccaccaccgggcggcacggttcttggcgcggcaggaggaagaggcggctcctccacgctcgacgcattcagcgccggcatcggcgccacgtacggcggctgggcttggaaggaccggagcagcttcatgattgcgccaggctccacaggccgcatgtagccgggcatgccattccccagaaccgtgcaggtgtctctgcaggcatgcaag

SEQ ID NO: 5251 - DNA, 717 bp, Zea mays
cggtacccggttgacctgtagagccgacctgcagcctatctacgcctcatcagctcgcttccgtccgctccctttccggccttctcctcgttcgtgtgtatatgctgtgtatacatcagcagtgcacagatggcaaggttagggtttttgtttggtcttgcggcgacatggcgtctctaggtatatagttttggtggtcactgctcagctcagctggcctgcctgatgatgagctagaaaggcgaacgaagacagattcgccgtggggtgtgtgtgtgttggggggcgggggaggtgacggccggagagacaggaatggctagccagaccggtcgtgctgggaggactgcttgcacgtgaaatgcagaaatggcttcttttgagccttttggccttggactggtgatgtttccctttcctgactttccgcttcccttccttagggaagccggaaatgcagaaatggcttcgtgtagatgcatctgatgcatgacagttcttgctgccttttctcgtctcaagcttcctgccagtgggaacctgcccaagccccaagctatcccctcacatcctacctttttttcccattgttgattgacatgggtttctgggatcttgggcttgctttgtatggtgaggctactaccctgcttctttgacgacatctgcatgcgtccatgcatggttaccaaacgcctttggccaccattagggaag

SEQ ID NO: 5252 - DNA, 797 bp, Zea mays
atggaatgcctattgaagagatgaatgaagactatctctgtgccaaactacacttagtagatcttgctggatcagaacgggctaagagaactggttcagatggcctgcgcttcaaggaaggtatgcttgcttcttgtctgtccaaacccttagtctatgtatttatttctatgccaaattaaaggctattttatacttcgtgacattaggtgttcacatcaaccgaggacttctcgctctcggcaatgtcataagtgctcttggagatgagaaaaaaagaaaagaaggtgctcacgttccttatcgggacagcaagctcactcgtcttttgcaggtattatttttggtcacctataaatgcaaaaagaaaattgattttatggagcactttatagtagtgttcagaaatatagttatgctcaactcgtctttcaacagttaatattttccaatctaatagaaacctattgacatttctgtgtgaagcttgctcatgaaattcatattactaactagttgttactgatatttcatccgtagtatgttcaaggaattcatattactgactcttcctatatcatctgcttcatctattacaggactccctaggtggaaatagtaagactgtcatgataggtaatttatcttgtcggtgattgctccatgtttcttacattttacttggactatatttgctgatctaagtgatatagaaaattaagtccagtaatatttgtttaactacaaaaaagtgttgcttgagcttacactcacctgagttaaacatatctttttct

SEQ ID NO: 5253 - DNA, 724 bp, Zea mays
gccccactttcatcccctcaacaagccagttagccaccaggaaatcgaaaacccctgccgcattctcctccaacggctatatttgtcatgagcaccactgacacgctggcccaactcgctttctgatctccaaaataaagggtaatccccgaggaaccgattcgaaacaatcaaatagctccaggactctaacccaaagaactgagcgagccaaatcgtcgaacagatggaatagctcatggacacggaaccgtcctcccctgcgccggcagcagccgtcaatctgcctcctccgccgtaccatcactgcccagctccagctgatgaggttgcagcgacgccgcagccgaagccgaagcaatcaaccgcggggccggggctgaggacaccctcgccgccgccgtcggttcaggtgtccgggtactctctacacgacctgctgctgctgtccccgccacccccgagctcacgccgccaccggtcgagtacgcgtggggcagctgggacgagcgtggacgagagcctggagattgttgcggtggcggggacgcccacgcctccaaggcgcaggcggcgcgggggcgcggagcagtgtgtgacgcccgttctggcgtccccgaggaatgcacgacgggcgagacggaggctggagaaggacgtcgaggcggttgaggacgccggcaggagggcccgcaggaggaagtccacaagggctgcgccgaaa

SEQ ID NO: 5254 - DNA, 713 bp, Zea mays
cactggatcagttttactcaccatttccatgtctgataaaagctccccagccatggttccaggcatgtacctagtcaccgacaccgcccttgatagggttccagcttgtgctgtccgaatctctgactgttgggtttctgcaacgctcaccggagaattggcgcgcctagtgttaaactcagttcagattcggccgttactaatggaggatccgggtgacgcgttaaagatttccgagtacgacaaactgcggtgctattagtggcatgccgaggctggagtgtgtacacttgttgtaccatagatttgtgtggtgatttggattattgtcgtaggttacctttctgttctccgtggactgcgtttcaagtttgcgataactgaaggaagtttgtgttcatgtgccgatataatcgtcctcgaggattctagagggaaagaacagaaatttccataacagaacatctagttgtttgattcgatttgttttcagttggcgcttatttagcccgtttttccgttacatgtcggtatggtctgggaagtgcttttcagttacgtgggcttcaccttccaaaatttccttttaagcgtcggtacgttataagctagtaaccattgaggaacctagattttatgatctgagctgggtaggatacttttgatatggttatggcttgtccactttttgggtcatgacttgccgtctatgt

SEQ ID NO: 5255 - DNA, 808 bp, Zea mays
acggccatcgccgtcacgctcgcgaccacgctgctgggtatcccctacccgcggagcttcgcggtgagcctggtccggtccgccagcctcgtgttccagggcgtctggttcgtcgtcatgggcgtcatgctgtggacgccggcgctcatacccaagggctgcttcctcaacttcgaggaagggcacgacgtcgtccggtgccgcactgacgacgcgctcgaccgcgccaagtcgctcgtcaacctccagttcagctggtacctcaccggcacggtggtgttcgtcgtcctgttctacctccagatggcgaagctctaccccgaggagccgcagtacctgccgctggtgaagggaggcggcagcggcagcgatggccggttcagcatcggagatgatgatcacgacgatgaggacgacgtcgaggccgcaaaacgtggcggtttcggacacgtggttagcggcacgaggcctgtcgaaatcgagaggtgagggtcgtgcgtagcaccgtacaaaaggttagcatgttgttgcgtggttatagtgtaatttgacttgaacgttttttgtttattggtgaaattaaaacatgcaaatattctctagggaggttgtaatgtttatagtttgtgacacagtgacacttgtggattaaaagaatcctatatttatcctacctgaagccatcttatcctacttgtcagttgtcaccacgctaattcaatagtgtcaggcgttgaccattgactgctgcgatcgctaggctgtatgcctgcatggactggctttatgcctgcaggcatgcaaactg

SEQ ID NO: 5256 - DNA, 726 bp, Zea mays
tgcatgcctgcagcccctccctgtcccagctggcgtatggagtgatattttgatggacttcctagaaggctttccaaaggtagggggtaaatctctcattctaacggtggtcgatcggttctccaaatatgggcattttattccactcagccacccctactcagcagcctcagtcgcacgggcattctttgataaatatagttaggctccatgggcttccttgttccattgttagtgacagtgatccagtttttacaagtcacttttggtctgaactattccggttgtcaggggtgcagttgcacatgagctccgcttttcacccccaatcaaatgggcaatctgaggtcaccaatagaatcatcttgacgtacttacggtgtctagctggagattgaccatgtacttggctcacatggttgccatgggcagagtattattataacacgtcatttcagacggcgttgaagtgctcccctttccgggtagtatatggccgggatccacctaccatgatatcatatcagccaggtctctcttcggttcttgccgctgatacacagttacaagagcgagaagtacagtttgaggttggtgattaggtctggcttcgtttgcaccagagaacggcattgggtatcacaccgacagccaattattctaagcttgggccacggttctttgggccataccaggtgatacaacatattggagacgtttcttata

SEQ ID NO: 5257 - DNA, 750 bp, Zea mays
aaaaacatgccttcttcacacattttgtgttctgaagatagactgtctgaatggagacaccgtttgcaaaggcaagagaatgggagacaaaccagggaaataattccagaaaatctgggccaagaaggcgaatcgttcctctcaagcatgctgctcagcttctcactgttatcagcagtaccaaaagtctcacttaatggccttcctccatgattaatcccctgatccgaattcacataggagtgcttttcattcttatctaatttcaaattcttcgttgaatcgaaaatgcctgggtctccaggatttgttgccgcacaccatatgtataacacaacaacacatgtaatctgcaaaagaagacattaatcattctcgaggtaaaattgtccagtcgctcaagtgagcaatgatgctatatagtctaacggatgtcatatcatcattcctttacgacagatatgtgcagcacatgcaaagcagatgacgttctctaccagcgtttgaacttgcaatgcctgacgtagtaagtaccaagaactgtaaagcacgggatggctggcagcgaatcaaataccgaactccagatctatgcatactagcgaaataaacccctgaaaaaagggcaggaacctcaccaatggagtgtagatagccatggccacaatctggaacggcttcgtccccacgaacggcacgaagaagacgtagaaggcgaaccccagtgccgagaacacggctatggggacc

SEQ ID NO: 5258 - DNA, 750 bp, Zea mays
gcctcggaaggtttggcggaggaagacttcggtggctgcaatttcaggcagccagtatttgtttcaaggaatggcttctgaccttgctgggggcgctgatgccgtcactatcaggggccgttctcgccggcgtcactctcgcaaaagacggaaaccccccacccctcccagagatgatgggagcaggatttatatgcagccccatctgccttcttcaggacttgtacccccatgcttgctgggttggaaccacgccatgactgttgccgaggaagatcttcgtttggcagtggttgtctcggtgatcagcaaccgtgactcagtttctgaattcgaagtggcatccctgctctcaccaagattggaaatcactgaagactccattgttctccgtcgcttatcaccaaatagttttctgctggttctcccgtctgaagatatggctcaaaggctcgactcgaggtggtccattcagcgggctgcgactttcacagtggtctgcaagcgatggtctagatttttcaactcttctggcagaactcttcctcagctggttaacctggaattagatggcatcccagtgcacgtgtgggagacggctacggtggaacatttaataaatccttttgcttggctatttaaggtgcactcggatacctctggcctgagtgacctggtttccttcagatgttctgcctggtgcattgatacatccatgattccggagtcacgggagctctggattactga

SEQ ID NO: 5259 - DNA, 816 bp, Zea mays
gggtttgaagtcattgaacctgctcatacccggggacctctatgtcgacctgcagacccccgaataacgacaagaaaactaaatttcatgaaagaaaaggagagagagagtagcaacgacagcgcataccatccttggaattgaagatccaagccttgccaatagttgggattttaacaaattcttgcagcaactttgactgggaggcatactcatcaatcatggtagcgtccactgccagaggcaatcctttgtcagcagctgcttctgaggcttgtgtggtagacatagcaattgagcgcaatgaaaccttgctagtcctgtgcagtcaaagggattagatcagcatcacccacatgacaaaactgaacctagtaatccagataagacaagcagaccttcaaatgcaagattcttccatgactactcaaatattgtatgtatacatgacaaggcagacgagcatcgtaaactaacccaactctgagatgtcatcggagagacgagaaaacaagaggaagaacaagaagaagtggaacttttttttcaagagctgacctttgtcgcagcagtggcccgccgggttgagctcgaacccgagaagtagaggctgagaggagtaaattcgccgccgggcagcggaatttggcacaggcgaccaacactctgaccaaaaccaccattaccactggttagatggagggttggatatcggctccgtctggctcggctccgtctggctcgttgttcggctatttcggcttaacactcggctcggctactgtttcgagctaggtaccccttatctctcaacgt

SEQ ID NO: 5260 - DNA, 770 bp, Zea mays
accagagaaagagggtgaggcacagtgtgaacccaagccgatgcatacagaggtgggatatggggagagcaatgccacttcccagttcgattccagagctactgctgagggatacggggatcggagcgctgatgcgcaggtggagtacactgatcccagatatctagagagcctctaccctggctggaagtacgacgaggccacacatcagtggtatcaggtagataccctcaacacacagacttatgctgctcgtgatactggtggtgctgtggcagaccttgcgagtggcggtagtgttcagcagcaccaacagtttagtggttcgtacatacaaaacacttcacatccagagcctgctcttgagcttacagagccgacttctgagtcaaagcctcagcttgagcctgcggcggcccctcttcagaccgatgcttatcctgcggtggcatcacataaagaggagcagaaagagcatggatctgtaccggtgcatactaagcctgaagctcaggagattcctgccaatgctggtgatactgccacagtgacagagggtgggtccccagggtcagagaaaggcatccataccgccgtcaagcaagtgcagtggaacgactttggtgccagcactggtggggcggatctatttggtgacctcctgcccgatggagctgaagatgacttctttgagggcaccgtccctgtcagccaagacgtctcatccttggtaggtgctacaaatgttagcgcaccagatcacagcttct

SEQ ID NO: 5261 - DNA, 716 bp, Zea mays
gggcggtcactcggtatttccggtaacatatgcccggttgaagcaactgtttgcttggcaaggtctgaaaactgaagtgcacacatatgtcactcactgtttgatatgttagcaagccaaagctgatcgtgctaggctacctggtctactacaaccccttccggttccttcttctttatggcagatcatttctatggatttcattgaagctttgcctagttcacatttgtatacatgcatcctggtggttgtcgatctgttttcaaaatatgccaattttttaccactgaaacacccatttacagctctaacggttgctcgccttttccacgatcaagtgtataaacatcatggattgcctcattctatagtttctgatcgtgacaaggtgtttctcagtaacctgtggaaggaattatttcggcttgctgatgtccagctacgtatgagctcagcttatcatccgcaatccgatgggcaaacagagcgtgtaaatcaatgtttggagacgttccttcgttgttttgtccatgcctgccctcatcaatggagtaagtggctatcagttgcacaattctggtataactcgtctccacattcagctacgggaaggtcgccatttgaagtgctctatgggtgtcgccctagacagtttggtatttcggattctgctgtcattgcttccactgattttactatatggctgcaggcatgca

SEQ ID NO: 5262 - DNA, 702 bp, Zea mays
gccaaaacaactatgtgttcttgagccgactattcacgtctggcaacagagagcgagcgaccagaaagcagataaaagagagggcgagtgagcgagagcttggctgatagagatgtgatagtctaagattaacataccatgataatttgtaataatatgtccaaaatcgtcccacactacaccagaaccatttccttcagggatctaaaatgaatgaaaagtttcattaaaacaggtccttctcagacctttgtatattaatattatgttaaacactatgtacaaaagatactgatgagaacagaaccacatatgagcggattttttttcctgtctgtgtgcgtgtgtgtgcgcctgtgtgttaaaaaattaacaaatactattgagcctgaacttagatcatgtaattcttttagtttacctccacaacaccagtaacattaagctgcggccgtagtgttgcatcaaaaatgttcacaactgagtaagtatttatttcaaatagctctgcaatccgtttctgccattcataagcatgacccaaagaagcataaatatatcttgagaacaagcttatcggataaaccaagcaagtaggtccaactgaacactgacctcagttggaaataatggcccagatggaaaaatcttaggagtcacatcctcgattttgacagacgtatcacccaaagcaaatgcgca

SEQ ID NO: 5263 - DNA, 725 bp, Zea mays
aggttggtccatgagttgttggataaacagcagaatccgaccgtaaaatcaaggctggcaactgcgttccataaccttacaagttcaaacaatctctcaagctcactcgaccggccaaacaggcagagattcaggaaaaacctccttagcttcatggcggatgtatcgggcttcatgcagatcaagtagatgcgatggcagggaacaggtgatgtttgaccggtcaattaaaccccgaggaagcactgcaccactgtggtaggggtgcatgtgggcaccacatgtctgtggattgatgagagcgaagactgccacgacaagtctagtagatcttgaagagctagtgtcaccagaaaagacagggagatgagctagtcttagggttggcattcatagcgcatttgctggacaagatggaggcgtccctggccacgagatcgtcgtgtaaatgcgtttgttagacgcacagaaacggtggggattttgtggtggcgactcgttttgttcaattcccacaggcagaaggtagagatgttaagttgatgtaaataccgtttgatttaaacatgccttattcgtaggagaaagcgacacggcttgctgtaacttagggtttattactctttctcgtggcataggatccccaaagaagtctttgctggggtatttgcagccaaacgatgaccagtatgattgcgagaggttttcaatcttttgtaccaaat

SEQ ID NO: 5264 - DNA, 845 bp, Zea mays
ctcagtaccctgagcacctctagagtggaccagcagtgcctcggcctcaccgtgctccacctcaacgtgaccaccaccgccgaccagctggtcttgtactctctcagcctcaaggtaactaacagctagtataacaacagactaccggcaacactgcaacgatggactccagtctccagctgatgagctgagcagccagtaacactaacacattctcgatcctcgtggtccttgctgctgcatgcagatggaggaccagtgccggctgtcgtcggtcgacgacatcgccgccgcggtgaacgacatactcggcaagatctccgacgagcgcgccagccgtcacctactagccgcgtagcgtagcggcaagtctgttttagcaggtgtcatgtattgttgttgcaacaccaccaattcgatcctaatatatgtgaaaacgcactggcaagtcgcaattggcgccactgtctcacgcggtgctaccacgcgctccatacgtcgtttgcgtgcaattaaacatgtatcggttggaccagctcagtctcttgcaattaaacatgttttagtagtactgtattattcgtgtgtatctacccagaattcagattcattcgcatctattcccgcgtcagcgccaattattagcaccgatcggtcgagatcgagacgacgcctgctgcgtgcgcagcgcacacgggtgacctgttcgaggtccgtgaactcgtggacgaccagcgcttttttgcttcaggaatctgttttgtctgaccagtctgcacgctttcgccagacaagaattagtagcatggattattcagccagcccctgtcgcgttttaaggctgg

SEQ ID NO: 5265 - DNA, 729 bp, Zea mays
agcttgtcatagaattaccaatttatctcacttgctggcgtctggacttctattcttcatagactcattgcggccgtgaggcctcccactgctactagcttctttaattcctgttggagccgtgcaaccagatctttgcccaaaatggagagaaaaggttttaattccctagtgatcctagtggcttgggagctttggaagcataggaatgccattgtttttcagggggttaggccagatgtccaaagtgttgtgtctgaagtggttactgaagggcatcatttgtggtgcctggttggggcttcggccctacatgacctggcccttaaggctggatcacttggggtcgatccggggcccaatagtgtttaagagtgtattgtacccctgagggtggctaatccatcagccccctttttctttcttaatgaaatgacgcgcaactctcctgcgtggttcgaaaaaaaatctcactggctggcattctagaatataacacattttttttttggaaaactgtaatggggatttccatcttgtatgctgcattaaggtttcaagaggaacataatcaatttaaaatcttctctctatatttttgttttcttgcaagcattttgactgtagctaatgtctctcacgtgcaaatttgatgtctttttcgttcttacactgtcaataaaatgttttggattggtaatttgtaatttttctaatgcttatttctat

SEQ ID NO: 5266 - DNA, 789 bp, Zea mays
tgcatgcctgcagttttaaaactagagaaatgtgggaattagcatttctttgttaagttctgttttataagctgcgtttccatgtacaaattggaacttctgattgctatctgggtgaacatcttttgaatatttatttgacattcaaacatgagcccagtaactagaaaagaaaatgatagaacaatatgtctggaattctggactgtgtaaattatttagcacaagagaattcctttttctcgaatacacatgactacatgagagctccatatcattatattaagaagaaaaaaaggtgagggtaaataccctattacaaagaggacacacacaactgtcacttgatacaatcaaacactaccatgaccaacacactgaaagcctaaccacggacctgaagagaggagagagctttagcaccggccatagaccagtacagaagctcctccttagccattctaacagcagaaataacactaggacggcacttatcaaacacacacttattcctatgcttccaaatgatccaagcgcccaagatgactatggagttgagacagttcttcaggtggactgcaactctagaacaactattcctccaccaggtttcgaaggagagatcaacttgttggggagacagatcctccagatttgctagcctgaggaactcaaaccaaaattgtttagcaaagacacaaaccaccagcaagtgattgatggtctcggaagcttgatcacaaagaggacatcgctctggatgagacagacctctcatggccagcttat

SEQ ID NO: 5267 - DNA, 735 bp, Zea mays
agtcgagagcactcgtcgcgcttgagatccaagtatgctatgcactgtgggtagggccgatcaaactcaacaactttgagtggtctgtacttgtaagcccgctcggcgaatttccggcaggttattgcgtccgctgcaagagctcgttgccggtgtggtgcatcagctttgaacagaagagcctcggtgacacacttggttgcttgctcgtggtctatatctgtgcaggctaggaccttccgcagcttcctacacgtcatatgactgaatcgcactagagggagcagacgagaactaaggacctcacgtctctcttctgatttcgggtattgtgcacgggcccatctgagtaagaagtcatagatggtatcttcagatgccacctggaggtcattacttgacaagatggcttcgattccagcacgagggatgttcatcacttcatcttggaacctgaaatgagagagagagagaaaaaaccaccttcagtatgttcacaatgatcttgtcaggacaatgttgggctaaactttccgtaagtaaaaataggtccccatcccaatgtattacctccatcttttttatatttgacgccaaacagtacaaaaataaactacaaaacgtcaaataaaaaaatatggagggagtatatcactcacttaatcaaatccttgtactttacagcgagaaaatccttagctgcatctgtcagaggttgaactgcaggcatgcaag

SEQ ID NO: 5268 - DNA, 730 bp, Zea mays
acattgaactgcaacatttttcttaaaatgctaactgtttgcacgatcatctgagtgcaaaagtttgtgctcagaaatcgcgtatcattttcttgctatcgtgggacggattatatcaaacatttgtgctcaggcatagcctgctatttctagtcgccggtgaccctccacggacgacccccgtccgagctgctacacgcttggttgccaagaaagctgtctccgtagtcgctggccagcctcatttgcctctcttcctgcggcgaaagaatcctgatgcaccgcacgcagttcacgaagtccctgcaaatgcatagccaccaaccatatgaatatcacaactgaagactgaggcgtcaatcaaaataccaaaatggtttcaggtgttgcatcgcccccccactgtcaccattgatatttactgttcatgagccattcagttgcacaaacccatcatgctagccacttctcttttccctctcatatgctagttatttcttttagacaaatgggaacaaaaaaaaagcttaaatgacttactcccatgggtcatcaccaactaataggacatccttctcgtgatcttcgtaaaccagtttccagccaactctgttttggtcgctgagctgcccctcaattccaaacatacgggcaacgtcatgcttcagttcatcgtaaccagaatatctgttgatgtcgatagatcttccaacagcgccacgcttgtgca

SEQ ID NO: 5269 - DNA, 764 bp, Zea mays
gactgccctgtgactgagaggggaaaacgtcggactcacccgtggagaagggaaggaggcactcaggtaagaagaagccttacctccgccttggtccagcacggcgtggaaatcctccgcgatctctggctgtccgagaatagtgtccatgtgagctccatgcccctgacgccttcgctcggcacatctgaaccctgccccgcttcaatgcgctaggatcggtagaacaggtctagctactgcgctacttaattaatgtactacccgcatccatcctttacgtgtgccactgcgacttggcacaacagtgatacggatgcgcttcagttatattatatctcagcaagagtcagatctacacgaagctggtcacgaaggagaacaagaaccgagcaacaatgaaaactgtccaacaccaaaaaaaagaaagaaaaaaagaaaagaaatcctctgtacatacatgacaacaacgagcaacaatggccccatgcatccaaatgtaacgcacgcacgcacgcacacgcaggcggtagtagtagtataacgacgacggagagagaactcaagtgaagaacaaacggcgagggcagcaggcgcgtgtgtgtgtttcgctagctagtgggtgtaggtgcaggccttggcgagggagacgggcctgccgagcctggtctggtccatggtgacgcggcaccgcgcctcggtgtagaacttgggggcgacgagcctgcccagcacgaacgcgcgcgaccgcaggcgcaccgcca

SEQ ID NO: 5270 - DNA, 770 bp, Zea mays
atggctggaccaacgctggacaattgtgtacagcggcaacctctgtaccacgaactaggtcaagatcggatagatttagtgagctagattgatccagctttcccttttccatttctattacagtttcagcaccaacatcatgaccaattattttcctttgatcgggcaactcaatcaggtccacatcttgtggcagcatatcgatatcaccgatctttgttccttccttaaattgtaacttcaagttattctcataagaagatattgtctgagttaagccagtttcctcaatcaagctgaccttgtgaaaagctgttgttggtagcaatttggtttcttcaatcaagctatccctgtgattagcagtcaacggagataaatcagcttcttgcatgaagccatcctcttgcgtcaagctatccttgtgagaagctgcaaatggagataaggtggtttcctgcatcaagctcttcttgagggcatctgttaacggagataagttagtttcttccttatattgctggacaaccacatgtggttgtgcatcaaccttctcttctaccatgtttccagtcccaactggtattccattttcttgaagaagcatcgactcttttggttcagcacagacatcaccagagctagtgttttcatggcaaattttatcttctctgttttctgacacaattttagtcaaaaatctctcagcagaatcagcgcttaccatatgtgaagcttgaccagaagaaactaaatcaaatgtttcaacc

SEQ ID NO: 5271 - DNA, 788 bp, Zea mays
aggctacttgctgcctgcagcgcagacaaggtgggccggctggcgtggatcggcgtcgccgcgctgctggcccacgtcgcgctcctcgcgctgttcgtcaccgcgctcggctggggcgtcgccggggccgcgctcgcctacgacttgtcgtcgtggctcacctcgctcgcgcagctggcctacgtcgtggggtggtgccgggacggctggacggggctgtccagggccgcattcaccgacctctgggcctttgtcaggctctcgctcgcatccgccgtcatgctctgcctcgagatgtggtacatgatgctgctcgtcgtgctcaccggacaccttgacgacgccgagatcgccgtggactccatagccatctggttcggacctcgtccatcttcaattcgtctttcttcagttcttaatactctgcactcaccactgctaataatggatcgattcgagcagcatgaacatcaacgggtgggaggggatgctgttcatcggcctcagcgcggccatcaggtaattaacatctccttttccgtttcgttcgttcatccattcattccagaaagaaactaaacggaacgaacgatgctgacttggctgccacggaccatgcatgcatgcagcgtccgcgtgtccaacgagctgggttcggggcggccccgggcgaccaagtacgcggtggcggtggtgctggcgcagtcgctggcgttggggctgctggccatggcgctcgtgctggcgacgcggggccagttcccagccatcttcacgggcgacaggca

SEQ ID NO: 5272 - DNA, 757 bp, Zea mays
tgctgcacgcgctggacgtcgcggacacgcagcgataccacgtccgcgcggtggtcatcgccggcatgggcttcttcgccgacgcgtacgacctcttctgcatcaccctggtgaccaagctcctaggccgcatctactaccacgtcccggggcgggaggagcccgggaggctgccgcccaggctggaggccgccatcaacggcgtcaccttctgcggcatgatcgtggggcagctcctcttcggctggctcggcgacaaggtcggccggaagaagttctacggcaagaccatcatgctcatgatcatgggctccttcctctcgggcctctccttcggcaacagcgccgacggcgtcatggccacgctctgcttcttccgcttctggctcggcgtcggcatcggcggcgactacccgctctccgccaccatcatgtccgagtacgccaacaagcgcaccaggggcagcttcgtcgccgccgtcttcgccatggaaggcttcggcgtcctcgccggctgcattgtcaccctcgtcgtctcggccaccttccaggcgcgcttgggcgcgcccgcctacgaggaggaccccgccgcgtccaccccgccgcaggccgactacgcgtggcggatcatcctcatggtcggcgccatcccggcctgcttcacctaccactggcggatgcggatgccggagacggcgcgctacacggcgctggtcgcgcgcgacgccgacaaggccgcgcgcgacatgtccagggt

SEQ ID NO: 5273 - DNA, 749 bp, Zea mays
acttattcaaatctcacatgtgagtgtagccacgtacagatatcacaatcagaaaaccgaatatatcatgtagtgtagtcacgtatgtagtataacatctgtagcagaacatttctcaatcatgaccagagctccagaagaaccttcacgatgacacggaattttacatggaacgggagcgtctcagatcttgctggcgaactggaggccatccttcttgagctcctcgaggttagcgaccggcggctgggttttcgccaccttggcaatggccttgttctcgtccggtgacccgccctccaggaaggcgcccaagaccttgccgtccttgatccagtacgagccgaacttgggcttgctggaggtggggtcactgtcgccaaacaggatggtttcgcccacgttgtcgccgtagaattgccacgccaggtcgaatgatcgggagtagaagtatggcaggtagtcatactccggaactggttcaccggactctttgcccttgatcgcctgaaataagaggccataacattaccatcgcaaccaatttggataccaaacggatgacaatataaatgaattacactactttttttttgggggggggggggggggatgcatttcactctaagccaactaagttcacagggtgcttgaagggaattttgatccaggttaaaggctttacgaactacagacactaaattggaagagtgaagtcaatagataacaaaggatagccacacctttac

SEQ ID NO: 5274 - DNA, 708 bp, Zea mays
acaggaaacaacaatatacggaagggtatggaattacgaatatattggatattgcattgttgtagaaccatacatggaaggattctatgatgtagctggctgctgttggcttatacttctatctactaatggattgaagtagtaataatttgaaacattttttatttgaggtgtttgtagttctctgctcctttcgaaattatatttatgatgacaagagatttacatgcatatctccagaactagctgtttaccaattgatgattgttaaagggcaggctttgtgccggatgctcccacacaagtggggtatggtgaaagaataaaccgaggcaagccttttccccacaaatgcggagaggatgcttcaaacccgtgacctggtgactcagtgagatagttctcaccactgcaccaggcctgccttctcaattgatgattgttaacaaataaattatttattcgaatagcagactactgtatagcctttgcttatttatgttgtctactttagatgtgtcttatttttcattttgtccttcatataaatgcacatcttatatgtcagatggtatatgctttcgcctaggagcaggctttttaaatgaacttttagaggctggtgccagtgccacaaaaagttcaggtttttccaattgtcaactaggaaatggcgtctcttcagaagaatcaacaacaattgatatt

SEQ ID NO: 5275 - DNA, 743 bp, Zea mays
ataaatacattaatactatattaatactttgtgagagatacatggagtcctatattaatactgaagagccaattgactactatgtaaatagactaaatgatagattataaggatccttatagccagcagtttggttattattaaacctgctcataaacagaacagaaataaattagtattgcgagaataaaataaaaaccggttgtcaatttacccgctgtgtgtgtcgaaggcctccattatgcggatggagaacaagagccagtgcgtggtgacgtggctgggcacgatcgccggcccaaggaagagcgtggtgaggtacaagctgagctcagtgcccgtggcgtaggcggcggcgaacccggacggcgccgtcttctcgtggtggacgcggtggatcttctcgtacccccacctggtgtgcaggaagcggtggagccagtacgacgtgtagtcctccaccagcgaatacaccaccaggtgcgtcgcagtctcccagaccgacggcaaagggagtcccgtccggaccccgaacagctgcatattgcatgtatacgatcgaccgtatcagaccttgcactgaaagcatgcgtctagagagagagagagagagccttgaatgcgatggagtagatgagcgggaacgggcccaaggcggccagggtgacgcccctgctgtcccttatgtattcgacgtaggtggaaaccggcgagggctccggcaacccgggctgcaggcacca

SEQ ID NO: 5276 - DNA, 783 bp, Zea mays
aaaaaggcttctttgccaagcaacaaggatgccccctcttgtgtctttagatggaagaaaagcaaagtcaccaaactcagagccaaggcagaaagccaaatcccagtgattaaaaagagagtttggtttcctgaacacacacaatggaggggtttacacagctcaccaaggaccttagagtatccttttgatgaggatcattcaaacctctgacgttccatacaagaataggagaattattcatcgggataatcaacaaccgaccaagaaaagggggggagggtctgtctaagcagaaaccaccaaccctcccagaggttcaacacggaactcatcagggatctcccacccaaacaaagacgccagagctttttttctcgaaaacgcaggagaactgtgcatcattatattaagaagaaaaaaaggaaggccttagaaggccagacatgatacaaaggatcgccaccttatggcggccagacacaagcatacaaataagaatccatggaaaaaactaggaacaccagagggttaaggtcacagacttctaatgcctactgccccggccatgccccacaactgagcatcttgctgaatatggagcaggaccaagctgctgcaaggggaggcaccatcaaacacacaggcattcctgtgtttccacagccaccaggctaccaagatgacattggaattgaagcctttttctggactttaggcaccttgctttcagccaccccccaccaatcctggaaaacaatgtcagcaatcccaggggataaa

SEQ ID NO: 5277 - DNA, 802 bp, Zea mays
agcttgcatgcctgcagttcgtcggcctgcacggcggcgtccccgccgacctgcactcctccgccgtcggcgccacgctggcgcgcctcgtgctcacgggcgccaacctcacgggccccatcccgccgcagctcggggacctgccggcgctggcgcacctcgacctcagcagcaatgcgctcacggggccgatcccggccgccctctgccgcccggggagcaggctcgagagcctctacgtcaactccaaccgcctcgagggcgccatcccggacgccatcggcaacctcacggcgctgcgggagctcgtcgtctacgacaaccagctcgagggccccatcccggcgtccatcggccagatggccagcctcgaggtgctccgcgccggcggcaacaagaacctccagggcgcgctcccaccggagatcggcagctgctccaacctcaccatgctcggcctcgccgagaccagcatctccggcccgctcccggcgaccctgggccagctcaagagcctcgacaccatcgccatctacaccgcgatgctctccggcccgatacctcccgagctcggccaatgcacaagcctggtcaacgtctacctgtacgagaacgcgctgtccgggtcgatcccgccgcagctcggcaggctcagcaacctcaagaccctgctgctgtggcagaacagcctcgtcggagtcataccgccggagctcggggcgtgcgcggggctcgccgtcctggacctgtccatgaacgggctcaccggccacatcccggcgtcgctcgggaacctgacgtc

SEQ ID NO: 5278 - DNA, 696 bp, Zea mays
ggccaggatcccggatctcgtaccacggcgccgggttcatgaggaagaagacggagtcgagccacttgtggccccgcacggtggagccgtggaacatggcgccgccggcccgcacggccgtcggcgtgacctcgtcggcgatctccgcgaacagcgggctgaagcgcagcaggtagggctcgcggcaggtggtgccctccgggcagaccaccaggtcgccgcgcgcgagctcgcgctgcatgatccggctgtccctgccgcggtcgcgcgtcagccggacggtcgggatcggcgcgatcagctccgagaagctggataggctgtacgtcacggcggtcaccttccggcgcagcaccgtcgcgaggatcaccgggtccatcagcgtctggtggttgcacgcgaacaatgtgcctcgccgcgggcccgccgccgccgctcccccgaggttgccgcgcatccggaagcccgtggccgcggacagcaggagcccggcgccgtgcgggaggaagccgaagaggaggcgcgtcacggacaggagcacgccgagcgggagccacagcaagatggccaggcacgcgagcgggtcgggccggcgcacgaggcggccgtcgtggaacaccagcgggcgcgggtactcgctcctcggcaggggcaccgccgccgccttctccagcccggacaccacgatgcgctcct

SEQ ID NO: 5279 - DNA, 706 bp, Zea mays
agcagtctcagcaaagcaacttcgcaacagtattcaagaatgtatggacaaacatatcagcacagcgcctaggtggtatgcaagctaccaagattacacccaacatccttcagtctatgatgtttccaaataattcttcagcttccaacttatggagctctcagaaggcagatgatcaagggcagagggcatcaactccatcagatattgcaacaacttcagctaactcacagaatcaagatccaaaacgagctgctgataatgatgcagggttagcatcttcccagaaggcaaacctagagtcgacaggaactaccgtaacaggaggaaatgaatccttgcagaagcctttttcagatgggaattccatgaatgctgtttcatcctttgcacagttgcatcagcaaggcatccttggtgctaaacatggggaaaacccaggagccaattttcaggctatgaattcttcccacaatagtgttaataatagtggtggcattgttttacatggaagcccagcaccttcaaacattcagcagcaaaattactctcttctacatcaaatgcatgccttgaggcatacggatattgatccaggcagtttagctggaaagatgacaagacctgatgttggttctgatgcttcacagattgactggaaatctggccagaggtttgctcatgtagccaataaccaaaccaaatc

SEQ ID NO: 5280 - DNA, 772 bp, Zea mays
tgccgatgaacggcggcagcagctccttgatgcccagcttggaagctgcgcagtagcattgaagtctaaacagctgctatagtaggctagtgtgtagtgtgtattattattgtagttagggacggggatgaaacattattattcttcagctaataagtctaaacaactccacgtacgtacctaggaggtccccggggaccaagccgttggagaacctccccgtggcgacgccgccggggaagtcctgcccgtacggcgggaagttggccttggcctccgtcagccggttgttgttgttgcccgggtccacgatggagtcgccgaacatgaagatggccgggatcctctgctgggtggcggcggcggcggcggccgcggagccacgaccaccaccacctgccgccgccagcgccagcgccgctacgagcagcagtgcccggacgagccgccgccggcaccgcggcgcgtgggcgtgcccccagctgggacagggcgccgtgggagaccgggaccgatgagagtgagacgccattattggcttgcttgcttgcttgcttgtccagctgctggcccgcccgacacccacacccccatcccacgacgaccacgagttttttttatagcgcgcgccttccggtccggtgtgtgtgagcgagttcgctacgcttattgcgcgtgcaccgacgtgatggatcgtactatcggtccggctgcgtgctgtctgtgccgtctgtctctgcatgatccggtggttgcgcgttgcatcggccac

SEQ ID NO: 5281 - DNA, 723 bp, Zea mays
aagtttcacattattaagtctgattttcatatctcctgaccacaaaatttttcaaccgcattaccctttacattttattgcctttcagcaagaaagttaatattaaccttcaggacacaatgctaatactgaaccaatatttcatacaggattttgctgataaaatggcagtgacaacaattatagttcctaatgcactgaataatatgacagctacctatagactaaatgtgaaacataacactaaagctgagtagcaaattacctggaccagcagcacgttttttagatggtgtagcaggcaagccctcgatacgaacattctgccttgacactaagtcatcaagagatggcattggttcagccaaaagaccaaggcggtttatttctgaagcaacagatggcctggcaacaatcagtgagttatacaatgatgaacctttctcccatgccatgctttccaaaagctgttcttctaaggaatttaggtgccttttcaattctcttgggagggtctcttcatgtctcacaaagttctcaattattttgctcaaatcaaatgcagttagaccggtactctcaagaacagcaggaaacatcatgatgactgtcttatgtgtcgccaatactaagtccgctgaacatgcaatcaaacatcggtggaaacgctcatttgacagcaatggagttagattatttacattgctgttttgtaactccgct

SEQ ID NO: 5282 - DNA, 741 bp, Zea mays
tcgacctgcaggtgcctcgcagtcgcagctatcttttcttcgtcacacgatgttgtgctgacaacccgctggagccgccatgactgttgtttcctgctaatattcttcagcctgttcgtttttagatttctggtctagttgggctttgctactaacttgtgctttcgacctactagttcttagcaggcgccgccctgggtttcttttgctttctgttgtcagtcgatgtttttttcgccagtgctttttcttgttccttttaacgcccaatcttgttttgttcttcagtttggttgcaaccatgtttaatttatcatcttattaatacaatgatgtacggcgcattcgcgaaaaaaaaaaagacagctatatatcagacttatagtgtcacaagtgattcatctaggaaagaacaatacttcgaaggctcatctatattttgccatggaatatggccgtatatgtttgtataaaaatgattacattcagattaaaatacatcgaaactccaataaattaaatagatcgattcgggacgtgatcagatcttagatccaccccttcccgccgaaactaaaaggaatggagcgactctacgcgcgcatggacgcacacaaatcgatcactagctagtatatatacacatgtccagtccagcactccagcggcgtgtgacgtttgtcatgcggggctagctagctccgccacctttgttgctggccgctggcaactccacacgca

SEQ ID NO: 5283 - DNA, 783 bp, Zea mays
gaagtgaccagccagccatccctgcaatttggtcgattggtggacaaggtgccaggcacgtattagagtgcaccaaatagtatataataaagattaatatctatggcatataattagaattattagataaattataaaatattttttatagtaaacttatttaagatataagtgttgttattgtttttttaaaagttaaaacctaatcaatcacgagattgaggatggagggagtaggacgtagctgagctgcacaaagtggtggagcactgtcccatcgcatgtggtatagctgtgtgccgtacacacactgttgaaccatactatacgtatatgagcagcatctgagaatcctggcaaagctgtggttttggaatccagtcgtcttgttggctcgttgctatgctgggagataatactaaaagttccaatgaaaagtactccaacacagtagagagtagtacaatactagctccgtgcatagggaacagctagaaaccctactgatgaaactgttctggcggagggcgaagggtcagggagagaatcttgtcctggagatcctttctctgcaacggacacgattgatttgcgacgctgcatctccggccgagcttttctcctggagccgcgcgctgggctagtacgactagctctgttttttttaccatctcatccgtcggttccatgcatctccggaggagcttttctttttggcatctctctcacgcaacgacgcgacgcacgtccatggacggcacgcagcgtcagctgttcacttca

SEQ ID NO: 5284 - DNA, 816 bp, Zea mays
tttgcatgcctgcagagataactggatcaactgtatattgccatatcatatcagactgggacatttatactcatttttttttctgtagaacgtgtgctccaaaccatcggcaaaagagagacgcgcccaagtctcgtcagcagggtgcgtcatctacaatgaataccttgcagagatactatggcctaacaccacctcagaaaggaggaaataccatggatagcagcactgaactgtctgtgtaccataagggcggcggctgccagagtaacctcaacgaaacattgctcaatccttccgcagctccaggcaccgacagcagctggaattttgaagcgccaggcttttcagcgaccgagggcgatggcggggcaccgaaaccagagcaagatggttctatgcggcggcgacagaaagtggaagcagagtctaacgcccagggtgattttctagtgaaggcgatcaagagtctgttgatttccagcgtccgtctagacacgtatgcaggcagcccaggttccagccagaagagcggcttcagatctgtgactgtgaggaagtcgccgagcgcgccgagctttgcggatgctgacaatggagtctctatgtggtcaagttccaagtggacgttcagccatgactccttcacccgaccgttgcttgatggcctgcccaaaccagcgtcagctcggaggaccaaccaaaaccgcgttggactgaaactgaactgaatacacacatgtttgagcgtctcctttgatgaacgacgagccgtggcgtgactaggcgactgacttggcagcagagcatatctgt

SEQ ID NO: 5285 - DNA, 752 bp, Zea mays
agacttctggcatgttcctggtatagctcagctcattcgctagtcaccacccagttttattttctagttggcattacgctataaagtgactaacacgttgtaaacaaacggtacacacacaactagcatcctatcgtgccgtgaatttgcgatttggttactcagctggtgtttggtcaaaacgaatccaatactgacatggaagattacagtcgctaacccaacctgtgttcctatcctgaaacagagatcagttttaataaactggactccgccccctgcatgcatccattttatattgtcgcagtcttgtttcccattttccctctgtcgtatatacactgataataaacactacttatttgtacgtgatgctcgataacgccttcgtagtactgattctagcagctggagagaacctggtaactaaaactaagcacttccgctgacccgacagctggcatattggatctgggatctctctctccactggcactgggcccggtcgctgctagatccagggcaaccagatccctgagcttatttatgtttccagcgttaaagtcgccatgaagggggcgggacaacagaggaaaaagaaccactacatggatacatacatacgcgcgtaccatgggttcgcgtatgtacggaatagagctgacagataaataagtgcacgatcgcgagtactgtctggaaggctataataatccaatctatacaacaattattactactattattaatct

SEQ ID NO: 5286 - DNA, 707 bp, Zea mays
aaaaataaaaataaaagacaaaatcagtcggcccaatagccatggaagaattgctctgctgcttggtgtttttcctcctcccgttcacctcgccgtcgacggggccaggcggccgaacacatccttgacgaccgccgccgccctactcgcagcttcctgggtttcatcggatcctctgctagcgacgagcaccccctacaccaggtattccccctctccttcccttcctcgcaaaactgagcatccgaaccctaccttaagctatttggctatctgtattcagatctgacaagtatttgcatgtattgtgcctactaacttcgttttttctggcaaaaattatcgggtgtgctgctgacgcacacacgcaaggccgttacttgggcgccggtgccatgcccggcgggtcttcgggtccagatggtgaagtggatgcaggatttgcgaagctccagggagaggatttcgagtattacatgcaaacgtactccatcatgctgggacgcaacagcaagaaatcaacagtggatgtggatctctcgagcctcggtgggggtatgaacatctcccgccaccacgcccggatattctacgacttccagcgccgcaggttcgcgctcgatgtcattggcaagaacgggtgccttgtcgagggcgtcctgcaccttccagggaacccccctgtcaagcttgactcgcaggatctg

SEQ ID NO: 5287 - DNA, 787 bp, Zea mays
ttccatctgttacagccaaaatctagtgtttcgcgcatgctggaccagtcaacaagtaacaatggagtaatggactctaaagggacagctgctgttgcttcctccttctggcggcagggacgcgatgtctgcttcccagccgtggagtgccgatgaaacctcagctcctcaacggagcaccggtcgcatgggacagggcccgtaggggccatccaaccatggcagcaaggataagaaaaaggatagagagaagaatgcttctttcttgctattcacaaagtgaagaaaaggtaaggtaagacaatgtccatgcaagcaactgaatagggaagcagcaatagctacaccattgtttttgttggaagagcagtaggtttagtaatatataggtatctgccatgtgtgtgcaaacctgactataataagtagaaatttatgcggcataagaaatacacatgcatttgtatatacaataaacatatccaaatattgtgccaaaaagacatttatatataaatataataatgatatattttctattcattcattatactctggaatggtacagtggtattgtctggtaacgagacattccgttccaacagataaaccagaatggcctctggaacatcgacaagcttggttgtataaaaataagccagaggagaaaaaaaaagccagatccattggttcaaaatcaatggcagcacatgcatttggaaaactcattcgtgtaaaaatataggcattcaataatcacagcacatatatgatacgtcaagaagat

SEQ ID NO: 5288 - DNA, 783 bp, Zea mays
aagagcaccatcatcatcagcagttttcggtttaccatacattacatgcatgccatgcaagactggagttttcggtttaccatgtagacgggcccgaacccgccctggccgatcttgctgtgagccgagaagttgcccgtggcggcctggatcgtctcgacgtcgaacgacggcaggtcgcagtcctggctgccgccctgctggccgtcgtgaagggactcgtcctgcgcgtcggtggacgcggcaatctggttccttcgtccgaacggtgcgctctgcctctgcgcgtctctcagcagcgccagggggatggcctccttctccttcgtcctgcgccttctcgtcctcacggcgcagatgcagagtccggccagcagcagcagcgccggtgcggcaaccgatgggacgatgatctcgacgagcctcttggttcgcccgtccgtgtctgctggcgaagagctgctgagagctggaagatgcagagagtttcacagttcggttagcatgcaccaataaacagtaaggtaggttggaatgtgatccttgatgaattgatcaaactatgcatgcagctaattatacggcacgttcagtttctgtttctgaacatctggcagatcggtagctcgatttcatttatccttttgcaggataatgcagcttctgggtctgctaaagagtcaaaggtctggtatttattgtgttaacctaaattaacaaaaagtgaacattggtgctggccttctttttttttcaaaagtgggcgtcattgtcgttggacct

SEQ ID NO: 5289 - DNA, 728 bp, Zea mays
gacagcaaaaaaaggctgccggacggcttgaataagcacaaatcaaaagaagatggtttcatacacatgaatattgcatatttgtgaaactattgtttacctgcatggttttagctcaaaatttctcctatgagggacaaattggagaagccttccatggctgcatatgtgtttcagtgttattttatttgtagtggttttctctaattcataacatgttttaagtaattacatctccactgtaggcaatggttgatgttgccaaggaagttgatgcagattgttgcttgtggatgcaccgagaaaggcaatgatcaggtaacaatgctgctaggttaattgttaatatgtgagtgcatcttgtaattctattttagtttctgtatttggcatttagagactaaaatggaataaaatagaggggctaaaaattagtccctagaaatcaaacatccccttatatggtgggtgtgggtctactatattgtctgcttaggcactaatatgaggttatcaaaaagagggtattagggaaggtaacataaaagcatttaagttttatgttgtcatgtgatactttttaggtgaagtaaactttatttaaaattgtatgtgagactacgatacacgtttacaagatagaaattcttgcttagcaaatatgtacagaaacatttccagtcgtgtgattaacatttatggttactgctttacctaattttcatctt

SEQ ID NO: 5290 - DNA, 758 bp, Zea mays
ctcggcctcggctgcgaccgtcttcggtccagttctaagggttttatttttggtgacatggcattggcatccgcagcgattcggccatgcctttcgatctagagaaaggtgcatcaacgagtccggcatttaaccattttttgtgccctgattacgacgattgactgatgttcttttgctttgtttggcgctacttaaatgcataatgtagtagtagtaaagtactcctccgtatcgccccctcacacaggctagacaggccctaagttccagctgcactggccaagtgcagtggcagtgcagtgctgtgctgctccatttgagtgagcccggtcaccgtacctacctgtccattaaaaaaaacgcgcatggttggcctcattcatcatcggacaaaaccacatcgcctaccgcgggaatacatgcccaagtgcagtggcatgttttgtttggcttcaccgagaatatgcctctctgattcgtgaaaagaaaaatgtgcttcgctgaattcagggcgtgcctgtatctgtagcagagtcaatggggggcgacgagattcagcggcagaatttggtttggccacattcgcctgtgctgtagcgttgtttgttccataaccaacccacccacgcaggacagaactggatcgacatagcatagcagcacacagggagaatcatgcccatgtgcgcatcttgaagcaagcggcgcatgggacggtagcagccaggtccgtcgtaggtcgacgtgccgcctgc

SEQ ID NO: 5291 - DNA, 809 bp, Zea mays
ttctttcgacacaacttgaacctctcaccgaacagcagctgtcagggataagcaaccttcagcaatcttcacagcaggctgaggatgctctttcacaaggaatggaggcccttcagcaatcattggccgaaaccttggctgggtctctttcgtcttctggatcaacaggaaatgtggcaaactacatgggtcaaatggccatggctatgggaaaacttggaacgcttgagaatttccttcgtcaggtattaaccctcttttccaaatgcatctttgtgacatagataaagggttctgtgaatgattgtactccctcccaaaaagaatgctcatcttgcatttcagggatagcttttttaagtttggccagacagaaaaaagtactaaactactaatatttatttatgaatgcgtagtaagtatcgttaagttaatcatgaaatatatattgataataaactcatttgtaccttcaattgttggtactattctttataaacccaatagcacttaaaaagatttgattatttaatatgagggcattagacttgaatatatatagcgatatacatgatagagaccgtgtatagaacaataactttatatatgagatgaaataaaacaccgacatatgcagagacatctagcaatgacacttatgtatgaaactgaactgaatacgacaaggacaacctgcggtgcctaaatcctgctacttctctttgttgtatgtatcaagagctgacacacctgcgcgctgctaggtcgaactactagagggatcccccggggtacctgaggctcgtaat

SEQ ID NO: 5292 - DNA, 757 bp, Zea mays
atggagtcgttggcagctgtgtgcagccagccagagcccagaagaacacagcacatgattgtatcaggtcacagaacgactgcaaacagacaaaaggcacgggcatcgaaccagccgccacaggagcaagaaaaagccacagacggtagcaaccaaaccaaaccaaaccaacaggcagggcacatagtctccaatacccaagttttttttaaccagtttgtttcagtagcaaccaggacacagcagcaaacaactgaacagcagggtaaaagtccaggagttttccgcctgttgttgcatcaaggacaagagcatcaggcagacccccccgcgcgcgcttccgatccttctagtgagaagctctccatctcctctccttctatgtgcaaggtagtaaacaaaagggccctgccagccggcgtcgacccggggcgtacgtaggcactttagtactcagtcacacggtggtgaagcaagaacccaaaacaaaaaggccgagcccataacttagaacaagtgacgccacttttcccctcccctctttcatatatgtctattctctattatatatatatatatgatgatgatgatatataagcagtgccttccgcacctcctgtacctaggacacctctagtgcatcagctggcgaggcgcacggggacgcacgggagtcttcgaggggctcaccctgaaaataaaaacagcgagatgcagcagtaggccgcctctgttatatacagtgtccactaatacc

SEQ ID NO: 5293 - DNA, 806 bp, Zea mays
ctctaacatataacttgtgctacatgtaagcatgcccttcccttccttatgttactactgtaggcgttcacacccacatggttctgccgcgcctccgcatccgccccacatccgcccgcggtcgcacctcgccctgcatcctgtcggcagccccgccgccctcccgcagcccaccgccctcccacgctccatccctccatccatccaccggcagccccgcatcctcgcctcgctcgcctcctccgccggtccgaccatcctcgcctcctccttctgcctttccctcgctcctcccatcgccgaaccaaacaggccccttgtgtcctggtccgttgcgacacgccgacacatcaacgttaaaggtggacgtcttcttagaacttgtagtttcagtgcgcagatcatccagggcggacctataagatgtcaagtgtgtatgccccaacaacccacagatgcggctcgacgctctccatcgtctggtataccaggtacgcacggatctcatctgtgtgttgttttctgtaatagcatgttggttgtgtcatctgtagtattgttagtcttcatcagtactcacatcaacttttttctttgcttttcaccacacacaactaaaatcttcaaatgttgtttagcatttctcctgtatggtgtatgatctaggcaatatgataagctattgagtggaatatctcattctatattggtagatattaggtgaacaaccctttctaaacatctgtacagataggagtaaaagatatggtccaagcagcactccaaatggaatgaatggtagttgt

SEQ ID NO: 5294 - DNA, 765 bp, Zea mays
aacaaggacatactcttgtaagtttccgatagaaacaattatcaagatgataaaagatatccatgtgcattcaacatacagggaagacaaaaaaagttgaaagtatgcagaaatcgttgatcaattagtaccataaatttgtgatattaaaattatgtaaatgctttctgtacagcaaatttgagtatgcctcaagtacaaccatggatttaaatcattcaatgcatttatgagttaccattcaagtgattcgaaccattagagttgcaagcactcaatacactaatatcgatgagaaaaacctgaaaatgaagaggcgaaggaacacaacagagtccaagccagcaacttgtcgaatctcttcttcggtgcaccagtacgcctttacaatccaaccagcagtaggcagtagcctctcaaacgagaagtaatcgtcctgcctctggaacctctcttcagcaagccgcctcccaaagtagacgctgaagttgtgaggctgcttcctgaggatcgaatagagggacaagaagagcacgcagacagcgatgtttatccccgctgaagtcagaagagcagagaattccatcccccacctctaccagtttgggatcctgacaatccacccatgaaagaactgcgaattcacaatagaagatccaggcatgtctttaaacagtcagccattcgcttgcactgatatggtagcagaatcttgttgcctttgactctgatgatccctgatttctccagccaaataagtctgat

SEQ ID NO: 5295 - DNA, 793 bp, Zea mays
actgcccgccgggccgtgacgcgtcgcaggtgatgaggtagcactgcccgcacgacgcgccgtcgttgaacagggtctggctcagcgccgcgttgttgatgccgtagcccgcgttgtacaggttgccgtacccgcacgcgccacctgcgtatagtatatatgcgtgcgttttggattacttgcattggtgtgtgctagctacacgtggagtagcgtcacccctacataaaatgtgcaattaacaccatatatatgcatgcaaatgtatgtatatatatgttacccatcgtgccggagccgtcggcgtcgccgtagaacgtcgcggtgccctgagaccagcctgcggccgcgagcccatggcaggctgcgaggactagtgtgcacaagacgagggatctggacgacgtatccatgtacatggagcacgtcgtcgatgcagggaatggcgaggtgtgtgttcgtgagaaggagcgggtgaggccggcgtggctgtgcggaatggcctgatcgggtacgtacgtttcctgagcttgtgtggaatgagatgcacaaggcgtgtcgtacgtctggaaggcccgtacgtacgtgcttaaatagctagagaaagagctagctaggcgcgcgcgcgcggcgtggctatcctcaggagcaagaatttttagttatatattattaattaatcacaggacggagggtggtgattagggccaggtatgatggtcgattgcaccttgattgattgctttctttgtgtgtcagaacacacgaaacgaatccgtgttccatcgacgca

SEQ ID NO: 5296 - DNA, 729 bp, Zea mays
aacatttatatctgatctgcccgtttcttctggaaatctaagatctaggaaactcttggcttcttgaaactgactcatctggcaaggataccttgcgacatttgcatatctattactgtagatacttttaaatctttcttgtgatgcttttttaagttgacactgacaattaaaattgctactttaactttcttatgctactagcatcactatctcatgttcctagttattaagctagaaatctgcacaacaattggtttattatttcctaatctgatatttcttctttgatactaatagaaaaaaatgctaaaaatgatgcattaatcaataagaaataatatgttttgactccttgtcccatttttataccacaacactgatggatctctccccatttttttcagattttagcaaagtatgagctgtgaactagtgttagaggaaagcacgaaggaaatagtggcataaaacttgatttgtctaaagataaattggtttcttaaaatggctcagcaaatggcttcagttcatttgaatgatacaacagttgttgatgccaagcccttgcgtacattaactcccatgttccctgcaccactagggcttcacacgttcactcctcagaactcaccttcagttgtttgtgtgaccccatttggaccatatgctggagggactgaattggggatgcctgctgttccaccaatgtttgcagcgcctgtacct

SEQ ID NO: 5297 - DNA, 716 bp, Zea mays
aagcgagtccctgtatcaaataactgtgtccattgcgatgcatggcactatatgccactagcatgtcagcttgctgtagtattgcatactcacgggcaggtgcatcggcattgtagttgtagcagctattgtttgatacgtacaggaactctccactgtggaagcacaaagccacaatggagtgaggtgcgacgcaatgaacaatatggtggcaaagtgaaagtctgtggaactaccggggggcaaagtggattttgtgcaactatttgtgtgtcgttttccggttgataccattgagaaaatacgaataagttacaggatcagtcatagtgcatgtaattgtcgccacatttggcgttaccttgttattgtaattgtaacatttgtaccatttgttgtatcattataactgtgagatacaatacaaatattatacggtctcggcaaatttgcttgatgacagtgttgttcgttcggaagagtcggcaatgcaaattctgtgatattccacatgttccaactaaaaaagtacgagtagcaccatgggagacatgtcacacagtaccccttcccttccgtctcccatcactccatcagtcagtcacttctacggcgccactgtcgtaaaccctagcgaggtgcgccgagaagcgctgcctcttgtagcactcggcgccgagcatctcctcccggctgagcagcacggcccggagcgc

SEQ ID NO: 5298 - DNA, 766 bp, Zea mays
atggggagcctcacgagtcgacctgcagcacattttccaaactatgccaaccaaattggcatgtggaacccacgatgacctaagtgagaacaaagatctgagctccagctcaccaccaaattgcatcgtctttttttttgtgtgtgtgtggaggttagtttaggaatacaggtgaccagacaccagactgaattattacttgacccttcaaacactcagccttgcagtgtccgcgctttgttcgtactaatcttccgacaacacctaattctggcgtgacaaatggacccacacctgtacttatcattaaattaaacatatataagcaagcattcttccaaaccaagcaacctgcttggatattctagtgaatagaaagcaaaagattttgtttttgcaacgtggtcgttatatatgttatcccttcactagaaactgatatatcagcaacataatactccttccgtcttaaaataatagtcgttttagctctagtttttatgtctatatttaaatagataaagaacaatttagacttatatataacacatatacttcaagtattacatcaagtattgtatgacctattaattaagtaaaacgaattttaatttgggaccgacgaattataatacatatactatgtacatgctccatggatgaagataaaaaaggtgcaaaagtaaaagtaatgtgaattataatacatatactatgtatatgctccatggatgaagataaaaaaggtgagaaagtaaaagtaatg

SEQ ID NO: 5299 - DNA, 738 bp, Zea mays
aaagtggtgtagtcttgggataaaacatttccactatattgtgttgtaaagcatagtacatttctagcaagcatcggaaactgtgttggtggtgtcttaattgttttgtcccataatgagttttgcttgcaaaaccataaagcaagctgcacagccccagttaagaactaccataaacccagttgcaagctagattaaataggctatgcagaacaacaatgcaatctttctcatttttttaaacacaagttgactaggtatgttaagtaccagagccctatgggttttgtttatgggaaaaaaaaagaagtctagtacacaccatataaaaattatatgaaccaaaaaatgtataagtaaatacacataataatatatcagggaaacgaaacataggatgcataacataaatgtctgccttgccttcgtatgacaccagactgtagaaaattactgtaaagtattctattagacctcacaaactcatgcgtacaagttgggtatttttgctgtgttttcctattctactagacttcactttaactggtacggtttgcagttttaccttgatatctaccaggcacacaagagtttcccattcaattcttatgcaagcatcgatgctagatcattagaatttcaatgtgaaaacatcagctcttacaatattttgaaccctggaaactaacctgttttatgctagaccattttttacccaccccactgcaggcatgcaag

SEQ ID NO: 5300 - DNA, 763 bp, Zea mays
accagagaccaaatttgccgagtgaaaacacagggaagcagaatgtgattgattgtctccttggcttgatcacaaaaggggcaggcaattgggtgaggtgggccaccctttgcaaggtgatccgccatccaacacctgatgttaatggccaaccagatgaaaaaatgtagctctaaggggcccaacttgtctgaatcctccaccatggggcaaattttatggtggcaaagatttgctggtacatgtgccagatcatgccagcttccagtggtgatgatcctgaatatcttgttgtaggacaaaaccatccgactgaagggcttcatatgctaaatgaataagccgtatccgaatgcggacattcaatatccataccgtatctgtatactcaaaaaaagagctagcctggtgcagcggtgagagcggtctcactgactcactaggtcgcgggtttagatctgcacttgcgaggggaaggtttgcgtcgatctatccctttcccagaaccaacccactcatgtgggagcctccagcactgggtctgcccttttttaagaagggcaggcctggtgcaatggtgagaactgtcttaccgagtcaccaggttgttatggttagaatccaaccattttttaagaaactcactgttttaatttctttagggtttcatggtatacggttaatcatctattggtgcttgtgttttcaccaagcaattctggtttgagtttctcaaagatggtggtttacaggagttctgtcc

SEQ ID NO: 5301 - DNA, 669 bp, Zea mays
aggccatcgccgttggagttggagagcttggccgtcagtgagccgaacttggcgacggcctccccggtggcggccacgagctccttgctggggacgagctggccgtgcgggttggagaggagcgccagcacccggtggcagctctccactgccgtcctgttggcctcctccatcccctccatggacggcctgccgcctgcctgcaacgaagcaaatcaatcactgaaaccaacaaccactgctcgagcagccgcggagcagtttctcgcggtgacagcacgagcattcctctccgcacacggaggtaaaaaaaaaaaaatacagacacaggctgatacgcgccggtggctctaatcattccatgccaccccacccctagatttgcatccagaacaaatacactaataagtaagccggccgaaacgcagcagcagattcccacaatgatgaggcccatggaaggcggcatttcggcgacccggggggcaagctaaaaagctgggcatccgagcacgggagcatggcgctcaaagcaaataagcaatggtccaaatcagtaccaaaactaggcaacatgacaagccaacccaacccagcaaacacctgaaaacctacacggcgccgctagcggaaagctcaggagccatcgccatcgccgccgccacccct

SEQ ID NO: 5302 - DNA, 698 bp, Zea mays
tgcggtacacctcacccctcatcacatctaccggtccatgatccagcgtatatcgatccggtccaaggtacatgccagtcttctctataagggccaggccttcctccctcccataccgtgaagaataaagcttcaggtattcgatgtcctgcgttcaaaagcaacaagaaacagccgtcagcacaggacaacatcgaccaatcttgcagtgtttcatatttccaatggaaatcaattgaacgagtggggttggttcctaacattcttctgagaagtatatatataacccttgaattacaaaagccttggtaggatacagtatagttcagacatacatgtcagcaaatacttccaatctgagtagttcagatatacatgccagatttgatgagaaaaataaccaacaaaaattatcacctgcatgccactgagaatgcgctctagccgggtggaagcaactggttcatgtgacgaagaaaacacttcaccagggtaaaacaggacaccgtcgccaggaggaaggccgcgtcggaaacagatctgcggcaccgccaagtttgagaatcagaaatgaagcaatagtcaacgcttgcaaatgtacaacggagctcagtcagaacaacaaaatggtttctagaataagaatacaaaatggtttgctcaaacattaagggcttgattgggatcaaaggtaatgg

SEQ ID NO: 5303 - DNA, 779 bp, Zea mays
ttgcatgcctgcaggcctctcaattctgcccgtcgaagcgcccgcggcttttattactgtgtatatatatatatatatataatactacggcatctatcggtccctcaaatcctcctcctcctcctgccgcagcccgcagggaggtggagttgtcaacgtgccgaggactggagcgcccgcgtccggcgtctctataaacgagaccgcccggccatttggtctgctcctctctgttctcccctgcctgcctgcttccagctgcatctctctccgccgagaccgagaggaggaggaggcaagggaggcatccctgacgtacggacggcggccatggggacgcaggcgccggagaactaccccgccgagaaggtacaggtaccaccgtctccctccatctgtccaccttggtcttgttagttgcttcgccggccagccatggcgcccggctaggttttcaacgtaacgacaccgacctgtcgttgtcggagtcggaggcctgtctgtggttcacacgcccgcccccttgttccattccttctgaagcaagagaggcagcaaaaagaaaataaaagcaaaagatataatgatcagatagatgcagatgcagataccttcgcatcgcagcaccccgatcccccccaacatcacgggaggagacagggcttgggacgccttttttaaaaaaaaaaacgatcttttttttggacgcctttaaaaagcgatcgaagcccccccatcccctggattttctaggaggagtagtagaaaggaaagaggtg

SEQ ID NO: 5304 - DNA, 744 bp, Zea mays
attttttgtgttcattttgttggcgacaactaatatgcaggcagatactaggtacaagacaactaatatgcaggcagatactaggtacaagcgtgcaagcagacattttactccgttattcaacggtatgttatatttagcacttaaacccttccaccaccacctggtgtagctttataaaaaactttctaacaaaccacaattatatctaccgttagatttgtacctaacaaacaaaaaaaaaatctgcttgcacatttgcatatatgtttgcatattagtcgttgtcttttagatggttttcagtgataaccacggttaattgagcaatggcggaatgaacaggactccgacaagggtgactcagcaataatgggatcactagcagcgaccccacgttgtttaatttaaatatctttcatttctgtacatttatgtattcaaattcaaactagtggattttaatcatcttgtttagatcgtgaattttaatatttgtcatttataaaaaaaattaacattattgtttgaatttatgttagaccaaataggtaggatacatgaaaatgtgggaaagattaccggtcaaaaaaatgagagaaagaatactttactcgaaagccatagcttttgaaccaaacggttttgaattttttttcgcaggccataatcaatatctacttttttacagctcagacctcataataactttttctaaaactatagcttaaccaaatacatctt

SEQ ID NO: 5305 - DNA, 795 bp, Zea mays
ggacgggtcggcgcccgcggcgttgggcacgaagcccctcacccaggcaccgaagtccgactccatggcggcaagcatggcgtcgatgctcgcccggtcaaagccacccacgtacccctcggaaggcgagtcgaggtacctgatgacgacacaaccaattaactgaatgtgtatatatatgcgcctgtctctgtatgctgaggtggacagacgttgacttgccataaccataggcaaaacgcaaggttgggacgacgagtgatggcatggcatgcagcacagcgcaggagcgatagatagatagctcacctgggagacgcgcagaggaggacgaggtgggcgaagaggtcgggcctcctggccgatgcgatgcaggcgaccatggcggacatggagtggcccaccaccaccgcgccccgcacccccttgtcgtccatgagcgcgataaggtcgtcggcaaacctgccgaacgtgtaccgttccgctgcctcctcctcctcctcctcctcccgttcgccggtgaagtcccagtcgaagaggatgaccctgtggtgctgggagagggccggcaggagcttgtcccacagcgtctggttggcgccgtagccgtgggccagcaccaccgtgccggcgccgccgccgccgccgccaacctccttcgcgttcgcgtaccaccgcattgctttcctatactagctacctgctgccttgccgacgacacgacaggaccggaccgtagggttttataggaggcggcactgggcagtggacccagagattccgctgcaggcatgc

SEQ ID NO: 5306 - DNA, 805 bp, Zea mays
gacacacgcagtccgagcaggagccagcagcagatatggacggcgagctcacgcgcgcgtggacacagagaagcaagcgcgcggtctgccggaacaaggacggacagggagctccgactgacgagcacgcgcaggaaacttcggctgggcgcgagagcgcggggaaaggggccgagcgagctgaagccgtggcgctgggcagagcccggacaggcaagcgcgcaggagcagaggacgcgccagaggagaaaccggcgagagcgacatgggaggagcaaaggaaggcgggtccgacgtgcgcggcagcacgcgaaccggtggagggcgcggccatggaagaggggctcggatgggagacggccacagcagcttgaacgaaggacgagttcggaaagaagacccacgggagaatctcggcgaactcgactgggctgaagcacgcgaccccgggcgcggcgagcagggacgacgtgccatggaggaacctcgggagagagagagagtcgcgagctggaggaggagaacttgagagagagaggaggagccgctggactgggcgaacgcggccaggtgatcgagatcgagcaaacgatttgctctgcgaggaagacagacgcgcagatgggagaaggagataagaagaagggatcgacgtcgctgtaaaaatctgagcagggtcggcgacgggataaggccaggcgcaggaaaaaatcaacaacgcgcgtacagaaaaatcagccccatgagcagcgcctagaaaagaaaaatcagagagagagaaagctgtagaagaatgagaacgaca

SEQ ID NO: 5307 - DNA, 698 bp, Zea mays
gctagccgatggtcatataccgtgggcatgcgaggcgttctccagatgccatggacaacagcttgtacaaaaccctgccctgctgtggtgagtagcttagctgctttagaaatacacattagacatattcctccactacgcatgtttacatatcctactgcaaattctctctctctctctctcgatgagcaggggctggcgtttcttcatgattaaactctggaaccacagccttcttgacgcccgcgccatgaatgcttgcaacacaatccttcaaggctaccaagacggaagtgcggaccccaagtaaatctacaatccagagaaatcgttggccagcgtgtgtaagatctgccggttccggcggttatttctgaaccccaaaacagctatgtgaagaactggaatggggccatagcggcatttgttttaaggtttagggttactccatttttccaagggaggaaactaatttcccttggaaaaatgaaaatccattgggaaaaatgagtttcccaaactagccattaaaagggtagcttcctcccacctagggggaaaaaaactaggagggaaaagctggatccttggccgagacaatcatcattgcttcattcgtgattcggttgtatttatcggtaccagttgttgttggcatgtggagtttgtatggatgataatgataaatgaagtgattc

SEQ ID NO: 5308 - DNA, 741 bp, Zea mays
tgagccacagcacgcccgtccgtccccgtacgctgcgtgtgccgtccgtgtttcagaggaacgttaaatctgagtgagactctctgctgctctcgtccttgcgttttcgtaattcgtagggcctggacccgctgacggcggcgagcatgttcgccggcgcgcggtgcatcggcgagaggaaggttaacggggaggactgcttcatcctgaagctgagcgcggacccggagactcttcgggcgcgcagcgaggggctggcggagatcatccggcacgtgctgttcggctacttcagccacaagtccggactcctcgtgcacctggaggactcgcacctgacccggatccagtccgccaccggcggcgacgcggtgtactgggagacgaccatcagctcgtccgtcgaggactaccgcgccgtggacggcgtggtggtggcgcacgccgggcggtccgccgtgaccctgttccggttcggcgaggcggccgtggggctgggccacaccaagacccgcatggaggaggcgtggaccatcgaggaggtggcgttcgacgtccccggcctctccgccgactgcttcatcccgcccaccgacgtcgggcccagctccgtcagcgaggccgccgagctcccgcggggcgagcggagcaaggccgccgccggcctcgtcctcccgtgccaccgcgctagggtcgccgcgctcgagaaggccgacgacggtggcgtcgcgtggagcggcg

SEQ ID NO: 5309 - DNA, 785 bp, Zea mays
cttgcatgcctgcagccgccgcccgccgccggaccccgcgcccgcccccgcccccgcctgcggcggccgcggcgggcggtttttcttgtccaagagcagcgcggcgcagtgggagagcggcttccacagcgacagatgcatggccgcccgcgcgcgcgcccagaaatccgggacgtttcctccttcctctctccctcctacagcatcctattccccgccgccggcgccccccgcgaattctctggatcaaatcagcccgcgatcgaatccgacgcggagaagggttccacttagggcttcgggagatcgacagagacggacgatcgggctgggtgccctcaccgccgcggaatctggatcaaggaacggagcagagagcaaagggacagccggacaggcggaggagtgaaagaggaagggctgaaggggagaggacagacgaggaaggcaggagggagtgaaagaggaggctgcacaatgaattggaggcttggagcaaaccaactcgccagcacggaattaaaagcagagggccccatgtaacggcgactccaatatatatatatatttttttgctgtgcagtatattttgcacatcggtaggtttcgatcttattttattaaaatttattgtacagatatatcagatttgatctttgctggaaatgaaatctgtactgaaccaagcaatctttggagataaatgaggctgcatacagcatcctacacatttgtggcagatttgcgctgccggtgagctcattgattactggttgcactacagt

SEQ ID NO: 5310 - DNA, 912 bp, Zea mays
gcttccatctgcatcgcggccttctcctcctgcaacctattgatcatggccatcgtctggctagccgcaactgccgacgcgctccgttcttcctcaagctctttgtgtagagcagccatggccttcctgttgagctcaagctgtctctttacgttctcgagagagcttcccccttcgacatcgtcagcgaggctcccgtctgaaggttccagcacacaatagttcctctcgagatacgggctcttgttgctcgtagcgttgctttcttcgttcggagcgtcaggagatccttcaatcgaagaactgtcgaggccgccccgcgcataggacatctgagaaaggagcgccttcacctcttgctgcgtcgttgaactgctgtccctggcagagataatttctgacggccgaggcgacgtcaagttggcccttgcaacgacggaggcattttttacactgccgttgctgtccacagcaatgcgtgtcggcgcggccgatctgtggttgctcttcgctgccccaccattcgcagaaggggcggcgctgtcctttgtaggaccgtcagattcttggacttcctcaatgcccaccacagaagctacaccaagaaaaatgcgtgcagttagtcagaagatcagaatacccaattatgcataccaattaccaatcacaacagctagtcacacatactcttctcatttggatggtctgcagctcgagctctcctacatcggggtcgtgcccgaggtcgtgcccatctcgccgacgcccaagcccgcgctggccgaccccgaggagccggagaacaacgcccgccggaacggggaggagtacgagaggaatcagttccctgacctaaatctcggggaggagaaccagatcattgtcttccagtacaccaggctgcctgccccg

SEQ ID NO: 5311 - DNA, 759 bp, Zea mays
atacctaagggctcttctgtgtacgcatgcgcggtggccaagaagctcctcgaagctgtggagataaagaagcaggcttataatatcttcaactagacataccaatcataatgtttatccagacaacttagcatgctggtctgctctttagcatctaataaggtgcttgcttatcacttatcagagactgaccacattgataagacttctttgatgaatgctgcaaactttcttgatagcttcttcatgctgaacttcttgtcttcttttttgtacactttaacagtcatgttggaatatgtggtgcttctgatttgctggcattgccactcaaaactttattatgtttaaaaccttttctaaacttatatagcagatcgattccaatacccaacttgcatatatcaggctcaggtatagtgaaggtgtttgtttagcagggaatgctacatctcgattctataaaagctggtatatatccaataatatgatccgtgtgaaatttgtattggagttatgacacagaattgtggtagaaactattactgcatgtggctgggaatctgggatgagatccttactgtgctatacacaggatgatcgtggtgggtttctcactttctcctacaatcacacactcacaatgcggatgacgtctggagatctacgaggtaccttaagtcctgggggaatcaatttggccagccacacccgtattagtcaagatcgccgtgattgcagaggctgatgaactggagc

SEQ ID NO: 5312 - DNA, 757 bp, Zea mays
aaccttcctgttggcctcagacatgtgacgtccctgaccaagctacacgtagcagatatggcaagccttgaggccgtggatgacattgctacgctgagggaactgagcgtctggaacactcctaatttgaagaggatatcaaacctgccttcccttgaaggtatcaacatgtgccactgccctatgctggagagcgtggagaacgtagacgggttacgaacagtgcgcatctttgatcatgatttgcgggacatgcccagatggatcgaggcgcatgcttccaagcttcgatcgctgaatttcacaagcacagctgagctgctgaaaaggtgcttggttgatggtccggactggtctgtgattaagggcattaaggaagttcgtgggtactccactggttgcagctacatatactacaataggagtccttacatattcgagagcaatgtgagtgatgaagataacctcggtgtcagagaggatgaagcagatcctgataatgttgatgacatttcagtttcatcttcaggcgccagttatctagaaatcagaggattctttgactcacaagtgttgaaggaaggaactaacagggctgaagaaattgtgccacgtgggagttttgggaggaccatgctggggctcactcatcgtcgcctgcataagctagcagaagttgctcctgaagatgatgaggttgaggacggagcagattcagctatcctgcttccttctaatccaacaagagctatgacat

SEQ ID NO: 5313 - DNA, 706 bp, Zea mays
agcacgccagccgctgaccaaaggcgtggtggcgacgtgcatgctgggcgcgggcagcttcctgggcgacgagctgctgtcgtggtgcctgcgccgccccttcgtggaccggctccccgcgtcgtcggccacgttcgagtgcgtggaagcggcgcaggcgttctgcctcggcgcgccggacctgcggttcatcaccgagcacttccggtacaacttcgccaacgagaagctcaagcgcacggcgcggtactactcgtccaactggcggacgtgggccgccgtcaacatccagctcgcgtggcgcaggtacagggcccggacgtcggcggacctggcggcgcaggccgcgccgccgttggtgggcgggcccgacgacggggaccggcggctcagacactacgcggccatgttcatgtcgctacggccgcatgaccacctagagtgagcactgatgagcaggagggagggaccatcctaggctcctagctgtgccggccgcgtcatggtgactgtacagtgtgcactgtaatagtatattgctgccagcttttgcgtaagtgaattagtggttccgaattgtcatttaaagaagaccaataaaatggagaaataatttcttagtcggatccaattgccttttcccccaagaatccgaactctgaagtacttctgtcggcctgtatctgaccgcgccattgcggcctca

SEQ ID NO: 5314 - DNA, 725 bp, Zea mays
acatggtacaacttaatgtgcaactaaaatcagcgcagaaattaccttaacatctcgtcctccaaagtccctatccccgaaaatgttcctaaagaacttcataaggaacaaaaataaaaaagttagttttagcagatttagaagagaactaaagtgtacacatcaactagaagtcatcagttctgaaacaaagcaatggagacaggaaatagaaatataatacccattaccccagtagccaacaaggaattgcgtggcaaataacaaagtggaagaaactaatcgtcctttctgaattaagagttgtgtataaaataaaatgatccagtattgcttccagatcagttatggacttgacgtagaataaactgtagcatctattagataaggcataaatcacagtgccaggtaaacacatgtttccggtttagatcaaagaagctccatgaaataagcatgcaaaatgaaataagcttccatagaagatgagttcttctgtaggctcagtgagttatattgtatgaagttgaaaagaagcaaaccaacaactaaaacaggaaatctttagggaatgataaagaaatttgtaaaggggtgtcatacatcattcattccaccaccgccaccgccaccaccaaaaatatcctcaaatggatttccaaaaccaccctcgaagccagttccgcctccgccagaagcagttttctcatactgctcagggccaa

SEQ ID NO: 5315 - DNA, 697 bp, Zea mays
aggaatggcgatgcgatttccatggtgttttttcagtttttcggggtcagggctctgccactgccagaagtagcacgtcccaagtacttttcaatgtggatgggttacataaacaactataagaatagtaaattactaaatttccatgtggtgggtggtgacaccatcacagatttttgagctgcttgctcaagcgtagaaagagtgagagaaagggggagaaagagaagaggtgtccagtccgctgactcccggtttgcttgcgatgttcaggggcggtgggtggcgccacggtgctcgagctgaggcaccacagcttcagccctgcgccggccaacagcagggaggaggaggcggacgctctcctgtccaccgacgccgcgcgcgtctcgtcgctgcaagggcgcatagagcactaccggctgacgacgaccagctcgtcggccgaggtggcggtgacggcgtccaaggcgcaggtgcccgtcagctcgggcgcgaggctccggacgctgaactacgtggccaccgtggggctgggcggcggcgaggcgacggtgatcgtggacacggccagcgagctgacgtgggtgcagtgcgcgccgtgcgagtcgtgccacgaccagcagggcccgctgttcgacccgtcctcgtcgccgtcctacgccgcggtgccgtgcgactccccctcctgcgacgc

SEQ ID NO: 5316 - DNA, 736 bp, Zea mays
ggtgtcgccaagtacgggggaggaatgagtgctgaaagccggcaacggtggcatgccaagtagaggggaggaactgttgtgaagagcggcggtggtgagtggtgacgctgtggactgagctatgcgtatcgctcatgatgagaaaaggtgcgatctcaggatcttctagctggtaccatgcaagaactagaagaggagaatatctgttctctgtattcatatgtagtttacgaattacaaaatatataggcacgctagattataagagataagcacaggtaaagtgatcctagaaaactgggcacgcaggcccgaagactcggacgaacaggcatgaaacgaggatctagccaactgactttgtacaacgtttagcaatattgacaattcaaaaatacccatgcatcaggcaaatgaaggacctgttgtttgattgaatttgagtagctggagaaacacacctcggctgcatgtgttggtccgccaggaatctttccaacctccctatgcagtgaactttgctttcctacttgttgaagttggagattcatttatgcaagtttgaatttgcattcccattatgtaaacagtcgtgatattagtacagtgtgtaacggccaaactgccaacaatattgacttggaaacttcaatactacggacagctattgctggaatgaaaacatgggggagccgaagtgttctttcgtcactcggtggttttaactccctttcgt

SEQ ID NO: 5317 - DNA, 747 bp, Zea mays
tggttggtgcgatcaggactagcttgttctggccaccagcttgccagctgccgtctcctgcaatcccaagcggggatgaatcggtaatgaccaagttaatgatgctctgcactcgtgtagcacctatgtgttatgtccttgtaatgttatatttacgccaaggtttgcagttcgtaggttgtctcctgtaggtaaattgtgcagggatggagaataggaaattatgaaacaccagtacatcgatcatgcgaataagaactgcacagtctaaatccaagtagtaattcactgtctatctgttacttgggagtataaactttccttggaatacttatattatatgattatatttatttattttttcaatagagctaaaacacctgctttctactaactgatgcctatattaccaccggatattcacaagctaaaattctatatcactttcttgctaactgttatttctggtacattgcttatacacaggtggaacaactgtggcacagttgtgctctggacttgaaaattcctcaagatgttagaaacaggtcccattacagccttctgttcaacaccatcagcaattcgtatagagaaaatgataataagttctatcctcaaaagattggcattgaggaagcaatcaccgcaaccttatcacctgcaaaagatgccaacacttttctggactgcttaaagaagcataatttccctttctctgatcatggactgcaggcatgcaagctg

SEQ ID NO: 5318 - DNA, 748 bp, Zea mays
tttgcatgcctgcagaagacaatactcaaaggtatatgttatgttatagcaatgaacattaatccaacagtacttaatgcatgatacatattctgtaaactgaaatatgtaagcaataaaagatttaaatacatcacacttactaggataatttttgtttcatccaagtccctctgaattttcattaatttgtcagcttccgcaggatcctacaatgatgaacatatcatgagtagtgtgaatatgcttctttatgaggcagatagagtgtaaaggaatacaggcataatccaatatcaaccacataacagtaacaaatttcattcaaccacaagcaacacatgatataatattaaaaagttagcatgtttttttctgggcagtcaccagagaagtccagctgaataactaactctttatcatgaacaaagtgacttgacaacctggaacaaccagatgcttatacatccaactcatacaatagtgtccaatacaacaatcccaaaacaatcttgtggcatcgaaaacaaatgaacatgtcacattgcaatgaaggtaccggaacaaccatattattggaatccaacccatttatctgaccttccatagaaaacaacccaacggtgataatttatacaagcttagatcatttaacacaaggacaaaaagtacttatgttttcacataaaggtttgaacctgaaattttgtcaaggcgtctgtcaggaaagcccactgttgagtttcat

SEQ ID NO: 5319 - DNA, 728 bp, Zea mays
aaggctgtttgcttgccatggcacccaactggtgtgtggtgaagatgagagacctcacggttgcttccttcctcttttttttcatttcacttttgctttttaggctcagtaccctccagtaaattttgctcttctttttgtgcacactttttccctcctcctttcagttgcttggatggatgcatccctctttcttggcatcctccttcctctgacctcaccctcccagcatcggatgcgctggaaaaaaggagaggctaaaagaaactaatcagccatgatgccttttcttgtatgatcctgaaaagcacaattctatgttcagtgaacctcatagtaagaggcactgtcggtcacactagaacaaactaaacccaaaattacattgcatagttttatctgtgtgtgtctcttattcttgctgaataaaatttgctatgagctagctactcgtattattattgacgccctacgtccactgaaacattacacggtctctaacatgactcccgaactactgacatcaataaaaaattatctgtgtttgatggaacgggtttatacttgattttcgtattttattatgagatctagtaataccaacctagtggtatgttattcccgatgatcatgaacactagagttatgtgtcaacaacacctggcagttccgggatatagaccttgcatcatcgctccataaatttcgacgttgttcaggcctgttca

SEQ ID NO: 5320 - DNA, 777 bp, Zea mays
ccccgtttcctctataggcgacctgcagactttttagacagttcctgctcctcttactaatgaacgaggcatcatcaggattgttccgtttcattgctgggcttgcaaggcatcaggttgttgcaagcacccttggttcattcggcattctgatatgtatgcttttgggtggattcctcctggcaagaggtatatgcaaaaattagttgactcaaaatatggtatttaaatgtaaaaatggcttgaatttcctaacttcagctattattcatctgatatggcaacggtacttatacaggataatgaattaagctattcctttgatttaacagagaatgtgaagaaatggtggatttgggggtactggatatcacccctgatgtatgcacaaaacgccatatcagtaaatgaattcctgggtagcagctggaataaggtattaattatattttcagaaaggtatataaccttcacagtatagttaacaaacaatgactaaaccttgtttatactcttatatgcagcaagtaatccccggttcagcagaaccgcttggaaaactagttctagaatctcgtggactttttcctgaggcaaagtggtactggattggtgttggtgccttgcttggatatgtgctgctattcaatatactctacacaatctgcctcacattcctcaaacgtgagtagatggtattctgcatatacaactgtacaaggacattattaatacatactgtaaacaatcaaatccaaaccttacgaattacgctgt

SEQ ID NO: 5321 - DNA, 657 bp, Zea mays
cactgaactaaggaaatcaaaccagaactgcttggcaaaaacacatttgaccaacaagtgatttatagtttcagcctcttggtcgcacaaggggcattgctattgctctggctggtctagccctctttttctgagcctgtcagctgtccaacacctattatgctccacaagccaaataaagaacttgcacttcccaggagcccaagatttccacactcgttctgctggttcgaacttaactgaaccatggaagagagcttcataagcagaactagctgtataatcccctgaagcactgaatttccatgtatgtcgatcccttattccaggctgaagcacaactgcatcaagcacttgacaaagttccaggaattcagcaatgactcttactgaaattgccccttttacatcggagatccaatggaaaccagggagagcatctttgaccaaccgtttgttggcaagacgcaagggcaccatatcaaacattgcaggagctatgtccttaatacatctcccatccaaccatctgtccttccaaaaaagggtattgactccatcaccgagcttagtagtaactgctgcaacaatcagattttgtaccaccttacaaacatgagtggggaagtccgtccaaggcctactgggatatgttat

SEQ ID NO: 5322 - DNA, 732 bp, Zea mays
ccatcgtcgtcaacatcctcctccacgggaggcaaggatgtgcgttctttggatcttggactttgaacacaagcaacagctagcaacataaaaaaggggagaaattgggtcgaggaactgacgcgcgaactgattaagtggttggagcaggtggtatatagctccagtagtgcatctgcatgtgtaattgttgatggattggtatttcttgatgatatcttgctcatattagctcacttgtgctttcgttaactgatgtgtgtttcttctctttcttaatttgatctttgttccgagaatatgatattttgcttattgtaattgtacatattctgaatcatctctgaccaagtccagtaattatttaaggaccgcaccatcctctctgcatacgatatcagttcgtcccccactactgtgtgcacatcttactgtttgggtcatttaaattttttagtttttcttgaagcactatgtggccccagcctccgggcaacttcgcaaggctctccccccaaagcaaggtagcaccgtagcagaggcagttattggatgactggaatcaggtcagatcagaatcagaccctagtctttctccttaacatcagatgcttttcatgggtatctctacactgctactgtatcctcatcttggctcttggttgttgtgcaattctttccctgctgccacatctgatattctgattcgcttctgcttccgttgctcattga

SEQ ID NO: 5323 - DNA, 733 bp, Zea mays
gctcatctatgcgttttcttttaatcatggcttgcaaactacagcagctggattatccattcaatcattactactccggcggccgggtacgtcgttggagcccatgggttagcatcccaactcccaagtgctcgatgccgctcttggattcggtgtcgcgtacggggccccacctgccagtctttggtcgcatccagagtccccgtgaagtgcaaaggccaaggccccggcccccgggacgccacgccaccgacagcgcgcgcgggcgggcgtgggaatccgtgggagctagcctagacgtccacaggatcggatcgcattggcagcgcgcgcggacctgatcggaaagaaagggaccgcgtaacccacccacgccctctgaccccgaccccgaccccgaccccgccggcgaggtatgtggtcgcggtcctcacctcagccgcagcacggcgacaccgcacccaccggccgttctccgatccccggcgctgcgctgaacagaaggcggtgggtgtcagctgttcctgacgcccgagtcggacgagaccgtaccgacggcggctgtttcggtcgctctcgtcgaccgtcggcgtcgcgtgcggccaaagcaggccacgcacgcacgcacgcacacggacaaaacaaccaacttgtcctcctctcgtctccgcgcaagggaagagaagggaagggaatgggactgcaagtgcagcccccgttcatgctacggcca

SEQ ID NO: 5324 - DNA, 766 bp, Zea mays
agatgaggatgagatggtagaagaaactctagcatcccataatcgacaggccatgacatatgcttacctttgtgggggcacagcaccgccagaagtgcacttctataggagacccttccggcacatagatgggttttctcaatgggaagaagatggggaacctgacagtgttacggcatgaagatacagttattgatgtcgaggtttgagagattctatttccagcttttgtaaagatcaggttgcaggttaccagctaaacatgtttggtgtagctgtgtttggctcgattccaagatgaacatctttataaagtacagagtcaaaataaccagcaaatcctgccaaattgatgcgggatagtcgtgtgagggacaacttatttatctatggtaataaacaatatgaataataaattgcaagtagagtatggttgcataccatgcacaaggcatgaacccatatctggcagcatttcaaattgcaacttggtgtacctttggttgctagcatttggtgagaaatttggatgggtgaaagtaaaaacctacacaagtaaaggtgatcaccaaatttcatgtcacaaatagcgaatggaatatggcagtgtgtaaaactgtgatatgatctgaaccgatgaaacacacacggcgggtctgatctctcacctgttgtggaggtgcaagtgtcgctatgcggtgtagtttgacaacatatgcggtttcaaaatgtgcaatgtctttgtgtgctttgattctacaggtcg

SEQ ID NO: 5325 - DNA, 719 bp, Zea mays
gcattattcccgtttccaagcttttcagttgctagcatttaaacaagtgcctaaggtgtccaccttgttgtcttgtctaatttgatttccattttgcattcagtttctcgtacaatagtattaacatggaaggcttattatttttgttttaattattgcagctgcgagattttgccttgtccagtattggttcactccataagcgagctgacttaacaaaaaagttgcttgtcttgtcagatgtggaactgcaagatctggtttgtaacaaggtgcgatttttcacattttagtttgtgcttgttgtctacaaatcatgtcagactcttttgttgtttgttaatggtattcccttgatatgtgtcagctggatatgcttttttgcttctcattggtagtctattgttcaatgtttgatggttttccagtatccagacctaaattaataatatagcatgaaaaccgcatacatacatttggtcatttggataatttgaccattcaatgactgatctgatagtaatttattggaaatttccacacgtattgtatgttttttaggttgggtgtacaggagcatttgataggctgtatatatcattttaggttaagttttctagcttctacctcttgtcccccttgtgaatgaggctgaaatttgatgatgtgagacttacatcgagtcccctttacctcggtggtcttagctgcaggtcgac

SEQ ID NO: 5326 - DNA, 746 bp, Zea mays
taataatcccggttgaagtcatgctgctgatacatcttttgccctgtttataggccatttaactgattagtttttttccccgggagcatgagtgctatgcattaacattgttttttttttaccggaaatgcattaacattgttgtacacaaatgttatttaaatcatattttttttttcaagatgagtacaatcattagatgtttaattggggaactgttaaggtcccattgggtcttgggactaacctgtattgtgtcctttgaactctcactctttactcagttatgaattgaaaagcagagctcttgtcattttccgttaaaagaaagatgtttagcccgctaggtgcttgaatgtaacgtagtttagttacaaagcactcactttaccatgggaagtgatcttggttctatcataggactaggtcaactctaatagtaacaactgttcttagtaaaactctgttaattggctcagctgacccctgatcctggcttgttcaacaggaggaaaagagaaccatggtgaactctgctttcggtgatgacaaagccggcggccatgcgacccggctcactatggaagacttgcgatacctatttaggatatgattgcgagggaactctctcattgcctcggtcaacttgtcagggcatgatgcgttgtaccttgtaatcgtagtccggcaaaagggcggtgtaccattgcgagggtaggctcattggtccatgtccgccacgcctt

SEQ ID NO: 5327 - DNA, 666 bp, Zea mays
aaaatatgggtcatttaactactggaatggctcctgcaactgcaaatgcagaaatggttaattcagatttgacttcccagaaccaaatgttgtcttctttaccgcaaacggatgacagattagctgatggaattgaatccaaatcaggagaagatgtttcacatggaagagtgaggtcttcggctgaaggtaggcccttataaaaggttttcctgtttaagtgaaattcgtcaatcacccatttaaatccctcgagttgtgcccagaactgtgaaactggaaccaaatttgtggggtctaaatttgtttagatcaagtcgtgcctatatcttaataggtgcgatgcatttgagatctggaaactgtagtacagaaatgtttgtatttgatgtaaacattttttttgtttgccccttgcagctatcggaccacaggatgcacagcttggaccagtgcaactaaacgctcagcaacttgaaagtatcagcttaacgcttgctctttgtgccatgttcgctttcccttttacttttagatatcacagattctgttttttttttttttacttttccacacattcagtgatttcagtcatattcagattctactcttactaagaaaagtgtaagccaacctaatgaacctaatggcattgttgttgtatca

SEQ ID NO: 5328 - DNA, 745 bp, Zea mays
agaaagatctgagctgttgggtgaagcacatgggcagaatgatcggcattttccctgatcatctacatcatctgacaggcatcttgctgtacctgatgttaagcataaatattctccagatttggatttgtcccggcctttgcatgcccaaccagagataagagtgaccagtgcagtttcagatggtgatgctgtttcatatgcatcttttttagcaaatattgaattttgaagaaatcatttaagctaacaaaataaatagatatgacagtatatcacggtttaagtaaaagaataacctgccaagcgtatattctgaagaaatgaagttgcctgaacatcactcagctttgacaccaaccatggtaaaacacgttccaataatttcaatggcataacacacaaacttttgtatgaaagttccctttgcttctcaagagagaagagcatcctagcttgaggaagcacctaggtaagttcaactaaacatgaggcactgaccaataaggtaaatgttccaacaaccaagttacctgactactgagtactaaccttggtttcttcattgcagaagtgtttttcgattgcctccaatattttatcagcatgtgaacacagttttgagtagaagtccaatgcagttgattcggctcctgctatttggatttgctgaattaaacacctaaaattgttaaacctgcattcttcttcagcatgctcctgcacaaaggacagctcactatcg

SEQ ID NO: 5329 - DNA, 668 bp, Zea mays
gacatgtgaactgcgaagccattgatgagatgatggtagctataaagcttctcgtaagttccttctactaaaagcgagtctagcagcttgtcatggtgtcctcggaggtggagggcatacgatttgacagcctcgctgcaaaatcagtaagcttgaaatgaaggcaaaactattgtgtttgaaacatgctaagcgcaagccagagtgcaatgcaaaaatatagtaaggaactttcagagtttgacatcaaggatcctataggaaaaataacggcaggcaagttcagatagcaataaagcttcagaaacgaaattgaacaacaatcagtcttgagagccatggcaaagaaaagcatcagcgagagtagttcattacctggttagatcaatttcctcgtccgaatccacagcggttgctggaaatccttggacaccgcctctgtagctaacgaccggatccccttccatggtcacgatgtacacatcatgcgttccatgggccgcccattgcacttgcacaaagataacaagcaaacaggcaagcctgatcctcctcatctttcaccgatgtcagcaccgcagaaccttccaaatatagagagccagaaagcacgaggtcacgcaagtattcagcacaaacaaacaaaaattgaaaaagcatgcatctgc

SEQ ID NO: 5330 - DNA, 743 bp, Zea mays
atattacgccatcttggtgccaggaccatgcggctgatgactaacaaccctgccaagtacactggactcaagggctatggtttaagtgtccttggtagagtgccattgctgacaccgataaccaccgagaataggcgctatatggaaacaaagcgattgaagatggggcatgtttatggaagccgctccagtaatcatgcaaacggcagtggcttggctggtgctggcgagagagaggagcaggatcagaatgacagtgctggcgtgcaagagcgaactccagaagcttgagtgcctaactctgcgttccttagagctgctccaatgggagtcttaaaaagagatgcatcttaaaatatagggctccatggcaaaaaaatcactccaacggggacctcattttacaaaaactcaggaaacaaatttgggctccggtctcattggtcccaaatgtaggacttgaaactatcggccctattctcgttcccacgcccccacgaccttcggacttttcctgttgcattcgttctcaagccgtctctcccacaaaccaaaccctctgcctgtcgagaagcattggcgagatggatggacggccaccgccttttcctcgttcacggccaacaggttggcctcgttgaacttccatgaagatggcactagatgcgatagggagatcatcagctgtgtcctctccgccagatttgcgcaggcctcctgtggccgtggctgcagggcatgca

SEQ ID NO: 5331 - DNA, 753 bp, Zea mays
agtcgacctgcagttggatggatacaagagaagttctagttgtaaaacccagtggctgtaatcaagtagaccctgattacttggaatctgagaagcgacttctgaagtggttttctcgacaaccagctgagataatagttgctacaggatttattgcaagtacagctgaaaacattccaacaactctaaaaagggatggaagtgatttctcagcagccatagttggttctcttgtcagggcacgccaggtcactatttggactgatgttgacggggtatttagcgcagatcctagaaaaggtttcttctaagagagtcatgatttggcttttgactgtttctttttgtttgatccattttaaaccactgatgttagcattaatatacacaattgacttaggggatggatgtagtgcaaatttatgtttgggtgctaatccttgttggcaaccggcctgcataggtgaggaaccaactcacctccacactcacacaacacttggctagaggtagaaggggtgagcacagaacgcagcacacacaagtgcagcaaactgaactggctgctacctattgcaatttatagagtatatatagaagtactggtggtacactagtacctgaactgagaccagccccaactactctacatggctgaggtaagccatgactaagtgtcctattgctatattgctacagtaggctagatagatagatggacaacaagagatggcatcatattgccaagtccct

SEQ ID NO: 5332 - DNA, 816 bp, Zea mays
cacagatgaaattttatcattttaacagagaatgtgaattccaaaacacaaaaatgacttccagttgaaagaaaacagatgtgacttacacaaagcaacaaaggaatgcgccagatattggaaacatcatacaaagtgataatatttgctgcctgcaaaaaacaatgaagaattaacttcctggagtgaagtgtctacagcatatgaagctttgaattaaaatgtttccctaccggaacatggcaaaactgggagagtttctccttcacattttcctctaattcctgttatacacagtttcagttataagtactgccattaagggactcagtaatggtcatattctaacaatgtaaaaaatgattagtttgataactaaccttagtactgcgacaagctaaaatatttggggtgagcccgagtcccctcaaaccacgtacactatgctgggttggctttgttttctacaagagcaagcaacatagatcaagaataaggtcagtgcagccaaacagatttattcaaacaataactttaatgatcagttaataagcagtagaacataactaatgaccaagaatacctgttcaccaacaacattcaaaactggaactagactgacgtgcaccaggcagaagttgccaggacctgccaagtgtcaaccaaaataacataaaaaagatatcatcaatcctgcttactagcagatggactagagattttacttgtcataataacataataagtgtgaagtttctcaccaacacgataagagaactgacccaaagcttcaataaatggcatagattcaatatc

SEQ ID NO: 5333 - DNA, 754 bp, Zea mays
taggggtcgctgggcaggctgttggaggttgtagcacgaaaagatctgttcagtgttcacattcttctggcccattgaatgcgagcgagggagcgtctgcgatggcgatgcgcctccccgagtcccaccaggccaccaagttgcatccaaactgcatgctccaaatccaaatgcaatgcaatgcaacgcagcgggtacgcacgtacgtacgtactcctagtctcctcctacacgcgaatcatgcatgctctgctcgaaaaacagaacatgggctgcggggtaaaagaccacagctactcgctcgtagtcgtagtacagccacaacatgctacatgcacgcacagctgcggcctgtggtcagtgggtggccgatcaaaaaataaaaaaaaactgcaaaaggctacaagtagccggccgtgcctgtactgtactgccactgaagatatgctccagacgcaacctctgtctatgcgtacccattcattcatgccttttggcacgacggcgtccaatccgtccgtccgtcagtgagcgagagtcttctcacagccgaggcagagggccgacgcggacatgactgcgctgcgctcagggccaatctgggtggcagcactcactgcacctcggtcgcaaatctcaacatgcccggcgccgcaactggtccataccctccctgcccctgccaccgctcggcagccagccactgcgactgatctccgcggggggccacccgggatgtctgcaggcatgcaag

SEQ ID NO: 5334 - DNA, 780 bp, Zea mays
aatttcagcacagaattcaactcctctgccagtctacaattctcatatgccgggtgctacaacacctgccaatgcaaattcaacaaacgtaaacatgatgccttcacaaccatcagttagtgactccaagacattggtacccttgggtaatggattgccatctaactcaacttttggtgttgaccctttttctgtgactctacaagcgaaacaagagtcagctttgatccccaatgttccaaataatcttcccagttctacagctcctgcctcagctgctggacctcatcaccctcctaagccaatgcaggccggtcctttgcagggtatatcgtcgcttccttctcatactagccagttgccacacagtcagccagctcctaggcaacaacaatttaatgctattccaagcactccaggaccagtgggtgcaaatattcctggtggacaaattccttcaaacccataccaatctcaggccccatggccaaaaatcactcaagtggatgtcaggaaatacatgattgtatttatcaaggtagacagagatcgtgatgggaagatcaccggcgaagaagcaaggaatctatttttaagttggaggctgccaagaggtacatcaaatgcctctttatgtttactctgctctttctagatcctgtaatttatagcattgtttctttctgctatgattctactaactgcattttcagtaatccaagtaaataattagttgataactatatggacagtataacctgcagagcagacaagcaaact

SEQ ID NO: 5335 - DNA, 782 bp, Zea mays
agcctgaagcggagccacaaccatctgttgatcctttggaagaagcagtggaacctcagccacgggcgactactgggaatctattagtatttcctctatgtttcaagaacattctatactttagctcagtgtctgcttctttgaagcctcatgttttacaaatatatgatgaattgcagaacttggatgaagaagtaaaccccatgattgcagaccttgaaacaagcaatgcactggctcttgctattgtggcaccaggttcaatgtttatagtatccatgcactgttcaatagcatactgtgcactacagcactagcagcaattttacattggtgctattttgtgcagagaatacttacttaaggaagatcatgtgttagaccttgtgcactatgtagtaattgtctcttaaatgcaggtaatgaaaacaagatgccaacttctcaagacttatttgcccttgacaagactggatgggaattggcactggttactgcaccaagtaaccacacaaatcaacaagtggacaatcaattggtatgtagacttttactatctctagagaaaatatgatcatatgaatttcacatagattattatctgtaaaagatgttgccataagttataacagaattttagtaaaagcaatcagagctaaattacttacttgcatttgctcaacaggctgggggatttgacaagctattgctagacagtctttacgaagacgaggcaaggaggcagcaaatagccagtgtgacctacacggaagtatgcagag

SEQ ID NO: 5336 - DNA, 706 bp, Zea mays
aagccttgtaattaattaactaacaagataagatgggtataagttgccttaaaggagacatgaaacagtaagctaggtttaccctatgtcaggactcaggagctcagggttgttcaggaaaaataagaggcccattgtcatattcctatatataaccacccaactaagacgctaaaagatattaattttattttatgatgttactacatgcaatccgacttaaaacagataaaaggattgttgatacgcctttcatttacatgccaaaacgtcttcaaacaagcaaataatcttcacacaaaagagtgtcattcaggcatcagtcctggccattcgataatcctttcaggacttctctgttctaaaatattaagtatgtgtaaggccaaattgaaacaatccctaaacactaatgacattaccgtttcactagttgcacgatcattaaccatcaatggtatatatttcaactgagttatagatgacatggtggaaacctagattgctactcaaatatacagatacacaaaacaacaaacaatagcagcattatgagaagttcaggaacaaaccaagacgatagatattatgaaaattggcaaaagaacttaatttggtgagcaattcgctacccaaaatgccctaatcaaagagcatattttttatcgtataggactagttgtcagtttagtggttggtaagaaat

SEQ ID NO: 5337 - DNA, 754 bp, Zea mays
cttgcatgcctgcagcattttctcgggatatgcgtatgcctctggttctctttcagcacaacgtacacaaaaggcacgaaaggaaatcgtgcagaatttacaacgttcacgtaggagttcaaaaggaataggcacgccctgaatgttcagaatactgattaatactctgttgttcccgtttggatgaagatagctcaagagaaattgggccggtggcataagcctagatacagttatacaggctacaaagcacaaactggtctgaaacctgaactaaataggaactttgcctttctgtttgtaactctgtacgtttcttgactcgtgtttactcacacttgctgaagggaaggggcgaaatcttgacacggcagcctcgcggggctttacaattatctctctccagtttgtttcctgcgtcaggtaaaacgaggagtgtgattgagaccaacaaccccccacgagacagatttttatgccatgatagcgagttacgtccatgtttctggaaagtgcatcagaatggagaagcaatggtaggaaacggccaaacaggtaacactttaaagagtaattggactggggattggcaactgatgatgctcaaatgataagagatgtaccatggaagcttgaaggtgtctctccagctaccctgcttagcacagttcgcatgtatcttgttcaggcgcacaattatctccgcgaatgttggcctgacggaaggcatcggatcccagcattcttgtatcaa

SEQ ID NO: 5338 - DNA, 739 bp, Zea mays
ttgtagagatatgaactgaggcggcggcgatcgagcagcagctcgtttgacggttgaagctctgggccccacgcacgtgcgtgattaattgtgtgtctttgcgggccactgatgaagagaggggaaggaaaggatagatggtggtggttggatcaaacgacggattgtcctgagcaaagacgactgggtttgtccaaccagatatgatctactagcagctagctattcttcctattcatatcacatcgtacgtatcctctgtgtgtgttcgcagatgctgcgttaggtttggtctgacttggtcactcgttgagtctagattcagttactgcatggctgcgtaccatacgcctgagaattatatcttaatataataagggctaataactatagttgcattagaagtaattaaagaaaataaaaaagaggtagactgaatgagatttcgtcaaagctcatccgatctaatcaactcatcgtcagatgcttctcccgtatttcccaggtctacatctgcaccaaagatgcaaccgctaacgaccgcgcgcgcgccacaggtaataactgaactgtgccagtgtgaatgaaactgtttgttttattttctgatgatgacaaaccactgtactgttctggctagctgctgaccaaaccatcagtatgtgtacaatatacaagacttatgtcaaatgcgtagagtatatctaaattataatatagatgtgtgtttactgataat

SEQ ID NO: 5339 - DNA, 671 bp, Zea mays
gaaatgagccaccaagtacacataagaatttatgtataaatgggacactaaactacttttggaagtttctggctaacaaaaatattaaacagtgcaaataagacagaaaacaaatattaaaaatcatcttttcaactggaaatggtatcaagggaaattttagggaaaaaaatagaagggcatgcattaggcaatgatttaatggttcttctgatgaacagatcagttaaacattaaagctctaaacctatcttccgaggtatgttttaactgtcagagttgaaggggaaaagttaaattcctgacaaatttcattggaaattttactatttatataaatgcttactattttcaaagaaaattccgcataattatgttgccacagctttgattttggaggaagataattgtcctatctctgtaacatttttagaatttttaggttgctttgacactgaagttgggaaaatagcaggatatcacttagctgagcgtttgcactagatctctccatttaagacttcggtaaacagaatgatgaatgaatagaacagtgacgatattcacctgaacaatgatttggtttcctctttttccaagaggcatggatgatcacaaagagcaagaacctgcaaggtaccatgtaaatatcgaagaaacaaaggtggaat

SEQ ID NO: 5340 - DNA, 820 bp, Zea mays
agcttgcatgctagacaagaaatcctgagcatcaacaataaagacaaccccagcagctttaggcaggacttcatcaagcttgggcttgagcctagcatgaccaggaacatcaacaatatgcacaggttttactttgcctttctgcacggaagggcaacaggaaggtttagcagaactattgcagtcagcaaatgcatgtttcttcataagagaaaaagctattcacttcatttttatctcaatatgttggaaaaagaatgagctctagaagtttccataccctttcttgctccgaatgcagcacaaaagtatcactgttttcttccattgaagtcacagttccttgatgtgatgatccgtcccgaagctggcaagcacagacaaattaggagagcaacaaaagattgtataagataacccacctacttgtaaaacttgctattgatacaaatgccaaatgatctaagagtagataaaaggggaaaatatcctggttagtcaactaaaaacaaaccaactaatttatatagaaaaaaggaagtcaatcagaataacaaagatatacatgtaagcatgataactagcagaactgatatccatctagaatgctaatctcacaccgtaaatagaataaaaaaatgaggttcagaaattattttgcaaacaagataacacagccttgttcttcaattgtaagaacacgaccaaaaatattggaagttacctggtagaaaatagtggttttgccactgccactgagcccggatagcactatggtgcttggtttagaggattcagataagatgctgcaggcatgcaa

SEQ ID NO: 5341 - DNA, 809 bp, Zea mays
aagagtgcaagacaaaaatcagttgcacatgagggaacaaaccttaccagacaaccactcaaagtaaaggcattaactttgctcatgaccaaacaacataactagcgaggcatgattatagtcttctagaattaaaaagggcctatcataattatactttaaaatgactaaacaggacagacccagtgtcgaaggctcccacatgagtgggattgaggaagggataaactgaggcaagccttccccgaaatgcaggaaggctgcttcgaacccgcgacctagtgactcagtgaggcagcactcaccactacatcaagcttgtccttcagactccaaaattactgaaagaaaaatatttacctgcccatcactttgtatttcaggaatgatcttcccagcaccagtatgaatagtgaagctgaaatgtttgaagactaatttcagggtccataacaaaaaaaaaatgatgcatccacgtattatcatagttctagcattcttgtgtttcaagtatattaatattaaactcagattcaataactactgctctgcctaagttgtttcaacatagcaggtcccaaactcccaagcctgggtaaggagaagtgttgtgatagaattggcaagcccacgtaaaaaactcgatcattcttatgaagatgaaacacgaaagaagcccaaaaagaaatattagactcagattccccacaaaaccaaattaggcaaagaacaaaaggtctcaagtgcatttttttgtgtaattcattttaactgttttacaatgctgctgcaatgcattacctatgtgt

SEQ ID NO: 5342 - DNA, 740 bp, Zea mays
atctgaattaacaatatgtttcctttggtattcatcaaacactgggggcttttgttcagcagtaagggcgtgtttgggaaggattttagtccgctcaatccctttccaattcacttgctcccaaacaagtcctaaaagaagtattcccaaacaagtcctaaaagaagtattactctgtcgagcaaaaaaaactatattcttggttcacacgattatattgatcatgtttttatctaaatcatagcagtttatcggccaaacttctaaactgcatcaatacgttataaatgctctatacaaacatggcaagaaatttaaaataaagttccaatttgtttcattaacttaagatataccttggttagactcatgccacgaaaaatctaccagttccatcttctcaatcatctttcaggttgatcagaacttgaagctccattaggaggcggtgtggacaagttgctagcagacccattttctaccggtggaggatttccccattttctatctgattccaaaggttccaacacaaaaacaccaccatcagtcagccctagagcaaactgactcgcttccgaagggtgtgccgcaaccacaacaggatgaacactcggactacaagagaaaaacatcaaagcaaccatcagcaatttgttcaaagttgaacacgactgtgttaaacacatgagttacttattacagaaacatttgaaagaatgaagactcatacaaaatgtata

SEQ ID NO: 5343 - DNA, 796 bp, Zea mays
aaatgtggtgcttgtttaagaagtcaaaatattcttcgacaagactagagagtttgggttatttcccacagccagatatggttcagaagttctggaaactatgtgaacaacagctcaacatatcaggtcttgttacaggacataccctcctgccttggatgtgtagcatattaataagtatcaaattgcaaaatagggtgtttgcatgatttaacagttttactaagtgtgccttttatgtttctgattatttaaattgattaaatatctgtgctcagatgaaacagaagatgaagatgcaaatgaagaacatattgaagacacaaacagggatgctgtcatgattgcagctgcaaagctagtgcttgctgatacagtatcaaaggtttgtgctgcatttttatcctgtgatatggttctcaagctttgtacttccaactacagttgtgtcaattaaccaccgtttgcaaaatattggttgcttccaattgttcgttgaccaataagtaaattttcatttctcttctgtttgcaggattatcttggtccagagattgtttctcactatgtatctcatggggcaagtacgacagagataatcaaacatctaattacttctctaaagaaaaatgcaaactttgacatgggaactctattttttgaggccttgaaaagggtaaatatacattggttattattattttttatagctttgcatgtaaaatacatattggtaaagtatgcatgaatggttttaattatttgtattttttgcatgaacaacaacatttgttct

SEQ ID NO: 5344 - DNA, 796 bp, Zea mays
aagttcagttcagaggaacgagtccaggtattgcctttgctacattttttttattctaaagaagattggacaaaatttaaaaccatcttttgtttattttcacttggccccactgttgattgtaggaaaaaggcaaaagaccttccaccctttggttgagttgtcatagttggtgcatataaatgttggctctaggcaatgctaaatgttggcagtaaacatatctatacagagaacaaggacttggttctgtgttagatagagtacattgtttgggtagtgctgcaactatgcgttaacacttgaggcatcagcgcagaggactatcctaatttacatgtagtgccaacaatcccacaaaagcttacctgcaaggggtaagacatcacctaaacattttgctaagaagacttcatgtaggtcaatggaactcttgaacccttgtccacccacaaatagtggtgcattagcccatatgagaatcatgaccttggccggatcacttcatacatgtgctttggtgtgggatagatgagtaggggtgacaatggccacattttacccgcgtgcacgtgggtaaaaaccctatagggtgcggatttgggtgtgggtacacgggtgcgggtttgattttcaacccgaccgttttttttctcgtgggtacgaaaaagttgtacccgtgtgcacgcattggatatatatatatatatatatatttatgtgtatatatatatatatatttatgtgtataaatatttatatgtatatataggtgaaatatatgtataattatgtt

SEQ ID NO: 5345 - DNA, 692 bp, Zea mays
aggagcacgggacaggtcgtcgtcatcagacgcctgccgtctgatcgatcacagcgacgacgacgacgacgccggccggccggccatgcccatgcatcgtgcatcgatcgacggccagccggacgcaccgccggatccctgtcatatattcgtcccacccaatcggccggcagtcaaatatatgaagagatccatcgtcactgccactgctacatgcatgcgctggcagcagcagcagcagcagcactgccagcacagcgtcctgatcgatcgacaagacaggacggcaggcgggcgtgccgcgcgcggccgtgcccctactgcttcgccgcccgcgcccacctcgctcgttgcacgccctgccgacgcgtcagcccctagctacgagtagctcggtcacgcacctgcggcatgccagccatcctggacctctgtctgccgcgggccgcggcgtcatcgtcctccactccattggctgctgcttcacctggctagtagatagctagctgagctgacgacggccattatatatattgagcgcccgggaagcttcgtcgccgaacccatgtcgacgagcggcgcgaggtcgtggtcgccgccgccgcggccgagccggtacgagtcgcagaagcggcgggactggcagaccttcacgcggtacctgggcgcgcaccgcccgccgctggagctgt

SEQ ID NO: 5346 - DNA, 666 bp, Zea mays
gaggctccacgtagtccaataaaacatgaaacatgtaaaaggcaagcaaaaatcctgaactcctgaagcatacgttttaccagatgaagcacgaaaccctaataagctcaaatcggggcaaatctgcttatccctaatccaacagcaaggccgatcatccaactctaaatgtgcgtgcaattcaaggttataatcgcgcggccgaagccgccaaacccatggagtcgtctagcgatgaactaagaggagggaggagcaggaaggaggcacgtacacgttttgttctatggcttcaacctctagctcctccggatcctcgtcctcgccctcgtcgtcggtggcggggaaaacggaggaggggtcaccagggaaggcggagtcagcaccggaggtgagctcgagctcggaggcgaggaaggccgcgaagtcatcgctcccgctcgacgacgacggggacggggacggcgcctcggtgaggctcatgggcgcggcgccaagggcagaaccgcagaagggttggtaagactggagggcgcttgggagaagctgtgaggaaccctagctcgggacgtttggcgagggcggtggcgaaggcccgcagggacggaggcggccgggtgcgacggtcgtggcgtcggccagggaaccctagcacctcatggaggc

SEQ ID NO: 5347 - DNA, 827 bp, Zea mays
acgaatgtaccgcaagtcaatatctcaagagtactatagctgttgacgatgctacgttactaactgatatatgcttgtgttctagatcagagatagcaaaagctagtagctagctcaagcagatccgatccgccgttaagttgaagactcttaacaaggagtacgcagcaataattaacaagctaattaaatacacgataaggctctcccttgacctctctatagctaacaacaagcaatgtactctccttcgcttcgctacttataaaactctcaagacagcagcagcagcagctccatgccatggtcttcattcctgattcctgtctgagacgtacgctagcttcaatgggccttcaaacctcatggtcatggcctcccagggcttctcggttcatggcggttgttggcaccggacccagggtagtcgttgacctcgatgtccatcctcaccgccacctcgccgccggggtctcgagctcccaccgcaccagcaccagcacccgcatccgcaccctgtataagtacacagagacgacgacgtacacagacaaattgtaaagattagctgggttcgttattggtagtagtgcgtgcgtgtgcgtcagatatttacaaaaagacttgatgatgacatcgacgagcagtcaactgacggacagctagcgtgcaagtagtgtaaagttgacacgattgtgttgttgcacgcacaaacctttatttttgcctttgtggcgggaaaggtgtcgtgagtggggtggggcacgcgaattgcaagtttgcaactgtgtgtgcgagtggccatgcatgtgacctgcactatggcc

SEQ ID NO: 5348 - DNA, 722 bp, Zea mays
agacatgcgccacctctggaactgggatctcgtccctgtgggcaccgggcaacgattagtataatgaccggttcctccccgcctaagcgcccggattaactagtagagcgccgcgattagattagtagtagtagataaaataaattaaagtcccatgtacatgtaagaacgtaactggatgtgattgtgcaatttggccactaccatcaatctagccggcattgggtttaggctaagaggttctagcccctctaatttccttcagttttctagctcccaaaatagctctaactctatttaattcagggggaggctggttgcatccaaggccactccaccctcttctctttcactcccagtgaattgtgtatgtagtgaggtgcattagtgcatagccaagtcggcggcgtcctgactgaccaatcacatggcaccttcaaaaccctggaaccgatcatcgtcctcctcttgctctgctcggatactcacagggcattgctcatccttcaccggaccgggagcagtacgtacaagacatgggggtaaattgcactgaaagctagcatttggttttcatccactggcagctatttttttttcaatgcatgtgttctttctttcctagctactgtacgttccaggggaggacctccgaccagccccggtcgtggcccagtaaagtgaagaggcccactccgagtacgcgaccgcccaggcgccta

SEQ ID NO: 5349 - DNA, 788 bp, Zea mays
tcgtaccatcacaatcgtgtccacatcacgtggacttcggcacttcgctgagaagtgtggccttgtcacctgtcagtaccatgatcgctaagcacagccagcccaggcgcccagcctacccaacgactgcaaaacagccaccgataccggcctctcactgagaggccagcccagcatggcccaactgccttttcacctgaggctgaactcagaaaagcctattaggtccagcccacctccgattcacctacattcatttggacagaggagagtctagtagggcctcggccgtttcttcgtctccacagctcccgcagccgcggaccagcgcgtcactctaccgggttccggcgtctccccttagcgcggcatccatggcggagcaggtcagatagatgcctttggaaccccttgtttgggccactgggcgagcttgactgtagcagatctcgtaacgtttggtagaagtgcccgtgtagtagtacccagcattgtggctctaagccgatacgcttcttaccgatgcttttgattggaaacgcagaagtttagtaatttaacttccatcattcaaatggttgaactttcaccattccaatggctgtgttaccatgttctgaggaatgtggattacatgaatcatgttgtcatatgctacgatgaagagtgttagacgttggttgggttccggtcttgatggccctgctgattgtggtgtagctagtatatgatctgatgcattttctttctctctgcaggtcgatgttagaccatccaagggtaccgag

SEQ ID NO: 5350 - DNA, 729 bp, Zea mays
caaccgcaggcggtacaagaaacagggacatgtgggggcttggccggcttgctctgcttaccgtatattgcccagatcgccatcctcctctcgggcgtcatcagctgcgtcgctgaaacagaaaagcagcgacatctcatcagatcagaggtgagagagacacatgcatgtgcggtggaatgcgcgcggcgcgctgattgtccaagctgactgggccgggtattcggtatgttgtgatacggtggccaggccacagctgcaactactggcaaaatactagtagtgtgcatgattaacatctcaatgcacgctacgtattctctcagtccataatttataagttaattttttacaatcattgtcagaattaatcaaatacgctagtggatttagaaaacaaattggaaaaggcaggtgttggacttggacaccccccggttcaggcttctaccaaggatacgtacgactgagatttccatcctttgcctatcgtccttttcaggacaaaaaaaagtttctttttttttactttgtttaaacagtttgccagaaaaacacacactagctgactagcagctgtgacacatgcatgtgcctcgatcacggcaaaacctttgtgtgtgccaagtaattaaactgaccgtattcagatgaacaagaagagcagcggggacttcgatctcgcttaccaaggtagaatgtcttggcgtactccctgcaggcatgcaa

SEQ ID NO: 5351 - DNA, 684 bp, Zea mays
cgactggttcatcgctatggccttctcgagcgactcgtcgtcttgaaattcgacatggcagaagccacaggaacccccggttcttttgtcgacggcaaaccttaccgatgcaatcttcgacggcccgaagaaacctcgcaagtcgttttcgtccacgttccatgagaggttgccaacatatgccgagaggcagccttcggacttcttggggtcggtttcgaactctgccttcctcttcttgtttgaggtggccgtcaccctgcacctttcaaccctcatgtatctgctgccactgcacatcgatatacactagagtaagtatatcagtgaaaaatggttttggagggcgtgcaaagagaactcaatgtgcgcatgctagcacgcttacattttgaatccatcaagctcaagagactttattgcatcttcttctgactgcaatgatagaatcaaatgaaaaaacagatttgtcaaaagaaacagcagagattgcaaagatctagctttgcaagtttctccacccttgagctctctttacgctagataataaccgaattcatgtcccatgatcagtaataaaccatcacagatggaaatatgaaaacaggggttctggaatttataagctttgcagccttccaattcagacatcacatacatagacccttgctgcatagaaattca

SEQ ID NO: 5352 - DNA, 735 bp, Zea mays
ctgccgcctgcagccatctgtcttcctatcagcttgaacatgttatgttaggtttccatacacccattagagtattgcttggtatcatggtggagcagccttatttttcaaggcatcattctttctttgaatgataaacatatcgcctttttgacgtggcattttcccaggcacttggagggtgggtggtgtattggcaatgtcccgtgcatttggcaatcgtttactgaagccatatgtggtggcagaacctgaaattcaggtgagactaattgattatgccaaaatttcaaacatcttttgtcgttaacttaatttagggaagccagtttttttaacagttttattacattagaattgccgaagaaaaaaatatgtcatgtcattatgtgtataactagaccatagtcctgaatgcccaacattttatttattgactgctattgatatgcaattggaagcaagagaagctgtaccattaatatgcaattgttaccactgttcttaaggcgtcgcctaggcgtccgggtggtggtctaacgcctaggcgccgcctaggtgtccaggcggttgtccaacgccttggaccgtcttaccgctttaaaaaccataattgttactattgatgatccatcagttgatagctgctgcaaccatgtgcatttgtttattggtcaacctgtagaacttccatcacagacttaggactttggtaattaataaagtttttttttc

SEQ ID NO: 5353 - DNA, 775 bp, Zea mays
cttgcatgcctgcagggttacacaaaagttcaggggcagggctaaatcaacttgccatcttgagtgatgtacatgtggcagttctagtgttctacacagcacacctcaccaaaggggcagctcttgatctcaccaatctgttgaatcaaaatgacacatggtatcagcgagcagaaaaaaaaatgtcaatcggcgcagagcacagcaacccccaccttgttggttcgggcgtccgtgttaatctgaatcttatcacagagttcctgaaaacccctaaaaatgtaaaccccgcgtcagaatcaaaactggtaaatggtaatcaaactggagagagatggagaggaacgggcacagaaccgtgcgctccaggatacctgaacacgacggtgcggttcgccggcctgccggcggcgcccaccgtagcctgaaacgaatgggcagtcgtgagcaaacctcgtttcccccaatccggaggaaggcaaacaggcgatcgaagcgtacgagttggaagtaggtggagtgcctgaggtgggcgttggcgtccagcgctcgctggagcagagccctccaggggcttgaaagcgccgacgcggcggggccgcctccggccatctgctcgtcgccgactccgcccctctcgtcgacgcgcggcttcgccaacgccggatgggagggagaggccggtgcagattaacggacccgattcgctagactcccatgtgggccacgcgtcagtgataggcaacctctgtggggccacagaccagtggttcaa

SEQ ID NO: 5354 - DNA, 707 bp, Zea mays
atcttgtaaaatagtagcttaaaacgaacacgctctttatcatctccgtcaacagctgggccgtatatgttgaaaagaactaaacaagtagtgaggcattatcattactacagacaaaacaaaaaataaatatgcaataaaaagcatgaaaaatgcaagcggttatgttatgttcctatcaagggaacaagctacttaccaaaatgtccatgatcagtgatgatgcaccgcccctcattgtccacccttaagaggtcctctcttgtgagttcaccaagaccctcctcctcaacaggcattgcaatactgaaatccccaacagtttgactattttttgcatagtcctgaagtccagtaaagccttcttcagctgctactggcaaagcaacctcctggctggaaaatgatgatgttactcggcaaaatgttgcaacacctacaaaggattcaaatacagtaattgactgagtatgtggtgtgatcaaagtaatgctgaacccagagaacatctccaactaggcaagcaaccatgcatccataaggtgaaaatctcctatccacatattgtaattaccgattttgacgccataaaaacataccagagtatgctccacggccttttgaagagcggttgcatgaaacaaaagcctcatatccatcagccataattacatccgcagataggtcctgccttgacaatttggtct

SEQ ID NO: 5355 - DNA, 692 bp, Zea mays
caggctgcgtctgaagcagattattcgtatcgtaatccatcggtccaggtccagtccaggccctccggcgctgggcggcggcccggggaccgcgagcgacgcgcgagccacacgcgccgccgcagaagatctagcagctgggcccgcggggcggtgcgcacgacgcggacggcggtgttggggtgggtgtggccgtagctacggaaccgtaccggcgcttgtacccgcctcaccttccccccacgtcgccgtcgccgctttggactggatgccgctctgcggcggccggcgggggaaagagtacaacagcagccagcctgtggcaccatgtggccagttcccgtccaccgacacgacaccgaccggcagcagacgacacaggacagggccaccgccgtcccagttataagttttttttttattataatcaaaacatctcaaattttaaccaagcggaagaatctcatctcacggcctcacgggcaggcctatagagtcctgacaccgttgcctgggttgctaatcagtaaaaacaaaaaatatagccctgctgctccgtaccagggttgtcctcccgcgcggccccgtacaaatggcgtgcgccacgaggacgtggtggagtggaatggaatccagcgtagcggcggagtcgtccgggcgtctcgccggcggccggctctccgtcccgtact

SEQ ID NO: 5356 - DNA, 796 bp, Zea mays
agaagatcgcaggcatccatgcacacacagttactacaacttacacggggagagcagaggggaagaacaaggtggtagaagccaagatctctgcttcgcttcggttcaattcacaggtggcctctgatccagagcagcgtccgccgggcgaacgacggcgcctcgtcggctctggagctgaggccgtgcccgccgcccgcggactcgacgtcccaatccacgacgctgccgctcgcgctcttgtcccaagccgacacgttgtactcggactccgtcacggggctcaccacgtccgcccggcgcttcgccgtcgtcgccccaacgtcgctcgccgtgcgctggagcgccgaggagagccggaacgacgacgcgcggcgcgaggtcgttgcgccggagggcacgtccttcctcctcggcccgctgcgcatccatatcttggagacggagaagctctccctcttgtccaccgccgctttcgacagctgctgctgctgcttgggcggcgcatcgaatccgcggaagccttcccgcttggagtggcagtcgcactccgacatggcaacacggtgcccgggcatgcgagagcgggtcgcggggcgctttttctccggcagcttcacggcgacgcggagcagggagctctcgtccatgacgtactcgtaggtccccatggagaagcaccgcctcacgtcatggcttccatggctggcgctgccgccggctccttcggtggcctggcttctgaacttgccgagcttcaccggaacgaccacctcgtccttcttgtccgctacct

SEQ ID NO: 5357 - DNA, 703 bp, Zea mays
aagaaccaaagatcaatgtgcagtgcaccatgcctgcaaaattgatctttcaatatggtaatgttgcaaagtcctttttttatgaatgcattgccattaactaatgaaaagtaggttaaaaaagaagcactacatcagtatattcaaaatcgtaaaccacaaatgtaataatgcaacatgttgtgactgttttcagctctgatataacatgttattcattatgcctatacttgtatgctctgatgcttcattaatccgaccttgatgcagcatacatcctgagcagaaagaatgaaacccttaaatgcagcagaattaccagttagaactacttggtgggttacatttagtcccacggccaaaatatcagcaccgcaggtgaacacaatatctgccgcatcaggatccccaaagatctgtgaataaacatgaatccattatcaacgactcgagcaaagtgatgcactgtttaagcatcacacaatgtagaggatagtctatttttctccgaattcattagggagccataataatacaactccaattaaaaaaagtgccactgcatcattatgtcgattgtggtacctaccagctcaaagcagagctcgagtgaaactacttagttacatgataacaaagggatacagaatgtatcacagaaatgaagagagaaccctcacatttgcctcagctgcaggcagca

SEQ ID NO: 5358 - DNA, 746 bp, Zea mays
gcgctaatggccaagccatgtggaaggcaccggctgaaacctagacttagcagtcgatagaacatcatggtactcagccccgctgaaacagtcgcggaagtcggtgaacagcttgtcaaacaccctccatagtaccctatatgatctggagtatggaaacggaaggaaaaactgcacatcaaagaagtacatgagtggtctgctatggatactagcatatccaaaaaataaaccttaagttgtctgtggtatgccttatcatactattatgtcagtaataaagcatgaacatcaccatgcaccagagtagcacttctggggaattctatgcttgtgtgccttgtaactcaatggaaagtgtgggtattgttttttttttttgtgagttaaagaaaatgcaaacaaagctatcttacttctccttcttgtgccacacgttttaacagtaagaaagtttgctggttttcttccaagctgtcaatgactgcaagccatatttttgaagcaagatcatgggccttttctcctgtattgccgcaagcaatgaattggtctgtacagaggagaagatacatgttggttcagagttagcataagcatgagcatgagcatgagcaatcctctgagaggactatcttaactattaagtacacagaaccagctatggccaatgggagaactcaatgagcctatatgacaggggaagggacatgaatgttcagtgatgttctcatgaccctacaaca

SEQ ID NO: 5359 - DNA, 730 bp, Zea mays
aactactagattcctgcaacctatttccatttgtcataattggaggttgacacaaaggctgggtgtcaaattgattatctgtgtcagctctccgtcgacgcttccaggcttcagaacttccagagctctcattatggaaagactcagaattgtactggagagacctagttggcctttggtttctcgaaggatgaagttgatttgagttacctcccttattgggaggaatggatgtgaaattgccaccatgagatgggccaactccaccttccagttggtcttgactaagtttcaaatagagatcatgcagttgctccccagacatgtttgaaaaggtggcaacataattccataacctcatgaccatgcctgcatcaatacaataatttagacaggatccatcaagcgatgcaagtaatcaagtatatggcatccaaaattgtctgcacaatgttaagacaaagagtcttgtctggagactggttttggagaagggggcatacacatttacgggaggtgcgactacacttacgggattgcctataagattcactgtgttgccggacaacttctccaattttgtccccaattatcaggagatacttgcgaatccttgaaagaacctgaagacagtaaattaaggtaagattcggatggaagagtggtttgagaatatattgtccacagaaaaagcagataccttttcctttgggaggtttacacttgtatt

SEQ ID NO: 5360 - DNA, 804 bp, Zea mays
agctgctgagcgatctccctgagcagaacgacctgcgccttctcatctcccatggccatgatggcgtgccgcatagactcccgatccgcctccaacgcgtgcaacctggctttgagttcctgtatctcgtcctcctccgcccagcccgcggccccagcacgagcgcccacctcgccctcccacgtggtcccaaagtcgcagcagtcgtcgtcaggcgccatgaccggcacgccatgcaccgcgtcaaccgtgtacacccggtcggcctcctcctcgtcgtcctgccccggcgcgtccctgtccgtgaagagcgggaactcgtcggccagcgcgacccggcagctgtacgggccgccgtcgccggagaacgtgcggacgtggcgtgacgagcggcgcggcgagccaaacatgacgaccggcttatcggagtccggggggctgggagctccgtggggggcgcgcggggtgccctcgtcggcgaggtggtcgtcgaggcagtggacggaatggtaaccgtcgtcgccgtcggaggaggagaagggatggtcggcctcggcctcggccgcggtcggggtcggggaggacggggaagggaagccgaggtggagcaggcgcgcctggcaggaccggagcctggcggcgagcgagcggacggcggcgtcgcggcggccgagcgcgtcgtgcagcgcggcggcctcggcggcgtcgtgcgcgaaccgctcctcggcgtagcgccggtactggcgcgcctccatcatggcctcagacttctcgcgctgcaggtcgactacaggggatcggcgg

SEQ ID NO: 5361 - DNA, 716 bp, Zea mays
agcagtagtagacttgctcggctttagtcttgtactgtttttttcctactgtttctacgatgttttgtctttataaattacacctgtttttttcctactgtttctacgatgttttgtctttacaaattacacctgcagcagcagtcttaacagctggctttaatctgaagccaacaatctggtacactggtgtgcaatgttatcttttactcataaatgtttcatggtttagttaggcttttgaaactttaacagcagatagttttctttcaaaaaaaaaaaacggtatcacatcttgctattactaaatagagacccccgatggagacacaccgcataactctcccccaaacgtgctaggaaaaacatgtaaattatagaaatttgcataacaatcagaaacatctagcacttgatttgatagagtgtactcatcatcgctgataataaatgatagaataacaccccctagctagcaagtagtagcatgctgttcagcatgcatatatatccgctaatttcctgccggaatttgctgtgggcctgctgggccattcctggctcgcgccgggggtctccgctagtccgctccgaagcttggtccagggtccaggctagccgaaaagagcgcgcgtcgacgtgcaggtgcaggtgcagtgcagccgccggaaccacgcatgcacaacgtgatgcatggctggctctagcggttaagt

SEQ ID NO: 5362 - DNA, 770 bp, Zea mays
aatatgattagttcatttgctgtaggacactggactcctgtagtcgtccaacagcaaaaatccattttctctgtctttctgtgaaagccagaaagtcagagtgttctttttaataaagaatgcttttattgatttcaaaacaattacatcaattgatacaactatcttgactcttgcttccaacctctgcatttagaatgcacacagcccacacagcgttttgaaataaaacagacagactggctcaatagatgcaagccatgtatatctttcagcgttttgaatgtccttcttgatgcaagccatgtatgtattactaaaggttaattggtggagtaacttaccttggtatgccccacaaaaccaaattcctctgtttccttgaatgtgatgaagctcaagagaagcctttgtggcagccacagatgggacagggtggctagtgtaccatttaagaaagacgtggtctgggacatgaggaggattcagcgtcaccagaaaaggtctgcttgtagattctatgttctagaaaatattccaataaggatctattaatcaaagtacatagtggcatagtgctatatacatacatatattaagtaacaatacattgctaattgctgctatccatgttaaggcaaggtaactacctgaagcagatttagccagtaggttacacaaacccccttgcttgtcgtccccaggaagttccaggaactccaagcagacaaactccgtggcatcaaacttttatcggagtggaggtatat

SEQ ID NO: 5363 - DNA, 715 bp, Zea mays
tttaatgagggtaagatggaaagcctttttggttataactctgtggagaaaataggcggtgatggcaagaaagatttattatctaaggatatacctcaatttgtgaggatacttgaacctaagaaggcacagaaccttgcgatatcattaagggctctgagtgtttcaccagaggaagtatgtagtgcagttaaggaaggtaaaatcgattttctgccattctaatcatttacatggataggtcttcctttctacaatgcttcttctgtgtaatattaaattcttaatgcatagtcttgtaactgcatatttattctacattttttaaaaagtaatagtactcatttatgctgcaatgatgttaacttctccatcttctggtttacagcttctcttgtaacattggatataatgacgctgctacatgactattatttttatcccataacctacatataaagattagagactaatctgttttttctgagctaaggtgttaacacatttccaaatatcgaacatctatcttttagtatgcaatcattttagttcctcagaggtacactgttccccatcgctgtattttatttcactcactgcccttgctaatttgtaggaaatgaacttccatcagacttgatagacacactactaaagtggatcccaagcaatgaggaggagcttaggcttcgactgtacactggggaactgtctc

SEQ ID NO: 5364 - DNA, 764 bp, Zea mays
gattcccgtgctgttgacagatacttatcagtcgaggaaatgtctggatgcattctgttaactgagtcagcatcaaacaaagcagggatatcgcagccaagaggtgcccattcaatggaaaaaggatctctgtctcctaagaaaccttctccaaagaaaggaatactcaagaggaatacaagggggtgtaagggtatctgcatgtgcttagactgctgcacattccgactacatgctgaccgagcttttgagttctctaggaagcagatgaaagaagcagatgatataataactaacttactgaaggaggtggccagtcttaggagtctgctggagaagcctgctggccaagtaagtacaaatccatgcattttagattttgtttcttttttcttatgatgaagtttttctgcacttaggaatgctatatccactctttactagtatgacgagttttacactgacttgtggtgatcatctaatctgaatattcaaggtcaggatcaggagtcaggtggataattgctagcatatttttgggcagcatggttgtagaatacgtctgaatctatgtgtttggcaactatagaaatgcaaggatgcattccatgccagaaaatttagccagaactgaaccacctattgtgatcacaaactgtcatttacggagggaacttaactttttttagtggtcactggtaacatatagacattgtaaaagtccacattaaccttactctatgtattgtagaacctatgaccta

SEQ ID NO: 5365 - DNA, 836 bp, Zea mays
tcttgcatgcctgcagggccaggatgctcgtcgcttggattcggggccatgaaggagctcggccccttccgcgtcaaccccgacggcaccctgagaaggaacaagcactcatggaacaaccgtacgtgatcttgttttgttggcggcgccgcgcgtacgtagcatagaccatgcatggtagtgtttggcagcgtggagtcgtggactgacgagactggatgtatatcacggcgtgctttctggcagtggctaacgtgatcttcctggagtcgccggcgggcgtcgggttctccttctcgaggaacgccaccgactacgacacggtcggcgacaggcggaccgccgaggacacgtacgtgttcctcgccaagtggctggacaggttcccggagtacaagggccgcgccttctacgtcaccggcgagagctacggcgggcactacgtcccggagctcgccaccgtcatcctgtacatgaaccgcttcccggacttgctgactcccatcaacctccaaggcatcttcgtgagtgctgcttattattagccagagttcccggccttcaccgtctgtctgtgtgtgtgcaaatatgtttccgtacgtcgatctgaaccggcgatctcgttgttatagttcggcaacccgttgctcgacgattacctgaacgggaagggggagctggagttcctctggagccacggcgtgatctccgacgaggtgtgggcgcggatcctcgccaactgcaccttcaccccctccgacgactggccgtgcttcgtggcggcgcactcgttccagagagggaacatcgacaagtacgacatctacgcgccggtg

SEQ ID NO: 5366 - DNA, 821 bp, Zea mays
tggaaaaccccggatcctgttagtcgacctgcagagagagacaaaatatcatcacctatagattccaacagcaagtttatgacagggaaaagagtcaacaggagaaagaatttcaaaatgcaaaggaaaatataatcatttctgtatgtgctctactatgcttctgttttgcaactttcagacaacgtagcagtaaattatttcagtaaattgactacaactaaggaaaaaaaatgcctccaggaaaggtattcaaattaacggagtaactgctcgagaagagttacagagacaagtatcataagaacactgggcatatgacagtataaaagtgatatgatatgagcttcagaaataattttttttttcgaaaaacgcaggagagctgcgcatcattatattaagaagaaggggaaattaaggtccaagaggaccagtacaaaaaaccaccctatggtggccagcaacaagcataaataaaactatccataggactaagatacaaaaagatgaccaaggaaaaaattaagtcgggcctgctgcgcctagagcagcagcaagcccaaggcttccgaggtgtttggcaccagccagcacccataaggatagctcgtcgacgaagcttcagaaataatgaccgagttattcacaggtacttacgaaaacgagagcatgtttcggactttgggtgcatcaggcatatccataaataaggagttggtaaaaaatgtaagacgccttctggcttctaggtttgaaggaacatccatagcagattccttcaccgtaagtagcagttccagcattttatcgcagtcacc

SEQ ID NO: 5367 - DNA, 684 bp, Zea mays
tctcagtaacaaatcctacgaagccagtgcaccttgtaagtttgctgtctcaattggtttcatcatgtttgctgtcggagaactatatagatatagacttatgaaaatactgtataaagctatatgctggttaaaaggtttaccacggtgatgtgttacaaaatacttaatttatcagatcaacgttttttaacctgagcataatttgttcctggcagaaatatggatggtatggaaccatgtctgccattggtccgctgatatcgccgccacaaatacgaacaaattgaccgcatgtatttctaactacgaaacaaccaggaaaaccgactcttgatttctgaattgctccgctaatgccacacaggaagtttttgatgaagacaagttcacagcagacgacagcatgggtgttgctgagatcaacattactgacatctacgatgctgcgaagctggacctgaagcacgcctctgatgggacaaggatcaagacgatctaccctgtcggagtaaactaccttggcggcgagagccatgttcagtggaaggatggcaaggtggtccaggacttgattctgaagctgaggaaggtcgagagtggcctgattgtggtgcagctggagtgggttcatgttcctggcgtgaagctgtgaaggccctgtctgaatgagggctgatggag

SEQ ID NO: 5368 - DNA, 683 bp, Zea mays
ggtcaagctgatgtccggcgaggctgggtatgtcttagaagacgtgccgcacgtgtcagactacctccccgatctcccggtgagtaccggcgatccgtgcgaaggtgatcgatctggtgtttgacgcggtgagtggttgattgaatgatcggtcgttgttgctcgaggagacgagggcgaggttgcccgctgcgtggcatcgtggtttgagaaagtggaatcctaggatgattgggtgcgaatctgctagaagccgagaaccttaaaagtcgtcagcgacttctgttacggctttcagtttattgtaggactttcgtgactggaacatccagtgcttttgtctatagcaaattggcaatcgccatttgagtgatcgacgaagtacatgcccaacatttccactcttttctggtttctagtttgctcatcagttataggcggtttggcattagttatggagtgtacggatgaaatgttgaatctgagagatactcagaagtcaccgatttgtgactaggggtggtgatagacgatccaaataattttgatctcttaattaattttagttcagaaataaatagaaatataacttgatcctaatgtgatttaatccttaaattttatattgtaaaatttagagcctattaccacatctatctgtgaccatgacacattttttgttt

SEQ ID NO: 5369 - DNA, 695 bp, Zea mays
tacacccctacatgcatgggcccaatagagggcgcgtgcgagactgaaaaaaaaaacaaaggcaagcacgtgcagtgccccattctgtcctgtgcactgctgacagtcaaaccctcagcagctagaggaagagtatatatgcatggtcttgtttacacgactagctagagctgtgaaatctagagctccacagtgcccatggatgtttattcctcattcatgcatgcatgtgaagagaggctagagatttgacagtgattagtttaatgcggaggagacttgggatgttcacactgcccactgctcccaaagagatctgaattaggaccccaagggaactccgaccgaggaataaacaagctagcctggggtactagatgcttttttgatgcaaacattcgaaggaactgaagaaaagagacgtacgctgaaagaatagtagtactatatatatactcttttatacatgtttcggggaagtgaaactctcctgttgcttatatattatattatataccctgccattatatatgcctccacacgcttggacaatgttacatgacaagaaagaagtcaacacggagttgcacgtcaattcttgctcgctcatctgttattgttcattcaattggaggtttgtttaatcccagctactagtactagttcagcacgaggcttcaagtttttacacttcc

SEQ ID NO: 5370 - DNA, 711 bp, Zea mays
agtggcatagcaaggctgaaaagatactaaaagccagcagttaggagaacttctgtacttctacataggttcccatgcaaatcctcttcctctcttttcttttgccattggctctatctctccggtcgtctcttatgtctgtttagcttcttccctgcctttgttggcaagattccttttgaaattgtaggaaggagagattgtataatgcgtggaatggtgggatgtattgcattgagcctttaggaggaatatataggagtacataacttggagggcaagaagcctatcctagagatgaggaaggttatcctagatacaaggaatgttatcctaggattacaatcaatccaatcaatcctaaaccaaccatatcaggagttgcctaatatattctaacagaaatgagtcagatactcagatgcatgttcagccatgtcaggaaggagttatactgctaaatgcatcgatgcagcagaaaaaaaagcagacatgtgtttaccagtaatgctgaaaattaacagtttttatatggctgctacaaacattgttatcagtagcagaggtccccttttatgtgcgtttagtctttttttttgtttagtcagttcctccgctttatgttttacattttgttccaccctctctccctggagttatatattttcagccttgtttcataattagcagggtgttgctcctgtttcgact

SEQ ID NO: 5371 - DNA, 727 bp, Zea mays
tagtaaaatcaatcatataattgatttgtaaaaagattaccaaaatcaaccattactcggaactaaaatgcaggaataccatgatcagccactacatggaactggttaaaccaagagattaccgtcgtaccgaagagcaaagcacaaaaatattgcttatacaaatcgatctaaatctcatgagcctgatgccacagtttagtgcacatttaccaacaagctgtcagcaacaccaccaagagattaccaaagacgacggagtagtcgctgtcgaggacgtcgccacagcctgcgccagtgatggggcagaacgcctcggagcccgtgagcttgaggtaagtgaggtaaccagtctccaggaaccccagcccagcgacacccgcagaccaggtgctcgtggaaatgcccagcagagaggaagggggcgatcttgcagatttgtccagcggcggggcgggaggggcgccggagatctcctgctcctgggaagaagaatccgcgcagcacctgaattgtgtggctctctgcgcgaagatgagaacacgaaaatggataggaccacagaattgtcgagccaaacaggaggtgggaagaggggtgaagctaggagggcggagaggaggggtcatgggcttgtaccttgatgcgcgaggaagcagagggcgtacttgcgacggcaacgcgagttagcgacggtaaggagatggcgagggctgcaggcatgcaa

SEQ ID NO: 5372 - DNA, 701 bp, Zea mays
actgctccttaatttcaaaaatcttcagaaccaccacacgccccctgatccgaacgcctcaggtccccttgagtagcatgacgagcgacagtgtatttttcctggctggccgaaggccaatcatccaatcgacatctgcattccactggggaatggattatcattagctggccactattattccaggcaaccaacgcatagatagagttaccgccatttggtgatcacgcggtgtactttctcttgcacaccaaccggaacggcttaacatccagttttcctggcaatgatctgcacgaagtcacaggcacatgcaaaaataatagtccaaggaacgcggcactcaaatgaatttccaggcgaaaaagaatcagcagttttgtaaaatagaacgactaaacagcacacggagtataatccggtctaaaaaaagaaggatattgtgaggacagctaaggcatgataattgtgcgggacaaaaatgattggcagacgacgtcctcatggactgatggtactaaacccaacacacatcgatacaatttttttaaaagaaaattgggttttctatacaagggctaaaaattttcagctgaatcgttgacgcatttgctaccaaatattcagtggtggtggtggtggactggtggtgacggtgacagttcaagtttttcttcgagaaaaattaagcacatgctgga

SEQ ID NO: 5373 - DNA, 731 bp, Zea mays
cttgtgcgagggtacgtgctttctcgattcgtcgaaccacgcaacagcacggccacgcgaacgaattattgcaacacttttgtaatatatgttgctccatcaggttggcgaggatgtggagagtgatcgccgacgcgcaccgggtgatgaagcgcaccgccgacgactcgatcgcgctcctcacggcctcggccgccgcggccgcagccgcccggcccgacccggtacgcgaaggaggtggtaccagggggccgccgccgcccccgggcgtggcgcgcgcggccgcggccgcgggcgcgctcggcgcggagctccgcggctggcgcgcggcgctggaggcctgggccgagtcgcagcgcgcgtacgcggccgcgctctggggctgggcgcggagctgcgtcaaggacggcgagaacatgccgcgcctgatcgtgagctgggcgcgcgcggtggaggccgtggacgtggagccggcggccagggccgtggacgcggccgctgaggcggccgccgccgtcgcgtcggccgcgaagcggcagcgcagcggcgggggcgaggagtggttcaacgaggacgagggaaagaagaaggtctgcgtggggctcgcccggcgctgggtgccatcgctgaggccggcgccttggccgtcttcgggaaaagaaaagcgctcaaatggagatgggtgcgagggaacgagagcgcgaggttccggcagcaaacgctcatgggtc

SEQ ID NO: 5374 - DNA, 787 bp, Zea mays
tggtgcctgcgggttcaagaacgtgaacctgccgcccttctccgcgatgacgtcgtgcggcaaccagcccctgttcaaagacggcaagggatgcggctcctgctaccaggtagctagatcaattggtcagacgaagaccctttgatccggtggtgcctgctctgctttaatgtaaaagttccgacttttgactaacgaaccctgtcttgtttccgttcccgccagatacggtgccagaaccaccctgcctgctccggcaacccagagacggtgatcatcactgacatgaactactacccggtcgccaagtaccacttcgacctcagcggcacggcttttggcgccatggccaagcccggacgcaacgacgagctccgccacgccggcatcattgacatccagttcaagaggtgggtgtcgtcgtcgtcgtcatgcgcaagtgcacatgcaccgcacatttgcgcagagcgccacacaacaggccccacacctgcatatatacaatctagattttgaggacttttgtcggacaccagactaatggaaacatgcatgtcgatcacgcacatgcagagtgccctgcaactaccccgggcagaaggtgacgttccacgtcgaggagggctccaacgccgtctacttggcggtgctggtcgagttcgaggacggcgacggcgacgtggtgcgggtggacctcatggaggccaactccggctactggacgccgatgcgcgagtcctggggatccatctggaggctggacgccaaccataggctgcaggcatgc

SEQ ID NO: 5375 - DNA, 721 bp, Zea mays
aacgacatattggtactcgtatatattgggccttgggggtggaggtttgcagttttgcacaattgttgtctccgtgcttgctcaccaaacatttactggggactgctagcagataattgcaaacaattggcctttggcttcggtcataaacttctaatctagatgactagttctggtgggcaggttccagtcggagtcctgaaacagcagaaagtagctacattgcttttttgttgcagttcactcagttttttctgactgttcttaggtcacttccaatgataaaagtgtttaggaattattttagagggcattatgctcttaacagtttttatctagttaccaattaggttaataacaagaggaataataatcagctccatatgcacccttaggaggtatacccatgttgcaagtcaatgatttaatcttaacctgaaactgttatttttgtgtacagtgctcttaaaatattgcatctaattggatctatactatctatgggtaatcgattctgcaatgcaaacagggtacaagttagatgtgctcgaaatattaccataaattttcaaactattactatactttgaacccccccccccccttatcatttctgtcttaacactctaacctcacttgtttcactttacagatttgaggaagttgccttcagctttaatggtgggaaaggattcaactgtaaatatctttatgttctctt

SEQ ID NO: 5376 - DNA, 752 bp, Zea mays
tcttgcatgcctgcagcggggtgaggccgtgcgggttgcccgtgaggcggcgggcgaggggcgccaggaggcggtcgtagacgggcacggtgagcaggatggagccgatgaggaagacggtgagggagcccgcggggatgaggaagcccgagccgccgccgagggcccggtccatgacctcggcctgcgccaccgagaaggtggtcatctgcgcgtggatggtccagaacatgatggtggtggcccagatgggcagcatccgcaccacctgcttcacctcctccacgtccgtccgcgtgcacagcgcccacttgctcgccgccggtgacgactcgccgccgccgtcgacgacgacgatggccgcgtggtccaggaacctgcgtgtcatcccgtttcgtcacgataagtcatctgcgtgtactgtatggtcagttccctgctgtgcgcgtggacagcacatcgttttcaacgctaaaatggattagtatattattactgataagagtagcgatcgcgatcgactcaattaaaaacgcaagaatcacttgttcgtcagtcgttcgcggaaacagcacggttcgatgtatcagcactaggcgactcatgatcgacagtcctcctgcttgcgctggcactcgcaggccgcataaggcaccgccaagcttcagaactggacgcctggctacctcagctttccacgggacaaagcatttgtcgggggactaaacaacaaagctttagaatggccgatc

SEQ ID NO: 5377 - DNA, 783 bp, Zea mays
ctgcagatgctttttttttcttcttcttgtacttaatcttgttgcttgctcatgctacttcaatcatattcctccccagtggagacgccaagcatcatgcttctggctgcgcttcggaacatccgaattgtaagacttggatttagcatactgcacaaacaggcccagaactgcatttgacattgttatgtctttccagccaaggccaaccatctacaatgtggtgctggagatgactacaaggatgggatatgaggtgatgcatgtttttaagaagaaaaaaaacagtagatataatgtttggctactcatttcctttaggaatttggtacctataacaaagaggtgtccagtgaactttgatgcacattaatgatttttgtatctacttgattttgagtcacgcacctgcacaaacgcatgccagttctgtccaacacaggcaggatttgggctgaacatatatgctgaatcaccgatcgctttggctacgtactctgcgctttcaggtgcgtttggtgcggatcacagaaatggtccatgacgcatactattctcgactatatctcgcaaaggtaactgcactcccaagtaaattatgccgcaaaaacaatccttttagcttatattggtctgaaaaaagaaagcatggcaacatgacaccaggttgggaatgaccaagacactatcagtttcgacctcaagccatcggatgctatcaacattgctttccgctgcaaggtatgcatttgattcttgcattttccagtacagaggacaatc

SEQ ID NO: 5378 - DNA, 637 bp, Zea mays
aatcaaacatccactcccaaagtcgaggaaaagtggacaggggtgctctccagccaaaatactcaaatatagcagcacctgaacctctcgcgttcaatcacagtcccaaacacccaccccacgcatgctatcgaaacttagtatttcttacaaccaaagtcaagaagaagaagctatagtttcagagacagtcaggcttcattggtatgaagcgcggcatgatgtaaagcaatagatgctgaaattccggtgcttcaccagctgggatcaccacacagccaacggaagaacggcggttcacgagcaggcttgggattcaggaacgtccggtgctggacgaggctctccctcagcacgtgcctaataggcagcatcctccgaacatgaggaagcccaaactcgcgcagcagattcccgttcctgtcacagtgcaagagccagcgcccggacaggatcagcacatccccatcggccgagacaacggacggggggatccagcagtcgtcgtcctgcataagccgcatccacgggagtggcagctggatccggtacgcgaggacccagagctcgttctgatagtcctccagacgccagagctctaccgtcgccaagttcttcccggagaccgacatgccga

SEQ ID NO: 5379 - DNA, 697 bp, Zea mays
  unsure (1)..(697): unsure at all n locations
gccggccggacggggaagaaccactcccggccgagcaacccgcggtggaactctgggggaagcggctccgacggcttcgacgacgacgactcggacgccgcgccgacctactcgaggaagaagccttcgtcgcaggttccgctcaagaagcggcaccagccagagcagggcggccggcgtggcagtggcgggtggaaggacgaggacgacgaggacgaagacgggcgtcgcagtggcggggaggactcggacagcgccccttcggtggggagtgacctatacaaggatgaggacgacaaggagcgtctggagaacatgtctgagctgcaaagggagatgatcctggctgatcggggcacccgcctcgatgattacaagctcaagcagcgggcacgagcgtcctcgtcgaagacagacaaggtgggcgcacggaaggatagcagtccacccccgccgcccagccggatgcggtcttcaacccgagctgacaagtctgggtccgcagctaagagcgcgttggacgagctgcgggcaaagcagcggatgcggcaacaggctccggaggcacgcaggttcacggacctgctcccacgtagtggctcaccaactaggcgcagggctgggagcccntccagtgatgggagcaacgatggggatggcagggggaggcctaatgaccatgggaggatcgctgacg

SEQ ID NO: 5380 - DNA, 774 bp, Zea mays
agtttgcatgcctgcagacatttatagtgcccccgtgcaaaaaataaactaaaataaaaaacaaaatgtaactgttaagtactctacttcagttttcatatgtattatttgcaactgacatcttcatccttaacacttaattttttgtttttagtaagagtcattttcttctctgatttgatgtggttgcatacttgcatgcaccttttgcaccaatgttctttgagatgtattggctaaggttgtgcaacctgtcgcacagtactacgggaacaggacagcaggtcctgaaattagtctgttttgtgtggagagtaaagaaggttaggcttgacacagtgttgagaaacttctccacttagccaaaggtcctgggtttgatgtagcctcactgcaaaaatgcaggggtaatgtttgccttggttattccttctccagactccactcatataggagccgccaacactgggtctgttctttggagtatgttgaggactattgtatttgaccaacattcctttattggttgttctgtttcgctggtcacgattgctcatctgtttctgaaacctaactcactactcagcatgtcaactgatttgtattctactatagtatcttggttcgtttccttttatgaaactgactgattagtgatttgtgtgtgatttcttctagttcttctaagcgaaaaagaggtggacctggtggtttaaaataaaagtttgggcaatttcacctgaactttcagaccattgttggtgagacttgcct

SEQ ID NO: 5381 - DNA, 715 bp, Zea mays
aacaacttagctatctaatggagcttatttcctttcaagtttgaactatattttatttctatttgttttccaatttgaactatatggctgttatgacttatgagtttgacttatcgctgatttggttcagtttgaggcttgaaatgaggtaagacttgttgtttatttcagtttagttcaatttcaggcttcaaatgaggtaaaacatgctctttcttcatatataaatgctatattgtctatatgaagccattatataggcaaaacagccactatattggcaagtcgacgactagtcgaccgacttatcgactagtcaccaagtcggtaccttgtcgactcgacttgacttattgacttgaaatccttgatagcaagtagccaaataaaatttgcatgcaaaatctagaagagatattcagtcatgattgattttcgagatcaaacagtgtcactattagaaaatagaaaaaacaaactgaagaagtgttgggccctcaacagattatcatgattgttcataaacccatatgtgattccttctggtcaaatacatgtagaaagagaaaggatcttaagtaaaaacaagataccacacagtcataagggtatggcatgattaatgtaagtataaataataaaatattcatgtcaattactgctcatgtgacaaattcattacgttctcttgccatgtgcgaaaagtgaactctta

SEQ ID NO: 5382 - DNA, 770 bp, Zea mays
ggtaccaatgttggcgacattggattgtgggatgttggtaccaaagacagactcgttgtaaggaacttcaaagtctgggacctcagtaaatgtacaatgattctccaggtctgtttgttgcattatgtgtttcaggcacttgttatattctattagccttcatataacacataataaattgatcaacattcaacaggcatcactggttaaggatccagctgtgtcagttaatcgcataatatggagtcctgatggaaccttgtttggtaagatgagatgatttaatcagtgtttttgttgtccttttgatggcttcaattctgatgtatttattattttaataggtgttgcttattcaaggcatattgtacaaatttattcctataatggtggcgacgatattagacaacacttggaggtttgactgcatgtttcttaattctttctacctcatagttgtttggtgtgttctcttttgtatagttgactatgttggttcatatttttgactaatgcgcttgctttcttcagattgatgcacatattggtggtgtaaatgacattgcatttgctcatccaaataagcagttatgtataattacatgtggagatgataagacaattaaggtgagtttctgtgatgatttagctcctgggctaatcattttgttcagatatgaagctctgaatattttatattaataggtatgggaggccaccagtggagctaagcaatttacatttgaaggacatgaagcttctgtttatta

SEQ ID NO: 5383 - DNA, 750 bp, Zea mays
aagcagcagctcccagctctccatcgcggggttcacggcagcagccatccccccatccaaggacgagatcaccagactttgtgcgtgagagctgccagaagatagcatagttccaactggtaccggggctctcggattcaacaagctcctggagtttgttctgcaagtcacccggcaaagatgtggcaacaaggccctcggatatggcaccacctccttttgttagatatgcaaaggcatctgctccaagcacagcagcgccgagagctcggtcgtcctctgtccacgtgccatcagttcctccgatggcaccattgtcctcgtgctccatcttcatgaccatgatacctactactcgaaaagggacagagctgaagtcacaagggagctgagaaaagcaaacaatggaatatcaagttttgggcaaataaagacaatagatttgatcgtatttgtgaatataataaaagaatcagtaaacatgcaccacctaatctagctacataagtgtactgcactgcatccaaagcggtaagaagaagtacgcgggcaaatttgagcgtcagtaccccctcccaagcgcaggcggttgatgattcgacgagccactagccagcagctttgagtgcaagttacattggaagactacgtaaaaatgggatgttggtaattatgtaattagcatgtgaaggcgagtgcatgtgcatggtcgaattgtagcaatcccaatcagaagggggctggatcgaa

SEQ ID NO: 5384 - DNA, 758 bp, Zea mays
aagctgtcccaaagaaaattttggaattgatgaatgtcccaggcttaaccagggaaaatgttgccagccatttgcaggtttggtttccagcgttctgaccatattacctgttttagtacctatatctttattgcacgtgatgttgccgcttatgcacctgtacattttataccatattattctacctaaatttaatctggatttgttagtgagataaatagaataatagatggcttcctgcaagagtgaactcagttgagcggcctgtgcttttattgttacagcacttgtctattctttcattgcagaatgcaatttaattgcaccagaccatcatactattcattgtttgactgaaagcattgtgaaaacgtgttactaaaaaatgacttcccttgatctccatggtacatatcacaaaaacgaacatcttttgattagatgaggatcaactatcctctttttattaagcatttttgaatgtaccctatcaccctatgtaataccattaagtttgctagtttctattggctgttggtgagctccaagtccagccattatttaataatctcatagcttaagacatcaatggtgataagatgcattttttctatgtgcagaaattcagactctacctgaagagaattgctcagcatcatgcaggaatacctcatccatttgttgcgcctgtatctagtgctaacgttgctccgttaggaggactggaattccaagctttggctgcttctggtcagatc

SEQ ID NO: 5385 - DNA, 694 bp, Zea mays
aagtacttatcagaacacagattgccagaaaatatcgtcgcaacaactagtgctgctgatgctttagcaggagctgatttctgcttccatgctgttccggttcaggtattcacggttcttcacgaagcattatgctcgttgctgacatttagtcctcttgactctcttactttttgtggcagttcagttcatcctttcttgaaagtatttcaacacatgttgatccaaagttgccattcatatcacttagcaaagggctggaactcaatacccttcggacaatgtctacaatcatcccacgagcattgggaaatcgccgccaaccgtttgttgttctgtcaggaccatcatttgctgtagagttaatgaacaaattgcctacaggtctgttgatatcattaatattgttaacctgctatgtcacttttttttcaagcttaatgttgatgctgagttatttgtacctgtattcctttgaacttcttcacatatctatatatgaaagaacaaacgatgggtttgaagacaccaaaacaaccctataacaatcagaaaattccgagaaaagaaaagaaaacgaattccaacaaactctcaataatcaagagcggaaacagagcttctgcactacttatattttttggtccagtttttgctgtatgttgtatggcaaatgcaactgttattttagcta

SEQ ID NO: 5386 - DNA, 779 bp, Zea mays
tccctccggcctccggtggtctggcacgccgcctcctcgcccagatccgaccgcggtccgcccctccggcctcgcccagctccagagctccctcctactcgcgggcacgcggcctcgccctggcggccaggccctgggccgccgtctccgtcatccgacctgagggagtgaggggtgagcgcgttggcaccctgctgccgccaccgccatcccccagtccccaccggcaatcctcactttgcaccgtccctgctttcccagaccccagcagttgtgccgtccgccgccaacagcggcagccagccagccaacgtctcggcaggcagaggatgcacataggttgaccatgggtttgtggccctagccgacagggcaccaggcaggcaagcagcactctacggcaacatcactgttcctctgcggcactgttttactgctttgcatttcaggtgagtggtgccctccaatttctaaatttcaattaattatttgcttagtttagcctaaaactactctagggtatatgttgaattgtgtatgtgatttagtaactgtgttagcttagcctgatcatttatgcaagattcaaagtcatatgttaaattcaaggtattatgagaccttttaaatatataagcatgcttttgttcgttttgtacacatatacggaatcacctagataattttatagatgtgttatcaaattgtgtactaaataaaaacttacttaacaatgtttctaaaaccatttattaacatcactaattatagcaacaatg

SEQ ID NO: 5387 - DNA, 725 bp, Zea mays
tcctctttagtcgacctgcagcttcaacttttgcccattgccgccactctccctcacgacccaatggatcactaggtcgcgatcgccaatgctagagcctctttgtctcctgacggcgacgtggtgtcaatgctgttcatccgcactgcttgactggaagcatggccccaacagcggtagcggctttgatacaagttgtagccttctactcgtcggcgtgtcttgccggagacaaaggagatgatccttgggtcattcaaacgctcacaaaactcaacacgaacactggaagaacacattgagtttttttacgctgccaaacaacactgtttcaataggtgtattctattgatatgtttatatacacaattagaacatatacacaattacaaatgctcacatctataaatcacgtcaccaatcatcaatcaatcagctaagaaaggaaactatctaatcagctatcaattagctaaaaaaggaaactaaccaatcggctattaattagctaagaaagaaaataatcaattaactaagaaggaaaaaaataaaccaagctggattatgcaacaatgtctgtggagatcacttgaattacactctcctgcacatccatgttagcttctaccatattccacatcattgatcttattgtagcccaagttgtgcttgggtaccttttctcttgctcttgctcccttctcctgtacatagtagctaccata

SEQ ID NO: 5388 - DNA, 564 bp, Zea mays
ggatcatgtaagattgggtcagtagttgtgtaaggagagggaagtagaagcaaacattcagagagggatacctatgtttagccattatgtagtttatggatagaaaatgttcttacggagagggaaagccagaactttgttattaataaagcttccttcatctagaaaaaaaaagctctcacactattgcattcatcctgttccaatatataccattcaatttgctcggtacactgctacatccatactgaagctagaccacttttgtgcctgcatcacctgttccattaccgtgcattcttttgcagacacactctccatcccagaatataaagtttaaccattttttattctagtcctataatataagatgtgctctatctagacatgtatacatcgacgcaatagcatagagagaattaatacattttttggcctttgaactagagatattgttgacacttttttggggcgccaatcactcaacacgaaccagcgatagtgctctctgcacaggggcggacggtccgcggccaggggccggacggtccgcggcctggcgcg

SEQ ID NO: 5389 - DNA, 575 bp, Zea mays
agagcattatttgatgaaggttgcatctacgttggtgtacctcctctttacaaggtttgattgtggcttcaagtttagtagtcttgaagacgaattgatcttaattgttaaaagttgtgtatgttgtggtgttaggttgagcgtggaaaactagcacattactgctatgatgatgccgacctcaaagagatagttaacaccttccctgcaaatgcatcatatcatatccagaggtttaaaggtacatttaactattgaacaatgagcttctaagaaaatatcctggcacataaaaaaattcatttttcttacttcagtgcacatttttaattgccttctatttcatcttgacaaacccctcaaactggcacccatcctccccacctccaaccgacagattatttgtctccactcaccctgactggatgactataccgtcttatgtccgtttcaagtctttacatattcagaggttcttatgtttcctttgtcgttatcttctatttgcttttctggtgctgccacacgtttgactgagatgatgccctgcacaatcatgggaaacatccatcgat

SEQ ID NO: 5390 - DNA, 776 bp, Zea mays
gtgactggtgaagagcagaccgatcgaactcgtagtaaaaaaacacgtacgccttgatcgtagctgtacatgtcacacggtcctcgggtacgtacgcagagacagacaaaggtgcgtggcttacacaagtcaagtcacggcagtaaccggccggccagacgcggtacggtggcgattccatgagtagactcgttgaacaatcaatcatggatcgtccagtgagtccaggtagaggttgtagagacgagtactactgccatgcacaacacaccgcagggggcaaaagcgccattccatcagagctaccactagccggctatactgcatgcacgctctactctcctctcagctctcaggctctcatagtagagactagagaggctagctagagggctagcatgcacgagtcatgagatgctgctagctttgattccttcctccaatacccacccacacgcagggtcagggacgaagaaagaaagcagtggcactatgccatgccatggcagccgtgcagtactggagttcctgcatgcacgcagccacagccacagcggcagcgagccgagggggagaggccccacgggccacgccatgctatgctactcgcctcgactgctgatcctcccccctcccactcgttcccctctgctacccttgcatgccatgcaccgctaatgatcgtcgtccgcgacaaacccggaacccaagaagacagtgtcaatggcagcaccggccttcctcatcgacccataataaaccccacacaccacacc

SEQ ID NO: 5391 - DNA, 746 bp, Zea mays
tgatcctataagtttctttgctcatgacctggcaacacaacacttgagcaattgtacgtgtagaatctctactgattttgggcattccatacagtttcttattttctttttgagaaaagtcagttttacatctgctagcgatgggcttattctaggattgttgcactccattcatttttttataggaaagatagttgcacgtgtgattgtttagaacctaaatcagtttgatatggaatgcagttttgttggtttgacgttgtggaaaagggttagcttactctttagatagtatttgttttgttgtactgttacactttcttttacttataaaaaacttacttagatggtttcaaaatcttaaagccatgcataagttttttaagattcaaatactatttagctgcaaagtgaacttttctctttcattcttcgctttgaatagtaggcgccatgacttatgttttttcatatctataactattaattacagattatattgatagtgtccggctttcctgcgcgcagtacagtcccttgtgtggctgagctattatgtatattgactatgtatgagggaaaaattgcagattgttttggatttttatttggtttgtgacttcgttggtgtgattctgtgcctcgagctagtttgtgacttcgttggtgtgatttttattatatggacactgctgtgtgtgtttagatcgtactgttactatcaaattattatagttgcacaaagc

SEQ ID NO: 5392 - DNA, 680 bp, Zea mays
caaaacaaaaataacgcatgatcggcaggagtgcagttcttacattctcctcggcatgggcatatttgacttgaaggtttccagactctgacagagtctagagttttacagtcttgtcaagggagcaagataataacttctcatcccaacaaagcacagatgttacagaagctttatgctcagagagtgtttggacacactgccgagttgtaaggtcccatgcctggtaaatacagagaattgaagaatgtgtcagaatgagcataacttctaactgccaattgagcaatatcttgaagaaaaatccatactttgatggacttgtcaagtgagccagagtaaagtcttcttgccaagatagacagtgaaatcactggccgttgatggccactgaggatcaacactggttcagtgttactatccttagcaggaaatctccaggccatgatgcgaccatctccagtaccagcaaacaacatctcattcgtgatagccatggaacaaactagactagaaggcccttgaaatcttagtttcatccctgtctttgtgttccatgccttgtaccaagcaaagtcacccctcaatgtcaccatacataatacaaaataaaggtgtactctcactagaatcagaatgtcacctccacaaactttggaattccaatgagtacccatggt

SEQ ID NO: 5393 - DNA, 741 bp, Zea mays
atgctcctctctcgcctccagcctcctcacgcgttcctcgggcagtcgggccacctctccgcctccccgttatggctctccaaccgcttcctcctcgccctcgcgtccatcccggtgtcgccacgctcgcggacgccgtcttcgcgcgccccccggatcccgccgccccgcgaccgattcccctggaacacgtccgtccgcctccacgcccccgcatcgcgctggtctactttgcgtggatgcgctattgcgacgtgcggccgggcgcctacaacgttcctcactgtcctcaaggcctgtggccgcgccggactccttggttcacgccgaggccgtgaggagagagggctgggcgcggacctcttcacggtgaacacgctcatcaacttctaatgcaggatcctggattgccactaggggaggattgtgttcgacaaggcgggcaacgtctcatggaactccatggtcgctgggttcttcgggaaggggagatgaggctcgcgcaggagctgttcgacgaaatgccgcagaaagacacgttctcttgggggtccttgatcgacgtttacacggaatgtgatcttagaaacatttttgttgatgggcattcaggtgtgaggaagccaaagaggctttggagtattttcagagtatgccggggtgtgggcgtaagggccctgataaagtccgtgcccgtgggggctgtcagtgctagtgctcagctgggcgctttggagcaat

SEQ ID NO: 5394 - DNA, 790 bp, Zea mays
tgcatgcctgcagcctttcttacaccgtgtggtagagatatgttttgatgcttgtgtcacgaacaagtctgctctctcctctgtgaaagttacagcatcaagaaatctctacattacctttacagcttccaactctgtcagatttagaacccatggcaacctaagaaaatgccatttggagaaacatgacaatttcatcttgtgaaatgtttgttgtataaatgtgtctatatcactgtataatccatcaatctaaactttacaaaacctacctaaccaaattactcctacaccataacctccactaaatccaacaaacaaattgcactcagacttaacacaatatcaaaaccaacgattcaaatcgctagataacctagacttaatattatttggatcgtctctcgtcccttctcctcctcgtgatctcgctgccgctgccgtcgacctctcgccttctcggattatagtgttagcacgaactatatactagtataaatagaagtttactgttgctccattccaccatcgtctcacagcctgattactcattgattacttgggtggacttcgaaccattactgctaacagtgatgtcgctttgaaataagaaaaccattcagttttgtaccgatatatcaaacgaagctaacacccaattcgtatgtctctgtcatgatttgacacactggtccatatgtcaatgactctagtgaccgtccttacatatagttgcgataggaatgttaaatcttgaaaggcatacaaattaagtgtcaaatatcaaaat

SEQ ID NO: 5395 - DNA, 735 bp, Zea mays
aaagagtagaatatttaattaatgcaataggaataagagttgatggttttgaaaaaagatatttctacctacctgtgaactagtgagtccacaagaactatgtacatttgattgatcttgtaccacaggggggctgaaacatccactatcaggaaaattaggtgattgtggtgcagttctaactgtgtcactaatgctggaccctgagcagttagaagtcctcgatacagaattctcaccagtaaatccatcccgagacattctctgatgcaagctatgtgaactgtaacaaaatccagaaatcttcccctgatgccccttatctgaaccaggcttcctacttagaaatgcagatcgcttgccattgcgcccctcttcatactgataatcataaggtgggctctgtgaaaatgaatggtaggaatttggccttctatgctcttcttcatgggccttttggttctgcaaagatgtaatataatttactacgtacttcagaaagatgcatcgctgtaagatatgctagtaaaggtacatgataagaaggctttacttaatgaataaaacatactgtatgtgaattctaatcacatttacacctccttaagtattcgtgacatctacagatacagcagcaggcttgctgaagccactgaaccgacaaaggacaattctcagggaggataacaactagacttcaaagatccatcaaaatttacctgtttgtctcttgga

SEQ ID NO: 5396 - DNA, 1427 bp, Zea mays
tgcatgcctgcaggacgagatggggtaccccacggccccgcccgcaccggagcagctccgcaagatctgccggggcaacatgatccccgtctggtccttcctgctccgacgcgtccgctccgagcgcaccgttgccactgcgcgccgcaacatcctcgtccacggcgtcgcggcccggcgggcgcgggagggcggggtgataggggcgggcgtgggtgacgccgcggccagggaggccgaggcgagggagcgggacctcgccgccgaggaggccgagcggctgcgcggaatcgtgaggaggcagcgcaaggagctccgcgcgcgcatcgcggaggtcgccagggaggaggcggagcgcaagcgcgtccttggcgagcgctccaatgccaggtacctaaaattacagcggaattgtggggtacgtctaggcgattaaactgttgctacattcatgtatacatttttgcggcttgcaaaatcttgtcagcaatcacacataagatgtaggtcttcctgactgtaactattccactaatagaaatggtggtgcttagtgtaatgattcgattgctcggaagctgacatcagtgttaatcttagtttgataggaatatactttgcagtgaacaaagaggttttctgaaatatgaaatccagaagactggcacatagtaaaataccatctgtagtatcttcagttttaccagcctagatgtccctctatcaccaaaaaacactatcattatattcctaccaattatctacatctggaatcggtgtttgtgcataaaccaacatttgatgacaatcccttcgagggcttaaaagtgccaataaattcatatttctttatgtttgttgcattaataagccaagaaattcgtggtagtaagcctgctgacatataaaaagtcatatccaactcgtagcatgtgaaaaggctgttgaactcacaattctgggttctggcacacagaggcggtgtacttcaatgtttgtggtacagttgttttatggtcaacattaacatgatgtgtttgaaaacaataactgatactgcttttatgtttctcccttcatgctttgcaatttcatttttatttatttatataaattgtggcaagtggtgatggtgtgcttgtagcatatctagaataattgacaaggaatttctaaaaaataaaaaataggcacaagcaagttatgctcgaagcatatgaacagcaatgcgacgaagcatgcaaaatatttgctgaataccagcgtcggctacatcagtttgtcaaccaagcaagggacgtgcaaagatcaagtataggtgtggctggaactacaggttctgttgaagatatgcaattgcagagcaatagagacgacctttactcatcaactattaaaagcaataggttgtcagaggatcttttaga

SEQ ID NO: 5397 - DNA, 791 bp, Zea mays
tgggagaggaagcggcggccggcgataacatccaagaccaaatggagatcgctgcacaccttaagggccatgtcaacatcagctaacaaaacccaaaaatagaatttgcttctctttcaagctgtattttaccagacgcaccactcgatgtaaaactacgcctagatgtgtattatgtaataaccgtgaattgcgacggctcacaataatacccatgtaaattatctaaaaaaagatttcaagatttttattgattgtctccgatcttcgcataatatttttttatgaacgcacgaatactataggcagcaaatcagagacccacatctctcgtatcccccacttccaaggtttaatagagcaggaggagaaggaaagagacggacatacatgtttattgtcggagaagaatacgacgaagatcttgacatctggaggcgacataggtaatataccgctagatatataaggagagagcatgcaagcggagaaagaagtccatacggagcagctccaaaccgagaggcacccgcaccaggcgtcagtccgagaaaggcgagagaatgcgagtctcttcacagccttggacccgtcgaagcgacacaagaccaccaccaactccatagcatatttcgactgctgccatggtacgggccttagttgttcaatatctcaaacttgtactcctcatcgctaagataacctaagcgtggtaggtgccaaccatgtcttcctcgacggcacgcacggagaaaggccaagagcatgcccgacttgccccgtacccgggt

SEQ ID NO: 5398 - DNA, 733 bp, Zea mays
acgtggagtttgatcccacacccatggaagaggtcttgggtttgtagcctgatgataatccaggctcctaatctttactatacttaaagcaccggtttcaacggtcgtcctgcattatttttttacaaaaaagttcctatatttcttgcaaattaactcagcgtaaaatattaaaatacggtgcaggacgtggagtttgaacctgatggaagaaaatgtgaaagacactaggcgaagttgtataaccaatagaacattatgctcatttgtttataatattaaatataaattgtacatatgtatatataattttttgtaaaataaaaaaatttcatgtcgggtcgggccagcactacgggccgaggctacggcccaatcaccgcacggcgctcgtgccgggttggcccagacaatattaaatgggtcgtgtctcgggccggctcgccacacacggcccatttagccatctatacctacacatatggtcctcacctcagttgccacaaactcgttcgtcattatactttttttctctctcccctcatgactccacctacttgccaccccattctgagtagagggcatagaagcaggcgcctcctccccgtattcgtctggcaccagccctgacactaactcgcacagtggctgactggctgttgcacgtccacgagaacgtttcacattatgcgcgcaccatcgttttcaccatcgtcggagtcccattcgtctt

SEQ ID NO: 5399 - DNA, 798 bp, Zea mays
agcaccggccacaggaagccatagccgccatctcttgctagccacgggaggatccccgtcctcgccaccatacatgtcgcactattgtaatctacgtgccttgccccgatctgtgccgtacagtgactccctagcgttcgggacgatgacccatggtgaccctgaccaacgatttgggacgatgaccctgggccatggaacgcggcatcgaccctgtttcctatgactatgctttgaccatgtttgtaaaaaaacatgcacaaaaatctacaacatcaaacaagatttattagatacaccatgaaatatattttgatagtccatttatttgatattatatatgttacgataaactcgatcaaagttaggtaagtgtgaactaagacaaaaccaaaacaacttacaatttgaaaagtaggaagtatattcaaaccacattagctaaataggggtgatgtctctcctgaaatttaaagaggaagctcgataaagctagatcaacctcaaatacttattgcaactcacgggtccatgactgcttaatgctaggtatccaatactgaccattatacaataaacgaacatgtgtgactgatacacattttctccaatatggatgttgaaagattcgtgataggtgtcaactaaatgtattaaaattgatgagaatggtatgataatttcattgtcatattcaatagtttacatgttgcacccgccaaaaagggttggtagacaacaaggtgatttttccaaaaaaaaggtgttttgtaatatttggctaaaaggtttaacaaa

SEQ ID NO: 5400 - DNA, 718 bp, Zea mays
agggtgagccgccccggcatcgccgcccggtttttctagatgttttaggcagcttctccttcttcctatactacattctttgattcttttgtactactgatccccattgtttcctgcatatacagcataacatacacatacccatctctggtagtcatagacattgatttgttcttctttctttttatacacaaagaaagtaactgaccaaattctttcatccgggaaacaagatcatctggttttcgaacgggctctaatctttcttttgtacatcgatccgttcgttcgttcattcgtacacagcagcagctcacctcacacgatactgggaaagaaagatcctctggccgtatccagatagcacggagagaggcagtgaggagaggggaagtgggagtgaggagtgaatcggcagagaggaggaagacgaacaagacgacgaagacgaagccacagaggaggtcaggagggcagagcagaggagagtaggtctcttcttgccacaccgcttccggccgcgtctccgggatgttggctggttgctccttctcgtcgtcgaggcatcagatgagcaccgcgcagcgattcgacatcctcccctacggcttctccaagcgggcgagcaaccgcggcgatggctccggcgccgcgccgcgcgtttcggtgcccgacgcccagaacccgtgccgcaggcggcacctgctccttccgcgcc

SEQ ID NO: 5401 - DNA, 1446 bp, Zea mays
ttgcatgcctgcagcaaaagtcatatagcataggttgctaaccagaataccaaaaggtgcaacctttaatacagaaaacaaaactagacaagttcatggttaaataaacccactggcatgctgtgcagtagatattaaaacatagtagaaatccatagaacattgagaaaatgtataatcaatgatcaataactgttttacaggtttggatcttggggtatttgtttcacatatggcacatggtttgctattgagggtctatcagctgttgggcagagttatggtaacagcacttgtatccagaaggcctgcaagtttctcttagcaaagcagctaaagaatggtggatggggtgagagtcatctttcatctacaaccaaggtaaccatttccggtatgcttttgcaacgtagatggactgcatctttcatcaagaaccaagctaaagaatgttttacagtaagcaacacatccagacaatggaagcatgctttgatcctgtttatgtttaaattatagacaaaaagtacagaaatctgcatgaattcgtaaccagatagtaattcattaggaacatgaagcattgagaggaaacaagtaacctggctcagccttatttagagaaagtgaaacaagcaataaagtaaataaactttacgttggaaaaaaaaaccgttgcaattgcatggcaagaagagcatgagtcatactcatacataatatgtttcaataattccatatgtacctcaataatggaacatgcaggctgaatatttgctggttggaaaacattatgcatcttttgctttcacaaagtttacagtgcacctgtattaacgctgaagatttttgtctcagaatctgtcttgccttgccgcattttcaatccatgagactgagcacatattcaaattatgaacaggcatacacaaatctggataaggagaagtcacacatagtgaacactgcgtgggcaatgttggcgctcatgaaagctggacaggtgattacttgatttaacactagaaaatatttagcggccaattggagcagagcatatttaacatcagaataaatcaaccaacctgcttatctatttaaccttatgaagcattagagtgatttcaaacttttcttctaagttccaggcggaaagagatcccactccacttcacaaagctgcacggcttatcatgagtatgcagctcagcaatggcgacttcccacaggaggtgactcctaacttcctaagtgtgctctgtattatacaatgcactttttaatcctgacattccctgttacaataaagatgttaagcataatgaagcaataaagatgttccatcaatagatgtgagcgaccttttgcttgagaaacgacgataggttttgaccttcaaagtaccctcacaggaacttagatagaagaatacctctctgaatggtt

SEQ ID NO: 5402 - DNA, 789 bp, Zea mays
gcatgcctgcagtaggtttacatttctttctgttgccttttctacttctataaactgtagtaggtatgatgtcactagacttagactgaattgtaagttttgatgtcctcatcagttttgtgcgtagacaagcagagcctagttcaccaatcaaattatgcttcgatttgggcctgatgagtgccatttaccggtggacccgcggtgagtcgtgatatacgtgattatcgaaaaatgagttttcctacgcaattctgttaggggccgcttggaccccttcggaactatgtcatcgggtcttaaagacaaaacccgtggactggcgtgttgagtggttttgaggtttaaccagtgttgagtggttttgaggtttaccatcgaaacccttgtgggtagtgtatgaaaacttcatacgtgacccatgttttagacacgtgttctgttagtgtgtaacgtaaccgtgtcggtggtatgatctgctctaatatccttgcacatgttagtgttcgatcaagtcctagtgcttatccttaccgttttcgatccattgacaagaatccacatgacttttatcttcgtatcaccattttcaactccacgctacaagccaagagatgtgttgtacaaatactctcatgcccaattagtccacccatctcaatccaagacactacttactcgtcacaatcgaaacacaccttatgtttgcaaaatgcctaataattggctcacaatccaataattatggactaacaactagttgagtaaattttagcggactactctaca

SEQ ID NO: 5403 - DNA, 707 bp, Zea mays
agctactacaaatgtacaaacccgggctgttcagtgcgcaagcatgtggaaagagcatcgcacgatctgaaatcagtcatcacaacgtatgagggaaagcacaaccatgaagttccagcagccagaaatagtgggcaaggcagttccagcgctccatctgcatcacaagctggtggttctcaccgtaggcaagaacctgcacaggccagctttgctcactttggtacggcttctttcagctcgttcggtctcccaccgagtggtcagttgggaccaacaactggcaatttcggcttcgggatggttcccccaggcatgacgatcccagtgccctctctaggatcacttgcccctgtaaagatggttggaaattcatcagctatgcagggctacccagggcttatggtgccgggagaaccaaaggtagagcctgtctcgcaaccactcatccaaatggcaaatgcatctccaccagcttaccaacagatattgagcaggcctcctttcggtcaccagatgtaaataataggaaagagaaaggggataatagatttgcttcagcttgtatacatgatagctacgctgcaacatggctttagtgttcatggatcgtccaattttttatttctattttatttttctgcccacgcatgtctttgaagcaaaaaatgctgaagatgataccctgtcgtgccttgtgtaatcac

SEQ ID NO: 5404 - DNA, 716 bp, Zea mays
tggcgcatatggatagaatcaaatgagtcaatgatgaaagtgttttagttcaatatgtgattgaaaaggagcactggatttgagacgcatgctaactggaagacaacggtttctgacgttatattgaatctgaaatttgcaacatcgcattcaggggcggggcggatccagtaaagggacttatatgcatctgaaaaaaaatcgcaccccccgccgcgctgatgccaccgctgttgcagatccggactcatggaatgcggatccgtgcccctgcaagtggatctccacccacgccacgccacggatccggccatagcgcaccagatcgagcccagccctagctggcgcaggcaggaggaggcaagcacgcttggggagggaactcgcgaggagagtacaaaggcctcgctgccgccaccctcgcaccagcgcgggcctccggccgcgtgctcaggcggcagcgagcgaactcttgcagcggcggcgcgggttccgcccgtgtcgccccgcagaggagcgacggttcgcagcttcgcacagcatgaagggaagggaagagaagaggtgggagtacctggtgggtgctcgctgccggcgaagaggccaacgaaagcctcagcaccctggcttagggcggcggcggcggcaactgtggtctgagagcgaggagagcaagaaagcaggaatgcagcggacggaaggggaaagggggaatg

SEQ ID NO: 5405 - DNA, 861 bp, Zea mays
  unsure (1)..(861): unsure at all n locations
ctctcggtacccggtgatcctgctagactcgacctgcagaagcatcattgggaggtcttccaagtcacaattgtaactatttatcagacgtgaatcagatggcttcccagtcaaggacccaacaatgcttggggagccctcacccattaaactaatttggccatctttcaagatcacctttgtactaaactgcgacctagatttgtacttcagctcgtgataatctgaaggctttgtgactcgaccggtggccaggataggctgaggaactttcaagcagagagaccaggaagaagttcgagaatgccatgtaggaagggaacgcagatggagataaggaaccctactaacctgcattagtgaaaggaattcacaatgccaatctactaatataaaattatactaattgacaaatgtcgagtagtcataccacactttccagctccaaatgtactttgttagaaaatatcctgtgagctactgtcatgcaaaaatggcttagcaggccacaatcgtcaggtgcagcctgagcacaactctggtagcgaaccacatgacgggatttctccctgagttttctaaggatgtcttcatggaacatatggagcaggtagatttctaagcttttggggttaggaaaccctctcacatncttatttgaagactccttcccatttacagtggctactgcaaggtttccagtatgatctatatccatatgatcttcctgccctactgtccccgagttattattctgcccagagagctcaagcgaaaggcacaaagaacattcctggccaatcgctaattggagaaaatccccacacattccagtaacattgatgccttgagattggataa

SEQ ID NO: 5406 - DNA, 751 bp, Zea mays
tgccaaatgttccagctgcgcgaagaccgggggccgtcgtcgtagccggaaggttgtcgtccttcgtcttcgtcttcgttttcttattagcagctgaagtgtttgtgtttttcttccggtgcagatagaaacagaggtaaacagcagcagcgaccgagacgaagatcaccacacccgcagcagcgccgaccagcacccacctggggctccgctttcgtctgtcgtcctccaggccaccactcacgcccccgatcctaaccgtcggatgcccaaggtttccgttccggctgaccttgaagatctccatgccgttcaggagcgcgtcgctagccgcggagctggtcgcggaggactcggagcccagctgaacccagagcgtgtcggtctccgacgcgggggcggcgtcgtcgtcgtcaaggaagtcctcgtggaacgccttgttcttgcccccggccttggcgaccacgtcgtagttctccgcggcggtcttgccgttgatgtagatcttgaacctgcgctgctccgcgctcccgtactccagctcgcagaagtgcagcctgaccaggtactcgaagccggggtccacgccgaaccgccaggacacgttgaacttcctgtccaccacgaaggtctcctccgtcaccctggccgtctcgtacagccgcagcggcgcggggaccgagtcggcgccgtcgcgcgacacgtagctgatgctggacgtgttccggatgctgtgagcggcgttcatgga

SEQ ID NO: 5407 - DNA, 773 bp, Zea mays
cctgtaagtgcgcctgtacatgacagaggcacagataaatggtcatttcaaatgggtgatctcagcacataatctccattcgcacacatctattccagaaaataataacgatcatgttagtgagcagcagctcaactcaggttgtacaaaccttcatccactcatcccagtctcattgcaatgctgagtgcgttcacgtcaaaaggtctataaaataggtgtaagagctatgcaatcaagtccaattttaagcacagttgacaacagtgattctgcaatctcttgccaaaaaaaaactaaacttctgcaaccaacttagtccaccactataataaagcaaacagcagcacaacgacttgcgtacgactacaaaagagtaaaagacatgtaagagatcgccagcttgcaccaaagcattgacaccagcggcaccaaatagaaaggcacaatgactggaacggaccagcatacactcactcgattaatggagtattcatgagtacaaatataatgtcaaaaatgggttttcgccaagcaaccatcctagtctcatcatgcattctcgtaatggtggagcttgtacagcaggacctttccacctgcatgtccgacggacaggaagccgctgccggggctgaaatccaggcaccgtggatagtggagactaaaccgaggccccggccagttctggaacacgctgaacgacgggacgtgcacgagcctcatgccgttcctctctttctcgagctgatcgccaggatctgggcgtcatg

SEQ ID NO: 5408 - DNA, 715 bp, Zea mays
acgggtggcgacagcgagagggaggtggagaactcgcagctggtgtcgtccatgaagaaggacccgctggtctttctcttcttggccgacgccgtggtaggggacaagctgagctgtaggtccaacgtcgtcgtcgtcgcatcttgggcctccaccggcgacgatggccgccgcttgaggcacgcctcgtcctcctctgccggagtggctgtggaggcccttgttggttctacaacgtgcttcgaattctgccgctgagatccaaatgatcggtcgcgcatacaatgtagggtgtcagagatgatccgctgaacggatctagggctagagagcgcatgcagtgtgaatgccgcgtataaatgaaaatgagcacgtatacgtacggtacggtacctcgagttgatgcccatcgtcgatgacgacgggatccgacgacgatctttttgcgaccatggagctgctacccgggtagccgacgactacgtccctactgcttcccccgtgccgccatctgaacggaagacgacgatctccgcacacggccggcgacatgggcaacggaagtggccgagagctgctcccgacgcagttgtcgaattttacactggtaactcctgtccctgccctgtgctcgccggcggcgacagcagcgccggcctcagtgaaaggccaccaccgccgatcgctctcaacgctgcgaagatgcagcgatgct

SEQ ID NO: 5409 - DNA, 784 bp, Zea mays
accgccatgctgcgaaccgctgccggggaagtacacatgcgacgacaagtcgcgagcggagcggccgccggccgggcaggcaaagctatttattccgtgatgtgaatgctcagtgctctactgcgcacagcgacgaccgcgacgtcgcgccatcagcagcagcagcagctcgcttgcggaacttgactgccatctatctgcctctctctgtaccaactgctctgtgaccagttattaatttattatctttatattcttcttttttttaaaaaaaaagaacttctctactcggacagaaaacacacgcttttagatgacttgatccctcgagtgcagattaaaaagccggcttctccgcgctgcaactcttcactcagccatgtgagctagggagctagctgcatgtaaaaaagatagagagaggtatgttggggcgaaggcgaagacgccatccttcacttgatgccttcgtcaatctcaccgaaccaacggaggctaaatggtcggcagtttctacccttcgtccaatacgctgcaagacgaagacctacgacgaggtcgctccgtctcacggcctcgtccaacgcgaagacccacatagaattcggcctattgtaataggccccgcgcggccgagggcattacgggcccagtttgtgaaagcttttctgtaatgacagtttgtaaccctactttattggaatattccggggatgacctaggtgcctgagggcacatgcgtccttaaatcatgacgctgggcactcggacacctataaatacc

SEQ ID NO: 5410 - DNA, 674 bp, Zea mays
ctaggtggaatagtgttcagcaagcaaacaagcaaaatatggctgctgatgcatcagacaagtctgagagcagtttggagattttggtcgattctggggattaccagtcagatggacttcttgatgatattattgagaatgcttttaacacagaggattgcatggacaacaatttttgggagaacaattaccatcacttatttagtagcagtgagacggatgatggatttgagctgaatgcggccacttcacatgtatttcctatatctactccagaaggcaatgttactcaaatatcactagaacagaacgtctgtcctgatcaaatcattgattcatattgtgtgcctgaatttcatcaatcattatcaactctatgtgatgaagagcataaatgtacatctggtgacaattctcatagaaccctggaaagtgaagatgctggatggtataacaatgttcccttaacaatagttgagaatcatgttttgaaaaagaaaaacgagcaagtacttcaacacaaagtgtcttctgtttgcagtttgaatcctgatgaatattgtaatctgaaaggaaaggttcatattcatgatatagatgtaaagtggcggatgtatgctggagatgactggttattacctcagaaagatttgactagcttaacatgcacagat

SEQ ID NO: 5411 - DNA, 738 bp, Zea mays
acgcctttggtgagtgtggcctcctcgagatccacgtcccacgtgaggaatcgcggctttgctaattgcttccttgtgctgtcgcgtcagacgattttagtcccgcttccttcgagtgttttgatccgtggggcaatgcggatcatgatcatatgttttgcgtgtacggggatcgtggcctgcgccgcgcggtgggctcaggcctctgaggcgaactgctagattggtcagtgtgtttacgacatgtttgctatggtgattgtgtcgttgggagttttttttaggtgtcgatttctgcggattttgaggtttttgtgtttattatgaattatgatgggatcctgcggcgtttagtcgccgttctggtgatgcatgcgggcttgttcctaattcgcgaggcatgttcccaattactacgagtctagcctgactggccttgattttgttgcaatttctggcatattggcatgttttgatcgggttggtaatttctgagtttccgtgcgcctggctgacctgttttgtttttacttgaactagttcagcgagtacactgtgcatcccccgtttttggtatgatgaccgcttgagcagaagggaagtgatgatcaaacgtgaacattaggtgctagctccaatttggatatttgatggaaacactgtgatttactgtataattgggggttgggtttagagttcatggtgtcaactgtcaaatgcttgtgccttgaaccacct

SEQ ID NO: 5412 - DNA, 763 bp, Zea mays
gcagggtgcaggagcagccgccgtaccgtcgtactcgtgcaggggtagatggcagagcggggggcgcgtgattttcaccacggtttgctggggggaaccgaacggaacggatcagatggcatcgctgtcgcctgtcacatggctttatgcccggggattatttttcaggcccctggttgggacgttggttgtaggcatgccaaccacaagagccttttgctgcttttctgtccctcgtcctcgtcctcgccttctcctcctcctcggccaccagatctctttccagcacagccgcagctagccgagggcagggcgccaatggacgacgcatggatcaatcccgctgcatgacattggcatggccttggccgcctacctgcgtgcgttaccagcggtgccggccggtgcagtggtgtggagtggaggagtaataactgatctgcccagcaaacgccaccacacgcctaaaccaagctgtgactcatgctcaggtactggaactgagtttgttttaaaaaaaaacaagaacaaaattggagcatacatggaactggagatcgatggcctgagtggacaaagcagccccggcgagcagcgcaagcacggatctggccgggttttgaatttcgaacaggacagctagctgcctgccgctgagttggagttggatcccctcgttggaacagaacagtccaggcgtggatcccctcgttggagttggagtcgtcgctgcaactgcaactctgcaagacagaaaagccta

SEQ ID NO: 5413 - DNA, 763 bp, Zea mays
agaaaaaaaaataacaagtcacctcggctggcagtccaattcgaagctgcccgcgcccgttgcctggctacgggtatggctggatgagctggctaacgaattggtttaattagatttgttaagaaatcgagtcagagaatcagtttgacttagtttatttacgagttcgagctggctcctttaacttataagccaaaaaaactatatgcatttatatacacaacaatataatcaattgttaattaactctagaccaatttcacactaaaaaaagtaataatacttataattcaacaaatataccacaacaattaaacatcaaattaacatcgtttatcacatattagtttatctaatataagtagatgttttgtttggctgataaatactagctcgttcgagttagctcattaacaaaacgagatgagctatttgttcaacccgtggcaagattgaaacgaaccgagtcgaaccaagttacggaagatgtctaggcttgcacacttacccccaaggctcttctcaaccatgctgctgctcggctactggcgcatctggaattatcaacatgacatggtcttccaccaccagcaaccacgcatgcgtaggctactaagggtgtttgaatgcaccagaacaaataattacctagttaaaactttggtagtaaaattagctggcttacaaataacttgataattatatctacttttttaaattagcttatgggtaaactttttattggactgttggagatttttaa

SEQ ID NO: 5414 - DNA, 772 bp, Zea mays
aactcactgcccacacagccaggtcgacgcgcacaacacatcaggggcttttacgagagaacaacggacgtccggctgctactactcgttacttacttccaggggtcgtccccgaccagcatcatgtcgccttcgtagtcggtgtacacgaccatccactccttgctacagcctttcagctcgccgttgaagtcgaacatctcgtccagctccgccaccagctccgtgtagccgttgaacttggtaaggtccacggacctgcccagcgccattccttgcttgtggacctggaacggacagcaggcgtcgttcatgccaaaaaatatttctgcggaaatataccgctcatgtgcctagctagcgcatgcagccacagcagcattaagtggatacgtttagatagtgcgtacagacagccacagcgttcagatggcaaaaatctaccatgcagttcaaacagggagtaaatacgcacgtgatggaggttccatttagttatgtctgcgtggtgcgctaggaagctaaagaggctttgcaagtttctcttgtagccttggaacattgcaaacgaacataggagatgcttggcatagtagtaacgagagaaaaaaacacaccttcttgcagctcctagtcgacccgccttgtgatttgcactgtgtgccccttgaagcttgtgggcatctctctgggacaggatccacctgtgtagcaccgagttgctttggccgtcttgtgcggctcacggcttttgtctgcgtcgattccgtct

SEQ ID NO: 5415 - DNA, 555 bp, Zea mays
ttgcatgcctgcagagagaaggcatctatcagacgatgacgacctctttggtcttagcaataggttacatacaactagtaggagctgtcaaatggtgttcaatcaaccctctaatcttatcatgaagctaagcatatagctttagacagacattatacatagaccatcctgtacatatttcaggctctagatgcaaactaaagatcaatctgccgcagatagaattatcaccttcggttagtgtagtaggatcttgcaccatttggaacgaaaccatatatttccaacaggtatacaaggttaagcacaatagtctttgccgtgtcgtacattttgctcaccagcaatcctctgcattgagccataccgcgatataagaaagaaaaacgacaagaatgggtgttagttcgttcccgatgtccatttgggtcagtgcgagtagcttatacagtaggtacaaaaaaaattaacagacatataacagatcattgggtcagtgcgagtagcttatacagtaggtacaaaaaaaatttaacagccatataacagatcagt

SEQ ID NO: 5416 - DNA, 550 bp, Zea mays
agggtcgagaataagaagccatttgctcctccaagggaggtacatgtccaggttacacattcaatgccacctcacaagattgaaattttcaagtcacttgatgattgggctagagataatatcttgacacatctcaagccagtcgagaagtgttggcagccacaggatttcctccctgacccagcatctgaaggatttcatgatgaagttaaggagctcagagaacgtgccaaggaaatccctgatgattattttgtttgtttggtgggagacatgattaccgaggaagctctaccaacataccagactatgcttaacaccctcgatggtgtcagagatgagacaggtgcaagccccactgcctgggctgtttggacgagggcatggactgctgaggagaacaggcatggtgatctgctcaacaagtatatgtacctcactgggagggtggatatgaggcagattgagaagacaattcagtatcttattggctctggaatggtaacatattctctcatccatttttttactgagtcttgacacatttttt

SEQ ID NO: 5417 - DNA, 747 bp, Zea mays
cttgcatgcctgcagtaaccaaagcagcactgaacagactatattgaggaaacaaaagggcaagttaaccccccacccccccccaacccacccacacaaaaagaaacatgtgtatcatagaaatgctacttctggtgaaggtaagatataacagaaacaattcagtaatgttgtggatggaagagcacatagaagtatataatgctgaaatatcgctaaaaaacatttccatcttctcttttggcattttgccttctcatttggcatatatatttttatgatgttgtctagattttctgaaagaaggctctgttgccatcgttattttttaagacttgacattttgccaccaaagactgctcctcaagtctaaaaggtacatcactattgaatatcggtaataaaaaaacccaatgactgaagttgttagcttactgttcgtaatctcttaacaccattgcgaccagcaaccatgtgtctgtcctgagggttgctccctgacagagaaaatattgacacaggcgacccatcatcctggagaagacaaggcaacaaacaatgttggcaatggcatacaaacaaatctaccaaaaaatcagacaaaataatcatttgatgggaactgcttaagaaatcaaattacatatgaaaattcagtactaatggtaaacctaggatgaataataaaactccattgacagtgtgcaatatcagtgacaaatacatgagtggtaatatggcacatgg

SEQ ID NO: 5418 - DNA, 715 bp, Zea mays
attctctcacgagtctaatcataggccaggggtaaaagcgcaaatgtttctgcgctctcttttctcccctcaccctttctctttctccctcgaccgccccggatctatctcgccgcgccggcgcgcagctgagccgccgaagcgaggaggcaatcgtggcggacgaagcgccgcaccaaattcgacgggggatcgagcaccagaggcgtagcgcaaaatgttcaagttcctcaaagaggtggtcgcgggatccggatcgggactcaaggacttcccctacaccatcggcgagccctacgcatcggcttggggctcatggaaacaccaccgcggtacctccaaggtacgcttccgcatcattccacactttcacacccgatcgatcagtcccccttagatgtatcattgttttgttttgtcgactgccgactggtacggttcggtagaactggttccgttgatcgaattcggggaggaacgaactgtgcacgctatgcttcgcgtgtgcttggctgtgtggttcatgtgctacgtggctgcatacgctcttaattttgtgggtctgctgcgcttagcgttttgagcactcgagcttttttcgggtaggtgtgactatgttggactattgcaagctttagtaaccattcagaagcacaatcgctggattcggtgtagaggtgatttcaagatagtctatagcctgttaatccaatga

SEQ ID NO: 5419 - DNA, 787 bp, Zea mays
tgagactttgaaagaaaaacggaggcgtgctgtgcaattctcaaaggctggcctggatgttcctgaagaactctcactgttcaagaaaagcggtggtacgaaagttcctgaaaacagtgatgttggggagcaagtttccccattgaagtttgttgagccagcaccaattgtggattctggtagagaatgtaataacaaaatgaaggatctagtgaaagctattgaatgccaaccgattatgggttttggagctggcattccagagccagaaactgaagagcctagtgatgatgctcatatgttgacaaatcagaaaattcagttgtcaattccaagttgttctggagcagaattagatttgcaggtcatcaatctgatccgaactatatacttatctcattttctgcatgctcatcaatgtttagattattcaaaagaatgctagttccgcctatccgtagtcctttcctgatgctatatcagaacctgctatacttattttaatataatccattgatcgtagttattctttttttggtagggtaaagaactaggacaagggcagcattctgtacaggagtgcataaatcctccaattgttgtacctgtgtcaagactgcatgaagttgataaggcaaggagggatctcccaataataatgatggagcaagaaataatggaagctatctatgaaaattctgtagtaattctgtgcggagagactggctgcggtaaaactacccaggttccccaggtcagtgagtgtgcatgcatgatgccttcttaa

SEQ ID NO: 5420 - DNA, 713 bp, Zea mays
tttgcatgcctgcagtactctgaatgcaaagcgtaaaaggcaatctagcgcaatgatggaacagtgcatcacacaacagattagcaggcattcacccccccatcgagcgggtgccatgacccatctgacaccgatcagggagctaactacgccatgtgctaggactaaacagtgggatacgtgacagaggttgcagagaaaacataatgaagctcacctgagatctttgctccctccaccagcagcagtcgcgtaagcagcggcactgtccatgtgcagctgagaggtggggcccaggccgaacgtgccaccgccaccagcaccaccacctaccccgccgccgccgccgccgttgccggcgaggatggatgggtacatggggtggctctggaagccagcggtgggcgcgggggcctgctggtggtgctgctgctgcggctgggcgtgcggcgggggcacgagctgcgcttccacaggctttcttgaacggttgcggccgcggtgcatgtggcgctcgcagtacttggagtccggggcggcctctttggagcaccgccacttcttgccgtccgtacgccggcaccgtccgggctccgggtccaccttcttgccgaagtagggccccgtaccccaacctgcaagggaaagcccacaccccaccaccacgccggcgcggaggagttgaaaccccccaatgggagttccacccggcc

SEQ ID NO: 5421 - DNA, 726 bp, Zea mays
tcaatatctgagagagctccccaaagatgaagatagtcaattagagctccaactgtgagagccactttaatatctgaaatccatctcctatttgataaggcgtcttggatagttctcttgttacggactctctttggtattaggtcatacaatcgaggtgccaaatcagaaattcttctccatgaagccacttatctgtccaaaacatggtgtttgctccatccccaatctcagagatcaaggccctggaaaagaaagcccgagccttactaggaacatagacaggtaagccagaccaagggcgatcaaggtcagttttttgcaaccaaaaccatctcatcttgagagcccagcagagctcctggagattagaaatactcaatccacccagctgtaaaggtcggcacacctttttttctcgaaagcaaggtcggcacacctttccccatgacaccaaacagtgacctcctcttgcttcctttcgacctctccagaggaaacctctccttatcttatcaatagcatccaagacccattgggggatgtcaacagccatcactacatagatggtcatgccttgaggacatgctgcacttgaatccttcttcttgccgtggtcattaaatcagccttcctgtttggaagctgatcatcaatcttttccacaaaaggctgaaagcctgaaagtgttgcctgctaaacttacgtaatgataatgggagccct

SEQ ID NO: 5422 - DNA, 768 bp, Zea mays
tgcatgcctgcagcaccgggcactggctatcaaccagagaattgaagtccaatcttggacatcaggattcaggacaaggtcactagattctacaagactttgtcgcagcctctacaatgccagtcagaaacccaagctttcgctcgtgaaactcgcgtctcaccgccatcgctatcccgcaaaatacattagccagtcacttgcttgcaagcattattaatcgtataagaaatggtaggtcaatgcttccacgtacttccctaaaaaaaatgcttgcacgtacgagcagagaagaaaaacgatgccatgttggagctgtcatccctggcctccgtttcatattaaaacccttgcgtacgttggcacgcgagtgttgtttgtggaggaaatggggagcagcgcggtgcaggtgcagcggcgtaggcggcagttgacgctggttctggtgaccacggcggcgctgctggagcgcgcggacgaggcgctgctgcccgcggtgtacaaggaggtaggcgagtcgctgggcgtgtcgcccaccgcgctgggctccctcacgctgtgccgcgcgctggtgcagaccctgtgctacccgctcgcgacgtgcgccgcggcgcgctacgatcgcgcgcgcgtcgtcgctgtcggggcattcctctgggccgtggccacgctgctcgtcggcgccctcgggcacatatctccaggtcagtgactgccactggccactggagtctggacatcggaccggacactaacaaagggggcatc

SEQ ID NO: 5423 - DNA, 770 bp, Zea mays
tgccgggaagggcgataccgcaagggccgaggagtactactcgcgcgccatgctcgcggatcccagcgacggcgagatcatgtcgcagtacgccaggctggtctgggaggtgcaccacgacccggagaggtgcctcggctacttccagcagtcggtgcaggcggccccgttggacaggtaacaacaagccttccagaatccagatccagtacaccacgcatgtgcatgaacattcctagactcgatcgagggctccccgtccttcctaacgttgttggtttgtcactcatcttgcagccacgtcctcgctgcgtacgccagcttcttgtgggagcaggacgacgacgaggactgcggagaccaagggacggcgggtggagcggcggcacaggagcgcgccgcgggaacagggcaagccatggagctggcgtccgcggccgtctgatcctttccactcctgacaggggacagcgcaggcgcgctatagcaaaatgcagtataaaatgcatggcgtatcaacggttataaagtatgaaatataaactgaataataagaataaaagaactcatgcggatatatacaaggtggagtggtgcggtgtaaaagtgtgttttctccctgaagaacaagccaattattctaattatctatgtcaattgtcaaattatatgttctttcggtggctacattagtacatattctaatcacgatgagaccactcccaaaaggagtgtctttttgaagaagacatgtttcacaacactacttc

SEQ ID NO: 5424 - DNA, 755 bp, Zea mays
  unsure (1)..(755): unsure at all n locations
acacttaggcctagtttgggtactctagtaatgagtgggattagagtggattgagatgtattaagagagtatttgatctattggggatttacaccctctccaatccctccaaaacactctaatcctaaagtatccaaactaggccttattaggatcgtttggaatagctgtacctaaaaagaaaagtaaatttggatctgaggttcattatgaggcagctgtactggtggatttagagatctatcctaaaaccgtttagctcttacgcggcagttccatatccattcaaggataatttggttgaaacggactatatattttacccttgagataataggcacacaagtcagtgtgtcttgctcttttattcctctttccgcaggccagagtgtctgtttatttgctcctccggtgtcgatcgatcgataatgcccccctcatctgacactgatcatggtgcttgttcatttgctgctgtgtgcaacctctccaggcatttctcgagcagggagcgcctagcgacccccgtatgctggtggccatgatgcccaaggtcccatccccttgacctctctagaatatcacatacatatatataccatacatgtatctctgacaagataagattactgagcagctggcgcggccttcatttctcttccccgcaggcgaccatcaacgtcngcgggcgcgtgctgagcgccgtggcgatcgagcacttcattctccggctgccccactacgacgatgacgac

SEQ ID NO: 5425 - DNA, 771 bp, Zea mays
ccataccctctaggatatttgggtcttctccaccgatgagtaattttgatccagctaaaatgctcactgtaagtcttcatcacttctgttgactgttgtgctatgtggcacagttgcacatttttgtttatgtttgctctctcacgtgctgacctgcataatttcatcacccttttaggcttgtttggacgtttagtttagttccttagattaagttaaatttgaaccgagggttggaagttcctagaagaaatccctcatccaaatagaggtcccaagttatcatttatatcaatgtggatctgaggtgccttttgaactcttagagctcaaatatgtcttgggacaatttggaatgaagtaatggactcctttacataaaggccaaaacaatttctgtttttattgcaccttactttagttattgtggtactgcgttactatatgtagtgcttgatgacaggattctgggaagctccacaccttggatatgctactacgacgccttcgagctgaaggtcatcgtgtgcttctttttgctcagatgactaaaatgttggacattcttgaggtattactttatgctacatgtttactatttaatatgtgcactattctacatgtttgtacttcctatgcagtatacacatacattttgcaaaatctacaaatgatataagtgtagttataatacttctgtagtcatgggtacccaattgaagttcaacaagactggatagcaatttttggtttccactattttgccatgcc

SEQ ID NO: 5426 - DNA, 785 bp, Zea mays
tcgacctgcagcagcgggtggtcgtaggtcatccccggccacggcggcatctccgtcttcatggcgtagttgcagtgctcctgctgcatgacctcctggtggtggtgctcctggaggagggcgacgtcctgctgcatgacgtgcgtgggcggcggcgagaagagcatcgggtggtggtggtgctgcgccggcacggccgccatggcgttgaggccgatggccttggcgctctcctcggtgagcgcgtcgcagaaggcgcggtgcgtgatgaagctgtcccgcctgcattcgcatgcgacgcgaagtcagagaagaaaacggagagaatccaaaaatctttaccgtcctgtacctgtagcccgcggcccgcccgtgatcagagctcgctcagaaacaaaaaggaaaagagaaagctaaaagcaagagctccatacatcccgtttgattcttgttcaccagacatggctaccgctagcgcaacgcaatgctggcgtgtatgactggtgttgaagagagagactattataacccagtcacctgtgtggaagaagggacacagcagagaggaggacagtgcgtgtagtcatgcagctagctctctagtagggcaattaggcagaatggatagggagtagcacagcacaggcagcattggggcgagagaaggagatggaaagcgccacccccggctctgcaaaaggagaattcaccgccgaggttcggcggatcttttttttctcagcccctatgccccccgtagcttttttcggtgaattggtctttct

SEQ ID NO: 5427 - DNA, 728 bp, Zea mays
atttttatacgtcatcctgcaagacaacacaaccggcccaattacattcgggcgttacaacacagtaagagaacgcctagaactaccgatacatttcaccttgtatatggtattgcaaaggtataatcagttagggctgaggtgccaacctcataggtatacaacccctcgtaatggaatgacgccacaatgaactgaatcacaacaccaaagtggggtaacaaaaactgtacaattggtgggtcacaatctgttattaaacccgtatcatggggagaatggctgattggaagatattgtacagtgcatgttgaacttctccagagctatgttcacagcgaatcagatcagccaataatgggaaaaagcagggtaatattctcctaaaggaatctctctccagatcacccaacaatttcatcacttgaagggccagaggagtcctagcagccaattcctctttcttagaagcgctcagcggcactgcacaatgtaaaggcggatttctttgggacgccccatcacatggtttgtgtcctgcgcacttcagatatgtttgcaatatttgctcacaggtatcaagcacttgagactctatgttcatctcttctgacaaggatggataatcatgttgcagagcttgaagaagtttgaggtaacttctggtgggaatcggttggcataatgaacaattgctggctcagatacctgcaaaagggaacattgct

SEQ ID NO: 5428 - DNA, 964 bp, Zea mays
ggtgccggcagttcaccgccattcggaacgtcgtcgtcgcgtcgggcgccaggcgtttccgggcacgcgtgaccgagagccatatctgcgcgcacagtgactggaacgacgagatctccccgcgcacttggggattcttggggtcctgcgccatcttgccgtaaacctcggcgtcttggccaccgctcggacggcggttggcaatcgctttcagctcgcgaattgcgtcagcgctgaagtgaaagacgcgctcacggagaggcgcgtccacgtcgaaggtcacggacgggccgacgccgccggggaagcggaggacggcagtggactcgccgaagaagcttcggcggaagtccggcagtttgggggactcgccgcggcagatggccgcccaggtattgaagaattgccaaaaagaggtgccgtccacgacggcgtggttggcgacgatgccgataaagacggcgccgtctccgagtgcggtgacctggaacgacgtgagcgggcgacggtgcccatcgtagctgacggtccggtccatgtccatggggaacaggtccttggtgagcttggtcggcacgtcggcgccagggacgaggaagtcgtcgagcgacaggccgggcgcgacggcgtgcaggaagtccacgccggcgccgtcgttgcagcggacgacgacgcggccgtcgtcgtcgggcagcgtgacgaggcggccggcgaggggcgggacggcggcgagcgcccgggacagcgacgaccggagcagcagcacgagcgagggcatgggcaggtcgggcgccgggaagaagagccccttctggatgtagtggcacgacagcatgggcaggtcggagacggacagcgcgaggtcaccgaccgcctgcgccgacgcggcgtccgggcggacgtgctgcctcgacacgacggcgatgcccgagggcggcgcgtccaggcagacggcggcggcggc

SEQ ID NO: 5429 - DNA, 738 bp, Zea mays
ttgatatatataagtggacgatcgatgccttagtatgtactacgacaactaaccgtacctattaacataaaaaaaccatgcaccttggcaggaagaatctacatgcatgatatagtatagcagcatatgggccacacaaagtttaagaccgtaccaaaggtagccttgcttagcagtgcaatcatgttggttagttaattagaagagcagcatactaaaacaagtagctagctatagtacatgtgtgtctagctagctagtgtagttggaaagatgatctgcacagtgcacacccaacaaagagcgtcgtcgtccaagcatattaaacaacgtacaagactactaattctaaatcgaagagggattagaggggggacgacgaccgacctaactaattattagctaatacaaggaatcaatcacacacacagcaacaggggattaaacaaacgcatgtgccatgtactgggtagtaccagcatgcagctgcatatgccttgctttgttttaactaataatataattattattagttgtatatatataacagtaatatttaactaactatatgtattttgtttggtccatgatgcatgcaacaacaaggtttgtttgggccattaaacaactactatccggtgggggaattaacgtaagcagtgacgtatagctggggggcgcccgtgtgtgtataaaatagcaatatattttctctcgatctcgagggggggggggtag

SEQ ID NO: 5430 - DNA, 769 bp, Zea mays
agtgcagatagagagcctgatctggagaaaatacagtagtagctagcacaaccaatcaaccatggtgcattggtgtcggcagtgccgaaacaaatccacaggtttcgccctgcccctgctcctgccctggccggattccagcaagggggcagcaccccagccggattccagcgtactactccacatcaccggcaggtcttttgccagattccagcagacggcgataccatttgccggatgtcacccgctgcgctgacgcgtgagccgacgagttccttaccgcaatactcgactcaggccgttcgggggtgaagatctacgaggtggggacaccgacaaagctacagctatgcccatttcttctccactggcggaggcagacgtgatgctgtgagcggtgagcctgtgccagggtattccaagaacaatttcccccagaacagcgagagccagtaacactaggagaactaaatattttagtatagacaatacatattcttttctttcacaaaaaaagggcatcccatggaatacctaagaatacccctgccgccgcccctgttcttctcttacaactatgcccgtgagcagggagggtttcacaccttgcgtgcgtttatgcagcttcggatctatccgcgggcaatcattgtacgatcctttcgaaacacgggatctgtgggggaaggttatccggaccaactatcccgaatcggcagggagcagtccacactctaacctgatagcttcaaggagctgatgtgatatg

SEQ ID NO: 5431 - DNA, 774 bp, Zea mays
aaggtggcgtcgagagggtcttctgtggtgagcactcatctacaaataatatgtccagtccgattattttgatatgactaaatctacgataatacaatggatgctcttatatgtgcgttgttttgatatgaacgaaaaggcatgtttctcctaaatcttaaataatgcctgacagtaggatctcggggcgctaaataccttctgtgtttggtgcactttttgcagccacttggcgagtctgaaaagaacaaacataagttctgccatagaaagaacatgctgatccttttctcacccatccccccccccccccaaaaaactatagtagtatctgaaaccacgatatgacaattggataatcagttacccaccctcaatatcttcatcacatcttcatcaattggcttagggtcttgttgctttggcctgaaacagcaaaatacgttccatttatggtaactacaaaatggttggcgaaaaagccatgagattcactactatcaaccaaagacaaatagattacttttgcttctgtcgaggcacctttggtctgaacttgagcatctgaggggattaagagaaagacgttagtgcgcagcattcttcttgacaatttgctgagctcatagaaagaagaagattggtgagccaccttcacatcaccatgatctgggcgactttttttggagctgccatccttatccatttctcttaactctgtcataaatagctaagagcccagttaagggggggtgtttggatcccgtactaaaa

SEQ ID NO: 5432 - DNA, 786 bp, Zea mays
ctgatgtccatgatctcatgaacagcacaagtgatgtccatgatcatcatcaggctcctctccacgaactgcttcttcactgctggagaataatatgtgcatgatttttccaggagggtagaacctatgcacttcctttgtctcgctgagcacatcttcagccacgccacccacctcctcagcaattgtactttcagccatctcttcggctatgtcatcttcttctccctccctcttccggtacaactcactttcaagttgctgccacagctccacatcagtcatcctgtcctcgtccccatggtgatcgacgatgtcatcatcgctatctcccttgtcatctaccaagtcaacagcatcgaccgccacagaaacagaactctgaaccacttctgatacagcttctgatgtaactgtctttgtggtttaagaaagctgcatgctcggctatatgcatccgtgaactggaactgcatctcctttgtgtagttgagctcgtcaaggtgtgcatccatggccttgttcatcggaggaggaccacatctcaggatttgaaataggtaaacacatctcaggttacatacaagaatagagaatacgcaatcgatcttcatagtgaactgaaaaaaaataagactcaagattcacctgaatgtactcagcaagcgctggacaatgagattggatcatttccttagacacaaacccaacaccactgttccagttctcaggaggctgcacaagtaaaaacactgtgtatgtcagatgtctttggaaacaatgtgc

SEQ ID NO: 5433 - DNA, 718 bp, Zea mays
aaattcttgttgtcgaggtattttgtcatcacttgtcgctttacagctaagttctcagtttgcaacatgtcaccaattgtgtggcattaacaagcaagtcaacatactcagaaacacattctattccactgctgagtgttttatcttctgttgcctttcccctttaacctagtgaatgtgctgtgtcaatttcagagtacctttctagacgactccatttcagttgagcatgcaagagaatatgggcacacacatttatctgaggtatctgatttaagtttttatttgaggtatcccagacttgtttattcaactttcaaaatgtcaaattgtatgtacctacccttggaaacacagataacaagtcagaccgacaagcttcaaaacaaagctattctactgatccacttttctgctcgttatattacagaggtgggctgatacctaaccattttttcagttctatccattgaaatgctatggctgcctgcattttttggttttcgattatttaattccattttgactacttctatgtggccaaactatcctaattccattcatacttaagatgcttcacttccatgttgctattcaagtttgtttttaccaaaaacaactttaccaacatgcacatctcgtttctactcttaaagttgtaaaacatatgaagaaaaaatcagttgtttttgctcctttttgcagaatcttggaaatt

SEQ ID NO: 5434 - DNA, 822 bp, Zea mays
gtaaattatctgcatgtgtttgccgacaagatgaaggtgattgatttgctacggactttttgattggtgatggatgcatggtctgaagactccgaagcacacgtagaaaacaaagtttgtaactgtatattacactccaggtcccaattcttttgattgtgtggtgtatacattaatacatagcaggaatggaaagaacgatgggtgtgttcctgtcagtcgaaagttgaaacacatacaattgtttctccattgccttaaaactagtattgagatgacgactctgatctgaatttgagcaatctgccaccaaggtttaaagcagcagcaacaacaacagtcttctaattccaaacaagttggagtaggctagaattgaaacctaaccataatttacggttcagacacaatgggtagctcttttttttgtgtgaaattgatttagtactacttgtatatcttcagagatgaggtgaggagagttcctgttctggctgtacatagatattaagatatatttaagtatagaacatgaaccattggctggtcgaaagtcacatgttattcatgcgatatcaaactgccaatgttcagaaacaaggtaaatgtttttgttaaaaaagaaattaagtaaatggtgcttacacatgatgtttcgcatttcaccattcaaacattccaatgtcacaagcatgagtaccgacaacaaaaaagccccgcatgaacccttcaggatgattggttatagtatccatccagagcacaccatagcaaaaaagggttttccgggtgaaaaaataccccacggcaaatcccaatttt

SEQ ID NO: 5435 - DNA, 744 bp, Zea mays
agcatgccattatcttgctataaaagtgttactctgaagtaaaaaaaaattgtgcaccagtgcttgaatcgatcatttaattgcttgaaatgatgatttactaattgcactattgcagacagttttgattggaatggatggacccattattggagaaagtagtgtggcgattagtgatttcagtgattacatggatggtgaaaattttatggacgttcctgatgagcaccacaccaaggtttgctaacaagttattttccctgctttcatcaggtactatgggtcattcttcttagtagcaagaagcgctatcattattgatgtttcctttgtgaaatgtccagattgatacagaaataactgatattctcatagagtgggggatgcctgcaacaatgcgtgcaatacatccgatttactttgccaaatgtttgacaaaggtaagcgatacataattatttgaagagtgcagacaccacaaaccagcagcacttggaatagtgaaaatggtcaagctgataaagatgctattaacgaaaggacagacccagtgggcagtggcccgttctggtggctcccacatgagtagggtctagacaaggaataatcaaggcaagctttactcctgcattttgcagagaggctgcattgaactaggacctttggctcagtgagaaggcttcgcaccactgcaccaggcttgcccttcaataaagatgctattaatgattcattgaattcagc

SEQ ID NO: 5436 - DNA, 713 bp, Zea mays
agtagtagtatgggaataaacaagctcacacgaatcacgatctgaactgggcgaaggcacacacctacactaggctcaggtcaggtgtagtacatttcagaaatggacagcccagagtcgccctaccaaagcaacccggacaaagctgtttccctctttcctcgcgaatttaaaaactcaaagcaaaaaaaaatctatatatgatttcgcgctttaaagcgcaaaagcccctgctaatttgcggatcgtaaggcatttgagatggcaagtagtaatggcatccacgcaacgtccaactgtaaatctcgcaaagctcgtggtgtctcgttttcttaatgagagtagtaacaattaacaaacgctctcgtgcttgagacggcaccattagttaggttaggtcgccactaatatcatccatttagcccatgctttgcctgtcacggcgcctccgatccgtattgaatactatagcagtgctgattaatacgggtctcgcgtcggttgccaaaatacacgggatcacaaatttcgctttagagatacggagcttcttcttcggtgtagaaaagagaactacaaaaacaagtagaagaaacgcaaacaacagccatccatccacgacgtgtgtaataacaatgaggaggtattcagaatcctcccttgtgatacgaagcgagtgaatgtcatctcggatagaatctagcagacgctag

SEQ ID NO: 5437 - DNA, 761 bp, Zea mays
gcacagcacagattagtgaaaaaatcttcattattaagtgaagtgaaaaattcttgtttgctagctattacagtttcagtacctccttttgaggcaggggctgtagggagtgtcgttgtaggttatgtggcccttgacgccgccaccaagcctgccccccaggatcttgagcaaggtggtcttgccgctgccagatggacccatcagcgccaggatctcgccagggtccacactcccagcgatgcccttgaggatgtgcttgcagctgctgccctggtctgccctcgtctgggacgcaaacgccactctcgccgctgtgagggggttcttcaaggtcatcttcaccctgtactccacgttctcaaactgggttttggagttcagcaagtcattgcacacgtcagcctaaaagaaaaaaaacaggagtgaggtagcacaactaacaccttaaggaatattggaagagggccatcttttgacggccacagatgatgatccacttcgacatcggcgtctgatccgttgccttgccaggaaggcggaaggcgctggcactccacttgcatcctctgctcgtcgctgatctccattgctaaggcctaaggctagagcaagaaagatggctcagagaggaagccaaagcacatggtctccctcttctttttatcaagtggtaactactgccaaccaagagcatgcttactttgttggaatgttgttgatatgcacggttcggttcggttcgttaacccttttgttgg

SEQ ID NO: 5438 - DNA, 778 bp, Zea mays
tgcatgcctgcagtcctgggggcatagagaggtgggaaatgtgagtaaccagttgggtcttgctagagaggtgatgcataggttggaatcagcacaggactttagagttttgtcagaagatgagttttggctgattggaaagctgaagcaacattgttttgtttatgcttctatggaaagaacaattgcaagattgaggtccaggattaagtacctaaaagagggggatgcaaatactaaattctttcatatgcaggctcgtttcaggaagaaaagaaatttcatttcatatctagaagatgaaggtagagtggtctctaaccatgaggatatgcaggaggtgctagatggatttttttccggtcttttgggtgctgattttcagaggcaaagcactattaatttatcgagttgtcacagagaggccgtggatctcagtgatcttgagtgccccttctcagagaaagaagtgttggacacaattgcgtgccttccgtctgataaggctcctgggcctgatgggtttacagggaggttctataaatcttgttggagtatcattaaggtggatctgctggcggctctgtctatcatacaccagggcaatgttcagagattggggcaactgaattcctcctacattattttgattcctaaaaagatggatgcttcgtcggctggtgatttcaggccaattagcctaattcatagggttgctaaattggtcacaaaattactcgctaatcgtttgggcgaacggatcatgataatttttatg

SEQ ID NO: 5439 - DNA, 753 bp, Zea mays
tcgcgttggcctccatcttctggaagaaggcgatgggcttgatggcgcggcgtagcaccagggcgaccgcgaaggggaacgcgaacgccgccactccctgcactgccgcggcggatccgacaccgagaggcggagcaccgtaagatatccacgcgccggcggcgaggtgcgctcctccgaggagcgcgagcgagccgctgaggcgctgcacggtgcggcggagcgcgtcgagctcccgccgcgtctcgtcggccagcggcgacgtatcgcgctccaccgtggggccctcgatctcctggtgccgcatctcatccggcgacgcgggcgcggatggggcgccttggctgggctctgatgtcgtggaggaggggttggggctggggtttgagggcgcggagaagaagcggcggccgggattcaggaggatgaaggggtcgcggccatgggtgaatgttttaggtatggggaagtgcgcggcggcgacagccgttgggctcaggaggcggtgggagaggcgcgagagcgccatcggaggcggagcctgcaacaacgctgcaagcctgaccaggaaaggtcgcggcggcggcgggctcgcctgtttcggatttctgaaaagttgtctcccgtttccccagtcaagagtcaaggcgtaatctgggaatacgtttgctcccctcgtatgcgggtaagacgtttgaaactcggaagtaaaggtttttgcttaagcacacttgcattcctttggcattcact

SEQ ID NO: 5440 - DNA, 1027 bp, Zea mays
cacgcctccatgcttctgcatagtttttttttatggggggagggttcagatggaacaatgctcaaaatgcgattaatgctttccagtggcagatattttgaggatatgtatgctacagacgctctgcgttcttcagacaagacgattgttctacctatgccggtaaaaaaaacatcctcctcatgcgtgctcatcgatattgtaccgctcagtaaatgcatggttgccacctctcgctacgttacttcctgcggttttgagtgattttcgtttaatgttttcttcacaggaagtggtaaaagctaaggtcaaatgtgatatcgctaaggaagctcaacccgggaggggagcacaaagcaccttgagaaaggaggtaggtggtagtctggtttctttcagatagtattttttttgtttgcattttcatctgtgcgggcttctgagatggaactcttgttgtggccctttttggctgcactgccaacaggcagaaaacaatctattttggacgaaaggcaggagcactgctcaatcattcaagtggagaagcaagagattttttctttaatcaaaacgattttgatgccatctgtacttcactaaatgcgacagcatatttgttcacccactaattctgacaaaactcacgcctcacttaaagttagtaggaaatgctcaaataatgggtcacaatcacaacaaggtgcaagcccgttttttttttcttagcctgctgccgcctctcgttttttcatctaccatactgtaggctcatgaaatcaaatcacctgatgcagattcttcagctcgagaagcacctcaaggatcaacaggctgtgcgtggtgcgctggaaaaggctttagggcctaacgctggccctgtcagcttgtcgccagagaatccaatgccacaggtatgtttcgtccaagaactactgttagtccgctcttgtacaaaaaataaaaaaaaaatcatcactcatcaggttaactaaccacttggatcttttcaggcagctaatgaatt

SEQ ID NO: 5441 - DNA, 822 bp, Zea mays
agcttgcatgcctgcagagcttcctttcacttgctagtttattccatattttgtagaaacattaattaatccgccgtcactcacggaacacgtcatcttttgatctgatgatcgtcggttcatgcatggatgatggccagtttcttcaaggagtgcccgcacccggacgacaagcagcgcaaggagctgagccgggagctggggctggagcccctccaggtcaagttctggttccagaacaagcgcacgcaaatgaaggtgccgatcctgcctataataatctcagccccccctgatccttttttttttttgttctgtgcatttcgatcgatcgggaaaattttggtttcggggttgcattgcattgcattgcaactgcgaggcaaggcaggcgcgccacaactacttcatttaagcctctgacctagcgtctggcaggcagcattcatggcctatttactacaccccatgtcctcttctgcatgcgcgctgccaattgccctgtcgcaaggtcgcagcctgccaggcagtggctggcaccagcaccagcaccagccatggtcaaaccccacctccggcccatgcatgtcttcctcctcctcctcctcctcctcctccctcctgctgctgacgcctacctggcaagctaggctggcagacgtttacggcgctcactgctcaactgactcaggactcaggagcgattaccatgggttgttattgcacttaatgcatggtttatattagttagcgtcgttgtcgccgtgtacaaacaaacagctaatccatggcagtagagacaacgcttgatgcaattcatgg

SEQ ID NO: 5442 - DNA, 794 bp, Zea mays
acaacgggacgcggcacgtcacatcacatcgcccttgtgctacggccacgccgcgtcggcgtcggcgcccccgtcgattgatcacacacggacacggccccacgcacacggaacggaagccgcgcccgcgcgagtcgccttgccgctgccgcacgctaggtgggcaggtcgcacgcctatctggtgggcgtgacgcgccgcatgccgccgtgcgcggccagtcgaacgacgtgacgaccaggcgaccagcgctcaccgtctccagaagccaaattccatttcggcccccgaaacaaaaacattattaccaagaagcggacacaggcgaaccattggagtccacggcggcgcgcgccgcccgtgatcacccgacgcatcgcagccgtccagcagccgaaatgggggacggaagggaacggaagcccaccgcgaaattttacgggtcgcacgtcccgcgccgcgcggcgtgtcggtcaaggtgcccccacgcgccgcggttggcgccgccgccgctgccgcccaccgccgcccgcgtgcgcccaccgccgcccgcgtgcgcccaccgccacctgttgccgcctaaggggaacgcctccgttataacccaccgcttcaccatccatgccgtcctccaccaccgcttcaccatcccctccaggcccaccaccaccatggcctctccttccccttcttcccccgcccgcgcctccggccggcgagtgccgccgccgtgctggacgaccgacgagaccctcgcgctcgcgcgggcctacaccgcgcgccggcttgccgtc

SEQ ID NO: 5443 - DNA, 755 bp, Zea mays
ttggctgcaaaagatatgaagatgccttttatccaaacaacagtttctaaacgtaaaatagaacaatagcattcttatgcagaacaatttacagacggaaatgatttgtactatttctcaggtgcaaaccaaccatttctcaggtgcaaaccatttcgatctgtaagttgttgtgcacaagaatactactgttttattttatattttggaaactgctgtttggataaaaggcattcacttgcatctgctagctactgcttgctctgccatgcatgctcccatatgctttactttgctgcgcaacacatatatctatactatacttaaagtaccagtttcaacggtcgtcccgcgtcatatttttacaaataacccctcacagttatttcaaattaatccgctgcatgcctatagatggccaaacggcgcccggcacgggccacaactatggcccaggcatgtcatgccggcctgttgactgtgtcgggccagctcgttagctcgtcggtccatttaattaaatcagcgtaaaatgttaaaaaatgatgcaagagatgtggtttgaacccatgccctgatgaaagaacatcatgccagtagaacatcatgctcagatgtatttaatattgaatataaattgtatatatgtatatacatttttttgtaaaataaaaaaatcgtgtcgggccgggccagcactacgggccgaggctacagcccaagcacggtacaacgttcttggcttttgcaagcat

SEQ ID NO: 5444 - DNA, 704 bp, Zea mays
cttgcatgcctgcagactatgcaaatgtaactagtgcaaggcaattgaaggaaaaatctggagggacgccattctggaaccctttcgatcgagcatacaaattggagttaaggagatactttgttcttaagttgctgaacggtgctatgagtggccttgttcacatgcacaatcatgatagactgcatcaaagccttggaccttcttctgtaattctcaagtatgctgaatattttctttagtttcctttctgcattgtattccctatgttcaactagctacttggatattttctttagttttttttagatacatagcttttgctatgtacttagttatacaatatgtcttatgatttagaatggatggagtactgaagattgtgacattctcatctgtagtacggcattggataaagagggacgctacttggttccaaggctgagagatttggcattttctgtagatattgggtatatttccatccccttcctaactttattatatatcgggatagaatcatctttaaaaaaaaaactgttggcaattataggtactcatctattggggctggagtgctgtcggacggactatggcgtcgagcctctgctgctggggctttcactcctttggagaagcgagcctttggaatagctgatgacatgcaagtattttttttttcccccttcaacaaaaaatgacct

SEQ ID NO: 5445 - DNA, 691 bp, Zea mays
cttgcatgcctgcagtacctgtggcctgtgggtggcagtaaaaaccgctgcgtgcctgccggtggagctttgtcgagcagacggtcccggccgcgcccgagtaaaaatcctggtcgtgcatgctgccgctgcgctggacggatcgaggagatgggagtgacacgccaccagcaaccagcagagcatcttgaccttgaaagttcaccgcagcagtagcagtagtacagcagtaggaggaggatcgatcgatcaacagcacctggcacccccaaagctcgcaaatcgctccatgcgattttcttgtttggagaagtcattttatagtagcattcgtagcggccatcaccgtttttttataataatgcacccgacatgtggagagacataacgtggcaggcttggtatcacggccggtgagaccgcagccaggcggtgttggctggcgccaagacgccgcggccgggggggcagacggagacgacaatgctgagagcctgcgacgcagcatcgcacggcaaaagccaaaggcaaaaacctgacctcgcacaagcttcaggagcctgaaaccggttgggctcctttgtccctttgcgtttgtttttaactcgcggaggccgcagaagagtcgcgccagtcgcagactgcacaaggggggtgggcgccgtacgggggggggggggggggggggggg

SEQ ID NO: 5446 - DNA, 804 bp, Zea mays
cttgcatgcctgcaggcaaatggctgcttgtttttccgttggaatgcaactagcaacagtgcgtaaatgaactcagagcttctgattcctgcgttcgtttttcttttctttctgatgaacagatgtacagagctgcaagccttggcgcagaaagaggaggaggtgagagatgaaacgagccctcatttgcccgcttcttccactgctgagttctttcattcattttttttcattgctcgtgttttttttattacttcacatgtcaacgctgtgcagtgtagctgaattatctatccagtattcattcagggacaacgaaatgttctgcgacagtaaactgaacattccaaagtattatatatatatataattccttttttaaaaaaataaaaaagaagatatgacattgccttgtggtttgtgtgactctcctcttagctcacatctccacatgctcactgcacttgccaactgctcctagcgaccccagattcccttctcatgtgtcatgagtggcaaagccttttttgttgggaacgctaagtgtaatgcactgcacactttagatagatttcgctaatggaaagccaaacacctttctttcatggcaccatcgatcagggacgccagcccagctgctgcaaaggaggtactcatgcagcggtgatgagcgaggaggccccaaagaggagttcctgtgcttgccaccaccaccacctctgaaaaagttcggccttgaaacgccttttcccttcttcttttaaacgtgttcaagttaaaaagacagccttttcaaggccctaa

SEQ ID NO: 5447 - DNA, 760 bp, Zea mays
gttgcctgcggccgcttctctgcaaccggcttcagagatttttttcctgtgaaataccctgtcaatatatgtcatatgcagtttgacggcagtagtatgcccatgaccttattttttactatgatctatggggtttggtgatggatggcctaacaaggtaaacagctcgggcacttacctagccaatttacatggacacatgggtttttgttttttatgatatgttcttcattcagcttgcactaattatgactactatgcaaacagataatattcagaaataaatttgtcgatctctcagtctttggggttttgtgaaacggtctcaatataatatatattttacacttgtccctttttgtttacgtgttcaggtaggatgccaaacacaccggattggctggaagttaacaaggacatgttgcgagtactctcctggtgcttctagaaagaagcaagagaagtatgagcaacagccacagaacgtcgatcttccagaattacacccaaaaaacaaaaagaaacccttccctgttccgattaaaaagatgctgcaagcttctcggcgagagaagagacttgcacaaatgcatatagagaagcctcttgaacccccaaagaacggtttgcttgtgccagagtttgttccagtggcacatgaagtccttgataactggaaagtgctaatcagagggctctctcaacttctgaatgttgtttcagtttatggttgcaggtaactaaaaaaatgtttcagtat

SEQ ID NO: 5448 - DNA, 771 bp, Zea mays
tcacacagagtgcagacaaagtactgtcaggtgccagaaaaccctttcttctgaggatgttctttgagttaattctatctctaaagaccaaccatacaaagatcttgaatttcttaccagccttagactgccaaatccagttaaaggcagcagggggctgaattgattgaaaagtaaggctatagaacttggatgagctgaaagtagagttgccccacggatgggtccatttgtctttatcagctctagaattctgaaggttattgacaagctcatgaaaagtttgatatttctgagcagcataaggagataaaggagtatggatattgtgttccagatccatgttggctaaaaattcttgaaccaaacaatcttttttcctggcaaaagaaaagagacaaggaaaagtgaatttgggggagatattgttaatatgggacaattgtgattatacccttcgttggccttttagttgtgattttaccctccacattttttaactttgtgtttttacccctccattttaaaaacaaactaccgtttgcccttgcctcttaacgacgttagggaaaacaagaattagttattaaaaataaaaatatacagaaggaaatgggtgaaatggtccaaaactaccccttctatttctatatgggccgcaattcccaagtaagggtaaaaggtccgcccatttaccttaattattaaccgagggggggtaaaaaattcaccacaaaaaaaaaatggtttattggggggtaacctcttttt

SEQ ID NO: 5449 - DNA, 914 bp, Zea mays
ggtacccggctatcctgtagagacgacctgcaggctttaaaaggcccagacgcattccgggcgcctctacagcccaattaaaaacctcatttcttctctccaggaaagagggattctatttcaggacgaacggacacagatgcatggatgcatgcacatgatcagctaccagctgtagtagaattgaaaccctctctcctctacctcgcgacgtagtagtcagtgcacacagaaggtggatgcagatagatgcattgcattgtcaccatcgtagcacctccctctctctctccccttttcgttccgaggaaggaagcaccacagggccagcagagatgtctggaaaagggaagaggcgaagcgctagattgttgaagctggaagagcagaagaacgacggcggctccaccgccgccgtctgcttccttgacccctggcagatcatccggaacagcatttccggtccgagcgcgcgagggaaaaggaaaaggaatgaaggaatccaggtaaaaaaaaaaaggaagagagagagaaaaaaaacaatctgcggccattgctggctgctttcaactctcttcgaataatcgtacgtgtgtagcttcttcctccggttctcatctgccggcccggatggttttgaagcagccgcagggagaagctttttgtagccgccaggagccactgtatgcaggaaacagcagtgcggaaactttgcttctttattatcctcatcggatactgttgcatcgcctgcgtaaaaatgcgagtataacatttgttttggtttcaaataagtttcacaaagccaaaaccctcgggtatggaacagaaatcatcggagttgatagtccttggacgaggttggtcagatggatagatcttatttagggcgcacccttctcttttgcgattgc

SEQ ID NO: 5450 - DNA, 822 bp, Zea mays
aattctagggggattgggtgaattataagtagggtaacgcgaaggaaaaaccattgaatttacaattattccttttcattacgccatggagtctactctgcaaattgagatcccgtaatgacgaaccctggtttcctacatttacttgtcatgtgttgagataggtggctctaatttttggtattgtcgaataatatttttggattttaatagatatttgttgctctccaggttctgcaaggaccattgaattttaaccgataatttaacattacatttgctagttattttatactgaaaaggtgtgtgtgatgcagcattgaatgttagtttaatttaattgttataatttatagtagctggcaagagtggttaaggttttcaaccagtgatatgatacccaaattctcttggtaatcttttcgaccatgcaacatatcgccatatcggtggcttttgacaaaatctagatctttttttaagggaaatctacatctaggactttatggatttacttcctaattcctcccttttactattgttaaggaacttcttagttgatatcgttttacatagatatcaactaaactgactcactgaatcttaattttaaagtatggcacgaaacttgaccgacaacaggaccagaaatacactagttatgattgagagttttggtctctggtccttcttctatctcttgggtgtatggcaaaaaaaatggtctgggagaaggagacggattacaaacctgggtcaatgaacaaacccaaatgtccacaaatttccaaatctgagttttgagaacccaccataatgcca

SEQ ID NO: 5451 - DNA, 775 bp, Zea mays
atacagagctgccctctgacttcaccaccacgacctctgcctctggcttcatagccatggacccttttccaatgtccagcccccggagccgcccaagcgagtcttgctgcgccatatccgagagggagttggggtgggacagcatctggacgttccgcggaggctgctggaaatggtgcggcagctgaatgtctacgtgctgctccgggagatggaagaaagaagggccgctgtacgagacgtgctgcatccccatgttgaattgttcgttggacttcggcatctcgcccgtcgctatcttgagcctctccacttcttgcttcagcgcatcgtttagagctgcatcagtatacgtgtttcgtcagtaaataacagtcagctgagaatcagtgcaatggttgcaaaatttagagactggtcaagcactacaccaagtactaaccatgtgttggcatggtacagcttctgaaaaaaacaatgcatcagctacctaacataaagctacgatgcaacagtgggatacccctcccacatgaatttattattgaaaaaacatataaaggctcaccatctcgcagttgagcctgctgctccatggcctgcaaccttatcttcagctcagcattttctgccgaaagtccagttgtgtctctctgccgagtgaaacaaaacagtgtgaagaatattaagcacattaatacaagagtaaattgcctggaccataaagtattacgtgattctcgtttggatcagtctatttggctccctaatgtat

SEQ ID NO: 5452 - DNA, 772 bp, Zea mays
cattgagatggcattttagcctcttgctgcctgcagaaccaggcactccaaaatagtcagatggttggtttctacttcaccagaatttgggattacttgaacagaaactttatcaataaactttcagctgagtttcatagaagaactgatgacaaatttggagtgcgtccaaggttctaaatagctagctgtagacgagtaatgcatgctgctgcaataacccataggtgatgtcacatggcaccttgcagaaacatatagggaaactgaaggcgttatggatgtaaattttggtgatacctgcttaaatatggtgcttgttccagctccaggagatccaagaataagaagcttttgtattcttttatgatctaagtagtcaggtacagtttttgatgaataaggggcttcatcttttgtcgcatcaaagtttgtaggaggcaccggtagtgaaaccaaggcgcacgcaaaacgtgtcaaaggctgttaaaagaagagcacaacaagtcatgctaaaagcaacgaaacgacaatacatgttaattaacaatgtttagaaaaccaaaaaggaatgtttgaccaagatacatactgactcccatattttccctttgatattggtttgtccttcttcctcgtagccaccatcatggtaaacccagaagtgagtatcacgggggcattggacttttgcaatctgcatgaaagacagaaaatatgtgatcgggttggttagaggagtgaaacagaactacaatgtacattcagtagc

SEQ ID NO: 5453 - DNA, 554 bp, Zea mays
tgggcgcgccgccggacctgctggagaggctgacggccatggcggcgaagctggacgcgcgcccgccgggccgccacgggccgcgcgacccggagctggaccagttcatggtcggtaatccacacagctagctactttgccgcgcccttccttcgtttcgttttgctaacctcgtctctctctctctctctctctctctctctgccaatcgcatcacatcgcatgtggtcgccggcgcggcgtgcaggaggcgtactgcaacatgctcgtcaagtaccgggaggagctgacccggccgatcgacgaggccatggagttcctcaagcgggtggaggcgcagctcgactccatcgccggcggcggctcctcctcctccgcgcgcctctcgctcgccggtaagaagtaagatcgaccgatgatatatcggagcaccaggcaggccggccgcggcgcttcgtcgtcttctttctgcttgctctccgggtccttctctcgccgtgctcgtactacatggcggccccgtgtttttatatcgcgcgccatggcatgctgac

SEQ ID NO: 5454 - DNA, 591 bp, Zea mays
cttgcatgcctgcagaaggcatagacagactgcatttttatttggtgaccagtttggtagagaaaacgttccacggaatttaggatgcactgattcatattcccatctatgcagctccggagtccggagtagggtatcctcgccgcacatgaagcatacatctctcgttgagcaaacgttgccatagaaaacaagcatacatctcgaatcatgctgccatgtgccttgcacttgcagtttatacatccgattccttcagaccacatggcagccagcctgtggcatctatttcaatacgtagtagttgactcacaacaggagcgaagaaaagtcacctgcgtcgccgttgaagtgctaggcgcatctgcatttttcacggtagtgtcgccatcgtcggccctcctctcggaggcgagcactccgactcctgatcagttcattatattaaattatattatatataatggagcagacggggtaaactgacaaaagcaaacaaaccaggccgtggcagagcaaccgttcaccgtaccatggctgccgggcgcgggcagattggtagcgcagcgagctccagcgccgcggccgtgg

SEQ ID NO: 5455 - DNA, 723 bp, Zea mays
tgccgcctggaggcagtgggaggccctggtgaagtttcttcaccctgtttctaaccctgctcattttgtttgcagtgcaaatttctcctgaagttactctcagctcgaaattgcagtacttatgttcatcatattctaataagtgtagggcgcccgaagggtgcatgatattctagtttcagatcaatgctgagtgcagggagaggcaatgtcttacctcttggatgttcatctctatattagtccatccataggttagtcatttcatcgtcaccaaatcattataaaaataattgattgattatggtatctttgtggtctctctactgaatgcatgcattgatgtgctaaagttctgctgtaatctgcacaggtatgcagctttggactgtcgatgttaaatcttgtctcaccagcgactacttctgatggtgtggctacctgagcagcttgtaccgattctgccttagcttgccgatcaacgctgtccaccaggacagagctgaaaacttgaaatggcaagaccagaaccctgaagttgaagtgttggcaagaaactcagataggtggatgaacgttgtgagccacctagctaagagcttgaagacgacagatggtaggtgttagaaatggaaggccatgcggctcccatgttatggaaaaaaaacccaatcatgaattttggaaagctcaagaccctttgttgaaagagataaggcggat

SEQ ID NO: 5456 - DNA, 763 bp, Zea mays
  unsure (1)..(763): unsure at all n locations
cttgcatgcctgcagtggtgagagctttttcactgagtcaccaggtcgcgagttcgaacttcgaagcaacctctctgcatttgtgggggaggcttgcctccctttatcccttctctagacccactcatgtgggagcctttggcactgggtctgcactatggtttgcaaatttttttatttttttattccttctaattattagtttgattgatttctgtgggggtacttttgatgtgttcatggattgaattgacaaggtgtcatgaattattatcccattgatatgccattaatgtaattatgtagtgactacccaatatgaattgtcaggatgtagcacttggcggtgatgagctgccaaaaggtcctggtcatgacaaaaggaaggacttgctgattgattctgccatttcccgctctcattaccttgaagagagggaacttgagcgctgggcaccagatgaaggagattcagagtgtatcgaactggagaagtatgacagaaagggaaataggtatttgatgtactgaagcaatataagtcttttcctctcatcctttaactgcaataaccaaccaccttagtcattgaaatgtacgattgtgagttaagcaagtattctgcttatcagcttccgttgattgtttctcatgctcatatattgtataatttagttccagagcagcaaatagtggcccaagcatgacantataaactatgaaaatgtggactgtgttggaatataagtgaattgtccatctc

SEQ ID NO: 5457 - DNA, 668 bp, Zea mays
atctggagctcgcgcgccacctcgacgaagtcgacgaggccggcgccaccgccaccgctggcccgtgcggcggcgccgcggcggcggatcctgaaggggaacagcgcgcggccggtgcccgggtgcgccgcggcgccggcgccggcgccgaagccgaacgagtaggacggcgtggtggtgcagctgaactccacgtccccggtaccgtacggcgggacgaacgagaggcccgacgacgaggccggggcggcggcgtgggaggtggacggctcgaccatttggtgctggtgctggtggtggtggtggtgcgcggcggcggccagaaggtcgtggagcgccttaccggcgagcttgttgcccctgccgagcaggaggcgcgcgtccatcgtgaggcgcttgcggccccgccgcagcatgtggtagacggcgcggagcacggtcatgaggcgcttcccgagccctggctccgtgctgccgccggcgcgccccgccgcggcgggcgcgggctgcaccgcccggccgctgctgtcgagctccactgctgctaccgccattatctgctgctgctagtggcgtggtggcggtcgagtcagctaacggtcctttatctcacgtggccttttgctctggctgggttttgctaggctcgatctgggctgggggtggtt

SEQ ID NO: 5458 - DNA, 693 bp, Zea mays
aatcattcaaggacatccgagagcaaaacctccaatcagcacttgagcaaatgcaaggttggggtcctgtgaaggctgatagtttcgcccttccaaacatgccgttgccgcccgattcattcagaggaattcgaaaaagaacatcttcaataacgcggtggttttccatttgtgttgatgatacgtcaaagtatgtcctgacatgatacacatatatattttatagatggcatgatatagcattcacgactatagctattgatttgaaagtttgtatgttgcttttgcttcttttcgataaatcaatccaggaaagggagatatacaaacactgtgaatctgctccggaaatattttggggattttctaatagctacctacttgaatgccgtgcaagagtcctgttatgacgatgcatatataggtggaattgaggttggattctcttttgaattgttttcataaagtttgtctggtcatagaccctaaccaaacaatatccatgtgtttttttctggactttggacattctgtgttcccctacatgaaacatattggattgcttaaacatcttccgtaaatgtatttatgaaagtctatacctctgtttaattgcagagggaagtactattgaagactcttgatacattatggaaagaccatttggtaaacatgaacaagcttagttctgct

SEQ ID NO: 5459 - DNA, 796 bp, Zea mays
gcatgcctgcagtgggtgtatactttgctcgtttcaatgcttcctcacgatcattcagcttgtgcttctccttgctctgatgacaataacaaaagcacaactatagtaaagccagcctttttcttctctgccaattgtagttaaacccgtgatcacatacataggcattcttataagttgctatttgttgcttacaaactttcagctccatgtttagatcactaagacgggaatcaacaggaactgtgcattgctgaaccaactgcttctgacgaccacgaacaacttgtggttgccatacgtttaatgccacagaagctctcctgcgtatgtttcacagagtaagaaattgcacaatcaacacactagtgataagaaatatgcaaccatgacagtaaagaagaaatggcgcagaagccattttaacatcaagtcatcaatggatggagataacacacactagcgagtagcgacatgcttcagaaagactgtatttgtccatttatatggcagggctgtagtctgtagaagtgtagtgctaggcgatgaagcaacatctctccacatgattcagctcgtggctgaaggttagataattagagatgccattgtgttgacttctccattcaaatcatgactaatgtaccaccctcctctcatcagaggatggccaagctcctagctaattgaaatataaaacagaaacaggaaaggagcctcatttcgttataaaaggtggctggagaagaggttttgtaacttatcaattttcccaaattcaactgtggctgggact

SEQ ID NO: 5460 - DNA, 792 bp, Zea mays
actgcttgctgctcacaccaagctagcacagaacacaattattctactaacctacgcaccacacctgatcacaataagtaatgatctaaccacacacagcaggaagaattactacttcacttgttgtttgcctgacctgccacccccctgcttcttcaacatctagagccccttcattctgtcagcacatgcaggctgttcgtttcggattaaatcaatctagttcgttctgctgacagtagaaaccgatacacattaaagcgagcaccaccgttccagaaaaagaaaagcaaaacaaagtattctagcagcttgctttacctaacaaacagccaacgatcctcgaacgtacagattcctattctccatgccatcaaccggccgaccaccagctgattccatcacgtctttctctcaccgcgcctagctgatcagcacacacacaagtagcatcttatctattggttcgttgatgcgcagctctcgaacgaatcaccatctcatgtattgtcttgtccccatccccatgcatgcagctgctgaaccacggcatctcgcacgagctgatggacgaggtggagcggctgaccaaggcgcactacgccaccttccgggaggccaagttccaggagttcgcggcgcggacgctgggaggccgcgagaagggcgccgacgtcaaggacgtggactgggagagcacctttttcgtccgtcaccttccggactccaaccttgccgacctccccgatgtcgacgaccgctacaggtgcgttcagacctcaaacacactac

SEQ ID NO: 5461 - DNA, 803 bp, Zea mays
tgcatgcctgcagctccaatagtatgatgaagaaggttagcaacacgaccatgaagggaagatatgaaactggcaaactgttttttagaggctgcaaccacaaatagcatcatgttaatgcagctaagggtcgtatcaaactatcatgtaacattctaacatagcaacatgaccacacatgatctgatctgtatataaagctgtacgaaatgtaccgagttctataagcttctttacaagaaaaacggcatatttcttgcaagaaagggtaagcaaatgtggctgtagaacatcaaagatagcatccctctctgactccgagcaccactttacacatgtctgccaaacgacagtgagcaactgatcatcaaaagccaggacacaggcaacataacaaaaaacgcagcagattgacaaatactgtgtgtgctaagcttacttgaagaacacgtgcagtaacatgtgatgtggcaatgtccaaatatttcccatccattttatggatagcctgacttactgccctggaatggtgacaattatgtcaatgtatgaatgcaaacataaagatacaagactgaccctattgcttacttggacctctcctctttgctcacatcgtgacatctcatcttttcccacaatttcgttagttcctggccagtattcagggtcaaacagagcaaacaagcattgaatttagcaacctgacgagtttactgtcaccacaaacatcagtcaaggttgaagaaactgttggtgttgatgatcttagtggaggcaacacccaaattcaaaatcgaaaa

SEQ ID NO: 5462 - DNA, 732 bp, Zea mays
gcccgaaaccgaatagcgtaccgctgattaggcccagtaccagcccacgggcgggcgagctcgcataaaccctagatagggaggcatgtcgggtctggtgggaaaccctttcatcgtcctcctgcgtcgccactcgccagagcggagcaacgaggggcgcgcgcgatggcaggcggcggtctccagggagcgaagaagcgcaagcgcgagcacgcggaagggaaggcaaagcctcggaagcaagtcaagggaggcggggacggagcgaagcggaagagccactcggccgccggcggctacacggcccatggcggcgccggcgaagttgtcgcgaggaagaagaccccggttacccccaaggagaagcgcctcgcggccaaggtatctcttaattgctcgtttgtgctccgaagcgcctttctatgtccccgagcttaggttgacggacgggctggactgtgccaggaaatgtcggaggccaggaagatgaagaggaggcagcattacagccttgagaaggtacttcagtgctgtttttccgcaccatatgttccagtttggggcttgcaccacctatgttcaggtcatattataaattaagattcttgttgtaatacttttgctgacaagctgcatcctgacttgcactatgatggatcggtcccatgtggacagagtttatgttaaacacatcagcctgtatgtagtcatatgtccagagagccagtttct

SEQ ID NO: 5463 - DNA, 710 bp, Zea mays
gctcttgctcctcctctgaccaccctcccggcctcccctcgctcaccatgaagatgaaatgaagctcttgtactgtaaggttcactcactgacggtatagtccccaactccccatgcgtagcagcggtagtaaaaccatccatcatgcccagtggggacggaaacatgtacagaatacagatacagactggatccgtttacgtatagattacgacgaccaaaacaggctgttcatcgtttgttccatgaacattgtttctctcacttctgtaccgtatgtgtgtactatggattcatagatctttcatgatgatgatgaggaggaggaggggacgacaataggagccggcggcacggagtcctccagcggccagcactcccagtcgccgctcttgttctgcgacagcgagaagtgcttgggcgtccacacctcccctctgtcgttcctctccttggcgaacctcctcgccgtgtcctccacccgccgcttcgcctgctgggctgtctcccagtccttcttcaggatcgcgttgctcaccttgccccagaccacggtcgactccgaggccgacacgccctgtgaattgtgatgtgacacgatccatcatttgatccatgacatgacatgcatgttcaccatcaaccaccacaatcagcattagatccatgctaccttttcgtcttgcaccacgggcgtggcgaggtcaccg

SEQ ID NO: 5464 - DNA, 497 bp, Zea mays
  unsure (1)..(497): unsure at all n locations
ggaatgggcatgtgggacttttgcacgagattctggggtgcgctctaaaccaccaaggtatgtcagacctgtactaacagaaatagaaatgcggggggttttggacattttgtagctatatatatatatatngtgtgtgttttgttttatgttttagagagaagggaaagagttgggctggcctcgtttacaggtgagaaaaatggagcaggagcagcatgcagatgcccttgtacagataatctgcgcctacccagtttttattttttttaaaaaaaaaacgcgaacaagttcacacccgcactccattttgatgttcgtttctggacgaaggatagaagagaaggtgcgttctagtgtgacaagtatggctctgtagagtactgttgttttgttgtactgcactagccgcagtatattgtctctgttttattctttgggtacgaatcgattctttcatcttgaaacaattgtgttacgccttgttgtgtattctt

SEQ ID NO: 5465 - DNA, 789 bp, Zea mays
acaggtcagtcggcgcgggcctactacagcttagcctgttctttttcctccctagcttcttctctccatgtgcaacttgcaactgggtggctgctgaatcctgaactccgccgcacgtgttctttagttggcgtcggtagtcactgtgtggtactagcatgtgggggcatgcactcgcgatgcagtgtatagtgcgtagtatgtaggcaaggcaacgcagctgacaacatgtcgcatttccagagagagaggggggggcatgcgtttggtttgtccgcgcaattttgggtgttggactggcctggtaaggactcaggagcatatgcaatcttctttgtctgaactagaaactttcacgcgccaacaaaacggaacgatttggtagtcctctcctcttcgttgaattcattcagagttagagaccataacagaaaacagggcgtcagttctgtgattctagttagctgctgtttaaaattagttggagatataggctattagctgtttttaggtagagacatctaatatctctagctaataggctattaactgcttgtttctttctcctcctgcgtttcccaattctaatattgggcattcagctcatcaaagttgtgcacgctgtgggtctgcgggagctttctccatttgcatccaaattaatgccttgatgttactaccttctacgtttacattacagtactttgggtgctgctgctttgacccatccctcgctttgattcctcctctggccctcatatcgttttgcccaaatgacaatgaccgggc

SEQ ID NO: 5466 - DNA, 803 bp, Zea mays
agactacacagcctgaaacctgcgagcgcgaacgtcaacgaacaaacaaatgcaacgttcagtctaataacaccggcggccggctcgatcttctatttacaaaccacgtacgaggaatcatacatacgtataattaagatgtgtgtccgaactagctagctagctagtatcggaagttggggttgagttcgatggcctcgttgaatatcagctgcttcatttggtcttccgtcagagcctgctgctcgaagtcgaacgagaacgggtccgtgcagatgggctcgtcggcgacgtcgtgtagccgttccaggtacgggtgctccagcgcctcttccactgcacggcaccggcacaacagagtttatttagtgtaatgaaggtatgatcaatcactcgtcgtgaacttgtagagcaataagtataatgaaggtataatccaagtcctggatattctaatgtttaagatcatgtatagatagatagctgcctgccaatgccagtgttgccagtggaggaatctaatatttagggctagtttggcatcctatcttttcaaggaatttctattttctaaagaaaaattagttttttttttattttaaaaatagtgttaccaaactagcccttaagactatgtatcgatagttttttttctatcttaaaacatgtttattttctatgcacatagcccccgtcatcgtcattttcggcaaaaagcgatattggaggacagggaggaggatacaaaagccgaggatgggtcaaaagcagcaacaccccaaagtactgtaatgtaaaccgta

SEQ ID NO: 5467 - DNA, 778 bp, Zea mays
ttgagaaagaggcgctcaaccgacaattggaagatatggccatatgggagcctcccagttcagatgcacagcataaaaaaaacttgggagtttggtccaaaaactctcaaagtggaagtggcgctttccctgagtgctgaccttggagccccaagatgagtaggcagtgatccgacacccctgaggcagcgctctgcaaaattgcatcaggaaaaaatccttctcaatcattgctgcaaaaggcactgtccagccttactagaattgggctcaagctttcaccggaccaagtatacttttgtctcaacaaaggaatctctttaagctctgaatcatccaagaacagccagaaccgacccattatagctctgttgttgaggttgttaatgttcttgtttgccacttgatatcaaatttaaatttcctgctacacttcatggaccagagaaaagggactgaaaattccacagctcttgccagaaaaggatttctcgatatcttcttgaggaccatatacgcctgtgaaccaccaattacagccttcttcaacgaattggactaactactgaaaagacatcaacatgggaggctattgcttggcacacataactcttccaagcaatcaggatcccttcatgcgtgcaactcgccggcagggcggacaaacttatcataatcagagccaaaaaaacaagtaaaaaatctgccaacttatagatgcaacctggtctatggttctggagcaacccatcatcctggcgagagatacttccgactg

SEQ ID NO: 5468 - DNA, 655 bp, Zea mays
acaaaaggcaaaagctgaaacaatcagaagtctttttctgacacaggaggcaacgaaaaattatgaaacatgatgaagtcgtagctgtaagtaattgtcatttcagcaagagtattttgaaacaaggtaatgaaggacatctatacctggccttcacaatggcatcaacagttttttgctcttgcgaactcagctgtccagatgcagtatctacactcctcgtaacctgagtaatatacaaattaacaagagggaagaactattcagccaagcaatacgccaacaaattacacaacaacaataaatgtgaactattcagccaaaggttgctattgtcactacttgctacctactacaggattcatagttgcggactaaggggaaaagagagagtgcaaggaaaggcatcagagagaacacatcttaaacagatattatgatactataaatgcttcattttaagaacaaaattctatttcactgttgcatgtactgacatgctacatttgggcaatggcaatatacaggtaaagaaaaatgacttaaaaaatgatagagtattcagagccatcaaattacttgcagaacatcccacaagaagagttaacatggtacctgcccatctgcaattatcaataggacgtggtattgcccg

SEQ ID NO: 5469 - DNA, 583 bp, Zea mays
gcatgcctgcagaaaacatactttacttaactagattaatcgcacaactaaaactgtacacataggaatttcagtttgcaagcacgagagcactcaactaaattaccgagcaaaatcattgagaggtactaccaccaatttctcaagtttaaatcattatgacttagttgtaaagtttcaatttatatcaaggcacttaagtatttcaagaaacatggatgcttttgtttacttctaatttgtctctaattcttcttataattataaaaacgtgtgtcattttactaccatatgaaactatctaatttggggctggaatttttatgaggcataggtaataacaaatcatgaccaatgtataaatttcacatgcccaggttttatattttatttaatacaaaaataacaatttgttaatgcaataaagcttgtgagagcaagttaattctaaaattaattattttctgtggatgcatgaccatattaagttttcttagcctactataatgtcatgcaaggacagtggaacatcattttacatttttgcgtatgtacattatttttaaatcatttaaaactactt

SEQ ID NO: 5470 - DNA, 484 bp, Zea mays
  unsure (1)..(484): unsure at all n locations
aaacccgcaattcaagttcagacgcggtgatgaaggatgcggaggcttcgtccgtggctcaagacgatgatgaagtgcaggtggttgacaagatgaaagaggggtagctttttttcgcactttttgtgtttggaggacttgatgttgtcgtacagagttttctaatttagtttgtagtatatgtttttctaattaagtactccttccattcttttttatttgttatggtttagtttagaaatgaactaacgctcgttcttttttatttgtcacgttagtttaaaaatgaactagcggacgacaagtattgagaacggaggtaatacagtacttgtcgtaattaccgtgtggcatcttaatggatggttacgtgtgtctgacgcgtcgctgctctcggccgcaagcgaacgagtattgcgacttgtgagcgtgtaaagaaccctcactgcttgtgtcacacacgagcagctcctgngactggagt

SEQ ID NO: 5471 - DNA, 677 bp, Zea mays
cttctcctccatttctcatacacctatgtagtttaaaggagtgccagaaaaattacggggcgataagaaaacatgtaataggtcgaactgaatctctcacttgtgagttgtgacgatctaccaacctcaacaaattcttcgttacttgttcccacagggtatttcctttcccctgtcactatctctattattataacgcccaaactgtatatgtctgactctttcgaaagaacgtatctttctatgtattcaggtgccatgtatccactgcatgacaacatgagtgccagagttagaaagagaaccattaaacagttcacattttctataaaaaatggatcgatttgtgaagagctttcctaccatgttcctgctaaattctttgtgtgaatatgggtttttccttcatcaatgagccttgacagaccaaagtctgcaattttgggtatcttgttctcatccagcaatatgttggcaggctttagatccaaatggagaatgtttctaccctcatgaagacagtgcaaaccgttacaaactccctcgattatattataacgtacatgccagtctagcccagaagattcatctgtaaaacaaagaactatggaaggtattagcttaccaacctattgagatcaatggatgaagataactgctacagaatattttccgta

SEQ ID NO: 5472 - DNA, 697 bp, Zea mays
tttatgtaccttaagttctccagaagcctacttgatctgatatgctggtcctacttgaaccatgctaatgactcactcaatagtgggttgcattgggatcaacatgtcaggaacggggcaagttgtggttttgtgaaactgaacataaaacatgatggaaagcattggcaccagtgattttctgcacctataaaacaagttttctcacaggaaactattggttttaatgttatgaaacatgactgttggctctgtggtgttgccagagaagatcacaaatgtttttatttgatatccatatcgacaaacagttgtgctacctcgatttttgcccctctgccttcatctgcattagcatccaaaatctgatggctatcatttctgctccctctagatttgcatcctagatattgcaaaagctactggttgatccatgtcacaatgtttcctattcccattaactacccaccaatgccaatcattgctctgtaccactcagaacttaaggcgttggagaaacacaatgggcgattcgattttagccactggaatatgttacacatacatactgtacatggttctgttctgctgacaccgacatagtacaatccgtgccactgtcctgaatcctgatatgatcttttggagccacctcatcctctccatgtatcatgtctaacatatgaggggcatatta

SEQ ID NO: 5473 - DNA, 714 bp, Zea mays
catgcctgcagtccagcatcaggtcccgcagcgtggcgtactcgtagtcgtagctccggccgctcttggccgccgacagctcgatcaggtaccggtccgtcgggaagtcgtcggacgcgcgcagcgacccgctgtggatctgcgccacgcaacgtacgtacgtacgtgtcactaagcggtgcaagggccaggcagcaacagggaacctcatgattactatagtatacaaacaagcaaaaacgaggaggatgatcggcaccttgaagttgccgccgccggatgccggcagcgtgaggggccccttgatgaggtacgtgccgccgtcgaggtgcacctcggcgccgccgaggtcggggatgccgccggtcatggtggcgttggtgggcgggcggaacgcgtcagctatggccttgctgatcgccgccgtggcgtcggcggcgccggtcgggtccgcgccgtagtccgtcacgtggtacacccgcgcgctcgcggaagcctgcgccgtccatccacgccaggtcagacatacgtggcagtacagttcagacttcccaagggtagaaaagaaaagaaaagaaaaaggaaaacaagctttgccggtgaactaaagactggcgccaatcgtgtgcggcgagcacggctgcacgagtagctgcaaagcaactggcgtttggcgtggagcaggtagcggtggttggcgtggcactggtcctg

SEQ ID NO: 5474 - DNA, 794 bp, Zea mays
ttgcatgcctgcagtttttttagcaagtggtgcaacaacaacaaaagatagtttgactttggccattagattttgtcagtcaatggctcaatttctaacataagcattctttaatttattcaccgagttatactcatacacaaattattcaaggttaacttaacttactgttgtctggttacaaaggtcaatacatattaacatggcttaccagtatgttaccattcaagacaagtgcatgtcatttgatttaactttataacatgtctttcaattttcttgctatggtctcaaaactttacactgcaatcagcaaatggtacaattttcaagtccccgaaacctcagtatttgctctaaactgaagtataatatttggaagtatcattcttttaggtagtctatataatatttcatttttttccataattgcatgatcatttctttaatcctatcaagaagcttaacaatatgtaagcctttaatgtctcgtctctgattattgaagatctttttctgtattcaatattgacctctaatgatattgaaccttagcaagaggtcttcaataacaagatataagatattcaagacttacgtgttgctgagattgctgataagattatagaattgaacatgccatttatcgaaccaagaagaataaaatatttggatacaaaactaccctgaaaggacacggacacctttgaaactatttatttcttttaagaatcaaaaggaaaaattaataagaggattttggggacacctctaaaaaattggtacccataatg

SEQ ID NO: 5475 - DNA, 774 bp, Zea mays
cttgcatgcctgcagatgagcgcagcggacacaccggccttgcatgcagaccacgccgacatcttcgacacgggcggcaccaacggcatggcgagggtcgccatggacgcgctccccgtcgttaggttcaccgagcgcagcaacgtcgacgccagcggcgagctcatcgcctgttcggtttgcctacaggtactctactgtttagctgctgctgctgctgctacaacgtcgacacgcgcacttctgatgactatctctatctttgcctccgcaggaattccaagccggcgacagcgcgaggagcctgccggtgtgccgccacacgttccacctgccgtgcatcgacggctggctgctccggcacgcctcctgccccttgtgccgccgcgctgtctaggccgcgcccgttcctctaccctcaaggatagccgccaccagagctgctctgacaagcgacacccgttcctgcatgctgtagccgtacgcacactggcagcgtgatttttctgtagctcatcagatgattcagatgagcgttatgtaaacattggttaatttttaacaaatgcaagtggtgcacatggcgatgggccacatacatacctgacagtcacatggaacgagcagcagcacagcacagcaccacaatagatcgaatccccaccgatatcaagctaaaaggataattacaagcacagcaggtcgcccacaagaatgaccctactaccttcaagcaaccaaccaaccaaaccaaacaacatggtactctctaca

SEQ ID NO: 5476 - DNA, 655 bp, Zea mays
gaagcttgcatgcctgcagattatacaacaattttgtcaaacagacatgaaaactgagctgaagttctgaacatcttcatcgacacagaaacactgtctggattagaatagagatcgaattaggtttgtcgagtacaaactcttgcagcttcagtaaaccagattaacaagatcaaaattttgtctttgaagtttatcagcatccaaatagggttatttgagataaaaaaatacaaatgcttcagggatggttcagtgaagtataccttatctgtttcggagccaccatcagtacctccatgcgtttctgaccaaaccgaccttcctttcagatcatattcaatccttattgagtcaatagctgcaccatggccaatcacgatctggcgtattgttgagtacacgccatcatcccaagggtaccctcctgtccctccccaaggtccaaccactatggggctctttccattaatgcttttgatgctctagtggacataaatcacaatttttttgttaggccatggtaatagaactagaattctaaaaactatatgatatatcacaaaaaccgttgtgtttttaacttcaacttaaatttatatctagcacaatcgaagtgctgctatcacattcagtcggcaagtttttcatggaa

SEQ ID NO: 5477 - DNA, 872 bp, Zea mays
cccctgatcctctatagtcacctgcagggttactcgtatagaactttgcaacactgatgcctgaatcaccataaggaagcttcacatatgaacagtttggaagtgttggaggggatctagactgagagtgaaggagatagcgctcaatttctgaatcatcatataaacagatgtgaccagatttcaacaagagtgcaagggcactttgtctgtgcttatttgggtcactaagccctgtaacaagttccattccttggcaagattcagcgataggcaaaaccatctttacaattcgcgactcactctcttcattcagaatcagaacctattcataaacaccaagtggaaggttgaacaacgatgcagttcttactgaacataaacaatcaagatacatcatccatataagtcaacaaactaggaagaaaatacaggctccaacaacgtacagaaaggggcaactttcaaatatttctgggaaatagaaacactttttggccagtctaccttgtcattggtgatatttgaatttgcagatcagccaaccataaaaccattaattccgaattgatattatgaaccagaatcatacagatgataaggcacattgctattagaacagaactccgcatgataagaaaaaggtacaaggacggatataacatggcatttgaaatttatggaagtggacagtctacaaactattatttgagcaacacttaaatagttattatggttaaggggagcgcctccccctgaaagtaggggcccctgaacattgaaacccattggttttacaaacccggcctgcctttttcctgtggttggggggcccttcgctaaaacaggctatttgggcaaccccggcctag

SEQ ID NO: 5478 - DNA, 689 bp, Zea mays
tttgcatgcctgcaggaatacctcctctaacataatatgtgccactaagtttaggaacgtaattatctatcagatctctgctgatcggatgataaggtttagcccaagaatggatttattgacgaaagctcaatgcaggtgagtgagagaagtaatttattacttacagattttggatcaattgcaagaccagacagcgtgcctccagtaaccttaaaagaaacctagaaaagttgttcataatcaatcaatcgagaagaaagaagcctaacaagaaactaaaacaaaagaaaggacagacaaaagaatctagaaaatagtcaatggaaattagacttgttcatgaatgcatagaaggataaacaggtccagcataccccaccggcaccaccaatatactcctagtgataaaaatgcagagtaatactgattttcagttatacttttatcagttttgggcctagatactatagaagtcaaatgtttcacactcctatatgaaccagcataactaacttacaacgctgaaaagggaatatgacaaaggagatcaagcataccatttccaggtatggtaattacttacaacatcatgtccaaaacaaaaggaactaacaataaggtttctcatggtctaatagcacagcgtttggtagaggcataccttagcataattatacgctggccaa

SEQ ID NO: 5479 - DNA, 844 bp, Zea mays
  unsure (1)..(844): unsure at all n locations
aagaacggagaggagaagatcaacggggagatgttaagagacggaaaccacacgctaaccgcaatgtggatgggggacacacggcgaaagctttgcaaacctgtcaggcgcttcctctttgttgataagtgaaatgttttttgaggagagaagttgaaagaacttggcagcatcaccttccttcaatctctcgtaaatgttcgttaggaactggttgaattcctgtggttcctgatcacggatggcgatgcccagtgtaaacagagaggcaatagctaatttgctacgacaactgaccagttttatggagaccgagcaagcatgctaatgaactaatagttagcggcccctctaaccaatagttggcaggtctattagcaggcatgttttgatccatacctattaatttaagctgctagctattttagcactactcatgtaactatcatgagcttttcgagaaaaaaaatgtaactatcatgagtgcttacctgttcaataatacaggccttccgcagagaagcaaaacattcaagtgctttttgatagttgcccccatcactggagttctgtaacaaagctgctatgtaattctgcatatctccaatagccttctgagtccatgttgagctagatctcttagcccgcatggcctcaaaatcttgaactggatttgaatctctgattgccacaacactctcttgtgaaggatgtggatttttcaaaaccttgtcctctacagatttagcttgatcacctgcaccagtatatgccaacatgtnctgtggtcgtgctttctttttctgtaatcaaaattaaaccagtcaaacgatgtagttttttt

SEQ ID NO: 5480 - DNA, 714 bp, Zea mays
tttacaaaatcttggaaaataatggtggactcgcatgaaacccagaggcagattatgttcgaggtgaattcatttacatgccctgcttatggcaaattctgcaacgatgcacagcgtcatgcaactctgaagttggaggttgagctgaggaactggagatcctgctttactagctatttcaatgctcagaaagcgtatatcgaggctcttgatggctggctatccaagtttgttctgaccgacaccatccggtactcgcgggggatctcgtcgattgctccagatagagctggtgctccaactctagttgtgatgtgccatgactggtacactacaatgtccaagtttccgagcaagcgggtctcgttcaccatgaggaattttctcaggagcgtgagggtgctatggctgaagcaaggagaggagcagcagcagaaaaggaaggtggacagcctggcaaaggagctggacaagaagctgaccgcctacaaaagggcagagaacaggatcataggcaccaagcttctggagcacagtcctgagacagacgccaagcagcgcatggagcacctgtcggagaagaaagaggtgctgaacgtcctaaagaggaggatcgaggcagagaaagcgaagcatcatgcgtgcatgcgggacacgcacgacgtcactctcaacgggttcaagatcggcctcgccagcatcttcgagtcgctg

SEQ ID NO: 5481 - DNA, 753 bp, Zea mays
attggaactctttcttcatgacttagcatatctgatggtgaactagaacctctgtcttcaatgggggttgctggagcgcagctcttaggctttgcagaagcaatagaagaatgaagttcatcgagaaagcttgggttagttgttgaacttaagcaagacccttcctgttgacttgaagctgtcctcgactcggccggactccaagcaaacaaaggactggaaacatctttcccaatacgttgagcaggtaggtttttcgatagatcctgccttgaattcagatctttaacaaatcctccttgtgaaccatttttagattcatgttgactttctgaccaggaaacatgctgattctgatgagattccacgttaccacgtccacaactcacatgtgccactgtaggactccatagggctctactgctgtgatggtggtttgattcaccagagcatcctccctgtattccatcatggttcaagtctgtgtgcccatatgaactcccaggagattgaatgaaaacagaatgcttattctggcagtgtgcttggctattcacagtataagcatcctttggtggaaccgaactagttgacagcgacaagctatcatctggagagtacacactttccctttctggaacagaatacttattatactgaacaggtattccagaagaactaaccacgctatgaccaacaggggagaaagcattggtctgatccacactagggtttgtcctttgatgtccagtg

SEQ ID NO: 5482 - DNA, 748 bp, Zea mays
acaagtctggtggtggcctttcgggcagcaagagaggaagctatcctctggtctctaacggagaccaaagctctgtctttccttcaggtcgattagctcctgttctagctgtgtggtagagttttatgcctagctagtgctgaggtgtctgctgagttttttttactgtgtgtgtgtttctgtactctaaattctggcctccataaggtcttcttgtactaggtccactttggaccttttttctctttaatattattgatgtgcagctctcctgcgtattccagaaaaaacaaacataataatagatactacctccgttcacaaatatatgacaccgttgactttttcgaaaactttgaccactcttcttattcaaaatatttattcaaaaatgtaaaatttaaagtcaagcacaaactaccttaagtgataaaacaaatcacaaaaaaataaatgataactcattattttttttgaatgagacgagtggtcaaagtttttttaaaaagtcaacggtgtcatgtatttatgaacggagggagtagctcacaacagagaatccaggctaaccttactccgagcaagacttccccaaacagtagtcagaccaggatacacagggggcttgccgatcaccgaagtcatcgaaagccaaatcaacatagttaataaagaatctatttctttcagccccatctgatgactcctgctgcacactgccagagacatgcgtcatctgtaattcaat

SEQ ID NO: 5483 - DNA, 725 bp, Zea mays
atcgacgatcgatcgagaggagccattgcagtcggcggtgtcgctagctgccgagctcatcatcggcggcggcagggtagtgcagcagggtctgcgtgcacaacagccttggcgccgccgaggacgaacctctccatggcgtcgatgacgtgccgtccatgcgcgtacctcgccaggctcgccgcgttgctacttgccacctccagcagcaacctcacctgccgctcctccgccgtcaccaccatcttctggatcacaaagttcgcgtacgggttgatcatcatgtcctgcacgtacgtacgtacacagaacacattcacaaacaatacactatggcgtgagtgagtggaatcaaacaaaggaaaatctgtcacagcgcgtgcatttgcaagccaccacgtactaaccacgagatggtccaagtgctgctgctggccgccgccgccgccggcgacgatctcgtcggcgatgagccggcggtcctcctggctcccgaacgccaggcacttctccaccacgttggaggcgaacttgtggtagctcatgccgacgacgcggcccgcgaaccttctgaccatcgcggaccgtatggcgccgcctccgtgctccaccagctgctgcaccacgtagttgcccaaccctgtccgccgtcagctttgttcaccgttctccattgattcttcgcccttcaggcgccgtgggtaacaatcttcggtgggtctttt

SEQ ID NO: 5484 - DNA, 753 bp, Zea mays
gccgctcaacatcctcttcatcaccgtcacgctggcgctcgtgcagctcatgaccttcgtctccatgagctccaaggcaagcgagctcagacacacgcataataatacatgctctgtctggagatggcgtccgttcattactcacagctggggcttggaaataaacatatatacaggtgaaggcagggtacgtggcgccggggctgatggggatctacgtcgtgttcctgtgctggtcggcgatcagaaggtgagatcgagatctatcgatggcttctgaaatcctgcctctgtctgtgtgctttgcgtacagtgacactgcatctgaaactaaccagtagtacgatttcacaacaaaaaaaaacccggcagcgagccgcacacggaggtttgcaacaggaaggcagaagtcgccacgagcgcagactgggtgaacatcgcggtaagtgaagtagccaagcaaaaagctcagttacaaacgcacgctgctgtgcactagtctgacgacgaatcggcatctccctccctccctccctccctctctctttctctggcagagctttgtgatcgccgtcgtcgtcatcgtggcggcgaccttctcgacggggatcgactccaagtgcctccaggtgcgtgctcctctcctgccatttgggcccaagacgactgaactattacccgaacagaaataagtctgagctcgatctgaaattaaacgtctacgaacgaacgaactcgcagttcaagcaggcg

SEQ ID NO: 5485 - DNA, 749 bp, Zea mays
gccatgaaaaccaggaaagcagtgacaggttccatcaatgcagtcaccgttaaaactgcatgactttggacattggccaatcattggaactggtacagtagtacacaactcatgatacatcgggcaaattaattccccttcagagcaaaagtaacttctatgagaaaaatacgaatgatctgatacaccttaagtaacaaactaacagtaacaaccctcaccgttgaatcctggaaactgaacaggcccaccagattgtggacatgacttccagatcccatcaacagcaacctagaaaaaaaaagttaggaagcacccctagattgatatcagatatgacgatgcactcaatcaggcaaaagtaagacaatatcagtatatcactcagaaatagaaaaaacagttagcatacaacggtacttttccccctcgaatacacaggagaactgagtagcattgcattaagaagaaaagttaaatattttcaagaactcacaatactcatacaactatacttacggtaatcacaatgagcatcagtgcatcaaaaattcacaattaaagaaaaaaaaactcggccggggaaggaatgaccgccctcccggtattatactaaggccccctttgggtagggctccttcaaaggctcctttaacggcttcttgaaaaaaaattaccaaaggggaggctctttgatgggctcttccctagaaaagagcgaggaactccaaaaaaatcagtaggagccg

SEQ ID NO: 5486 - DNA, 856 bp, Zea mays
gcagcctgcagagactatcttgctttgaatcctattatatcactgttaaaaaatattttagtaaagtgtatcctcgcaatcacatgcagctagcctcatttttatagtctcttctgaattcgatttccaattcttcagcatcctagactaatataatgtcttagaatctatttacatgactcaaacgtatatgaaaatcatgaacctttgcttatgtacattgatggcgtgatgacttagctgtgcataaagaaaaggcaccaataagattacaagaattctcatctcacatattcgcactcatcaatcatcacgcagccaagaagcatctcaaatttaataaaattaaaatcgtttgcctttctaaagaagttacccttacatttatttctccataacttttagctcttgaaccaacttgttacccctccaaatgttctaaaatgaagggtacatagacttagtataatttctcaagtttcctgatcatttcatctttgttagtgttattgagactgatataatgtcagctaacagagtacagtggatcctcgcactcactttcacctttttcatagtctcttctgaattctatttccaattcctcagcatcccagactaatataatgtcttatattctaattacatgactcaaaaatatatggaatcatgaacctttgcttatttaactgtgttcagtataaacatggggattgctctaacatcaataataagagtttctactattttacttatggtacaaagaattctcatgtcacagattcgcactcatcaatcatcaaacagccaagaagcgcctttccaggagctcgctcgctttctctccgatcgcttc

SEQ ID NO: 5487 - DNA, 805 bp, Zea mays
tctagagtcgacctgcaggtggtcaatcttcattagcagactactgcacatactatgttgcttattctgatggttcatgcactgatgtaaatagtgcacgggcgcctgacagaatgttaggtgaagtgcgaggaagtaattcgaggtgacatcacctacaaagatttggatatacgcacaactacatccactagttgtgttgtaataattaagaatttgttaatgagcaggtgcatggcctcaacactagtgcgaactgggtttgtacggggatctatgacccaaggaaatggctgttatcagcaccgctgcacgaacaactcactagaggtaatacacttcattccatgagctgacacttgagggcgtgtttgttattcctaatccatgtggattgtaatgtgttgggtgggattgagacggattttgacttgctatggatttaaaccgactcaatcccactcaatccacatggattagcaacaaaacgaacaagccctagtggttaaggattccgagtagcacctccaagacccgacctaggttcgattcccctcgggggcaaattttctagcttggttaaaaaaaatcccctcttgtgcctcatccgctcccaggttacgatgtcctgtgcgccacccttcgtttggaccgttgcagagtggatgattgacgttttcccgttagtgatgggaggttaagggtttcggggattttctcgactgcgaccaattgttcggtctcttaagcctttgtttgcagaactcttcctctgccaacttgagcccattgctctggctccttt

SEQ ID NO: 5488 - DNA, 858 bp, Zea mays
ataaacaacatgtcaacatcagatcccataagggtgccaatcaaacaaagagacaataagacagagctagcccaacaaggggggtcatagataactgaaaatcatatgtagctagaagagtgcaatagcactaggcacacatcaataaaactcaaaactcattcctgagttcaagagacagtttttttttttttggttgaaaacagtgagcaggagcaccgctatttcatataagaaattcaagagatactttagaactgctgttatatttatacgaacccctgattgcccgctgctgctagtgcttgaattatctgaagcagtggttgacgtcttcttagagtcctccaggtaggacttcagaagaggaactggagggaacttctcctgaagcccagcctcgtaagaaaaattcacagcatcaagctgctgcctcttagcaattagttcctcaatgatatctgcaaatgcaaaagaaaaggtgttaacgtgtagcgactaatctgctcaagtctggacaagaccacgaaagactagctgtcactcagaaaacacacaaatatatggccaagaaatagtagtagtccatacaaaggcatcttccatgcagcattgagggtatcctctgtaagaggaaaaccaaactgccatgaagttggaagcaaaaaaaggcacgaaattatcgttgttgtaacagcctagccttataatggaaaaggagctagatggcttctaatttggaaaggaaaaaaaagctccatggtccttaaaacacttgtatggggggggccgtatgggaacagaaaggccagaaacctggtggtactaaccctgcaccaatgaatatgccttaattca

SEQ ID NO: 5489 - DNA, 931 bp, Zea mays
aatattgccattaattggcggtggtgagagggggaagggataagattgccacacgggcgacaggcaagtgggtgtggtaggataacacacctatacgtgggacccgattttcatgccaacgacaattattttgggacaaccttttagagctagaacgaccgatctaaagggagtattccattgaaaagtacagcacaaatgcttgtgaagtgaacaagtacaaagttttcagcatcagatagcatcttacccacaaataggggagaaggttttgaaggtcttgacttgaactcaggatggaattgtgcgccaacaaaatatcggtggttgggtatttcaatcatctagaacatagcaagttggttaaggggcaaatttcgtgaaaataaaaattgtaaagcaagtctcagtgtgagtcagacctccatcctccttccagtatcatctttgccaacaaactgaagcccagctttttcgaactctggaaccatatcagggttcacctgtgaagacaaaacttcagtccaaagaacatgaaggtgtaggaacgacatagcatttaaatgcacatttaggaaactggtgaacttcaataaacaaacctcatatctgtgccggtgcctttcatcaacataagtgacattgccatacctaaaaagatcaaaataatcaatgactaaatagtcatagaactacacaaagaattcaacgagacacttcatcgaaggggtacaatgaaaattaagaagggtctatatgcaactcacaatttagaagacttgcaatcagcaatcttgaaaaatgtcctccttgatcctaagcgcatagttgcacccatatgtgttttggaaccctacaataaaattaaattccaagataatctgtatcagccataaaagattgctaattgccatcgaaacaaatcagtgtc

SEQ ID NO: 5490 - DNA, 815 bp, Zea mays
ttgcatgcctgcagtgcttcaaatggatcaaggagcgcttcgatcggtgatggccacgaggagtgcagtgctgcgcaggtcatgaaatggcgattcatcaagatcgagttctgccctgaagctcatcacaggttccctggcttagacttgcccacagtgcagacctagtcatcgagcaaagatggttgaccgacgattgttgtcgtttctgttttctcctctgacctccaccacccatggatggagctattgtttgaggaaactgtaagcaaattagagatgtcgtgggaaaggaacatgtcgtcctccctagatctttcactttggcgaattaggaggcaggtgtgataaataagagtcttgctagttcgtcttcgtccatgttgtcatagatcctgtctagcttgtgtgttcatgttactgtgatgcaggcaattgtgtgttgtgtccgggcgttatttcttgtgttgtgctttgccaacttgcgaggttcagtttatgtgtatatgcttcttagactgtcttggacggatcgtgtaaaatatgggacgtggcagtgtagatgacaccgtttaacttgtttttaaaatgaagtttgaaatatacacacatcatagttcatcatcacaggaggcaggccgcaaatgccgaagccactatgctagttagttccagttttcaatcatggtgttaattgttttaagtcaaaaaattggaggtttatgaaaatttggtgggtgaccaaaaatacctttaagtttttgtttaagcctaatatttataaatgggtccccgctgtaaatttcccattacat

SEQ ID NO: 5491 - DNA, 762 bp, Zea mays
ccccggatcctcttagtcgacctgcagcctcgcaacggtcacttattggcagatgcattaggagctttgaggcattgctagccccaaagaccttatggatagcagcaaagtgcgcagccccgtgctcatgacagaaatatggagcgaagacacaccccttcacacacttcctgcgtaggaacttgcacgcaccacatggtgagccaaggcctgtcatcttgggtcttcttcttggtgctgttgttagtcttatactcttattcttactctttgatgtgaatgctatgaatcatggggtcatcattctctgctatttatagagactagcttatgctgtgagtaactcagtatattgaataattaatttatcttggtctccctagtggactacaagttcaattattttaatcatggttgttccactctgaattctgcttcagattccttccagagtggttaaatgacaaacgatgtaacactccaaattacttataattttcttgttgattgtttattagttgataaactttacattcatctcccggactagggactatgcaggagtggtagttgccatttcatcaagaggatggaaaaaataagagagaggctgagacatctccctgaacacccattttctgataaactttactcatatccaagttatgtcttaatcttacttccttctgctagttcagtaaggacagaaatatcaaaatctgctgaacattttttttcatatgttgctgtcatctctaagta

SEQ ID NO: 5492 - DNA, 836 bp, Zea mays
agctgtagaaggtcttttctttcaactacgcctcatgtttccttccttgatattatattatgagcattgttttcagattgcctgatcgtctgatcgatgccactggacgatcagacgattagtcgcgattaggcgacgatcagggcgtttagtcgccccctgattgaccctaatcgttccctcatcgtcctatgtattttccggacatatgtaacactatatatagatatatatacttatatagtatagagacttgctcaggacaagcacaagtataggcaacagtataaatagtccaaaacagcagtatgaatacttgaatagtccaaaactgcattacatctccagcaacaagtctatatgaaactatgaaactgcaattctacaacttactagaccatgaccaagaaggcaacaacacctatatgagatcatcatacaactgaagtctgaagtcttaattgaagtctgaaactctgaactgaagtctgaacctgagttattaacgcgactgatcgctaaccagacgactaatcgctacatatcgccgactagtcggacaatatggatgatcagatcacctgatcgaatcgaacccccttatcgagcactgagtaccgatcagcccgactaatcgcgattagtcggacgatctgaaaacaatgttagtcagtttttgctcagtgtcaggattactagccaaacacacaaccttacctgttccccgaaattcttcttttcctagggtaccagggcacatctcacaaattgagatcataacagtacggaaaaatccatggtataggggtatagaactgcaagctaatctgcctgca

SEQ ID NO: 5493 - DNA, 1589 bp, Zea mays
actgctgcacgtgttaacttttctgaatccaatgctgcaagtaaaatcaaagtttgagacgtattataagttgtagtaatgactaatgagctatatatgaggcatgcataattagcttacccacacatcattttttaacacagatttcatttatagtaccatgggtcgctcattgtcctttgccctcattggtaggctttttcattgtatactgaaatcccggtttctcaaattgatcatgtatctgaccaacggagagtcccattgacgaacctgtaccatcgttttactgcaaatacacgtgtactctgaaaaatttagcttacccacacatcatttcaatttggcacctgtcttgaaatttaaaactttcctcctagttcccagttttcagataataagttgtacttaatatataaacaaggaaagaagatttagtggtaaattactaaaaaaagagtatgtggttatctggcagaaagagggaaaatgtactccatctgtcccaaattaaaattcgttttagattattaccggattcgtacaacacttgatgtacatattttatgtatgtgtctagatttatcttcattcgtttgaatatagacataaaaactgagagctgaaacgaataatattatggaaagtatatatttgtgctgcaaaactcttagggctagtttgggaaccctatttttcaagggatttccattttaccaagggaaattagttcgttttctcttgagaaaatagaaattcattggaaaaatgaagtttcaaactagtccttaactgggaaaaaaaatacagaaagttcttatagcaattttcgatatgctgcccctctagctatgcatgccttaatacgtccggattcgtgctgcttagtattgtcagcgagttatcgctcgctccaatttgtcagcagttatgaaaactgaatgtgtggattattatattcataatgtgaaatggtgtggaacttcctatttgtttatgtgagcggattttagagatctagtgtaaatggtgttccatgatttcttctgcaactttaattgcgcgcatgcatactctactggtttagcaacattctatgttgatttgcatgcaaccctgcttgcctcacagcctgagattttttttttttgaaacccaacaaacaagcttcgttaagtaccagctgaatcgcgaatcagctgtcagctgagcatttacaaaagttgggaaaggatccacccacatcaacacctgatcagtttccccatttaacgctaagtgagcaagctcatgagcacactcattacaggatcgcttacaataatcgaaacccaacattgagaagaaagattttatagatagcgcccttccttgaacagtaagctcgccggtgccagatcaaagtcatcagacttaaaagcttttatcaaattcaggcgatcagattccaagataatatgtgaaatttccaactttgttgctcttctcagcactgtgcatcctttcgcttcagcttgcatagaattgtatatatgtgctagttttccggtccctgcaggtaaactatagaggatccggggtagggaggg

SEQ ID NO: 5494 - DNA, 706 bp, Zea mays
  unsure (1)..(706): unsure at all n locations
ataaacaactctcgcatatgtatctgtacgtacgtacgtatatggtcaccccgtagatggaccttgcaatcgtattcgtatcatccagaatccagccacgtatcttgttttgcctcctgccgatttgagtgccggctgccgagagcgcacgagctgcctgccccatacggcagcccagccaatataatacgaacaataactgcaccaagcaaacgctggagctatcaatcccccgcccggttcatccgtcaccccccgtctacgtgtacgacgtcgtcgtggcggcgcgcgcggcctccaggtccgcggcggcgtcggcgggggcggtggagagcgcctgctgcatcttcttgccgctgcgcaggcggagcagcatcttttccccgacgaggggcttgctgcgccggcgctccgtgatggcgatggatatgtcgttggggaagaggtcccggtacaccaccgcgtgcagcagcgtggcgaggaagagcgccgccacggccagcgtggccgccgcggccagcccgatgcacatgcactgcgtgaaggcgttcttcacctcggacgagtagcggatggaggcgatcgccgcgctggtcatggggaacgtgtaggcccaccacgccagcgagaagctgaaccctctgaacaggttgatgcgcacggccagcgacgcgtacaggaaacatgcgatgaagtangcgacgcg

SEQ ID NO: 5495 - DNA, 796 bp, Zea mays
ggttcaccactaagcccttcttggagtaataatcaatcacctggacgagccaaatgttttcaaattaggaataatattgatataaaaagaatacatcactaagtacaaagaatacacagatggactgtcatgacatactaagtcagaactatgaataaaaaagcagagagcccagaagacgtatattagtggagcaccagtactataaaggacattaaaaatgcacgtcccaaagggcccaccaaatcgttgaactttacgcagtggcagtgctatgacataattgatgatatacatatttaaatggatagaaatcatcaatgaacaaatgtgagataagccaaattttactgtcaaacaatagagccaaatttcagagtaagacattaacacaactttaatataaattataaacatatatagtggtcaaggattttttttcaggctgttaaaagaataacatacaggttcggtttgtctgtggaaagcttcaagccttgacttcaagacctcagcggtgtcatctctcctttgaatcaatggctctccagttacctttgcgaaaatgaagagcaaatgaagagagaacagtcaagtataatgccaattgaaaaaaatatatttagtatgagaagactttaaatcacaagtgcacaaatatatagtatagataaagtcattttttgatattaatagttgaatacaagaagaagccagaagtgctttcaataatgcaagcttttcttgctgcaaaagagatagcaaataactgtaaaattatctatgtgcatttttc

SEQ ID NO: 5496 - DNA, 753 bp, Zea mays
  unsure (1)..(753): unsure at all n locations
cattcgagaagcagcacagctgaaccaattttcatttccttggcaagctaataaagagttcatcgtcgatcagtcccgctgcatggtttcgtcctctccgcaagcaaataaatttcctctccgcaagcaaatttcctcgccctcctcttcgtgcatggctcctcatgtgctattagtcctagtgattctcctgtacctcgtcagaaccctcaggccgtggcggagccggaggaacagcacatgctgcaccccttcgctcccgccggggcctgtgccatggcccgtcgttggcaacctgccggagatgatgctgagcgacaagccggcgttccactggatccaccatatcatgaaggaggcgggaaccgacatcgcctgcatcaaactgggcggtgtccacgtcatccccatcagctgccccaagatcgcgctcgaggtgctaagcaaccaggatgccaacttcgcttctcgcccgctcaccttcgcctccaagaccttcagcacaggctacagggacgctgcaatgtcccactgcggcgaccactggaagaagatgcgccgcgtgctggcctccgagatcgtctgcccctcccgtcacaggtggctccacgacaagcgtgccgacgaggcagacaacctcacccggtacgtctacaacctcgcgacgaaggcggggtcgtccggcgccgttgacgttaggcatattgcgcgccactactgcgggaatgtcgtncgccgcctcatgtttaacat

SEQ ID NO: 5497 - DNA, 758 bp, Zea mays
tgcatgcctgcagcgatgcagccgcgacgaccagtgctgaaggagataaaccgtagatcacgctcaacgagtgagacctccatctcggggctcaaagggatgtggcgttcggggtcgaagcgaagagggtcgtcccagacatcagggttgcgtccaaggccagtgcgactgaggatgacgtggctgcccttggggatgcggtagccggcaacagtggcgtccgcgacagcgacgtggggaacgttgaaaggcgctacagggtgcaggcggaacgcctcgcggatgcaggccttggtgtagtttagccgtgggatgtcgtgctcctgcactagccgttcctggccaacgacgctgtcgatctcgtccactgccttcttaagcatcgtcgggttgttcaccatctcggccagagcccactccactgcattcgacgggttgtccatggacgcgaacgtgatatccattagcagagctttgacctcctcgatgctgagcaccggtctgccggcctcggcgtccttgagcatgatgagcacgtctaggaagtcctcgagctcccgcctatcgccgctcttccacagcctccaccgctcgtcgatgaccgcgtcgtgcagcctggtcaccctctcattggcctccttgaccatcttctcgtggccgtctaggtcgaggcccagcagccacgggagatagtcggagacacagaaggagtagagaaggccgagggaggtaaagacggcgtccacatgctgtacctc

SEQ ID NO: 5498 - DNA, 816 bp, Zea mays
  unsure (1)..(816): unsure at all n locations
atcaagataaaaggatacatagggaatttggaagaacattctagcataagagcatcatcaatttacctgaggcctcttatcattgggccacacaagagattcaagtcttaaagcggtgtacaggccaccaaacccaccacctaaaatgcacactcgtggtctctgaaaataaggattaaaaaagcacattcagtaacagcattattaatcttatagttagaataactacattaaaaatccagctgacctaatcataacaaacaactatcctaagcaaggctcacatagatgagagaaaaatattccccagttcgtaaagaagcacacaaaatatgtattattagtagcgtttatcaaaagttgtatctcatgagttggaatgcatttatactaaaatttatgtcaggatgatgtatacctaagtctagtctcttgcaattgtaacatgttaacatttcccacaaattattaatttattagccactagtcattagagtaggtgagtctaaggtgaatcaactcgtgaataggtggaaaaaaatatcagggaaccgcaggcaatcttaagtcgttgatacttgatagcccaaatcagtcgacctgcttatctggccaagagtataatggaaatggtgctgcttcgtcagtcaatgtagaccgagcaaaatcaccatcaccagagccacttgaagccatgcacctaaacagtgttgatggcagcgcaaacatatttgaaacaccagcaccaattgtccatgagttccttncacagattccttacttccttgtcaggaaccaaaggcataacccggttta

SEQ ID NO: 5499 - DNA, 700 bp, Zea mays
atcttgcatgcctgcagtgtttttttgaggaacttcatgggccacgccgacgacttcggctcctctcgcttatgatatttcaacacatcaagcccacgtaaagcccttttctcggctgttgcccctccttgctcgctggctgtcttccccctgctgcggctcctcagtcctctcgcttctgttcccctatcgtcggcctccacaagcgccacgtctcgcgccctcgtccgctccccgccgatgagctgccgcgcggcgccgtggagtcgcccgtcgcacattgctggtccgcgtgtgcccaccccggcgcggccgcgcttcgcacttggtgaggtccacgagctccctctcgcctccagatttcgtggttatctgacttagctgttcgcttactgcctaccttgtgggttgtttccccgatgttgggcttgggctttacgtccgatggttagcatgtgctggtcaatgcgcgtaccgggtcacgatttagcttagctaggacaatagtttgaatattgactcatgttttacttatcttgccaacgataaatattttcggttttttttttgctctgatgttatttcttgcactatttgttctgatagcgtaagaaagtcttaaaggctgaactcaggtaagatggaaaagttaggttgttgaagcatttgaagaaaatgggctcgcttgaagtttttggaa

SEQ ID NO: 5500 - DNA, 1020 bp, Zea mays
cttgcatgcctgcaggcaagcttctaatggataggattcctacattattttggagtccatgtgctgcacattgcttggacctaatgttggaggacataggaaacttgaaggaattcaagaaaccaattgcacgtgcaaggcgtgtgacaactttcatataccgacatgggagaattcttgctgccatgagagagaaaactggtggggatgatcttgtgaggcctgccgccactcgttttgctacttcctttctcacattgaagagcttgtacaagcacaaggatgctttgaaggctttatttgcaagcacagcttggactgataacaggttgtcaaagacaagtgctggattggatgtgtataacattgtcttctccacacagttttggaattcagtagaagattgccttagagcttcagggccactacttattgtacttagggtggtagatggagatgagaggccagctatgccagaggtccaagcattgatgaaatgtgcaaaggaaaagatcaatcaaagctttgctgtccaaagcaagaagactttactcaagaaaatcataactataattgaacggcgttgggagaaacaaatggatcacccattgtatggggctgcaatgtatttgaacccaggaaagctgcatcctctcataagaaatgatgatgatgctactgttggtcagctaagaggttgctttcttgatgtgcttgcaagaatggtagatgatgaggaaactagagacaagatcaattctcaagcaatggattacgagtttcttagaggaacatctttttcaaataagatggccaaagataacctacaaactatgaccccacgtgagggtttgtggctgttactagtttactacttactagttgttgctagtagctcgctaaatagatgcgaagttattgcagttgagtggaggcgttcgtatggtgtccgtgctatagagttacacaaatttgttaacctattgtgagtatttgagcgcactttataaggtgtgaacc

SEQ ID NO: 5501 - DNA, 719 bp, Zea mays
ttgcatgcctgcagttgctcgctcgtgacaccaccaccgcgcgctctgacgccagcttcgccacgcggtccattgccagcttttccggtggctatatattactgtgtgtccgaaactagctagcactcacagcctctttgggtgtgtgaggtacgtagatgacttggaacttggaaggtgaatgatgtgtgtggttgctgctcgaaatgttgagcggcttcttgacttttataggctggaaaagactcgcacgtactaaaacgtaaacttagtgtggattattgagatttccttggcttattcacttcttgcacagttgcacggtgcctacttgcgctgtggaataacattctttaatttagactttttctctttgtaggtatgatgattccgggacttgctaagcacatgttaaaaagcacccctccccctcccttctcctttgcaagacgcacacgtatattatattacgaattaaacttcaaattaaaatctttgactttacctaataatttaaattattatggtacaaacttgataagagatagtggataagtgatagtggtgctatcagtgttgtgccattccctaaggtttcattgttggaaatttgtcactccttcgatgccaccctggctgtgttaatgtgtggaggtggttcttgctacatgaagttggagttgccgcgtcagggatatgtctcggtaacgatgataggg

SEQ ID NO: 5502 - DNA, 817 bp, Zea mays
agtaatgcagcaaatatgctaaattgctaatgcaatctagcaatagctactctccctgtctctcgtcgctcaaaaatcatcatcaaactctcctgggatattgggtgcctccccttcttcaccatcattgccaccattagattcatcttcacaatctgtgatttctgcatcatcatgtggaacatcttcatcatcatcattcatcttcatcttcctcttcagcctctgacatattttgtgcagcaacagaatttcttcttgaatacacattatgggcccttcttggtaagtttcggccacggagtgcttgtgatgctccaatggcattatccacaaggtcccatgtaaggtcacactcacacccacgcccaccttcagggactacatgcaaagaatcagcccactcattgtcccagttgaagtcctcatgaaccaatggatcaaagtttttccccttcttctggcgtagtttttggaacctagctttcatctttctgttgtaggaaatgaagacaatagaattcaacctcttatgcaacaatcgattttttttctttgtatggatctacaaaataagaaaagagaaaacacttggtcatttaatcctgaaatattggatacaaaagtagccaagtaggtggatgaggacttgaggaggcacacataataacttacaaattcaaaggtactccaattgcgttcacaacctgatgaagacgcacaaagactcaccaaacgtctagcaaatctctgtaactcaatagcacgaccaccatacgaacgccaccactcaacttgcataacatcacagcatttt

SEQ ID NO: 5503 - DNA, 782 bp, Zea mays
ctcttggcatggactggcagagtgcagacaaacaattaatttgattggtcgacttatttttctatggagacctttttttttgcgagaaccttctatgatgacttgcgcacacatgatttgtatagtttcgtggtactatattatctgctttttaggcagtacatgtatatttgaacacaacatagacgataggtcaccaattaggcgatggatgtgctatagctatcaaaatgctgatttgtttctgtaagactactgcattgtctattcgcagtggtaccatagtgttttcagtgtactttgcctgtatgcaaaacgtacaagtaacaataatgcgtccattttagtaccacactaacaatgacagacagatgtctaagtgccaactagtctttcattatagcataaataaaaacaagaatgacctcctttatttgggtatataggcgaatatatattggagttgaattctaccttaagacatttggaaattaaaaatggctcctttgtgccagagaaaagcagccttcttcattgaactgaaaatgctccacttgtgagtatttggaaatcactcgtttcctttattaacaacggattccctttttgagctagtttggaaacttaaatctccttggatattgtaggggattaaggtagaaatgaactaacatctccccctcaaccttattcaatcctcgaaatgtatttcgctggagagaaagaagaaacatatgaaatagaataagctttgccttgtaagaagcaacaacgctgaattg

SEQ ID NO: 5504 - DNA, 755 bp, Zea mays
aagcaactgaattggggaagaaggccagggagctgaaaaaggcggctgaagctcttcaccaagaagaaagaagtgggaacaagggccggaaatggcgaaaaaacgtgaaggctgtagagaaggtacattgtacacatctgtatttaaattgcttttcccaggcattggtaatgtttattattagctataactttcacaaaacaaccaccactatatttagccttttacatgtgctgttataaagtaaccccaagagattagttgatggcatatgtcctcttcagatgtaggcatgctacttcaaatacataaaagctactcacatcattccaaattataaggcattccaactttcttggagagttaaagcatatcaagtttgaccaaagttatagagagaattacaaagatttatgacatcaaataagtatactatgaaaatataattaatgaagaatctaatgatacttatttggtaccataactgctgttattttattataaaaatttggtcaaacttgagatgctttgactccaagaaagttgggatggcttataatttggaatggagtacgtaccctagctatttatttagtgtaatggcaacaacttaggttcttgagggtctttggcttcctttagccactgggaactctgcgatttgcaatacatagtctcatgtatgtcgatgaccagaataaagaatttttaatttcaaatatttgttcaagaaaaattggaagttttttacatgt

SEQ ID NO: 5505 - DNA, 514 bp, Zea mays
ggagtggaggaccttgccactgccttcgctcagccatggaggagctctcacgtgtgggtgtagagggcgttgtggtggctgtggtttgtgtagggttatgggagaagggaggcagcaggcctgggaagtctgagagttatccaacaagctgttggtgggctgagctgtatcggattgacgtatcaaacaggcccaacataccagtaaagagtatctggattattgttggtttatttttttacagatgcttcacagatatgtatccattgcgtatccatgctgtatccatatgggatatatattcaatacaggataaaataagctgatgcaagccatgagttggtgacttggtgtgttgcttggataacaaattatgttttatggttactcagtttagagatgaatctgtgctatttgatgtgctaggtataaccactgaacctcgtttgccttcaagttcaataaaaacagggttgtcggagatattttgtagtttggtccagaaatgcaatgt

SEQ ID NO: 5506 - DNA, 581 bp, Zea mays
gctctgtggcctttcagcacgcttggttggcctgatctttccaaggaggattataagcatttttatccttcaactgttctggagacagggtatgttagtttttggcaacattttgatttatcttttcttctttcagtagattaatacttgtgttgctgccaagtttttgttctttacattgatgcctggcactttccttcacagccacgatattttgttcttctgggttgcacgaatggtcatgatgggaattgagttcacaggatcagtaccattttcttatgtctatctacatggtcttatccgggatgctgaggtgagatggggcacaatgatgcttatggttcgttgttttcaggggccaataatcatggctattttttttcttgtgatgcaaaagcaacatgatcaaatttctaaataagagttctcctgcgcgttcgagaaaaaaaaatctaaataagttatggttcctagttcataaggggataaacagcgcagggaagatagccggtggagtcggcttgagaggggggggggggctagacttctagaaagattcgggactaaattcttcctca

SEQ ID NO: 5507 - DNA, 568 bp, Zea mays
catgcctgcagctctgaattctactgacaaaaacaagcattctggtacagatgatgaaccattgaggaaagaagcaactgaaacagccatattttcttccgaaacaattgctcttgtcagtaccactgaagatgtgacaagctacaaggatagctcaatctataacgaagaaattgtaccacttatgcatgggactacagaaacaagtgaagaaactatccaaggcaactacaaatcattgttacaagaaaaaatagaaggttcactagaagaactggaagaatctagcagtcatgacaattcccccatgggtggtagtctagctggtgaaaatacaactgagaacacagaacaaggatacattgaggtggcaacagtagaggaaattttggtggtaatgcaaggagaaactacatcatcaactgaatcaattgtcagcacttatcttgatgctgatgactctgagatcaaggaagtggttatagaagataagcctgtacaaaaagagagtctaccagatgtgcaaccatcagatggcacaaacctagagatatccaagaatgacaac

SEQ ID NO: 5508 - DNA, 789 bp, Zea mays
ataatacaaagcaaccacaatctgtacagacattccagcaagccactcaggaaggtcgtgaccaccgtgatagagatgatcaacagttggtttatcaacaagctgaagctatatcccggactgttgagattaccaattctttgtctgaaaatgtagtaccagctggtgtttgccgtacaatcccacttaccaaaccaaaagatatcactatactgggaaattcagtggatctgaatcactgcatagaaacttgtcatggcagtaactgtttgaactccacgagtttggcaagcttatctagtaagatgccctgtcaaaaattccaaggtgtgaactctcatctgaatggcaacaatgtttcaagtcttgatgtgcagtatcttggagaacaaaaccatatgatatcacaagcatcatttaatcctgttagtttggcacccaagggagtatcaggtgatatgagcccattgtcagagccttccagttgttgtttatatgataggagcagtatcacgttccacgagaaggctgatgctaattaccacttgggaaaagttagttctgagattcttagatctggtaacgtggtgagaagcataagctcttcaacaggatcaaataaaccagcacaagccatcgattgtgtatctgctgcattcaggaacatgcacagcccgcgtgacgattatgtcagccttcctaataattcacgaggtgaattcgtcaaggttcattctggtgggacccctaattattttgacatttgtaccagggcaaggtttgggggag

SEQ ID NO: 5509 - DNA, 704 bp, Zea mays
attactgtgatttgatccgacttcgaaattcctgaatatgtagtatttttgctgtcattttttgtcctcaatatattacactatatgtcattataataatcttctatataaattatattaccaggatcttcctaatggtgacacagtcattgtgtatggtttcttcaggtctagtgaaaggatcactgtctttgcttgtgactgtagtaaagacactcttgagaaggcaaatgaaattatatccaatacaaaagggattaatatcaaggataggttccacccctttttaatggatgtttctaaagaaactttcccagattggttattttgcaaagcatgtcaaacttcgctgggaaaagctgctgcatctttacttggtcattcattttgtttcaaatattccttcatttgagttttattttcacattaccaagttctgatctccttacatttttgctttcagatccaagtcaccatggaattagagaagaacacccagtcttccttggagagaaccaatgttgtgctggtggcatggattttattaccatggtagattaattttatctggtgctagttggttattcatactcatatcatttgtttgcaattgcatatagaaaatgatcatggcgtacatgtatatgtatttttaagcttgacttgcacatgttgtagatctgaatgtactatggagagctgca

SEQ ID NO: 5510 - DNA, 720 bp, Zea mays
gcacaggtggttgtagggtgctcgggggagaggatgcacttggtggcacgcgtctggcggtagaagaggacagggagaggtggtgaaaccgaaacagcactcgtacaggcaggaggcggtggagtagtaggcgtggacgagcagcttgcccccgtcgttggggttggaggggagcgtgcagttagacgatgacgacggtgtagacgcagctgtagcagcctcgccgcctttgctagcctcactggggcagcatttgaggcggcggcggttgtggtgaggagggtccaaggagctgaggaggtgccagatgcgccgtgaagcacggccggaggccgagctgggcgccgcacacttgtttctctcctccgcgcttcactcaccctctctttcttgggaaccggtctgccagcgggcaaaacacgaacccagatcgatggttggaaggaggaaatgacatatgggccatagcaatatggatggaggaaatacttgctaccgggtttgtttcgaaccgttttggacctaacaaagacccgaacatcaattaagactttaaaagacatactttaaaagtttatggaccaggttgacacaccgacacaagttaagggactggaaatgcactttactcatatgttattcatgcaagaaatacagtaattatttccgggaaacttcactaattgccctggcagtagggaaaaaaactacataaaaagt

SEQ ID NO: 5511 - DNA, 729 bp, Zea mays
aatgacatgagaacggatatgaactcttggagagcaaaaataaatgcatcgcagctgatcaaagcataaatgcgccatttttaccatgatttttggcgatattactgatggattcaacaacactgtccaaccagcgtgtctcatcagagtcgttaacattcccatgaatatgcaacacgcccccgccaaccctatacatagtaatagagtaaaatgttaacatcaaaggtttgtggatccagcaaattgacaaaattccaaacatcacattaaaaattatagagaagtttttcccaagtgaggccacacattccatcaagcagcccaacgtatttcatgccctacacactgaaagcaccaccatgcaggcattttcagtgtgtcagataaccaaacttggcaagcatgtaaatggaaggatcgagacggcggtctccagcaactccagttggccatatcaggagagacgatacttcagcatgaatcggaggacgatagcaatcaaatgatcttttcacatgaaatgaacttcagtaagagaatctttagtatcccagcctccttgaaaatgatctgctagatgtaaactcaattgtgctttgttgattcagtgggggggagggggaacctttttcttttaaaaaactggttggaggtctttctggatggtagaataattcttacattcaattattttgatttgaacccaaattttttttaaagggaacc

SEQ ID NO: 5512 - DNA, 751 bp, Zea mays
  unsure (1)..(751): unsure at all n locations
aaggcagggctcagggcatggtggatatcacactaaaaatgatgtgtatcatcctatgcctcataattcctatattatgaatcagcctgttattccagtcagaccagtttatcagggtccagtgccgtatgatgggtattatggccctcaagcaaatttcaataacaccaatgttagagatcctcattttgttggaggtcctggaatactaaatcaattcccaaatcagaatgacaggtttcaccctggacatcctcaaaacagaccaggcaaacatgaaacggtcccaagggagcagctggaatctgataagttacatgtctttcaccgagaacaccctgggagtttgcatgataatccagatcgtctaggaggttcccgtgaatttgaaaggaatgtgcagccagcaccgccacttcttccacatcctgatggaaaacatactgatatgaacatgagggcagatacaagggacacctttagtgagactgaaagaaccgtggtgcttacaaaatcggtgcctaaccagagaggttcggttggtatagaccatttgtctgtttatgaaaacacacgatcccatcacagagaaacttgtgatggcactctgcgcaagaagttcaaggaggatagctcagttgtacttgaccagcatcctgtcattaagaagaatgcagctttaatagagaaaattgagagtttgaacaacaaagccagaaatgtctatgcacagaatcntccagaaccagct

SEQ ID NO: 5513 - DNA, 712 bp, Zea mays
acatcgccggagccgtcaacaagatcagcgagagcgtgaagaacatcgagaagaacttcgacagcgcgctcggcctagaggagaagcgcgacgatgaagaaggtacgtacggcacggagacaataatgctacgatcctcagtcctgccattcgcctaattcagtgtattgacgttgcattggtgcgtggttgtctgcgtattaacattgtaactgttgatatgacactgatagggtagtcaatggtgttactggttatgtttaattgatatttgacaaatccatgtttgcggagaatgacatgtgctcattgcttattatcattggatcgtgaccaaaaaacacacctatcacccgatcaatttctacgtgaagtcaaaattcagtctattagtctgttgaattctgtgctattgaatggtttaggcatattttcaaacctatgtcctcttacaagtgttggaactgtaacaccttttgcactctgtctgagttgctgatatctgtaggaccgattcatttgctagtgctggctaagagcttcacaatggaagcattgtattttttgtttaaataaaatgtttttttgtaacgcagctgcgtgctcaaataaaatgttttttttgtaacgcagcatcaggatcgcggacatccaactctgatggaataggattcttcaatcctgtcatggctttcatgggacacaatggtga

SEQ ID NO: 5514 - DNA, 810 bp, Zea mays
cacagccgaagtgaggcagtagtacgatggagcagagccccgcgaaaccacccaccgcgccgaccacgcagaacgcgatccaggccttggacacgcgtctactcgacgacggcggcggagaagggggtgcgggagcaggcggcggcggcgaatcgtcgcagagggcgtcgcagatcccgccggagcctccgcagaacttctgcgactgcgacatgaagccgcacccgcggcatgagctgtcgtcgctgacgcagacgcccgggcggatcctcgggagcggcaccggcgcggccacggcgcccgcggaccagcagtacacgctgaagtcgctggacgcgacgccgcaggtgaagttgccgccggcgacgaggaaggcgaaggagatccccagggccggctcgtacagggtggtggtgggtcccccgaggatccagcaaaccgcggtgtggtcgggccggcggagcgcgcacgcgtgggagtcgccgacggcgaggccgtagccgaagaggtcccgcggcagggcgccggcggaggcgtccgagcccgagcagagcgcggcgccggaggcgagcacggcgcaggcgcgggcgccccctgcggcgaggtacggggcggcggacgcgttggcgaggcccgcctgcacggcgctaccctgcgggccccagcagccgacggcggcggacgcctttgcctgtactgcgcaggagaagccgtccccggaaactagggagccgaacgcgccgtcgagccgcgcggggaaccggaccccgacgtgccaccatatgacccactttccggaagcgttgtagg

SEQ ID NO: 5515 - DNA, 829 bp, Zea mays
cttgcatgcctgcagagcaacagtaacagccgttggtcgttagtatcttcagaacgagacgtacacaaggcacagtcgcacagagagagcaggtccggggtagctagctgccatgggcaacgtatgcttctgcggcaccacctccacctcccctgatcagcctgaaccggccacggccggcaaagcgccgccacaaggcgccaccaacaggaggccggcgacgcctccgagcagccagcagggcagcagccaagagccgagcccggccccgggggccaataagcccggaccgaaggcgaggcccaaggctactactaaggcgaacccgtacgactgggctccgccggcagcggcgcacgcgtcccgggcgtcggcgtcggtgtcggcgtcgcgcgtgctggacggcgtggtgccgcaccacccgcggctgcgcgtgacggacaagtaccacctcgggcgggagctggggcggggcgagttcggcgtcacgcggctcgccacggaccgcgccacgcgggagcgcctggcgtgcaagtccatccccaagcggcgcctgcgcacggcggtggacgtcgcggacgtgcgccgggaggtggccatcatggcatcgctgcccgaccacccagcgctcgtgcgcctgcgggccgactacgaggacgccgacgccgtgcacctggtcatggagctctgcgacggcagcgagctgttcgaccggatcgtcgcgcgcgggaggtacactgaacacgccatggtcctcgacggcaggaccgaggctgatgtggtgcaggcctgccacgcttacggggtactgccccggaccataagcccg

SEQ ID NO: 5516 - DNA, 726 bp, Zea mays
ggacggcatctggtgccagggcgacgctgctgccgcctcgccgtcggtggtgccggacatgtcagcagctaaccaccaccacctcatggttttgcagtacggcaggaggtcgtagcaggcagagacagacagagtaccacccgctcccccccaccgatgtccgatcgatgacactcagttgcaatgtagattctggcatcccctgcccggccctcctaaccctttttgtcggcacggccggcaataggcggcatgacggaacgaccacgagctcccgaccgccagcacgcgcgcacacctggacggcggatgaccggaggcggctgttctcctccacacaagtgctggagagaacataacagcttggaagttgcctggcagagacagagagagagagagaaagaggggtcgtgtacgagtgctgatcgaagagtgggtgtggcgcgacttccaagccattttggccttcattcagctgacctgatctactaatccccagctgagctgagccgttacattttgttaatcaccagtcccttcccggttccgcgacgataggccagctgctcgcttctcttttttgttggggaaccagtaccttgtccgctgttcttttagagggccaacttgacatcgattcatgacttgaccctagagaaactctttggccctttcttcttttttttttcttttggctgtattcaacagttaagttgtaggcgcctc

SEQ ID NO: 5517 - DNA, 789 bp, Zea mays
tttttaagcataactgaatttgaacttgtttcattttgccttcttctagatcatgttgtgacaaaatgtaaaataagacatcagtgtttttagttgccaatgggggtcaagttttttcctttctcattctattcgttattttatatgtctagctttcaatatgtagaataatgtgtgaatatacatggcaataagttcaagtgaatttgctatatttgacaatttacatacattccttattatttgttgtattcttagctgccactctacaatgaatttataggtggaggataacctgtggtcatgctatgacagtttattttttagagcgggcttgcaatagctcagccaaatgacgtggatagctgtaaatcatgctttgcaatatggaatgagatattacatgtttcattactgctatttgcaaagtgtaacttcgtttgcacttgttcagcatcttgccaactattttttagatcctgatatttcattttgactaacatcgtcagtataaatactattgtatcatgatttcatgttttcttttctcaagtttttcaggcccgcgcaaattgcaacattttatgttccttgagcattttgcactgtcgctggcttactgctaggtgctacaggtttctaaagcatttttcatatatggaagttgtttgagcatcattcttaatatgggcacaagaatggactttgagtgattttcgtaaagatgccaaaaaaaatcgtctagttctcaacaccagcaatgaacttacagttttgacatagacccca

SEQ ID NO: 5518 - DNA, 605 bp, Zea mays
gcgagcgatccacggcggcgttgctctgttggacgggtactcagatccagtcttctctaacaagtcaagttcacatcaagcatgaatcttcgtattatttataatgaacggaaggggaaatggggccagtggtgggatcttttcttcacaaattcccgtttcatactaggccatgaacgtgtgaactccagcatgctggtctctgagtgccggttaaaactccgaaaattgaaaactatcctacggtaaacaacacgccatcggtcatgcatgcttgacaaccactaaccactcatgactcatgattcacgcaacaagaaccagcaccaacgtacgtcattcatttcaatcccacaaaaaagtggggaaagacaagaaacatcctgcctcttgtttgatcaaagagagagagagagagagatcccgttagtttgactgcaagatcaaatccttgacatccacacagcatgtaatagccatatataagtcatcagctggagcttctacgacgacacgacacgacagagcatgatgccctcttggcacaagcaataatagcatatatagtcaaccagtagcagcctgccactactaccatggacgca

SEQ ID NO: 5519 - DNA, 789 bp, Zea mays
acggagcgagcttcctcaatcgtccctcactttggcatttcatcgagcagcagccaagccgcgttgtccagaagccagcacgcgagaagggggtagctactagctagcgctcaggaaacgaacctgcggcaggcgcacctcgtcgagcggggcagccgaggcgtctccctggccggcgggggcgccggttccctcggcggtcgcggagaggaggacgggccggtggtggaggcgggcagggaaggggaggaaaggaactgggctcctctgggcggtaccggggaaggccgcgagcgaaggccccggcctgagggacgccgccagcattgcgctcgtacgtaggtgtgggcgggggcggggctgctggcgtccggtggccttgggaggtgtgccggggggaattccgtgccggggcccgggggggattcagaggagcgaaacgagtggaggtgggaggggaggcgcgggctgattctgattcaggctgtgagatagattgccacgtggctcggcaacattctcccccgtcttctggagggagagagagaagcaatgttgtccacacgagcacacgactgtacttgtaccactagaaggttcagctctggacaccggagcccaatatcatgttccgcgtctccactcataaaatctaccaattattttaatagtttgtggtggtgtagcgaagaaattttataaaaatacataatttttttttatcaaacttcaggttacttttataaaaaacaaacgaacaggttaaatgattgccaagttccaaacagg

SEQ ID NO: 5520 - DNA, 726 bp, Zea mays
aagtagaatgcacaattagcccattgttcaatcataacattaagagttccaattcagcaataaatgaatttgatagatattgaactcaggattgacttttacaattatttagtttcacacatctatcagtcatctaaatgttttgcgcagagttacttcactgccattaggcaatttgaatattgtgcgtacatcttgtatagtatcctgaagcctacaggggtgtaattttgttgggaattacagcacacagcaacggtcaggcgtactattgattgaaacatgccatttggagcaatctaatgagttcgttttttatgttgtattaactgtattttttgtgaggtcacaaaagaactaaataactaagattttgttgctttctaaacattacatttcaaagttaaagctaacatttatgccttttttaacatcgctgagttcccgcattacaagacatgccttgtttttttgtccaagttgagatttttccttctccgtgaaatcctttaaaatattccctaaaatatgctcatatatgttgttgcccctattttctccctatttctctgaaataaaatacatgcatggagacacatgctgagacatgagatttgaaagtcagacatatatataacatgaaataatataaaaattgatataccaagctatatgtaattatgtatatatctttttcttgaatacgcaagagctgcatagctttga

SEQ ID NO: 5521 - DNA, 746 bp, Zea mays
acttacaacggcgggaaattttccgctcgctcccgccgccgctctcccgtgtatatcccagtcgcctgcgacctccgttcctctttcccagtcgccccccagtccatctccacttctccattcctctttcccagtgcccccagtccatcaccacatcggttcaaatgggccgcaaccgcaagggccgcaaggctagggtttcgcacgacgccgacgccgacgccgacgccgatggcagcgaggatgagagggccaccactgcgggcaggagcctctacgaggtaaggcgcccccgaaaccctatctgggatcacggcctaagtgcgtgctcgattgtggttgcgtgctcgattgtggttgcgtgcggcgctcgaaccgtgtatgcgctggaggtgtagggttcgagggtgagcgattttcctttctgattgtcctgttagtttgattcggattagttttgtttggtgtttagtgtgtgggttatgattgctcgtgaatttggtgatgtccttcggatctacttgtggtggtgagagcatgtaagaagagcacaagggatttagattatgattgctcgtgaattaggtggatgatgtccttgggatctgcttgttgtggcgagagcatgcaatcagtgcttaaggaatcgggacagtagtgtttgcgagttgaaaaatgctgatatgggtgcttctagcttttattttttctcagtttcaattggttgccgccctgggcatagtaca

SEQ ID NO: 5522 - DNA, 744 bp, Zea mays
  unsure (1)..(744): unsure at all n locations
actgatggagtgtactgtgcatgtgcagggcagcagaaagatactggcgatgccattctgttcgggcatggttggtatcaatgctgtgcacaaagcctgtgctcactgcccagagcatcagcagccatctcaggcccataacgcactgcaaatgcaaatgcaaatgtggcacgggtcagcactttggaaggagttcgttagggtggtagcagcgccgcggtctacatacccatcattatggctgacgacgattgtttgtcgtcagtggcggcagcagcagatgggcaccaccgggaccggagcgccagcctggacatcagccacttcatgacgttaaacacagatcatcatcacttgatacaagtaaagaagaataatgctcaagtagttggctgctgatttcatcaggttgaaaagtgttgggcagagctagaagcatcattactattacacatatctgacggcaagtagctgttactactttacattatcgtaaatgttctgtttgtggcaagcaaaaatcgaacaaaaaactgtaggtgcatacagaagaaaaaaatacagtacaagctaattgtcaaacaagaagccaacaacatcagcagaatttccaaggcccaataacaaggtgcatgaatttccaaacacgcaagaactgcattaagttcaatggctcgtaaagagatcgatggtacatcgtcctacaccacgtangaacttttcacttgtacttgacctataaca

SEQ ID NO: 5523 - DNA, 637 bp, Zea mays
cctacggcaacgacgccgaggtgcacgccaagatcagccacgccaaggccatgctggacgccatcgtcgcgtgctgctcctcctcgccggccttcggctaccactactggccgccggtgcccaataaggcgcaggcagaggagtacgcgttgcagccgcagcactacagtggcggagggtgctactacgcctctgagaacgcgctcatctacaatggcggggggccgccgaggtccaggctgtcgtcgacgcggcgcccctgccactacttcatcaagggaatctgcaagaacgggcagagctgccactactcgcaccaccggcaggaggcccaggtctgctccggcgcgctggagaagctggagctggagatcattgagctgctcaagtcgcggcacgggcagccgctgtccatcgcgtcgctgcccacgctatacggcgacaggtacgggaagagcctaaaggccgatggctacctcacggagagcaagcggcatgggaaggccggctacagcctgagcaggctcatctcccgactcagcaagaacacaaccatagaaaggtaaatgaattaattaattatcagaagagagaattaaagagatcattggatttgaacgcatgcaggccggacggg

SEQ ID NO: 5524 - DNA, 738 bp, Zea mays
ggtgaagctccccacacaacgacaaatactattaacaaggaatgtaagttcgaaaacacaggtcctgaaaattatatcgcttgggaactatcactaaactctggttaagttgctaagaatgtaaggtgatccactcaatttatcactatcacttccttcgctaccaatgtacaatggtcttaaatagtgcaaaggttattttggggatctcatattagatggtgggggcacagaatatgggataatgctacacattctcacttgggaattaaaccttactctcgttaatctgcttttgctatccttatatcagtggccctgtactgttgggctgaacatattgcagtcatcatattgcagacacatgtgatgccagagttttcatgagtaatgtttgcgatcaaggtagttaacaaatatgcatagttgtataatcatgcaactctaatgtctctgccaatatgacaacatttttcattcgccccccagtgtcttatggcacaaaaagttttgtagtgttggccatcaattttgtctgattaggacccatttgttctctatagatatttggctgtaaaatatacatccttggccattatactgataagagtgtagagattacaattgtttcaattttcaaccatacttatacttgtcggaatcatctgatatatttttttatgacaagcttagaaaaattctaggcataggcatgcataaagtgagacctttttgtga

SEQ ID NO: 5525 - DNA, 807 bp, Zea mays
gccgggttcctgtatagtcgacctgcagagactacgatcttcttttcctcaccagtttttggatcaacaatctttatagagtaacattgtgttagcatataactcatatgaaaatttcaccttttaatatgtcggaaatcatcaatagctagcatagttactttacaaaggtaaattaaacgacataacctttgtatgaactggcacaatttcctctttgaatttaccagcagctgctgcggcagcagcctttctatgtgactcaacctacacaacagaataaagattataagactttaaagcaggaagcatattgtgagacagcaaacgaaggtctcatatatatacacacaaaaaaaacaaaccacagaatgggagtcaggcaacttacagcagcttgatcttgctccagtcgtgttatgccaaaacggtgtgcaacattctcagatgtgaggcccattgggagaagacaatcgcgtgcttgagaaaacagctcaacctaaaacagtagaaagactcgagacaaatttaatcagatcaaagatgcttgcacacgtttctaaatatgcagttttgccatattgaccaacatgttagacttactttgggattcgcttggccatcaagactaactttgttcactgtcatggactccaaaccagcagcaataccttgaatggagaaaaataaaacccaatttattaacccatcccaaacaaaacaaagttagccaaaacaagacagcaaccaatcctacccatgtcatagagccctgctttattgcagtggcacatcttgcacttgctg

SEQ ID NO: 5526 - DNA, 797 bp, Zea mays
ggtgcctgcagcctcaccggctcatcacttcgtcagccatcttcacagcccgcctggcgccccccagcatcagattcccctgctaaaccctcctgttgcggtttctatctggtccagataatcactcccttccctccaattatttttccactgctcgaaggcccggggcgcccaccggagccaatcagttccgttcacctttccaccggaatccaccccaccgccaccggtggatgatttgatggagttgccgttttgcggaccgtggtaactactctctcccaccaccaacaatcaagagtccgctctcctccaacctcctgccaacagcacgcctgcctctctctctctctgtgtgtgtgtgtgtgtgtgtgtgtgtcaccgagggtccgaggcggtcctactccctctgtcttggtgtcttcttgcgcacgccgcttggtggttctcctcctcacggttccatctccgggtccttgggtctggatggaactggagacacggtagaggagcccgcggtttcccttttcccctcccaacaaaggtatgcctgggttcttgcttgcctttatagctctgcgggattgacaaaaataacaggaccgacgtggatgaaaggttgacagggacgattttttggattgagtctatagccttttggtggctaacgggctggagctttggaggagaactcgagctctggggctctaagtcgttctggaccatgctctgggaagatgccaatggagccgtcgactgggatcttggacttgctttttgagctgcctcaagtttct

SEQ ID NO: 5527 - DNA, 792 bp, Zea mays
ttgttgtgtcttgtgttggttggttcctgttctttctgtctatctattctcatgcatggcagtttgggtatggtatgggtcgtcttctttggttacgttcgctgcattctgtttgtgtcattgtgtgatgatacgatcttctttatataataatagagccagtcgttcatcagcaaacctgcaaagctttgtgtaaactgtaaagtggagcagccagcgttgcagaacgccggatccaccctaggtctaggactaggagcagctcggtcctacacaaacattccaacatgtcgtcaagccgggtcattggtctcaacggcgcatctataggataggacgctcatgcgactattacgtggtccgccggagctagtgaccagtgagcctgttctgtcaatggtctccatcggcatcacccggcaccggcagccgattcggtgccgacttgctatctttgccgacggtctcgggtaggctcgctcggtcatggcccatggcgattcgctaaggacatactactccatgacggtccatgacagcatgtcagtcagtaacgtgcttcctgtcctgcggctgcggctgcggttcgcgcaaagcatcccggaggtccggagcgaagaggagaggtgtccaacgcaccagcgtgcgttcagttcaactggacacgctcacacacatgtctgattccaggccccaaactagatggttgtgattcagaattccggaacacaatcaagatacgtttgtggttcagaatttcagttccaggtggccagcgccgggcagggaagc

SEQ ID NO: 5528 - DNA, 561 bp, Zea mays
gctgaattatttcttgataatgtgaaaaactgccttaaacccaaatactcctctaacaagaataactagtttgtgcaaagaaattattaatagactcgctctttattttaggatataaatgtaatcttattacaatagatgaccatatgtcagttaatttcttcagaattgatgtaacttgaaatgttgaacatgtctaaacatgtaaaatattctcaccgataattgtttgtgtgcttcaggaggcagctgatagttctcagcaggagttataatgacagcacgatcaacaattgttgccccctgttgacaagcaatcaaattattgatagtcgtatattagacaaaaaaaaagatgagatgaaatagtatcaaacagaaagttaagctgtctaagtgcaacagaaagaactaaatccgtaagctaagaaatgagttgcaggaacttgaacataccgagagaagaacagcagtgtctgctccctgtgagtctttaaatgtgacataagcaagctgtgaccattcagattcactgatgaaaacagaagcaaatattcaata

SEQ ID NO: 5529 - DNA, 787 bp, Zea mays
aattttaacccgcgcggaccattctaacacaggcattccatgtcctgagattgcagttcagttcaatttttgtactggcagaagatgggaatactcttgcaaaggattagaaagaggctataacataccgtgaagatgataatgcagcgtgttattagaaacaaagtcgtatacaagtaacctttggtcattggaaatgcagtatcccacaagagaaaccaaatggcggtggtgcacgcgactaattatctccacttcggcctggaactcgcgctccccttgtccgccgccatcctttagtcgtttaacggcgacatctttataatctggcaggcggcccttgtacaccgacccaaagcctccttcccctagcagcctctgagctgagaaaccatcagttatctgatacagctcatcatatgagaagaacctggagttgccaatgctgatatcagacaagcattgtttcagcctggggctcccggcgctatagttggtgtggacagaaggatcagctgaccatcctacatttgcagattcacctgaaggaagcgggatatggtatcagtggccgtgttgctagctattccaaagagctgcatgctgtattaagctagatgcagaaacaaagtatttcaggtccctggaattttcaggcaacaaccttacacaatcagccagcacagtgaaaagggcaactcacaagataatttattaaaaaatgacaaaaaagctgtatgttgcatgatatatagggaggagtgagaaacaaaacaaaatacccgaa

SEQ ID NO: 5530 - DNA, 766 bp, Zea mays
atcaaagcaggactgaagagcggctgaatctgaatggagcaagttggctaacatacgcacggcagctacaaatacttataggaataaataaagttggtcaactgttggtttcatggtgttggagtacaacaactgtactgttcttatcctcatatatgatatatgaactctagttcatcacataatataaatctgtaagagagccgagaaacatagatggctcatgggacagctggagaggcttattttctttctaccatccagtttctgattcaacataaacaaaagcgaaaaaaaaaacatgtaaaaatatgcatattcaaaaccagcatacttacaatttggattttattccacagagagactgattgctcaagtttaaatcagtcaactgtttggtcttcttccataataatttctcaaactacttaaagactgaaattttgacaccaacatgtgggctccagtatgcataattgtattgaacaaatgctgcaaatgcggccggagaacataatatgcctaccaggataccacttataattgctgattttccttactgcattagaatgctgttccaaatacaactgctataagcaaaacctgtttctataataacttcagacagcattacaaaggaacaagcgcaaccatgatgggaacaaacagattttttttaaaaaaaaattggaccaatccaattcggatgaacaagtagaacactgaaatactttcagaactttttatttaacgaatattgtccaat

SEQ ID NO: 5531 - DNA, 708 bp, Zea mays
ctcgcgtgatcctttgcacactgccgtgaaactgaattatattgtaagccgacctggctgaataccgcccattcccattgaatttccaaagaccaataattaatacactagtgctagcatcatgatctctaagaaacgagaccaaataatcatcaaacctaatcctaatagtggagttgcctagagtcacaattaaaccgagcttgctgctgatgacttgtactaccatctgcttccattctgctccctgatgatcgtcagagcttcatgacccagctgttccgttctgctccctgatctctataatcctccgatggcgattagagtgctgtccgatctggaagctaggagacgtcgtcggccggtactcaggcagcagcctatgcgacctgtagcgtagcccgcacgcgttgcacagggttcttcgcccgtccgggccctcgcgccactgcggcgtctccgacgactggcagtggctgcacgtcctctgaacttgcctgttccgcgggcatggcacgggacggcgccggcggacggcgccaccggtactccccgcggacggaggagcgagagcgacaggcaaggcggcgctccggttattgccaccgttcccaccatcgggcatggctggaggagcgactgccggccaggcctgaagagggaagtcgatctgcgactgcgatgggcgtcgtggagaagatgacgacg

SEQ ID NO: 5532 - DNA, 773 bp, Zea mays
agaactggacctgccatttgccaattttcctgaagggtccgccctctccacaatctgctttcttatgaagtcgtggagcctgccagacaacatctgtctcaccttctcaaatgccatttccagcctgtcgagctgcgcgtgaagcagcagtgaaacattaggttgttgtccgcgcttaactttaggcatatatagtacatgttagcaaacaattgcgctgcatgcgttacaacaatcgctgacccacgggctaaccaaaaccagcttatgcaactaaactaatgcatgatgtgttgagaggccgggtggagagcacttgcctgctctgtggcattgatattgtacatgaagagcccgtagtacaggtcgaaactgtcgcttacggtgttctgggtctgcaaggttcgtaggcgataagagccagcattcgtctcagcaatcaagaatggacaagaccacttacaagttgcagcagggtctcgtagcccttggtgttgattggggttgaactgaggttcagctgtgacagaaccctgcgccaaacaacgtgagtcatttataacatcgcgttaattaagcaggcagatcgaaaacgatctggagtgatagctgcaaaaacgttccagatatatgcaatgttgctgacctccccaattgtgtgcgtgatgaactggctccccgcggcgtagcgatcatgctcgggacacgacatttccaccattctacaaccctacaagaattgtctagaatgaaatgaaaccaccccaaaattt

SEQ ID NO: 5533 - DNA, 720 bp, Zea mays
attatgtccccctcttcggttccttcgagaacctgctccaggctctcaggaacaacgcctaccttctcagctcggacctcgagcgcgttgtgaagcccaacgtcgcgttcctggtggagtgcgggctagatgcttgtgatattgccaagctgtccatacccgtccctaggttgatcaccaccaacccagaacgcgtccgggcaatggtggagcgagctgaagctgtcggtgtgcctcgtggcactgggatgtttaggcacgcactgctggctgttgcattcctcagcgaggaaaagatcaaagctaaggcagagtttttgaagacaacatttcggtggtcggatgctgaggtgggcgttgcggtttccaagctgccattggtgctcaagcactccaaggacaggctgcgccgcatgtcagagttcctgatcaccaaggttgggttggagccagagtacattgctcacaggcctgctctgcttacatatagcttggaacgccgcctcatgccccgacactatgttgtgaattacctgaaggaaaatggattgttggagcaggaccggaggctactatactgctgtccagatgagtgagagtgccttcatggataagttcatatgcccctacaaggaagctgcaccaagccctgccctagattatgctgctgcttgcaaaagagaggtgcccactaccttcttggcaaatgtttaacccctc

SEQ ID NO: 5534 - DNA, 677 bp, Zea mays
gacctgcaggaggccacgccgaccctcgcggccgccgacgagctcttcgagggcggcaggatccggccgctgaacacgccgcacccgagcataagcattccgctggccgacgacgtcgacgcctcgagctcctcctattattccggtggccctcggtggtccccgagaagagccggcggcgcggatcgtcgggcggaggcaccgttggagagaggcaggtcgggctacagacccgccgcctcgacggcggcggcggcggcggcggcctcgtcgaggagtaggagggccacgcggtctctgtccccgttcagggtcaggggcggcggcggaggaggaggaggcgtggacgacgacgaggagtcccctccgtctccccgaacctccatgatgcggggctgcggcagcggcagcaagaagtggcggctcaaggacctgttcctgttccgcagcgcgtcggagggccgcgccaccaccggcggcggcagcaaggacccgctgttcaagtacaccatgctgtcgtcgtcgtcccagcagacgctgcggaccggcggcgacggcagcgcgtccatgcgcaaggggagaggctccgcggcgtccgccagcgacatgccgatgccgtacgccgtgccccggtgggcggcagttctcgaagtcgcgcggcgccggaccacggcctg

SEQ ID NO: 5535 - DNA, 599 bp, Zea mays
atgtcaagacaatatgggaagctgaaattaagctgaacctagtctttgacgcaaaattgaggtgtggaatcaactgaacccatggtaaaacttgtgctatcggcgatcttacaagctttcaacgattgaattcatgaactaataatactcgatgctaacaataacagatacgactatttgaattatttatagttatagtaaagcatgtttacctaccatggcaggttcttgctatctctagactggtccaacttcaccagctccccagaaaaataatagaatgtttttttatggaagcatcacagggatatttatggttcaatgaatgggttgatgatggagtggaaatgattggtatctataaatgtagaaacccagtcggtttactttttaaatggcattaccaaaggttatattatccgtcttgagaaacttgatctttcatttatgaataagttggtgatgtgtcgatataaaagaatatgttggtattgaatggttatatagggattccaattacaaattaccagcttataacgaggaaaaaggggttatgctcgatgagtacctaataaacatgacaaagagattaaattgta

SEQ ID NO: 5536 - DNA, 761 bp, Zea mays
ggtcccatgctctgtgtggactgtggtcgctgcctgtgcctgcccactgcatgcatgcatcttctttcttccactgctcaactgcgctccttgtctcatctgctggctgttacgtccgtgtgaattgtggtcacacacacactacagctgagcccaagtacaaggcctatctgtctgttagcactaaccacagctggcctggcctgcgcctgcgcctacttcattaaacctgggtgggtgacaacgagttgttccttaggatgattgatccttagaactggggcaacttgacaaggaagcaggcaatttgccactccaccctccctcccacaacactaaagctgagttcaagaacaattcttctttgttgctgtagttaacatggaccacaacgatgctactgctcggcatgttggagaggcacccttgtccctcccaggagagagcaatgtaaccttcagaacctcccacacaccgtggcagcagattggaatataacaacatataagcctaacatccatcatatatggtatagcataagttcaaaagattatgatgacaagaactgagagagtatttatttactaacacgaatctgcactgttggcatctaagcatttcggcttgaatttagctgcctttctgtaatctcgaaaagaaaaaaaagaatagacacgtagttttgccccaagtttagcgtttatggtaaacatttgacagggtacccaataacgtctgtctcagctatcaaggtaccatga

SEQ ID NO: 5537 - DNA, 700 bp, Zea mays
gcatgcctgcagttggattgtggtccaggagaaggtccatgtcttcttcaatggagactgtaggcatcaccagagtgatgaaatttattcgatgctcgaatcatgtttttattccatggaagatgaaggtgaacactcaattgtgtgatgataaccaatgagtacccaagtgtgtcaaatgtggtttacttgtcatcatctttttaatcttacatgtggaaaacactagaccgtactgaacttcggtgatgttgctggaagaatgaataatcagattccagccatcatgcactgctgtagcaacaataaaagtcactccctcgatcccaacggcaaaggaaaggtgcaagttcatgccctaaagacgagaacaaacgaaggtgggcctccggtcagatacatgttgccagaaatcgtccaagctcccgctctcttgccatttttgttggtagattcaattagaagtccatgaacgcacattacatgaattatgaaaaactggccacaaggcaaacattgccacagaccagattttgcatagcactgccagctgatttgttatctgtactatctcacaatcctttgataaatgttatttatccccctgaacaaattacatgattcaggtgattgaaccccagtgaatacgaagcaagatattggcgccaaaaattgtacggctgtagcaaccccaaattaa

SEQ ID NO: 5538 - DNA, 741 bp, Zea mays
tgatgcctgcagcggaagcttcttgcatggcttcaacagcagctatttgtgctgattccctgtgcctgagaagctcctgtaacagacacggacggaagagcatgccaattcaaaatttgaaatactcagttgcgcagcgcttgatctttcgaactattgcggaagcgatatcgattgtctcctccatggattttagcaaatacctttcctagcttggcaagtgatggcgggagtgatgtccatgaagcgctaacgtctgctagttttctgctggtgggaggaatcttcactagatttgtgacactccagttccctaaacccccggaagttctcttcgctgtaggaatatgcttcttcttcactgctttgtcagcagcgtcgtctgaggcgggagcacttgtggtgctcttcctagcagctttctgactgttgtcatctttatgtggcgccaccttctcatccactggtgatttccgtctaggagtctgcatgttaagaacgtacgtattatcgttttattaactttgacttcaaataaatgtatgatagagagtcagcatatcacataccattggaatcttgctatcagacttcctgtcaggtttggctgtcctcgattctggttttcctttccctttaacatccgtgtttccttcccagcttcttctcaaggcctttggccctgacgatccaatgctcagcacagagctaccgatcggattgccagcagaggacactctc

SEQ ID NO: 5539 - DNA, 773 bp, Zea mays
gcttgcagttggaacacgaacaaacacatatatgaaaaggtgagatgtcgcatcagtgttgttccttgtcttgctatgctgcacatgagcacattggcgcttccaatatcttgaatgacagggcattctcggatcatgcagttgcatctattctagtgctgttcttctgtcttttcccagttatattctagtatggacaattgctgaaagttcccagttgctgcttaagcttaatctaatgaattcttgtttttatcaaagtttggagtttagatagtgtagcatttattttcatactgatggtgtattgtccttatcatttcttttcaatcttcagccaaacctaaggcaacaagaaatctgatattattaagaataagcagcctctatcctgaaagagtggggggaaaaggaagggtgacaatatcatctgtgatcgtgtttgttgcaaatcttcttcatatgcacctttataatctaaatatactgcgctcctagcgactttgttcattgcaaggctttgtgtgaaatcattgctccaatcatgaatctaggaaatatactttaagctctaaaataagtgcatttatagaatgttttggagacatcaatgctactataaaattacatatatacactcctattgttttaacatgtaataattgcacttcagaaatacagggtagcaaaatctacaaaaacctaggtggtccatttgatctagaagtgcccctgtactagaacaattttaaaactaggtgatccgggaactc

SEQ ID NO: 5540 - DNA, 770 bp, Zea mays
agaaggcgactctgctggccctgaagcaggggctcaggctgccatcggcagcggccttggcggactggaacgagtccaacgcccacgtctgcggcttcaccggcgtcacctgcgactggcggcaagggcacgttgtcgggctctctctcgccaacgtgggcatcgccggcgccatcccaccggtcattggcgagctctcgcacctccggatcctcgacctgtccaacaacaaaatatctggccaggtaccggcgtccgtcgccaacctcacgcggctggagagcctcttcttgaacaacaacgatatctccgacaccatcccttcgatcttcagcagcctgttaccactccggatgctccggaacgtcgacgtctcctacaacctcatctccggtgacatcccgctggccctcggcagcctgattggggagcagctccagagcctcaacgtctccgacaacaacatctccggcgccattcctctgtccatcggcaacctgactcgcctcgagtacctgtacatggagaacaacaacatctctggagggatccctctggccatctgcaacctgacaagcctcctggagcttgagatgtccggcaaccagctgacggggcagattccagccgagctctccaacatccgggaccttggcgcgattcacctccgcggtaaccaactccacggcggaataccgccttccctctccgagctgacggccatgttctatctcgggctcgaacaaaacgacctgtccgggaccatccca

SEQ ID NO: 5541 - DNA, 758 bp, Zea mays
gaccgggcaacctcatccatggccggtctccgatcgggcaccactgacgtgcagcgcagggcgagctcgagggtggcctgcatccccttctgcgtcgccgcgctggcgatgctggggtcaagtatctgcgacactccgtcggtcacgttggcccgccgccgcacccacttgacgacgtcgacggactcgccgtcgggcgccggccgctgtgctgcggtgaccagttccagtaggatgaccccgaagctgtagacgtccatgaggtgcgttggtttcttggtgcagctttgctctggtttcagaaaagagaggagcggaacaacttcagtgaaatctgtttactactggtcttctttcgttgtttatacactcattcagtcaaagccaaaatgatgaggtgaaaacacattatagatgacgtctagcatgcgcaaatgtttctagcaaatggaactgcacgtgcgagaatcattgcaatttgagtgcataaactgaactgcaaaaaaaaaaaaaaaagagcatacctggtgcaacatagcacttgtaattcaggtccgaagacatgcaagactggtacgccatctccccgacgacacgatcaatcccaaacccggtgaccctgggctcgagttcatcaccgagtagcagcacattgctcgacttgaggtttctatgcagcacttgaggagcatggtcatggtgaaggtgtgcccagcccttgagctactcccagagcgatccctaccccggtctttcag

SEQ ID NO: 5542 - DNA, 759 bp, Zea mays
aacacgtaacttgcgaataacgaacgagttttgccacagcaggacgatccttgtaccgtcgtccgcaagggttgtaatttctcacggaccgttacgacatgattgtatgtcaggttttgacagtttgagccaatgcaattcttctaatgaaaaagacaagtgcatgtgagtggttagcatctgcctatcgcctatcgggtatcatgtggagtcgtctggtataccgtcctacacggctacacctgagaacgaagcaaccttacccccaacaatcaccttgtagcgatccgaagttgttcatctttgagtttcagttctctaactccatcgtagctaagcgtttcagcaatgagtcaagagagagatttaactatttgtcaccgttaggaaggccacatcttcgtttccttgttttacctggcaactgtacgattttttatcggaaacgctaactggtctattttattgatgtaccatgttaaattagcatgtcacggtggatcttagtcttttttccggagagacacctggaaagtcatttttaccttcgcattttggactatttagtgcgttatgtgcaatttgtttagaattctatcatttagattgcgatatattaatatttaatgcaatactagtagtgtggatttttgggcacttatttgaagtaggatgagctgtggcacagggatacgaaaattaatgagcctcacactatgacacgtagcattaagatacgaaaataaacaacttgatttt

SEQ ID NO: 5543 - DNA, 784 bp, Zea mays
tgcgtagcccagatgcgccggcgccgtgcatgcattaggattgttttcgtataagaaatatgaagtttcaattcgtaaaccatacggcgtgtgaaaaaaaacatgcatacagtaataatattctagatcctgaaaatgatctattttcggtggccggccgctaatatgcgccaaaaaatataccaacttatttttggctgccagaacacgccgtcgaaaataagttggcttattggcagcatccattagcagccgcaaaaaaaagtcgtgtccaaattattttcagtggttggcctagggccgggccacaaaaaataatgtcaattttaaaggaagaacttttgttgaaatggtgtcaccgagaataactctaatgccactgaggctgtctcccacagatcatacatatagtcatgcacaatacggttttcactatagattgcattgtttgtagattgaagtttgaatttgaaaatatgatatgagatatgatggataagaccatgtccaacaatttacccgtatgatcacctaaaacattgttttgcaccattttacactgcagactgcactgtttgcagagtaaagttctaatacgaggatgaggatgagtgagctgccggagattgtctaagcccctgtttgtttaaagtataatctcttcagattatataatccagcggcaataatcccataagtaaaccaacaactagattatgaggtccagattatttaatcttaagccccaaattattgatattctcataaatcccctcaagacctt

SEQ ID NO: 5544 - DNA, 946 bp, Zea mays
atcctctatagtcaagtagcaaccgagcaggccaaaaacactgaacatggctattccgaccaagtgatgtgaaatagtaagcaatttacctccattacatggactgttttggggctctccagcagagtagattcgagccaaagcgtgaattcttgctccacctgcagaagaaacgaagtagttcagcactcgttcgtcacacggtatggctgtatgagattattgtgtggctaaacggctgcctgtggagaagcacatgaatcgacgctatcaatcaattcaaagcacagtggaacagtgcaaggtttagatggcttacaagtcatcgtctcttgaactgtaagtagctcttgaatctgatcttggacactgctcgtagggctcatacgcgcagaagtacgtatcgaactctttcttaggcaggaaatccatcttgttatgtggctggaccctcagacagatggtgtgcgctgcgccagaagacagcagcttcttctgaagcttgagcgttcgcgagaagcagttcggctgtaggtcaggctcctgctgcgtgccatcagagcggccctgctcacgcacaccctttgggtagccagtctccgacctgcacgtccttgtcaggtcatctgccgtggatctgcttgacgtcaaggtactccgggcgtcatcctcgcaaccgtggaccgttgttggtttcgaatcgacacgtcgcatggtgtatggtgattcctgctggctagaggtgtagcctttaagcggtgtctctcttgctccaggccccctcgcagcttcgtcttcatcagtcacgactgaatctgacagctcttgcttccggccagagcaactgagaaaactgaacgagtgtctcttcaacctagcatcttttctcactggacaaggtacaagtttgaatctgatctccacattgcacccaagaacgtgctgt

SEQ ID NO: 5545 - DNA, 1158 bp, Zea mays
tcccctgggtgtttaaaatcttgattccatatgtaatctgctgccatgcgttgttgccaactttaccgtgcaaatatttggggtgcctctatctttaaaaaagcttggcaaacagcacctccaaccattcattgataaaattgcaaatcgtcttccctgctggaaagccgatctgttgactagagctggaagattgattcttgtccagactgtcttgtcttcaatgtctatttacttaatgatggccatgaaccttccttcttgggttatcaaagcaattgacaaaatcagaagaaatttcctgtggagaggaagaaaagaagctatgggaggacattgtttggtagcttggaacaaggttactagaccaaaataatttggaggattaggtatcttaaacctacatttgatgagttgggctcttagattgcgccggctctggttgcaaaaaaactgatattggcaggctttgggcatcctttaaaatgaatgcacatccttctgttaaggccttctctgcaacggtttcttctgtggtgggcaacggtaagaacaccttgttttggacagataaatggatcgatggccagagtctgtgttagttggctcctcatctggtcaagttggtctcttctagggccaaaaagaggagtgtctacgatgctctcacttcaaggaactgggtgcatgacataagaggagctatcactgtaagtattttgtctgaatttctcaagtttgggacctcactgtagactgggccctgaatccggatcaggaggataagcatatatggctgctctcaagctcaggaatatactctgccaaatcggcatatgacggtttcttccttggagcaacaacttttaaaccatgggagaggatctggaaaagttgagcacctagaaaatgcaagttctccatgtggcttgtggctcacggtcgctgctggacaactaatcgtctgacaaagaaggggctgcctcaccctcaaaaatgcttgttatgtgatcaggaagagaccttgaaccatttgttagtctcctgcgttttctcacgggaagtttggtttcatattatgagatctgtcaggttgcagcaacttgctcctaatcatgagaaattctcttttgaaggatggtgggaagggtgtaccac

SEQ ID NO: 5546 - DNA, 856 bp, Zea mays
tggttctactgcttccttcctttaccgaatgacttcctttggtaccttcagtggttgatgagcggttggttcttatgtatccaaacagattagttcagaatgcaggggagtttgtggttactttccctggagcgtatcacagcgggttcagtcatggtgagtggtctcaaaagatagcctccatggaaatcttcccttttatgttgctgagatgagagcaatgtagaacaatgcctgcctcattaaatcgctgcattctagttttttctgaacaatgcccgaataatgtattaatgccccccctccccccccccacacacacacacacaaattctatctctagatttgtggaactagatatgccttacacatgatttattaggaatggtatggtgggaaattcttctttttttgcttaaacattcaaatttggtagatatgttgcggaacggatacaaggcggaacggaaggaaagaagcgtaacagatacaaggtataacagaatagattgagttttaaaacggacaagtgtaggacatttaagcttgggtttaacattttctaataaaaggaaactatttattcttcaaaaatcgaactatttcctttctgggtaagttcttcagtttcaccatttacctagtaggtttggtcatgctactctgcattgagtcttcgtaaatacataccatatagactgccagaccgggtgtttcgtatgcaaatgtaagggtacatgttttgcaaaaaggcaacaattgcatggtgcatattggcacatttaaggattttcctttttctaatcaacttggatcacaatggttatccgccaaaaaagtaaaaccttggggtcct

SEQ ID NO: 5547 - DNA, 748 bp, Zea mays
ccccagcttttcacagggcgcaagccatccagccagttcatccttgctcctcccactgactacaaagacggtattcattggatctgagcacagttcattcaggacgctaatcaattcctggctaggatgtctggtgatcagtccctgaggaaccattactgtgccatcatagtccagtaagatgagtctgttgccggtgcggtggtacgatggattaatgtgttcaggcgagagcttctggaagttgggatcaagcacgacgatgcggaagttcatcgcgagcccaacgctcaagaagttcatcgacgcatgatccatgcttgccttctgtaggttctggtcaagcgatcgcccccagtaggcaatgtcgtgcttgacaacatacatgtaatgcttcgcatgtaatatcttcttgtcccgctcattcaacctcagtgccgagctcatcccctcgacgacgtcgtccacgttccacgggttgacgcgaaccgcgccgcgcaggaacgtcgagcacccgaccaactcggacaggacgatggcgctctccctcggcgcgcccgccacgccgctggagatcggaccgtgctcccggcacacggtgtagatgtacggtgtcctgttcaggccgtcgcgcaccgcggtgacgatgcagatgtccgcagaggtgtagaacgccagcttctcgtgcatcgtcaaggggtcgtcgatcatcacgatcgggtcgtaccccggcttggcgaagcgggca

SEQ ID NO: 5548 - DNA, 733 bp, Zea mays
actaggtcagagctctgactggcgccggcgcgcaatccgatgcgtgcgcagctcgtggtgttcgcggtgggcccgctggtgggggatcttgtgagctcgctcccccggatcccagcgtaccgatcactaacggtgatccagacggcggcgcacctggtgtccgcggcgatggtcacgtacgccttcaccgtcccccgggctccagctgcatcggcgctgctcctgcggccgtggttcgccacgctggtggcgtccacagccgtcgaccgcctctcctgcgtctccctcggcgtcatcgcagagcgcgacttcgtcgtccaggtgagtgagtgagttacagtgttacacgccattgccgatgcaagaaatgttcagaccgcttctgcttcctctgaatgactgaactagctagcaggggaaggcaggccgatcgcgctggcgcgggcgaacgcggcgctcagcagggtcgatctcctctgcgaggtacaaatgcacaatcatctcctcctgatcatgactgcatctcctcctgatcatgactgcacttcaatggcgacgtagcgatccccggccggtcatcattatcatctgcgtgctgcgttctttgtgtgcagacggcgggagcgtacatcttcgccgtgctgctctccaggaaccacccgctgacctgcgtcaggctctcctgcgccgtctcgctctgctccctgccccttctgttttttctaggcggcgc

SEQ ID NO: 5549 - DNA, 763 bp, Zea mays
ctttagagtcgacctgcacgcagacgagaagccggtgatgcaatgcaagccatgtcaggtgctgcctgccaggatgggcacatcagaggactacagcgagggggggggggagccggaagaaccaggaggaccagagggcggcggtgcttggtgaggactgccaaagaggaagactgaaacaggcaggaacagcgctaatcggtgacagagcatgatgtcgtccagatgggacaagtccgtcccctcaattaggaaggacgacttagtcctgaatatcagaggaatatccctccagcaacgatgacactttcccctgcatcacatccaaatgtgctcgttccatcccaccccatttcatcctaggaaacaaacacatgctaactgagcagtcaacatcaaaactgatgaaacaatttgtttgaagattccacagccttcctaatttttgcaattatacatcgatgtcaaatgctgattatagctatatttactgaaattgcagtttaaattttccacattcagtaaccaataatgtattgcatttctttcacaactattcctctacttttaaaggttgttagtggaggttgaattttgaaaagataaactctcatgtgataggggtatcattttctaaatgcaatagctaattggtctacaaaagaagcttagttatgcaggtactatcaagtgaagtagtagtccacgaatagcgactgttaaaattattattgatccatgaccaccacaaacttttattttc

SEQ ID NO: 5550 - DNA, 775 bp, Zea mays
tttattgacaggagaaaggtatggaatggaaaaaatgttttctggatcatgccctttttccaagcatggtggttccagaactacaatgctgttgaaatctttgtttttccctcttgataaaaggctgaaattgctgagtgatgaattggctaaacccacagggtatgtcctgcaaacacttgatgtatcttttacatactgataatttgcagaatagttcatgtcatgaaggtgcttctcaaataaaggattatttatttccactgagttcaagcgacccaagccagctacacaatccacataacaatcatgtgtatcatctctgtagagtgtttttgatggcataagctttttcaagcttagcgctcttcgtttcaagctcggcaagccttgggacttctcttttgcgacagcctctggtggttcctctgacacttcaaaaacatccttaaattcttgatgccgactattgaccactttagaaggtggcaacacctcaattcccatcagttttgcaatcacacttggtgatgaacgcctttgctctatttcgtttaatacatcctttccaacaagtatttttgtttgacagctggtagttcttcgtgtcctgcactccttgtatctgttgccaagctacataaattcgagaaaattattgacaagcatagatttttttcagagcttcagttttgacaaaataccgatattgaaactaatgtgattgtaactaacagcatcaagcaactcactgaaatttgttccatcttaaagt

SEQ ID NO: 5551 - DNA, 793 bp, Zea mays
caaatgagggtctcaatcttgctataataccatgaacaaaaagagatgatatctatactactctattaagaacctaatatggacattgatgctaccacgacttcacactccgcgttgacactctggacccgccccacacgctgtgccctgtgggtcccacgcccagcgctctctcagctactgccctgtgcccgcacagctattgtgcctacccagcacccgaccccgcctgcgctactaccactccgcgcaaaaaatagtgcagaacaagcactcggacacacaaccccttgctccagaaatttggggctaaccaccagaccacacatatcttagtgtttagaaataaaacaataattatatttaaataaatatctcaatacctatttatatgatatataacaatcctagcgaagcaccagcaactggctagtaagtgtaaaaaacagagatgatccatcttttcttgtgtgaatatgcctcttgagttctagttatgctaagttagggattgttgcatagtattttaataatgactagcaaataaatgaatcatatgggagaaggtaatgctgtcgaagttactgagtaaggccaaagaaacttacatcattccgaattctttccacgtacgcttccatgttttgtctctgcatctcactcaaaagtaactcgcatgttctaggcctaggtacaatttcactgcctaccatctcatcatagagtagataagcccaatcggtctcaccgaccttgcagagaccatggatcagaagggtatatgtatcaagat

SEQ ID NO: 5552 - DNA, 745 bp, Zea mays
atgagttcgctcatagaggcccatcacctgatcagctacagcccacattatagcctgtccaggtgggatcctcatgagccggggaagcaagcctttccacagggctcgcagcccctcttcggcatatattgttcgtatcgcatggaccatgcctttgtacttggcgtcaccagttcgcccttgggccatcagcctagtcttcacgacatcgaagggtccggtgcagacagggcctgctgttcctgcaaggaacccagagaccattgactgccacggcaggagcaccttcccgtccccttcatgcttcttccacagaacaatatcaaacgtgttcttggctgagaacattgccgcttggtttgtgccgttgcgcatgacggttggtagtgctccagaccaaagaccaaagaggccttcctctcgaactatagttcttgcgcagtgtatgggacctttgtatctaagcaagtctgggcttagccctttttgctgttgcaatctaatctttaccacctgcatccatgacaaagaaacagttacaaaattctctcagcatgttttgtattaagcaggatgtcactcacaaaaatgaaaattgcttgcctcccacaagtgggacaacacaacacatgaaaagctgctgaagtttatgcaataaggaagatcaattttataacgaaagaaataaggaaaagctggtcgggaatgtattttttttctgagtaatagaagggctctctattcc

SEQ ID NO: 5553 - DNA, 771 bp, Zea mays
aagtttaaagaatggattgaatcaccagatccatcaatatttggtaaactgcatatggaaataagtggtagatcgaagaaaagaaaactcgatgaaaatgattcagatggaaaggggaaaggcctggaacctgaatgcattcaaggttctgatgataaacaatcttctaatgaggatgaacatgtcaaggaaatatttatgagtaaacatgtaagtatgttttcttgcagggaactacttatggacctctgtcattgattgattcttgcatatacatgctcttgtcgtgttttttcttattgttccttattttatcagaggaatgtgagcaagaactggcatgtccctgcaacttttcctagtgagaaagttgtaaatgcatatatttctccacaagttgacagttcaacggagcctttttcctggggaagaccagatttaggcctactacgcaagtaagttgagaactatttttctactaggcattgaacttgcaagcagtatacgccatattcatgagagctacgcttctagatttctgtgagcatataaatttatttatttccttttcgagaatgataataatttattttggtttaatattacatgtgtagtatatcattatccatttccagtttggaatatattgcctaaagtaggttgcatatgtaagaagattgtgtgtgtgtcactcaaaaaaaactttttttttaacccaagactcttacggtgccactggtcagccggatacgccaagaagcggtctgctgg

SEQ ID NO: 5554 - DNA, 816 bp, Zea mays
gcatgcctgcaggctcccctctcgccaacttcaccttcgtcgacaacgcccgagaggtctacttcacctacaacatcttcgacgagagcacggtcatccgcaccacgctgcatgtctccggccggaaccaggtgcgcgtgtggaccgggcaggactggatgacggtgaacaaccagccagcgcaccagtgcgacgtgtacgctgtctgcggccctttcaccgtctgcacggacagcgcttccgacgcggatccttcctgcgactgcatgagggggttctccgtacggtcgccggcggagtgggcggtcgaggacaggacaggcgggtgcgtcagaaacactccgctcaactgtgctgccgacggtaggaacaggacaggtgtgccagctgacaagttctactccatgccaggcgttaggctgccccagaatggtcgccaggccatgccgaacacgtcgagcgcgatcgaatgcgcgcaggcttgcttgagtagtaactgctcttgcaccgcgtactcttacggcggcgaagatgggtgctccctgtggcatggcgagttagttaacgtagctgctgacggtaacgaagggatgatttaccttcgccttgctgcatgcgaaagagctagagagtgggaaaggcaacaggattgccatggtagctggtgttgccgctttggtttggttctcgtcgtcgtagtgatttgcaacaggcggaataatgggaagtggtggtctagacccatcgctgacagtgataaaagcggtagcgtcgatggcattactacgttcaagtatgctgaccctgcagacgcga

SEQ ID NO: 5555 - DNA, 729 bp, Zea mays
agcgtcgccacctgcgccgggtccgggaggtcgttcgcgatctgcccgtagttgatcccgaacttgtgctgcgccgacactgccagattaacgcacacgcggggcaatacgttactggcgcagtcgaagagttgatgctgttttgtatatattttcgttcgaggggattgaatttcctttttttttctcagacagcgatcataaagtgttttaggtgcaaagtcgctttcgtatatagctacactcaataataatgtatagggaagcagacggaatgatcattcatctgtgggagaggcaaaatgctatgattgaaacagctagctagatagagatgtaaaatcatgtaatggccatggacggatgcgtgtcagagctgagttagcaaccgagctgaatcaatcacgcctccatgttcttcgttcgcggcttcttgcagtgctgtccatacggagaatgaaaccgggacgcagcgtcgtgccagaactcggaagaactgacatagcaactgaggtcgtctcactgggacaggcggacgcggcaccgattcgcagcaaagagagcaatgacggcagaaagcagagcacgagcaaggagagagagggagaatccacagtgatacaacatacaagcgagcagggaccgaccgagccggcgactgcgactggagttacctgagacgagcgcgacggcgagctggagagccagtgacaggaggagggaggagga

SEQ ID NO: 5556 - DNA, 728 bp, Zea mays
agctacgcagctcgtttctttggttaaccgcgccggtgggcaacacgggaaggataacattaacaatgagtcctcggtgccaacacattgacaattgagatcgatgcttaacctgaagaacttgccaaagcctgccgggcgccatgcatgttacacagaaagtgtcaaaataagttcacgtttacctaaacggcctgtaaactattatgaaattaattacaaaaaaaaaacatatctcttgattattactataaccgaaccgatttaaatttagacgttaaataaattttgtcccacgcatctgctgctagaccaagtatgatgttctttattgaaaggcaaaaacacaatgcgcggcacggcggcagggagggatgattagattagctcgttgagacaggcagaaaaggtgacagaaatcttgttgtcgtagtcgagcccagctgatatatacgctcacgtccaccccaaccagcaacgccactagcgtgagaacgacttcgcctgcatgccgatccagctccccagcgataggcagttatttacaggctcacatctccagccttcatgcgttgcgcgttctgcccactccccacaggccacagctagtgcagggcaatcatgcgccgggaaatggcacgtacttggtgtattgtagtatcacaacaacaaaaaaaacagctatgtatatagctaggccggcatgctagtgctactgattgagcgac

SEQ ID NO: 5557 - DNA, 784 bp, Zea mays
tcgacccgcagataaaaagaagccagcattctcttatcaacccagcaattactatttttcttaatgctggtgcaggtggacatggaacacctcgtgcatgcagtcaaaatggtaaatcaattttggttggcccttttaataagttagatgcaagcacacacctaattataaaagtagccttatgggttttgtctgcaagatttctgaaaacttcaatcagagaggttgagtttactattttcaagcataaatactccttcagacaaagcaccatcacatatgtgccatgttttttcacctaccatgatggaaaactatgaagagaattttaccattaaacttaagcaaccatataatttttcaggaaggatcaggtataccttcgcatcattctggagtagaaatcgtacatttagagctctagaggctgcactacaaagttatgaagcaaccttggaagctgaaaaacaggtaccgtacatatttgaactttatctttccttatcttctcgcggaaactaacttgatgcttatacccgttctccccaaaacaggtgagagcacatgtacttctacaaatagaaaataacagtgtattcagcagtaagacggacaacacaaagacaccagaaaaaaacattgaaaaagctataaaattccaacctttcatcaatgaccatgttcttgcagatatagccagtgtgagcattcaacttttgtttttttccaattctttctgaagcataaaccccatttctaaattctgatattaactcatctttgc

SEQ ID NO: 5558 - DNA, 790 bp, Zea mays
gcggcttgccatcttcaggttgcggcacgcggcttcctggcgcggcgtcaagcacgacaagtggcagcagcgacgcggctacaggctacgatccgctgttccctggcacaacgacttgcttcgttattgcacgttgaacaacacgcggcacgtggcggcaaggcctttagaaggattggctgattctccactccagttcaccatcctgatccatagccatgtggacagcaaaaacatgtctaattgggtggcactgtctccaatggaactcacggcagctcaagccgtaggactagtgagctgccacgtcttggcgtttgcagcctggacgagattgttcccataggatcaaggtggctgcacacgtggaagtccaatgcgtggagggtgtccgccttatcttaaggggtcaaaattaaagagtcacagtctaattcaggttcggaataataaaataagtcgagatgtaaaagacttatttttaggtgttagttttgtgtctagcggagtatcgttaggttgcagctcgagaacgagatgcatgtccaggaggggtgtagtgtcaaggaggccaaatgagggcgtgaacagtaccaaggattagatcaaatcaggatagggtttgttaggcaagagataaggattagatcagattagttagggaagagataaagattagatcagatttggttagttaggttgttaggaaagagatagttagtcgtctctataaaagtggcgctattgtatcaattgaaggtaagcaagaattagaagcaaaccttctttg

SEQ ID NO: 5559 - DNA, 724 bp, Zea mays
  unsure (1)..(724): unsure at all n locations
cggcagcctgggtcctagatccgctactgctgggctgatgttctcattgttctcttattttgctctgggttgctttgtgtccatccttgtgtaatcacatactgtaactactgccaacacattgtttagatgggcacagtgggcttgttctctctgcttccttccttctaaataaaacatgtgcccatgcacgttcttaaaaaaggtgcataattatatattggttgcacttgcaactcatgtggcttggtgattactaaatagaaattccacaatcattgaaagattgcacacaaaaaaaaaactacatctcacaatctaaatcattaaaacctaccgcagagtaaaagttccacaatctttaaaagattgtgcagaaaaggttacaaaattagtgtgtgattatctaaatcacaagtcatgtggtttggtggttggatagtagaaattgcacaaccgtaaaaatgtttgcacaaaaaagagaaagcaactacacttcacatctaaattaaatcagcagatgttatcagatatcaagctatccaatcacgatgtccaaatccaatagaatgaacaggttcctatgaatcattaaactnttgaggagcacattagcatcctccttcagggagccagtgtttcaaaagtggccacataatctgcatgggcatcttgcactcaatgtcaccctctcacattatagatgagcgtgccaaaccctcaa

SEQ ID NO: 5560 - DNA, 761 bp, Zea mays
atgcaacagccagggtttttcaggaccggtcatgtcagtttcagagcgatccagcaattgttccaccaagcggcaaaacgttgggtgaccaaatccgtacccgttctgctaggctgtggctgttcgttgcctgtccgcggcgggctcggatatggatgtagtcctccttctgagactcggggacctctttctctcccttccctctcgacttgccaggcccggcgccggcggtggttgttgccgggctgctctcctcgcctttgtccatgctgtgcacgctctcgttcgccgagtcggcgctgggcaggttggccgactggacctgatcgcttcccaccacctttcattgcacaaaacagaagacgcacgcgccggatgtatccatccatttcaaaagcttagctacgtcgtggacaggtttctgaaacggcagtggagaagtagttgcagacacaagcaagaagagcgctcacctcgttgggccttctcctcttcttggagtccgacgtccccttggacgagcagtccccaccaccagcagcctccgggctcagcaccccgtcgtcgcggccgagctccggctcgcccttctcgccgacgacgtccttcttctggtgatccagcagcagcgcccctgacgaaccactgaacgcgttgttcacggtctgaccagccgcaccgaaagcagctgcgctagcgcccatcaccccggccgccggcgccggtgtaagcaggacgtccgcgcggcgcgcttcatgaaa

SEQ ID NO: 5561 - DNA, 581 bp, Zea mays
gcatgcctgcaggccgggctcagctgggcgtgcggcccgggccacgccgactgctccgccatccagccaggcggcgcctgctaccagcagaacaacctgccggcgctcgcgtcctacgcctacaacgactactaccagaggatggccagcaccggcgccacctgctccttcaacggcaccgccaccacgaccaccaacgacccaagtaataaccaatacctttttttttccatttccttctttcacatcaagagattaacgccttcgatcgtcttcgtgtgactgcgcatccaattccaggttcaggatcttgcgttttcgcgggaaggtgagcactgtctatttcaagctctgcaatttctgcacgtctcttagcgtttaacacaacctgacgacgtgacctcgttttctcggcgcgcgctgcggttgcttgcagctccaactcgagcgtgccggtgggagcgagcccgccgaccagcctctcccctccgacgggcttcacacctccagtcggctccagccccccgtcgtcgtcggagttcggccccccagcggccggcaccaccccgccggctggaggc

SEQ ID NO: 5562 - DNA, 776 bp, Zea mays
ctgcagtgcaccccaactcttacgccctggtgatcagcatggagaacatcacactgaactggtactttgggaacaaccggtccatgcttgtgtcgaattgcctgttccggatgggtggcgcggccatcctgctctcgaacaggcggtctgacaggcggaggtccaagtatgagctggtgcacacggtgcgcacgcacaagggcgccaacgacaagtgcttcggctgcgtgacacaggaggaagatgagattggcaagattggcgtgtcactgtccaaggacctcatggcagtggccggagacgcacttaagaccaacatcaccacgctggggccgttggtgctcccattatcagagcaacttctcttcatgggcacattgattgccaagaaggtgctcaagatgaagatcaagccatacatccctgacttcaagctggctttcgagcacttctgcatccacgcaggcggccgcgctgtgctggatgagctggagaagaacctggagctcactgactggcacatggagccatcgaggatgaccctgtacaggtttggcaacacatcaagcagctcactctggtacgagctggcgtacactgaggcaaagggtaggatcaggaagcgcgacaggatctggcagatcgcatttggttctggattcaagtgcaacagcgccgtctggaaggcactccggacggtgaacccggccaaggagaagagcccctggatggatgagattgacaactttccggtggatgttccaaaagattcaaag

SEQ ID NO: 5563 - DNA, 925 bp, Zea mays
tgccaacctgaagtcatgtcccacaactagggatggcagttggacccgtgggtatggatacccacgggtcctaccgggtaggatacccgaaatatatcgggtcaggtatgggtaaaatactttacccgcgggtatccagtggatatccgagatatcaatatacctctttaaaagtgctacatccactaaaaattaaggaccataatagaatggagccaaaaaaaaatacacatcaatcctggttttgttgcgtgctggttgctgctacttcaccatggacacagacacgaccaggggctgctgttgctggcggcaggctgctgctactataaaccatgtcacgggctgctggagctggttgttgcatgctgtttttatttatcaatttatcatggcgcgtgtgttgttgattaataaatattaatttgtgctaacagtcaactgtaatgtactagagatcaatgagacattgacaatgttatattgtgactctcaactgtcatgaactcattaagcttttattctctgtactcaaatttaaatttattggatatgataattatgagttgaaatattgtatcaacgtgtagccaaatatagtcattctcgtgttgcattggtgcttagatgtaaactaaaatattttatgcatttattataacactgaccgaatgttatttagtctacaataacatatccactggatacccgatacccggtggatacccgatgggcataggtacgggtacagtttctcgcccgattggcttggtgggtatggatatttgtagaagtctcgggtacaatttcgggtcgggtattattatacccgaacaaaatccgacccgctgccatccctatatgggaccaacatcgctgagccttttttttctctcttctgttgcacgaacaaggaacaacctgc

SEQ ID NO: 5564 - DNA, 712 bp, Zea mays
acggctccggccgctacacctggcgcaacggcaccgagtacacggggcagtggtgcgcggggctcatccacggccgcggcgcgctcgtctggtccaacggcaaccgctacgatggcgggtgggaggacggctgtccgcgtggccaggggactttccgctgggccgacggcagcgtctacgtcggccgctggacgcgcgacactcccaccggcattgtccagcagaagggagtctactacccgtccccggcggcgtcctccccgacggcacgcgatccccgcgacgtgttcgccagggaccttccgggcttcatgggcgccggccccgactccccgtcgccgcgcaagtcacgcgcatcgtctgggaccagggcgcccaacgggcgggcgagctcagcgtccgggttgagcaacagctccggcggcgacaggaagtatgagaagatttgcatttgggagtccgacggcgacatcacgtgcgacattgtggacgggcctgccttgggagatgaggcggggaccgcgcggaggagcgtgaggacggacgacggcggtgacgaccggggcctgccgccaccatcgccggcgccgcacgtcacacagtgggtacctccacgggaggtgaagcgacaaggggagaccatcgccaagggacacaagcactacgagcttatgctaaaattgcagctcgggatcaggtgcgtggagttcat

SEQ ID NO: 5565 - DNA, 787 bp, Zea mays
gacctgcagtgcaaaatgtgctttttaagtcaaagaagcctttactatgaaacaacatatagacaaacggaactacagaggacaaaccttcacttcagatttcttcatcgtctttatcatgtaccgatcatcgtttgtcaggtagaaaaagcttccactcttaccaggagatgaaagctctctgagagcctcatttccacatagcgataacatatagtcaccagcatccaccttgaacagcttgcgcagcgtcctgtgatccagttcagaacagatggtacgttgataagaatgattgcaaaggaacatgttgtgtcatgaacatatatctttatcatgggagtgatgacgaaccggaagacctgtgggcagtaatccttccatctgaagtcacaagaattgtggggaggagtgtattttgagccttgaggaggaaacttcgtccatactttttcctttgggtcgaaagcagacgatttcagatcaagcacaattgggccttgcttccccactgcatgcctatccagatatgaatgtcgaggcaagagaattcagtcaggtctggagaaaacatgaaataaaattgacgaataatcacaccgaataatgtcttattggtggaaattttcacacggaagagttattaacttataataagaaacagaaatgagatcagccacctagaaatccacttctgaagcaaaattcttttttttagataacggacagagttccagcctctacgaagcaaaactcttttgatgattcaaatgtcagcgttcccaaa

SEQ ID NO: 5566 - DNA, 749 bp, Zea mays
ttttactgtttttatcactaaaataagctgcccattttaaatttataaccacgatacaaattggatcattagggaatacatagagttctatataacataaccagtgtccagcgatatatatttttttgaacgtaagtgtccagcgatatggaagcagtggatacaatcaagtaacttactggaagggaatcaccttacttaccttcttttaaaaatacaggtagttggatttttcatatgagaaatgtccgtagatccataatcattcctgaatcctgaacaggtaattttaccaaaggatacagcagctgtactggcaaacaactcttgtgacaaatcgacagaaccaccatctattttttgggaattcctcgataaaatacgaagagcatgctgggcatatacagatcccatctcaacctgattgctgtaccaagaagaatcaactggctcatcacaaggagttaaagacggatccaacgtatcctgcacaaatttagaaatgcttgagtcaaatattgtatttcaaagatgtgattcttaaagcaagcaaaagagaatatgcttaaccttagtaagagggtagcaacggaaaagcataagatctgattctgatattaaatcagacacttctgagacaagcttcaaagctccagaagttgctctgttgtgattagcctcactggtaaattcaagacgacaactccgcagcctgttccaagtgtcctgtactagttccaacttggaag

SEQ ID NO: 5567 - DNA, 707 bp, Zea mays
tgcatgcctgcagtctatagctatctgaagatatctggaagacaggttcttacttatggggaaaggtatgagagtattgctgtgctagtacataaattagctctattttctgctacatttatgcaccgtatccttgcaaaaatatcaatatagtcatgctggaagattttctatttgggtcccaacaagtacaagcacatccaaagatatctgagtctcgctcagtttgttgaggggtgtggatgtatgcttagacaacctagttactcctaagttggtatagtctttttgagtccaatcagatccaaagcatccatgcagcagttgtgtccatttctccagagtccagtagatctgttgtcatcttcaactgattctatgtttctgaaatttcaggaagcccatcgagtatttcctgaaaacagttgaggagatcactttgaatgacattttgtcaaccgcaaaggagatgatgtctacaccactcacaatggcatcgtggggcgacggtatgttcagcagtttcgagtagtcatggtgcattggtgcccgacaaggtatggcgactaactgaattgcttttattgcagttattcatgttcctagctacgagtctgttagccgcaagtttcactcgaagtgagaggattcagcatcggacttgcatgacctgttccaacaactgatgtgaagcctgcaacgggccc

SEQ ID NO: 5568 - DNA, 805 bp, Zea mays
acatgtaacagcacctttgatcaagggaagaactgctaaaacaagaagggctaagaaatccaaattaaagcgtgctcactcgactgagcataatgatatttcaccttgtaagaatgaacttgatgatttccatgatcttccagatatatctcttccatctgataaacaaataaaaagaaatcggcatcgttcgctgctattatctgagtccgatgatgatccagctgatgtaggtactgaaaaacataacatatttactgttactgaagttggtttcttcccacaaccttcagaggtgcctcctatgcatgggcaagggatttctgatcagttccattttcccgttgaatcacgagagacatgtgaaattgctgattctttccaaaatccacctgaaagcaacatgtatgggtccatttcacaagtttgtgatacatttatgtcacaggacgtgtcatgtgtacccgagtcatccttaattttggacggcacatctgcatccataagtggtgatgaatttttgtcaagggcagtgtccaatggtttttctgccttttgtgagggtacatacactacctccagaatggtattagaagacactgactgtgtgaagaatctaatggctgaacgacaaaaagatgttgaagacgtagttggtgagacaagtgagacttatatggaatcatttcgaagaaatgaacaggcaagctgttcagctgctgggtttcaattaatggatgaatgtagtcgtgctgaaagcatctggctgctctctggcaaaaaacctaatgactcttgcaaggtg

SEQ ID NO: 5569 - DNA, 815 bp, Zea mays
  unsure (1)..(815): unsure at all n locations
tgcgtgcctgcagcagtataccttggggtaatttgtatcaagaaccatggcaagtgaacaatcagctattgcatcagtaacttgaccgagtgcttgatacgcagctgcgcgattgcaaaaacagacagctgaaaatgcgcgcgattcactattacatgccaaagctgctgaatactgtttgacagcatctgaatatctaccagcttgaaatgattcatttccagcagcctaacgattagaaggtaacaacaaataagtgatactagttttgtcatccatatcaatgaaaatcaaaaggggaattgatattttgctgctgcaaaggttgaaccattagagtttgctaaaccatgcatcatggatttgcaaatcatgcggtcacatgccagcgaaaaaagagatggaaatcctggatgcaactagataaagtgacgaatctcaattttcaaggttatctaatttcgggtttattttgtgattttgtacttaacattaaaaattgatggatatttagctatatcattttttctgttttcattaagcaatgtgcactgtctatcaccagtacatcctatgctccaataaagagcagcatgaaagctcagcatgttcccatttataaagccaaattaaacagccaaggtaacttgggaaattatagtacatttaaggagaacaatcatttggaaactatttcttccattaaattcatgggagagctgcacatcatcacattaaaaagagtacacagcacgcacgtaactagctcatagacatcactagaaattgcaacatgtncaacatagagatgcgat

SEQ ID NO: 5570 - DNA, 509 bp, Zea mays
ttgagttcctcattaagaagatcgacaaattgcttctccatctctttggcaagctcagggttgtttttcccacaatctgcatatttcaacacaaactttaaagttttagttcagttagcctaatattttgataatagcaataataaggtcaggaaagtgtgcattgaaagaaaaaggtagacatagaaaacagtgcaaataaggtgattcaaatatttcgacaattcctgtcctggaaaactgggtggctatgagatacaaaagcacaagaactaatggtgcagcatagtgaggaagatttgtgcaaccttgatgaagcaaatataccgtccaaatctaaaaagtgccaaaatgccaaatctagttggatggaagaacaatctttgagtttcattggatgttatgaacgtcaacacatactaaggctatcttcagcagcttactcatccccatacctatattcaaactccactttgtgaacagtgcggtctacagtgcaaaatagtttt

SEQ ID NO: 5571 - DNA, 765 bp, Zea mays
tcggtacccgctgatccgctagaaccgacctgcagctgcgactgcccggcgcccctttccctcaagtccatcgccccaggtgatctgtcctgttcagaccctctttccagatcttcctacagttctcgcctgatcagtgtcggtacgcatgtctacccataattcgttaggtaaaacaaaaaataataatctgtattttggtcgggactagggtcatcagatgaacgccatagcatatggtacagctgacgcatgcatatgggtagcaaataagctagttttagttgctgtgtctaatcgtctatgatgaaaactcccagttgcagctatgtccacattactgacaggaatttgtgtttattgcagggcttgccaacttctcaataacaggtttgggtccttcacttcacagttcacactcctgtcaattgaggcatgggtttcctcatatttggatgagcatagtggttatcttatgatagaatggcagcaatcgtcatggatcactgtgttctttacttactaaactgaacaattcgtgaagctgccttcagtagttcagtcactatgatgatgcatggggtgatttatagaccttatggaaccttctacttgggttattcttcacactacaaaaaatgcacgagcaaaataggtcttatgaaatgaaagtaaaattatgtgttgaattctgaaaaatcacattcttaatcatttagcctcaaaatgtcttatgtgaaaagaaaaactgaacactaaaattct

SEQ ID NO: 5572 - DNA, 585 bp, Zea mays
cagtttgatgcctgcagcctcaccggcgggatcccggactccctcgcccgcctcacgggcctccagaacctcacgctctcctacaacaacctctccggccccgtccccgccgcgctcaacggctccgccatccagaggctgtggctcaacaaccagcaaggggacgccaagctctccggcaccctcgacgtcgtcgccaccatgaccggcctccaggagctctggctccacggcaacgacttctccggcccggtccccgacgccatcgccagctgcaaggaactctacaccgtcaggctcaacaacaaccagctcctcggcctcctgccgcccggcctcgccgcgctccccgcgctccgggagctcaagctcgacaacaacaacctactgggccccgtcccggcgctcaaggcccccactttcaccttctccgggaacgagttctgcgccgccaaacccggggaagcctgcgccccggaggtcatggcgctgctgcacttcctcgccgaggtgcagtacccgaacaggctggtcgggacctggtccgggaacgacccctgcgcgggctggctcggcgtcacctgc

SEQ ID NO: 5573 - DNA, 727 bp, Zea mays
tgtgccatgtcgatccgttccttcaaaattgattccaatcggattgctccctcaaagttgctctccaaattctagggaataaatgctatagttggcgcacgcgcagtcgatatgggaattttgaccacccctcaactgcattggatggtccggagcaaaaacaaaggtgtcatggcttccgagtcatattattttaggcagcttattggatcgttcaggttattttctagtcattgtcctgctgcttttagtctcccacgaactactatagtgtctttgatgatgagtttctagcattaaatttcaccaggcgtatgttggaattagtgccaaaaggtaaaggtggggatgaggttgccaagaaacttattgtcgatggagcaaatggcattggtggggtgaagctcgaacaaataaaggtggagctttcaggcatagatattagtgtgaggaattcgggcaaggaaggagaagggatactaaatcacatgtgtggcgcagactttgttcaaaaggagcgagttactccacatggatttaaccctgaagatgttggtgtcaggtgagacgatcggtagttgctcatgcttgatgcttgcctatctttatttttttagtcagcttaccattttctcctagcattttaggtgtgcaagtttggatggtgatgctgatcgactcgtctacttccggttgtcatcagctagtgacaatagggttgatcttg

SEQ ID NO: 5574 - DNA, 807 bp, Zea mays
tgctgaaacttctctttggcttcctagcaacatataacattatatttgagatactttgcactaaatgcctgtagaaaaacattcatgtttatggttgagatactacctcatccccaggattcttatctgggtggaggcgcagagccaatttgtgatacgccttctttatttcttgttgagaagcggtcttctcaactcctagaatcttcaaatgataaaaaaaataaacaagaaattaaataattaaattgtgatctggaaagagaacctgaaagcaatccgtgacacatttagaacagttcagacttttgtcccatctacagttatttacatgacctgtttgcaaatagaccttaaataagaagccaaaagaaattccagcaattaagcgttgttgtagaccttctcataacaatatttaacagtatcaaatctttttaaccagactttcaatgcttagtttcattaagtgcgatcaaagcagtaagcattggttaactatagttccaaagtgatagcataggccaaagaaaaacgcaaacggatgccacgtgatttagcattaaagaataaggcaaagatgcaaccaagaaaacaacagcgctaccaaagaaaggttgcctattatattatatatagccatccaagaacacagtaatcagtacacgtttaggtgtatagcaatggttgagtaactaaaaaaaaaaaaaccaggacatgttccttacccccaaagcaggacaccagataatcatgccaccaatgcaagagtctacaaggcatgacaaaattgatagggtgcgaacg

SEQ ID NO: 5575 - DNA, 788 bp, Zea mays
aacccatcgatcagagtgcaatgaacaggtcagcatgacagtcggtcggcgaatatgaaccgagaaaggaaaggtcacctggtcagcgttggccatcccaatggagaggaggtgccggatgaccgcgttccagatgcgctgccctcggaagtagatcccagtgtcctgtagttcaccccaagcagaacgacacgactcgttatagttataggtactacgtacctggggctctacttacaaagacggcgaaataaaaatgcctgcaaacttgtaagatgcactctggatacatatgtgcgtgcaccttgtcgaaggcctcgccggcaaaagatccaccgtcacagtagcgaaccttgacccggttccagttgtagaaatctgcgccggagacgacgacgacgagatgagcgatatggacatggacggatatatgagggtgtggaagtggaactacgggtggacaaactagaatcgggcgagaccaggattcacggcacggctactgctcatgatgccggtgaaggggatctctttgtccatgtggtccgacgagccacggccggagctcctggtgagccggcatgtcttggcgctgttgcaccacgcacctccctgtgtgtgtgtgcgcgcgcatatgtgtaataataatgtacattaaaataggaacgacatgaatcatgtgtacaagtttaagcaagggccaagataaaaagcgggagtccctactaatatgtgctttcaattttcaatggtagcctaaaccatggtaactgacctctaagttcaca

SEQ ID NO: 5576 - DNA, 563 bp, Zea mays
atcattttccatgtgaatatacatgcttgtgctgctcatttattcaatacttactcagtcattatgaaaccatttttcttagattactttgttttacatgcagagtcaccgtcagatactgtattgttagtcgatctcattttccagacattgccaatatatgacgatcgagcatcacgaaaagcagtagacgatttggttattcaggctcttggtgaacccaccttcatgaagccctttgctgcggtacttgtacaatctatggaaaagaatctaaaggttacaaacccccttacaagcttaaagcttctcagatggtcacactatcttctgaaatggagtcaatttgccacacttacaaaaggcgcctttaccagactggccaatgcacaagcagtcttatgtcaagtccttatggatgggtccttccgtcggcgccggacttgcaaacagttattcattcatctcttctccgaggtaattattggcaatggtaaataaatttagatcaaatcataattgtctcctacccatatcttatctagttccattttccagcacag

SEQ ID NO: 5577 - DNA, 729 bp, Zea mays
tattgcaagaacgttcttcagggcacctgcgatttctactcctgtaacatcactgaagtatcataggtcacattcaaaatattcgcctattgttttctcagtatcacaggtcgctgaagtacaaaactgtcatgatcaaaataatctctactaacctacctcctaaatcctaatgtgtacaaaatcataaatagttaacagtggaagaaacgttcatcacacttctttatgttggtatgatatattatgtatagcctattagttgggctagttttagctggacaaaagtttctcaagcaacagaaattcccaagatattgctcctaagactagtattgaactgcgtggtagtaactaatttgaaacaaggaaacctatttcttatgcttagctgttgaacgtactagttgcaaattattgaatgatgttctggaatattcaggtagtaacacagtcacttttcccttgtcttaatagttcagaaactattgtcatgcccctgaatataaactgtaagaaattttctctctttctcatacataaaaaaccaaatagtaagaagagcaaaaaaaaatctgtgtttcatttcattcacgcatcttccacctcatcttctttatcagttttagtaaatacgagcctacatggcatgcacttttgcattcatgcagttgtagcttggtgtatcttctgtgatgaactcatggagctaggcaattttaccttgag

SEQ ID NO: 5578 - DNA, 805 bp, Zea mays
gaaattattttattgtcataggaagctttatttgggtatttattcatttcctttaaagtgtcggcagtacaatatacatgtttactcctctgaataatgagacagataatccttctgcatttttgaacgctattgcattctttatttgtaaagagcttactcaacttccacagaaacctttgtggaaatccaaaacaaatgtgaccagaggaagcactttgtatgctaccatgctgtgtgaaaaaaatcatgttaatgaatgcctttataagtgtttcatgcatacttggtcaaagttttaggctgtctacaacttaacgaacctacatttgtttgtgtctggttattatttataagaaataagacttattagaaatcagtaatcacttttgctaggtgtgccatgtatcccataacaccacttattttcaaaatgggtttaatgatcttatgagaaccttgattgggagaaatagattaacatattgcattacaactgattttttgctggttttgtaccatacttctatttatctgttcttcaagttcaacatgattgttttttatcactgaataactactcactagatttgcagatcaaaagctaacgagccaagtgcatgaaattgttgggcgcataaacggtcgatttggaacgttgactgctgtccctattcatcatctggtagttttcacatttcccattgctgcctctgtatctgtattaggacctaacttttcttaagcgttataccacactgctgagaaggcactacccatttgtaaggttcaattttcatttgct

SEQ ID NO: 5579 - DNA, 741 bp, Zea mays
acacagcacatcagcgtgcggcgtgcctaccctaacaaaccgccacccaaccacaattactatcggctggggggcactggaggattcggattccggatcagtactggctggctcgggggcagcagatcactgggcaggggcaggggcaggggccgggagggcgaacagcagttgggctgttccgttctgttgacactgtttgtgctgctgggagatgatgcgttgttgtctgctgtcccgagatgagcgattgagcgtcgtgcagtggtatagagcaaatttgagagaggtgtgcacttgacttcgtgatgtataaacatttgttataagggtgcaaatatggtgaaattttaattaaatctaaagatttagtatttttagtgcatttgtaccccttagagactgttgcattttttttaggttcagagcttcagctccatgcatgcatccttacctggtccatccatccgtgtggaaggaacagcggaagtggaactggaaccacatgcacgtacgcatggtcctcctagctactagctgccggatcaagcagctcgctcatcgatctgcacactgggctctggacctgttccggtacggatgatcggcttgctttttacttaggtgcggttcggttatctgggattgattggtcgaaatgaggtgcggttccgttatctgggattgataggtcgaaatgatttctaaccggattgctcttataatttatataaactttga

SEQ ID NO: 5580 - DNA, 701 bp, Zea mays
tgcatgcctgcagaatccttgggttggaatcgtcaatcgctcacaagcagatattaataggaaggttgacatgatttcagcgagggaaaaagaaagggaatattttgaaacaagtcctgactatgctcatttatcaagtcgtatgggttctggatatcttgctaagcttctttctcaggtaactttaaagctcatttctcggacttatatatatctgagcaaaataacatattcagtaactctattacaacatttcagcatcttgaatctgttatcaaagcacacattcctagtatcacagcgacaatcaacaaaactatagacgaacttgaatcagagctggacatcatagggagagctgtggctgctgatccaggggttagtcagttatatcatatttagacaatcgaaataatcatgactgtattttctctcaatcccctggttctgaattataagtcattccaacttttttggagaatcgaagcatatcaagtttgaccaaatttatataataaaataataatatttatgatattaaataaacgtcattgtattctttattcattatatttttatagtatatctatttaatgtcataattcttcataattctcatataatttttcggcaaccttgagatgctttgaccctctaagagagttggaatgacttataatttgaaatccaggtaatatcag

SEQ ID NO: 5581 - DNA, 837 bp, Zea mays
gcatgcctgcagctggtcaaactatgtgtatgtatgaaactatgtgtatgtatgaaactatgtatatgtatgaaactatgtatgtgtatccatgaccagtttctgtttttgtgtcagactatgtgtatgtgtgattctgtttttgttccatgaccagacaatggcagtttgtgttccatgaccagttgctgaacaccaaaaaatcagttgacagtgtgactccaattcagtttgtggctccgaccgttgaccagtttttgaactaaaactactgaattttgatgtgttttcatggccgaatcaaacaagactgaaacaaggctgaaactgttttcatggccgaagcaaacaggcagctgaattgaaattcagttggtcagtgcagttactagtcttgtttgtcagtaaatcagtgacagtcttgtttgtcagtgcagttaccagaaacagaaactgaattcaaaagactgaattgaaattcagttggtcagtgcaaaaaaattcaaaaaaaaattcagatacttaattaagatggtcagtgcacgacggttggccagtccagttggtcagttggtcagctgaaaaatacaaaaaaaatcagttgagactcatctagttgcttgcttgaattcacttgagactgaattagatgagactgaccaacttgaattcagtttatgcttgcagttgcttgcctgttcacttggagtttgtgccagaaacacagaattcaagtttgtggccacattcaagaatgccttttaaggatgaaaatattggaaatttcagtttgggggggccgaaacatagaaaaaacctcgaattttgcttttattt

SEQ ID NO: 5582 - DNA, 543 bp, Zea mays
ctgtctcaacacctatagtggtgccatttcctttttttagtttacttcttgacctatgcagaaattgcagttgtttcttgcataattaaggtttttcaatagatgtaagcttgttcctgtatactaattctatgtccagtatgacaaactgaagctgacacattgtagttactggagtacgtagatgctctgtcctgcacctgctccatgcatttaaagtagaatgttcctactggtttacatgatttgaacatttcacaaacacttctttaaattgttatttattatgtatctatgcatcatactgtagcagcattttacttctggcacctaggatgcgtatttcacatttttcaattcactttgcatttcagggatcactcgaattttgttaactgtatccggtatgctcctgatggtagtaagtttatcactgtgagttctgataagaagggtttgatatatgatggtaaaactggagaaaaaataggagagctttccactgaaggcggacacacaaggagcatatatgctgttagctgg

SEQ ID NO: 5583 - DNA, 751 bp, Zea mays
agagaattttctggtgtataatgaaatatcaatatcgccatccatcaaagatgaatgaggaccacaaaagaaattatatttccgccatcacatcatgttcgcgcctgcttttgtttgaagagaaaacaatggtcacggcatcttcagaaaatagaatacagaaagaaaggaagggcttctcatcatcacttgcccattatagctaactgagaaaagatctatcctattactgtacaatgccacttcttccagttagcctctcaagatttgcatcctggagttccttcctcacaactgaaacattgatccagtgaccagcatcagcatagatgttagacaaggctattttggatgcaccatgggtttgatcaagctttgccaattcttcagcggctctttcacctaatgcgacatttccttgtgcccttgatgctgaaaggatgctgccccaaattacaacatctggtttcataggcatcattgaaacaagctgttcagcctcttccaagtatccagctcgaccgaggagatcaaccatgcaaccgtagtgcttgatcgttggctggatcccatattccctcgtcatggactcaaaataatattttcccttggttaccgtgccagcatgacaacatgcacttaaaacacctatgaatgtgattgaattgggcttaatactagtcctctgtaattgtgaaaacaggtcaagcgacatatgtgcataaccatgtatggctaaactacaaatcat

SEQ ID NO: 5584 - DNA, 785 bp, Zea mays
ttgcatgcctgcaggccgctgaggtgtcaagcaatgagtatgaaccttcagagaaagatgtaatcttcgctgaaggagtaacacaaggaaatgggctagctttcatcgagttcacacttgatgatcgcagcccaatgtctgaaccttatatcgacaacagtgaggcacattcgcagcctctcaccaagtaataatttcttaacttgccttgtgaacgtgtgtaaaaaaaatgcatctgaatcatgtgctcttttttattcatcagatatcagctgatcagagtcagtgcaaaaggcatgaatgatggctgcaaatgggtggaaatgtttgaagatgtccgcatggtaatattctgtgtagcactcagtgactatgaccaattgggaccccctgtaagtggcagcagtcggcctcttgtgaacaaaatgatgcaaagcaaagagttgtttgaggctacaatccggtatttatttatttatttattttcattctcagtttatgttcaataataacatataacaacggtccagtgattctctcgagtttgtgttttgagcaggcagccatgcttctgcgatactccatttgttctggttctgaacaagtacgaccttttcgaggagaagatcaaccgcgcgcccctctctagctgcgagtggttcaacgacttctgccccggtgcggacgcaccacaacaaccagtcgctggctcatcaggcatactactacgtggccatgaagttcaaggacctgtactctgcgcagacgaaccggaagcttttcgt

SEQ ID NO: 5585 - DNA, 793 bp, Zea mays
  unsure (1)..(793): unsure at all n locations
aagaaatgctgtgtgttgctattgaaagaaggatttaggtgattttcttttgcaaaaaaacaggttgtgaggtgctgcttggagcatgctgcatcggtggcgaaaaccttcatcacctctgatgccgttgttgttgacgccaaggtggctgagcaagcaccatcatctcctgcaaacccaatggcaatgggtggtggctcaggtacatgaggttgatggtttacttgttaagaaatgggaatggtggtgttaatttgtgtcggttttctttttcaggttttgggttctaaattgttcagctgcccttcgttccatcgcagcgacagaatcttagtttcgagatataataataaattggatgatgttagtttcgagatattagttggatgttgttattgttgtctcaaattataaaaaatcaagtgcaagtaaccaagacagctgaaaaaaatagttttgatgagatgctgcttcgtttttcttttctactatattggtgtgttggaaatagttttgatgagatgctgcttcgtttttctactataatattgcaagtaaccaagcagccagtgttcagctatgcacttgccatcctttggcaatacaagttggtcccaattttaaacatagtatccaaccagttttaaaccggacgtgtacactgatgtttgcaaactaaaacctaacaaataataaaaagaacgggacggatggagtacattntaaccagctggataaaattaaattagtactggtacatacaatgcatggacactcgattcttatatgccag

SEQ ID NO: 5586 - DNA, 712 bp, Zea mays
ggacctacatcagaaacctttagaaggtaaacacccagagcacaggggagggcatgtgaattgagtagtaaacaaacaccagcagcagccggtgttattagcttgtgagttctggccaccctgcatcagtgcagtacaaaagaacaagctttcacaggcgctagaaacactgtacttattaacaagggataaagttcagaacttggggttaccgaggaggaagaaatgttctcactcacctgcacctcacctcctcaacagagcactgagcacagcagcaagcaattaacaattccggatcagccagtggcaataatgagtacatcaactagggataaacatacccaaatgatgccatcagctgggctccatccatgccatcttccttccatcttctttcttcccccacacctggattgacaattgctaatattcctttctgatctgaaactctaagaaccacatttttgcagaccacactcgctgattttgcttgttaccaatcgagcacgaatctcaaagacgaatagacggtatggcacagtaggatctacggctagagaacagaagatggtacaaggcactgtacctaatcaaatctgttgtttatcgaaaagaatatcctgcaaaagctaagctattgcttcgtttatttcatttggatccagatctcttaaagcctctgtcttttgggtgctattaaacaaatttc

SEQ ID NO: 5587 - DNA, 783 bp, Zea mays
ttagtctacctgcagttatgcggcgcgaccatgctgaacctctcgctcttgacctcggacatgtgggctgtcctcatccgcatcttcgcttaccatgagaaggttcgttttgtcatggagcatgctcgagttcgtcgtttccaagcaaaatgctagtgccgacagaaatgtttttgtactcaccgagcgtgtgcatgcgcgtggccaggtcgactggatctacttcgttgctttcgccgccactgcgggcggcatcgtcttgtactcgtacaggtatgtctccttttgccatcacttcacagctactgttcttgctactactgagtactatggctgcatcgtcctggcacaacatgagaggcctggttttgcacgcaggggctctaatgaagtggaggagacggcacaggtggccggggccagcgacgagcacggcaagggccgggacgaggaggctgggacgcggaacccagcgtgaagctctggcgccagccagcaatggaggtgggttgccccctgccaggcatccaggagtgacgagttgttgttgcatgccttgacggcgagtgtagcagagaacttggtcaagtgtcgcaggagactgcttcaagatttgacgacggagatagtattggtttttatgtaaaacaagaacagttggtaacataccgacaccgaaccgtcgtcagaaatgattagatctaagaatcgaagattttacaggtgttttttggtaggtgtgtttggttgagaaaataaacggtttcatttttattttctgat

SEQ ID NO: 5588 - DNA, 733 bp, Zea mays
gcaggaacataaacgccaaacatgactagtacagctgacagcactaatctagagagagagagagagattccaggctttcttttacttttttcctcacaataaatgctagaacaacaacagaagccagcatgtaaacacataagaatttgatctcagctctttctcacacaaaaaaaaagaaatacaatgaaagcagaaggcaaaggataattacacgagtaataccagtcagactgagccatgtatgcatgcatggccactggggtgcaccatgccaccatcacatcaccttcactttgagttgacccacaccaacacaagcccatgaggtatactcatacacatacacccatgcatcagtccgtgacacacatattataccaactaataaccagtccataaaaaaatcatggactatatataaaaagccacatatttctatttaataaaatatagtaaaaagaaacatatggccatatattttttaatattgcttccatcacaaaacaaatacacttctaattttttaataaagatattaatgttagtgaaagaaatcatatttataccactctaatacatagttattatattttagaaaaaaaataattagagttaaattatcttatacggaataaatatttttgggcaagaatttaaactatagttttaggtctctgagggagtatatatatacatgatgagaaatgtttttgtttagtgttccgccaca

SEQ ID NO: 5589 - DNA, 740 bp, Zea mays
tacccaatgctttcgtatattatcctctcttctcattatttcatatgcacttgcaaaagtggcaaacaatcataatatcatcgctcattaaaaaaacagaaaaactattgcttgtaccatcacatggaaacaatttcaaccaaacatatatcgaggcgttaacagacaaactgattcaaaagaactcaggttggctagtgttctcattgtctcatatacactacaaaattaatagaaatatcaatcaatcatagtgccatcagcttgccaaatcgctgagggtctacagtcataggacagacaatttaaattaggtttctattgaggtataaaattcatcaactaattcagagggagctcatgcacttggagattgaagaacacaccaaagttgccttacaattaggctggtccaaacacagaatttaaatatttcataatcaagtctatccaaccgaagggcaggtctggtgcaggggtgagagttgtctcactgagtcaccaggtcgcgggtttgcagcagcctctccgtatttacagagggaaggcttgcctcggtttatcccttccccaaaccccactcatgtgggaacctccaacacaaggtttgccctttttaatcaagtctattctctattgctccaaatgccaagctttaggtacaaatgtaacacacatgagagggtccaataaaccataatttctgtacaatgtacatagcattaagtttgcacaaataa

SEQ ID NO: 5590 - DNA, 703 bp, Zea mays
atgagaaagagagaagggtgcgtgttgctgttatacatggactggcaagaatggcagcaatcatggctaccacctatagaccgtatttgggtgttggtctaggacctttatcggtatgcaataaacacactcaatgcacagatcgcactctcttttcagcaacatttaaaattagttgtgaagtatgttaccatcaattttattggatttctgaaatatggtttcgaatcagaactatattaccaaattaccatcctcctaagagcattactgaagaacttcatactggaagtacttgaactgcatactaaatttatttacctgtagtttttgaccaagttgcggataccacaccctggaagggttggtggcagattcttcatcaagtatggaatgcctgctatgctgagctgggtgcttggtggcaataggtgcataccaaaattatgaattactatcatgtgttcctgtttcaactttcaagcacatatgcaatagtaataggttaccattagtttaaatgtcacacacaaagaaataaacaccactcaggctttcttcttagtttccaattaccacatccgtactcatcgtgcaaatgaaacttttcgctgtgtatagctcaaagctagaaggaagacctttaagctgccgactttctgacaaggtatgttgtcatagtaactgtgaaattgatttagta

SEQ ID NO: 5591 - DNA, 743 bp, Zea mays
ttagacaagtgtattacaataaccataacaggtatttttgctaaaaaaggaaaccaaccactgtgagaaggcatccctagctttgtcttaagagagaggagtgccgaactctttagggatgtacccagacaacctgcaagcttgtgtttgatcccaggtgggtgccttttcctggaaactctaccaaccaaaataccactttgttctcaaaatttttgctacagaatatttctagtttatagctacttagctagtagcaggatatggttcaacgtgctagaacccactacaagtaatgatgagagcatcacattctgtccttcagaaaaattggcagtgggtttgagtacattctacttactattatgaacaaaacatcacccccattatttcaaacatgacatgcaacttgagatcgacatccaactttgtcaaaagcatttagcaaggtacaaccaataagttatatcattaaaatgatggagataccaaaaggtgtttttaatgcaatacattacttttatatagtaaagccattggtattatttctcatgtaaacagttgtagaactagagaaaataatacaaacctgtatcctgtcacctccaaagatccggaaaatattatcctcgagactaagaaagaagcgagagcttccaggatccccctgtcttccactttgaccacggagctaaaccagaaaaaggaaccaatttcagttataatcatgctctgtcatgatc

SEQ ID NO: 5592 - DNA, 823 bp, Zea mays
gggggggggggatagaggtccagtggcagtggcaaggaggctttggatgctttagagtccacctgcccaatgagaaaatgctacgtcaatcggctgaagatgaggccagtgacctcaagaatcaaatatcacactggaaaaagctggaggtgttgttagcttaaaacctttttttgtctcaaagtattgcctcagtgtcctgatagcaaaggggcttccctcgctcatcttgtaggctacagctacagctgagataataaaactacagaaaatgctagatgctgaagctagccagaaagagaaacttgaagaagaaataggtgttttgagaagccagttattgcagatgagtatggaagccgatgaggtaattgttactatcattgtcaaggattttttccccagggaagctgctatatctttttgtaacttatttctatttctgacttgaacatgctgccctaacatagtcggtatgttttctcttcattcctatttggtcacatcagacaagaagtcttgataaaggagatgggccaggaaaaatatttcctggtttagattcattggtgtctcagactcgaggttcacaacccagagagcaggacaatggacagaagcaaccgattgccaaactctttgaacaaggtatttgttatttattcttttacagtttctgcttgatctgcctatttcctgtaactctgtaagaaatctccaaaactaaaagtaaactaattgttgggcttaacagttaattatagcgattcacgaaccccttagattacaataaatggtgtgccaaaagattcatgtgctagca

SEQ ID NO: 5593 - DNA, 719 bp, Zea mays
tcgacgacaatttgaggagcagaaggaaagacatgatgagacattgccaacgtgaaggtcgaagcattcttaccagtaggtcttggtctcaatgtggaacaggaagcggtgcaaagtgtattcgatcagcgtccaaataaatatcccaaatagagccatcatagctacgtcctgaacggtatgacccatcagaatagatttcacgagcaggcagcagacaacaggcagccatatagttggcacagcccaccacttcgtgcgagtcaagaactggacagtccaagaagtttgttagtacggttaccaaaacccctaggataccattaccaatgcgatgggatatgcgttacctccaggacatcatttccgaaaaagcgtggaccctccttgctgacgatcggttggtgaacccattcctggtaccgttcctcaagatggccaacctgcatccacaaaatcaagagacaaccagaagatggttatgtgaatgcgaaccacgtgaagcagctggacatcgactcagaaactcggaagtttacaactactacatgagattccgctttcatgatagaatctgccacaattattgctgaggagaaagcacagtctaacactaaggcctggttgcgaaaagacccaaagctgcattaaacaagctcaaaagtacataataacttgtaaagtgcgagagagaatcccataagcctactcaaaaaggc

SEQ ID NO: 5594 - DNA, 748 bp, Zea mays
tgggctgtccagctgtgactgtatatgagaatgtcatcaaagaaaaccagcacaaacttgcggatgaagggtttcaaaataccattcatcaaactttgaaatgtggaaggtgcgttagtcagcccgaagggcataacaaggaactcaaaatggccttgatgtgttctgattttttccacatcctgcggatgcatgcgcacctggtggcagccactccttaagtctaacttggtgaagaatgcagctccgcggagttcatccaacaactcatccaccacagggataggaaacttgtcttttactgttttgtcattgagttcacggtaatccacacaaaatcgccaggaggagccatctgtttttttcacaatgaggactggggatgagaaggctgaggtcgacacacggataataccttgctgtagcatagcgtcgcactgtttttcaatttcgtctttcagcagttgcaggtaccgatacggccgtactgctactggtgccgtgtctggcagcaatctgatcctgtgatcatggcgattggcgacgcgagggaggcaggccacgaggttccatgaagacatctcctcataagagtggagtaatacatccatgagattatccccagaagtcaacactgcgcactgtggctgtactgcccaattccagtccattgaatggtgcggccttggtgcacaaacgacatggtgagggctgcaaaaatccagagaatcggtcctagtgtgctcac

SEQ ID NO: 5595 - DNA, 676 bp, Zea mays
agacaatagtcaatgagaaacctttttgttcacagattaaagaagattaggtgcaggctgtcaattgaaataatacaaccataaagatcaatgtgaacataagcatttaagatgggactaatgctgaccttaagcccaaattcttcagtgtggcttagtactccataagagtgccaaaaaggaatccagacaaaggcttgatgacaaactgtctgatatagccaacaataatagcatctggcccttttattgcttcaataaaatcctcggcgtttgagtttacacaaacaggaaacatcaagaactccaaagcctgtgcataatacctggagtgcaataataagatttgtttcttatgattggcaactgatatagaaattcaccccatgttgtcatggggtcgtcgcccttctccaccacaacttgcaactgtccctcgtcatccctttctctagcccttctccaccacgacctctagctgctcctcatcatcaatttctctggaccctcatagcatatagttttgtactactaactatatacaaagaatcgacttgccagcctcccatgccatcacggctgtaggggtccaacaaaatcacccacaaaaaagcatagagacaatttagtttggtaatctaaagcaaaaacagattgggttttacagaaaaacatt

SEQ ID NO: 5596 - DNA, 784 bp, Zea mays
aacaccaactgaaagttaacgacacgtccttctactacatctaataaacatggctaaacattttaagttgtagtgcaaggatcagtacagtgagagacagaaaaaaaaagaagggaactaaaagcttaacctactgctactggacatattagagtgtacaaacaacggaatctgtggatacactaatctgtcgctttgaacattgtcactgttgtgaatgtgtgatagttagttaacagttaccaaggaaaaaaaaggggtcaacgtcaagacgcttactgcttgctaacttcgtctcttatggttggatggcactccttgctgtacatgcttaaggtgtgaaacaagaaaccactgtgactgacaatagctatctctttctcttctcttgtccacaacctgaaagtatgttcaaacaatgggcagaaatccagatataatgatagagtgagtaactagtccactcatagaccaagctaaactgcctttacaggccccgacctacatgcaagaggttctgctgtttcctgcattagaccctttctaggaaaaaagtattcaactctgtgagagatcatcagtacatggaaactagcacaaaataatcagtacaaaacatagcggaagcagcctcaagcagcggtatatccactccataaattcaacactcagcatcagtcttaattagtgtaaacattgactagtctatagataggcataaacttattcgaagatgccagtccataactttgaaaggcaagatgaacaaaaaaaacttttcatg

SEQ ID NO: 5597 - DNA, 749 bp, Zea mays
atagggtaacagaagtcactgagctggaagaatcgcctgggctctcagcctcagccttggatgaggaacccaacgcttgtgttcaagcagtgcttctcagggagccaaactcactaggacacaatcaaagaactgtagttcctagatcacagcatgcatctaatgtactgggtggaaatgagttggtgattgttggacctcgatatgctggttctgtgccacccattgcaacaagaggtctggaaaacagcaaggagagcggtggaaggggcttcaaacccaaaccttgtaacaacattttccaaaatggctcttcaaagcctgaaagggaaccgggcaattcgtcaaacaaaagaacagctggtaaaacggcggaggaccttggtcacaaggatagttcatctgaagtgtcctacgagtactgtgtaagggtggtcaggtggctggagtgcgagggctacatcgagacaaacttcagggtgaagtttctcacatggtttagcctgcgtgccaccccgcaggagagaaagatagtcggtgtctatgtggatacccttattgaggaccctgtcagcctttctggccagctcgttgacagcttctcggaggcggtatatagcaaaaagcggacgcccttctggttttctgcatggacctgtggcattgaaacaccacaagcacctaccgtttgctttgtatggagcacacattcggccccatctttttgtgcagaacgttgcattgattct

SEQ ID NO: 5598 - DNA, 704 bp, Zea mays
tgttctaacatcctgtgcacgggtggtgcgcgacttgcagacgcggtgccggcgctggtggacacaccgccgctctggttcccgaacgccgcggagatggacttccccgtcgacgacgtggtccccgttccccaagccaacagcagcttcggctaccagtggactggccaagcgttccacatgccaggttaacccagtggtcccgaacaagataaacaagtgacccaggtgaagatcacttgcaaggttccagttccagcaataggatgtacattaacaaaatactgctacgcggttatatgtccacgatcagcgtcggtcggtctgtctgtctatctgtctgtctgtccaagtaacagcagggtttaagggtaggtgaaacttgagcggcccttccctgcattcgccggacgcgccgagcgtccgcgggcagcgagaagcggcgaccaagtgcaagattcttttgtttgattcgtatcctttgtttttgttgtaacttctcaagtttttccgttctgcctggccaagtactagcgtcctgctcttctcccaagattgggttgcattgcatgtaaaaaaaaaaatgtaacgccggagcagcgacgctttgtgggctggcgaacaggtgtggtatgccctacaatacaaaggctagcaagcagaacttggctgggtaaacacacagctctggttttttctttctc

SEQ ID NO: 5599 - DNA, 825 bp, Zea mays
aaatctaggggttttgggtgaattgtaagtagggtaacgcgaaggaaaaccactaaatttacatttattccttctcattacatcacggagtctgcaaattgagatccttcactgacgatccatgttttcctacatgaaaatgtgatgcgttcagttacatggctctgatatttggtattatcgaatagtacttttggattttaatatatatttgtttctctcaaggttctgcaaagagcattggattttagtcgataatttgacattccatttagtagttatttttatattggaaaggtgtgtgtaggatgcagcattgaatgttagtttaatttaattgttataaacattgaacacaaccaggacaacatgaggaaaccagagtactatagtagatggtaatgtttgattaaggttttcaaccagtgatatgatacccaatttctcttggtaatctgtttcgaccatgcaacatatggatggtttttgatgaaatctggatctcttttttttttgaaagggaaatctagatctaggactccattgatttacttcctagttcctgccttttcctattgttgaggaactttgatattgttttacctaggtatcaactagactgggcttactgaatcttaatgtcaaattctgttagggtgtggtattggaccaaaacttgacttggagaacagggacccagaaaaaccacttaaatttgtggaattggtggggttttttggggcccttctggttccctcttctttcttatatctcattggggggggcctttggggcaaacaaaaaaagatgggttttctttggaaa

SEQ ID NO: 5600 - DNA, 800 bp, Zea mays
  unsure (1)..(800): unsure at all n locations
aagtttgcacttggtgctccctcagtaggccaaccaatctcaccaattgcaattggtaggttcccgtagccaattttactgagagcagaaactaatgtgtcaaagttcccatcaaatgcatcgtagtacacgttcggaccatctactactgggtgagtagatccttcaaagaacgcataatcttgtgggaaatctgaattttgataaagactgaggaatggatagatattgacgacaaatggagccccactagaactcagaaaagcagccagctgggtcattagctgagtcaattcagtcctgaatactccttgagatggaacagaagcactctgataagcatcagcattgcagggaactactagctttacatagctagcaagattagctttcaccagtgattgctgaatatttgtcatcgctggaatgatatatgattggaattgaccctggtagcttgtcaggaaaggctcattgcccacagcaatgtatctgtaaaaacaaatgcatagttagtagacaaagaaatcaactgtttcagagtcaatcggtcaatcctgtatggacacaccacattcaagattccaagtgaaatttgatgaaaaagaaagtaacttcgtaaagaacacgcaaaaacaaatcacttgccagactaagcatcgttaacctgaatcaactataccagttttcttgagcagtaattctgcaatgctctcataataatttattgaccatttgcacatcactcttaacctctcactattatnggtgtctactanattaaatggtcagtttcactt

SEQ ID NO: 5601 - DNA, 771 bp, Zea mays
ctgcatggcctgcagcaggccggctgggtgcagatgcactgatttgttacgttggcatgtggaagacccacggacatactcttttaccctagctatactgcgaggactgcaaaaggatgcttgccagcgatgcaaggtcttcttgacccttcatggctgttactaaccttaggagtaacggttgattatcagtccctaaggaccaatgtttacaattcgggcgaccagctggtcgagctagagcagcgaccaggcgcctaatcgcgattagggcgacgattaggacgcctaatcggtcctggtcgacctctggtcgtctattagtcgtcctatagatttatggacatatgtatatgtatataactatatataagcaataatgttagtctgcatttctgcaatactgcaatagagtgacattatataagtctttactcttaaaaagtagtaacatactgaaactgaaagtaatataggcataaaactaaaactgataacagtagttactgaacttagtagcagcagaagtgcagaactgaaagcagaagttcagaagacgagctcatctcgactcagggtgactgatgttggtccgctggactggagagtggagacgccggcatgccgccggtgggctacagacgctgccagagaagatgactggagcttggagcagccgccggtgactggaccactggatgccgatgactggagctggacgacgccagagagcagtagggtttacgcctgaacaaaagctggcggctggca

SEQ ID NO: 5602 - DNA, 745 bp, Zea mays
ccttcatggaggcacatcttccagcctttaaggaaaagaatccacacttagaggtggtgacagagcttgtccgcggtcaacatcctaacttgaagggaatttacagtaagatcttggttactttctttcattgcaatttatgaattctgtggaactggtttcctcatagggatacaacttatggaagtgccattagatatctggattggcattgagatgacttacaatatagcttaacctaccatgttcagttgaaaatcgcacagcatgaccatttgaggtctttctctgctctcctgctctctctctctctctggaagtcgggaggggaggcccctgccttaatttcattaatgaaagaaaatggcacacataagccgaaccggcaaaataagtgcaacaggcaagcacaaagaaggatgagtaaaaagatgttaaaaaaaggaaaggcagagagaggaaaaagcaaaaagaaaggaaaacctgaagacagggtaagagatggaaatgtgtgaaagaaagaagtaaacgaaaataaaaaaccgaaaaagaaaaggaaaatataaatattaggcatgaatgtcgtcatattaatgtgctctttaacttcaatcttcccgttcctatctttctgtccaggttatgatcagtggtggagttagtaccgaattaaagcctaggcaccattatagcttctaaagttcacttaaagtcttaaatcgattatagacaaatgattttaagg

SEQ ID NO: 5603 - DNA, 729 bp, Zea mays
agagaataggccggttaactgtgtaactgatgaatcatcagggaaggcaggccaggggaaccatacctgttatcagataagcaccatcgacggagaagacacagtcccaaacccaacgctgatggcctgagaagttgattgccaatgatgtttcagggtctctttcgaagatataagatggatctgagatggagagttggattaaagaagactccaaacattaccgactaaagttctttccaacttgaagccatcgacattccaaatctttacagtgcggtcagatgatgctgtggcaagatacctgcaaacaaaacccaagaatgtgtctcatagaatccaagagaacacaatagtacgctggaataaccgtgggaaaatagccttttagaccatcacactacctgtttggatcgcaaaattcgggtgaaagcaggcacttcagaatgtagccatcatgggcttgcagtttgtgcagaggttcgaagcaggtaattgtctacaaaacagaatttgacaacttgaaaaaaaattcagaaatcgcaattctacatttaagaacaggtaggtctgaagaacaaactgacctgagtacccttaagcaggcgccaaacgtaacatgtcccacggttatttgcagcaaccaccatactcccatcccacatgactgtcagagatcttacagcagtatcaacttctggcacctaaataaatggaaccaacacatca

SEQ ID NO: 5604 - DNA, 768 bp, Zea mays
taaagattcttttttctttcttgggccattattacgccgtccagacaatgttgctatcactagaaacactgcactgcactgcacccataaaacccaccgatagtaatcagtgggcatcttagtcatcatgctacctactctctcctgggttttctcctaaactaaggcctaacacctcacaagtactcctagccaagaagagcacaatgtataagcactaaattccttcaacaagcaagctaaatccttggcatatgagatgtgacctagcttctggtgaatatatatatatatatatatatatatacataaatctggagacacgccagcagtgggttctccaccagtttgtacccttgcaaaagtagaaaggaatttccatagcgatcaaacatcaggaaagcttcacatggaatgttcttagtacataatcattcacctccccaaagtgtcgtcctccagtgatctctcctgaggtggtaaagaacaagggaatgtcaaatgttcctcggtacttttaatattagtaataaatatatgtccgagttcaattactgggcgccaatcatcagactagctagtggagaaattaaaattcattaataagctggttaactagcacctaataagcagcactatagaaaagcgctttgctcctcctccggttctcctaaccaacatggaacttgttttcccttttacgtacaatatgacaagattgcagtaaaaaaacaatttttttaccactctcccatagagtaaaagatg

SEQ ID NO: 5605 - DNA, 725 bp, Zea mays
acatgaacacgggcgtgaaagtcggcggcgagcaccggtcctcgctcctccaggtggtcagcatcgtgccggccctcgccgggagcgacctcttcaccaaccgagggttctacctcaaggtgtcggactcgtcccacgcgacctacgtctccctgccagaggagcagcacgatctcatcctgagcgacaggatccagctgggccagttcgtccacgcggaccgtctcgaggcggccactcccgtccccatcctcagaggagtccggccggtccctggtcgccacgcctgtgtcggcacccccgaggacctcgtgctgaccgcctccccgtcgaactctcacggcggcggcggcaagaacaagaaggcgcgaccgtcgaatgcgaaaacgaaggacgccagcgccagcgtcctgtcgctagacaaggaatcgagcaagctggagaagataaacgcctcgcgcaagcctaccgctaccggggcggaaaacaagaagccgacgctcaccagatccaactcttcgctgccaagagaagctctggatgggaggatcggtgtcggtgatgacaaggaagcggcggcggttaaatcaaaaaaggtgaagccaggtgttactaggtccacaccttcgtcaccgaccagcgtctattctctgcctgcgtcgttcgacaggttctcgaatgatctgaagcagcaagggaacagagtgaaaggagcggacaataaa

SEQ ID NO: 5606 - DNA, 867 bp, Zea mays
atgcctgcagtggcacctcttttgaaagatcttagagtaaagaaacaagacagagtcaaacaaatctcaaatgtgcaatgtcaaatcgagaagataaaagcacaaatttctgatcacaattatcaggatagtgatggttccatcaaacaacttaacgatgaccatgacttatcgaccagaagaatttctgatcttcaaatgcaactgcgtaatctacagaaggagaaggtaatgatgatcttagcttaaaatatttatttgtggaagttgctttgattgattttttgagatagatatagattaaagggcagacatagtgccggaggctcccgcatactttggagcatcaaaattgttctactgtaggcaatatatttcttggctatgctatatttgccgaagaaaaataactctctcctttcctttttctttagtccgatcgtcttcagaaggtttttatatatgtggatgaagtgcacagcctatgtgcagtgcttgggatagattttccaaagactgtaaaagaggtccacccgagtttgcatggatccaactctgaaaattcaacaaatattaatgatagcactcttggaagtcttactcaaactatcctggaacctaaagccgaaaagaagaacagaggtttaaagggtgatccttggaataaaactggcgcctgtagatcattttggtatgtggcttctctaacgaattggccatgtgtcagtgccaagactgaaaaaacttacaagtatggatcgatggtcactggaagagcgatcacttttgagagcgtatctgatcatgagagaatcattcagcttttcatgaacataaagtcgcctttgtctatgtatgcagagtgtt

SEQ ID NO: 5607 - DNA, 730 bp, Zea mays
aaggatccaagtaaacatttaatatgtcattaacaatataaattatagcagagaagcacattatatgctgttaggcaatatgaatgctcaatactaacatgacattgaaggaaaaggctgaaaccatatttgaaatataatcttttaacaaagaaaagaatcctacttggttatattcctcaagccaagtctcttcatcacaagctgatagccatttatccactctctccatgatatctttcctcgttaaggactcttcatttgcttttattatttgcacttcaatgctggaaaggagttcgcaaggatccactaaacctgcatgtggagtattcttagattactcaaaaattgagccatcggcaattttcaattttatgccatctcagcacacataccggaatcaatcagcgcggtgatcttctctggtgctgtgctcatatcaggctccatgtgtgcatttctacagatgccttctagttctaaccttttcttgagaacaagctccttcattctactagttttttgtacagttagcttttcgacttcctcttcagtctgaagaattcaatacaaataatgctactgagaatcaaaccatcttgtcaataaacaattaaagtaacaaatagttgccgtaccttctgaattgtctccaatgacagaatgcctggagaattgatctcttcctcagtagatccaagaatagcagctacttcagagaagtgta

SEQ ID NO: 5608 - DNA, 753 bp, Zea mays
  unsure (1)..(753): unsure at all n locations
gctagccttgctcgcttgcagcagcaccaggcgcctcaacccagccccggcgctctattctacacccatgatggcgtcgccgtctacaggaatccggtcatgccggcgttctaccaacagcccgcgggcagcaatgtcgtcgtgccggcggctccagggccagctcattcccctgccagctctgagcccttcaagcgcaagcgcgggcgcccccgcaagtacgcccccgcagacggcgccgtgccgctggctatcgtgcccccatcgcagccacccactgctcgtgccccagctacctctgaggcctcacccacggttcctcctggcttctctccaagtccgcagagtggtggcgtggtgagtcggcaggcctcgccggcgccggcgccggcgtcaggtgctcccgatgtcaagaagcggggccggccgtcgggcccctccagcaagaagcagcagccgcaggcggcagcgcctggtaatgttctgcctgccttttcagctagagcgtagaagtagcaaaacgtgcaaggctgcattgatgtcttcgatcgtatttctcttcagagcttcagatacacgtatatatacttgtagtacttcggaatgagcaaaatgagcaccagaaagagatactaattcatttatttatcctttcgttcattcttaattcttttggtttgctgtcatgcggcaacagtggcaatcangggtggagttgtgggcggggaatgtaatgcttggtgataatgaccc

SEQ ID NO: 5609 - DNA, 1411 bp, Zea mays
acaccaacctcgtggatcgcttgtaccgctcggaagagccgaaagatttcatcgccttggcaaaagctgcgtgccccttcttctccagagcctccacctccatgccgcggcagagctaagagtcaatgaagaactgattttttttaaaaaaaaaaatgcaaacgagtctaagcggcaagccagtaagacaccgagcaaacggcgacggagacgaagaagagaaacaagggctcacggagatcagctgtagttgcccagtggtcagcgcccggaaactcggtatcagggacagggacagggaggaagaagccgagcacgagggaggggctccggtcgatgacccaagaccaagcagccaggcaggcaaacggcgtcttctgatgaagtcacgctaagctccaaggaacccagcactgtccacaccgacgagcgccatctatctctgcccgcaccaccaccctccactcttccggtcaagagctaatgagccatttggagaggaaaacggaaagcaaaatcctctctttctctctctctctgtccccgatccaactgctctgcatccacccccactgagcactgcgtctgcgtgtgtatgtgcatatatacagcacaagcgagcgccaacgctagtggcgagcctgcaaaaaggccgttgactgtgacatctggtgaaaaacgccacacgcaacttttcccctctcctggggttccgttcgttccttgctgtgacggatgatgaatgaataggttaaccactgcgccttttccgcatgccccaggtcaggtctgaaaccctcgctcgctctagccctccgggttttctatgttttttctttctttcttttttttggcgtccagagaaaccagggtagggaaaggggaaaccttttcagccagcctggtaatttgcgccctaatcaggcttctctacccccaaacccagatacagtgacagttttgagggggccatgcgtgcccatgagacatcagacagacatgtgggttggagtgagagtatggtcatgggagcatatatcagtgcaaagcctttaacgcctccagctcctgataatagagccacaaaccttgtgttaccaaactactgacaaaacatcgaaagtagcacgttcccctaccaaacctttttgtgcaagagattttcagcatgcaagtagcagttggtgagtgagtgagtgagtggtgtgcactgcaccaaacgatgacaaacaggccaaaagcatcaaggattatgaattctctattccgttttgagagactggctgtgaggttgcctaatcttggtggttgatgctggtggcagtggatagtgtactttggggggttgttaatggcgcaggcaggtttctagatctacctggcacgagcgctccagttaacgtatgtgcgc

SEQ ID NO: 5610 - DNA, 744 bp, Zea mays
atcttgcatgcctgcagaggcagtgcagggaatggtcaagaaagggctggattctctcatcattttgggagcctggaagatatggaacctccgcaatagatgtgtgtttgatggagaggccccccagcctttctcgaatcctgaagcaggctgatgatgagagaagcctttgggagctagcatgagccaagggtctctccaatttggctgctccattgtcggtagcctgaagactcttcctcatggatttgtttctttatgcttgtttctggcctccgtaaggagcgtctttttgtatttgtattttggtcttctactgacctttttttcatcttaatataatttaaggcgcagttcccctgcgctttcgagaaaaaaaataatacattgatatatagggggggggttgaccattgcaatttttgaagttttgagatctgccgttacaactcacatattctgaaacttgctattataattcttcgttttcatgatccttgtcattttctctctcctgaatgcatgagaccacactcaggccattgtacgcgtatgcatctttcgtatggaccaaagcacccttgctgcttctctctccctccactcgctggcatgtgggccccacaagttagcttctcctccaatctccagtcattctcatgaagcgggtgcagtacgtggttgtgcccggctaggaggtatgtccagtccccgcccctgtgggaactctgcccaggacgtgcc

SEQ ID NO: 5611 - DNA, 694 bp, Zea mays
atctgaacgctgccctcccctgctccccgagcgcggcgaggatcgccgctccacggacgcaagaacaagtgcccttgatcttttccccccatttgattgattcatccagtgctgctggtactggtacccagcaacagttttcggtaggaaactactatggcaacttctccaggcaagttcgtttcgttcaaccagagaggattcaaatggttttcatccatccttctttcgtagggagtggaatcccgcttgggaaagtctctcgtccaagtggcatctgatccttgttcctgctctgctttcctctgcttcaggtacatacagatggtgctagtgagggagaggtccgcgagccgtcgccgccatttcggaccaaccaaggcggcgctagtatgcttctgcttgctttccttctacctggacactactgcaatgccgtcaacgtcattgtaaaccgtcagtgctagccacatggtaacgctagactgcgaaagttgcgatctttttctcgcatctcctcggcaacttgccaatttggtcagcatcgtcatcaccaccaccatcagcggcgcagctgaactgacgatgctttgcccgagatccggatgctcatccagatcgagacgccattcatctccccccaccgccgtgcggatgcggtggcttctcctcttggcgttcgcccgccgccccc

SEQ ID NO: 5612 - DNA, 531 bp, Zea mays
ttcgggtcgagcagccggctctcctgcttgccggcgcctcccctcctcgccgcctgatccgaattacccacgccgccggagttgttcaggaacaagctctcaattgccgcctcgtcgacgctgcaccaataaccacgcagtttcctgctcagtgcagaacgatggagtgttgtggaaacatatggatgggagaggcgagagggtcgcaccggaacgagtcggaattgttgacctggtcccagacggtggtgcggccggagatggcgcggagcttgtcccagtgcagcggtttcaggctcggtggcttcggcggccgcgttctcccgctgtggccatccgggttctcacctcccctgtcctgaccagagggttcaggggaattggttagcgccaaactggcgaggacggccgggggtggggactcctcgggcatcggccgcagcagcctttgcctcggcggcggcgggggccggcggcggacgaccaggtcggggggcgttagcttgcggcggcagcggcgtgggcgtggac

SEQ ID NO: 5613 - DNA, 810 bp, Zea mays
aaactgaagacttctgtatacgtcttcgcgctcgtcgttgctgttttcatgtacattgtcgttcacatcttgctgtccttcgacaaaatggcacgggtcatgaagaggactggagaacagtgggttccatgtctgaagaagatgtgggcactcattgaaactgaacctccaaaccatcagccatcttcagaggaaccatgagaggctgacccttggctgtatgcttgtattgtgattacatgaattgttcaattgatatgtacctaagtaccttagaatcaatatttgttttccccacttgtttaaggttgaagtgttgtaatctttttatgcacttacagataagatgcattcatccaagagggttagcttcaagtacttcgttcttggttttaactttctcagtatattggacggccggaactacttatttgtagctacctctagcagtctttctctttattctgtaaatagtgcagtctaaagtgtataatagtacaaaatagtgttttctatggtcatatacacgatctactggccacaacctaaggtgggcaagttccgtttgaagaaaaggggagccgtttgagatgacaatatgatctgaattttacactatagagtttaatgattagatcgtggtaggatcgcgctttatttctatttcatttttaactaaaacttatttaaggttctaaaaaaattgggaaaaaaacattttgaattgcaatccattaatgggccggtttgttttcacgtcgggaacccaagttgaccagcctcttggcccttgtaaaactttttttttcg

SEQ ID NO: 5614 - DNA, 1333 bp, Zea mays
agcagcaccaggaactgtagtaatcaagcagccacagcttcagccgcttctaaaaacggcagccgagcaggggtataccacagcacattccagacgcaaactgaaaccgaaatatggtgatacaatcttttttcaaatgtctttttgagtgagagtaaggtgacgttgaaaacctgggcggcaaacagttgctttttgggtacaagttcttgcctctcccatgagatagggagaaaaaaaaactccggcttctatagaacggttgttaggctcagtaccgcatcgagttgcatgtatttctctatttgcatatagcagattttctcgtgatatgtgcgacgtacggctgtacgtgctgttaactcttacaaggaacaatggccaaggaagcgccaaaattactctggatttaataaccagctatttcagatgtgcatacagtacaagttacatgatgaacacagccactactaggggtggatatcgagccagctcggctcgttatggctcggctcattatagctcgttactgtaacgagccagctcggctcggctcgttatactaataagctaaacatctagctcggctcggctcgttagaaagctcgagccagctcgttaggctcgcgagccacacaactaaatataaagatctatgtacataaatatatgtataattgaaaaatcatattttgagtgtttaacgctacaaacatgtagtcatgcaataatacaaatatctaagcacattacacatccacacatgtccatatcacagatcataacaacgagaaaacaagactatgagagatgagacaacaccaattactagacaaacttgtgttgtggcttagctcgtttggctcgcgagctagctcacgagctaacccgagctggctcattagagaaccgagctagaatgctagcttggctcgctacaaaattaaaacgagccgagtcgagccgagctactaacgagccgagtcgagcgagttatcgagccacgagtatttcgtccagccctatactcagcaaacgacgcccgctcttctttatgacgccgctgctccgacatcctcctcgccgttcccgcctcctgcgcttgctgagactgcggctgcgcgggagggcggagggcaagcgcagtatccatgggcacacggaccgtcggcgtcgacgtctctcccggcgctgggtatagcgcactggtcgtccgcggagatatcggtgtcatcaattcctcggggctcccgtagatcagcgggagaggcggcgtcctcgaggacgagggggagttggcgccaccgtagatgaggcgcctgcacacggcctg

SEQ ID NO: 5615 - DNA, 763 bp, Zea mays
atcatcaggattctccaataccgccacgacagctgccgccgccccatcggcctcctcctcccgccggttcgacccgccgccaccgtcgtcgtcgtcctcctcgagccatcaccaccaccaccaccgccgctgagaatcgaagaagccacactgtaaatctgccgggaagcggctggtggcatccggcccgctcctccctccgggcgccgcaacttttttcgatcggttttgcgccgcccgggacgggttgtagttgatcgattggattcttcataactgtatttgcgtactgcttacactacccaagtgaaatcgaaaatggcgccttctctcgttgaataaattgcacgtacgctactcgatccgctgcggctcttgctggagtggccgccgccgctatagatagaaggatcaagccaaggaatctgtcatgcatggccatgtgaaggaggagcctcctgcaatgtttagtcttttttggtcgacgcccaccagagatatacgcactagattttcatatagctgagctagatcgatcgattccgttgcatgcatgctccatgccgtcgagattcgagctagcaccgcctgttcatcatcgaccgatccattctgatcgattcccctctcgagctttcacgaactgaacctacctagtgagggtgacgcctaacgcctagtgcgcgctgcgtgggtctccgatgtcagtggccgcacgcgcgcgcgcgttctcgagatcgcatgtgcttatagcgcagcaggt

SEQ ID NO: 5616 - DNA, 735 bp, Zea mays
aaggcaacagaggctggagcgacgcaatcgagctcatcgttcttgaaggagtttgggctcgcttcttcgtcatcatcacctcgaccaaagcagcagcaaccccatggaagggttgctgaaaccagcacggacccatggcagtacaggaacagtaatcagcaaatggagatggagcgccaccagagccatcaacggagggagatggagtccagttcgcaaccgtggcagcacccccgtagtacccagcagatggagatggagcgccaccaccagcggagtcatcaacagagggagatggagtccagtttgcaaccgtggcagcacccccgcagtacccagcagatggagatggagcgccaccaccagcggagtcatcaacagagggagatggagtccagttcgcaaccgtggcagcacccccgcagtacccagcagatggagatggagcgccaccaccagcggaaccatcggcaaagggagacggagtccagctcgcaacaatggcaccaccaccaccaccacccgaatgaccagatgatggggctggagagctaccggagtaaccagcaaatggagatggatcccagttcgcagcaacggtgggcgcagcaccagaggagcaaccagcagcagcagatggagatgatggagcggcaccacctgagtaaccagcaaatccggagtacccagcaaatggagaggagggcgatggtatccgggggtggtctgggcctt

SEQ ID NO: 5617 - DNA, 689 bp, Zea mays
aaaattagcaaaatcaataataaacaaaaattgcagggtgtcaccacagaagtaaataataatagttttaggttgactttatttcacatttcagtgcaacaattaaccaaacgttaattacacgtaatttacccattcttctgacaaatcctattaaaataactatcaccaccaaccaactattgaaacatcataaaatatctaaaatatattcctcaagtttggtggaaattttcaaaatccaagcagccatcccatatcctaaatcactgcacgtacaagtaggttttcattttcctaaaatttacatatatctactatggtctattgcaaataaacaagtttaaatttagaatcttagatataatatgtaaaaaagaaacaactaatgctcccggtgcgaagcatgcgcaggtaaaaaaaaatccagaagtcaatcaacactcacatatttggatctaagacctgatttccaaatttcaaacttggtgaagcaaaagtttgcctcacatattcttgatgactctcgttcaccagaccaatctactaggctgtactttctagctccactagtgactagcctccttatgtttattatattggcaaattgcattcgtcaacatattttccacagcaaaagaaggttctggccggagactgaattcctcatttgccatggtttgttgcaa

SEQ ID NO: 5618 - DNA, 740 bp, Zea mays
cccatactgccatgattcatttatgtccactgttagctacaatctcatggcatgtctagttgtttgcactcaatacaaaattgacttgtgccatcaattagaagcgatcttctagtgttatttttttaaattacttcacaggaaaaaatcattgaagaataaagaattgaattttgtgcccaaactcatttgtattcactgtgttctgcgtgaaagcaagaaaggcttgcttgctggatgttctttttggaagagtttgtctatggtgtgctagagttcatgtgtctaaggttagttgcttgttcaatcgtcttgtggagcactctatctgccaatcgtctttaattgcttgttcaatcatatagggcatgtttggcttgctgcctaagacaccacaacttgcataacttttctgtctaaggttagttctcaattggagcgattaaacttaggaagactgtggcaccttaggtatgaaaccaaacaggtcatcgcttctgcttagtaatgaatagaatttcaattgtgccactgttgaacgggaggtgaatccaacttttgtttgaacaccagttgtttgtggcccttgttgtctttacagcaatttagttctcatgcctccatggacatataggatgctcagaagattttaattagtttttaagcacattgcctcttactctctttgttactcttaaaacattattagcactctccaatccattctgccacttgtggtt

SEQ ID NO: 5619 - DNA, 716 bp, Zea mays
acagcgacgacccatcaaagattcttcccaggccgtacatttgctgacgcagaaattgggggaaggccaggtcagcgcccaaaaccagtgagtgtctacgacgctggcccggtggccccaggattctagaatcaaagcagctaaacctaaaattaactcaacgttacaaaactacaaccttctgccctataattctggaatcaaagcaagtaaacctaaaattcctgtggtaccatcgatcctgaaaattgcaaggttccaataccccgacgtcaagagcagcccaaggtatgctcaattcacccatagcattacagctgatctcgtaagactccagcttctacaggtttagcaatatgtccaaccaaggagtgcaggcacaatttccgaaccctgcaaaaggcaagacattagacaaagacaaacgatggaaaaattacaatgaatagcacatggggaagagaaacgtcaattcaactaaagcatctaccactgaaatcaaggccaataaatggttgacatgatatatcagcaatgtaaaccaaaaaaaaaaagacaaaccatgctcataaacgtaaggtcaacacaaccaaatttccagaattattgaagacaaaaaaaaagagaaggaactgaccaactgatcacgcgcttatgtcttgggaactgtaacattcaagatttttacatcttgatatggcttgtcattcttgtca

SEQ ID NO: 5620 - DNA, 787 bp, Zea mays
actgtgtccgtcacttgaagatggatattgccaacataccttttgagaatgtgatcgatgagcacaaaaaggataaatgtagaaaaggtagtcaacattattttgcagaattacagcatgcaggcggcaatatgatctataacattgaacacagaacattctgcataaaggccttgtttcatttcaaccatttagaaattaaggggtcagaaaagccatattttatggagatgttcttaaaagaagaatttagaactatagcagtccctagggtataagatcagagaaagaacaacttccaacacttacacgctgcggcatgtacttgaatcaaacccaggaggcaggtttccactgactatgggctctatctgcaaagacatacaagtgtaagcaaaaggttctatgaagaacagagataacatctatgatttcataacgcagttcgcatttgacttaaataaagaaaaatggagccaggcaaacagataagtgaaactatacccacaaataacccagtgaaatcataaagataagggtgcacatggatcggacacaaacggatatcgctaatattacatttgtttccagatttctattcggattcgaatatggatagtatcaactagctatgtcggataggatacaaatggatatcgacatcataaatatgtgaattatttgttctgatatgggatgccggtttcgggatgtttaaacattcaaaactcaaaattcctaacgggattttgaaccttcctataaaacagaattctattggtcaaga

SEQ ID NO: 5621 - DNA, 1407 bp, Zea mays
catgcctgcagcaggtctagaacctgtagaagatgagaacccagcacctggtatgtctggaagttcagaatcaatgttgtctcctattctctacaaaaatcagcgtcctcgtacaaggctccaagacggaactgtgcctcgaatccgatattgatgtcttactaatactggagaacctgaaggtttgtctgaagctctagctgataaaaattggagacctgctatgaaaatgctgaatttgatgctctagttaagaacaacacttggcatctagttccacaaaagggagtgaaaaatgttatagattgtaaatgggtatacaaaattaaaacaaaagcagataacacccttgataggtacaaggctagattggtagccaaaggatttaaacagcggtatggcatagattatgaagatacttttagtccggttgtcaaggcagcaactattagagtcatcttatccttagcagtatccggaggctggtcattgaggcagctagatgtacagaatgtgttccttcatggcattctagaggaggatgtttacatgaaatagccaccgggatttgaagataagttgagacaaaatcatgtttgtaaactcgataaggccatttatggactcaaacaagcaccaagggcttggtattcaagactcagtgaaaagttggtgaaactgggttttcacgcttccaaatctgatacttctctgttcttttacaacaaggcgaggcatcactatttttatgcttgtttatgtagatgacatcattgttgctagttcctctcaagaagcaatagatgcaatgctcaatgatctgagatctaattttgccttgaaagatcttggccagccacattattttcttggtatttaagttcagaaggtaaaagatggtattcatcttgctcaaatcaagtatgcttcaaatattttgaaaagaactggtatgacagcatgtaaaccggtgactacacatctctctacttctgaaaaattgagaattgatgaaggtgagttacttgggccagaggatgcaacaagatatagaagcattgttggcggtttacagtacctaaccctaactcggccagatttgagctttgcagccaataaagtgtgccagttccttcatgctccaacctcgcagcattggacagcagtgaaaagaatattgagatatgtgaaatacactcttggtcatggattaaagattgcaaggtcgtcgtctttacttgttagtgcttttgctgacgcagattgggctggtgacccagatgacaggcgatcttcagggggttttgcagtttatcttggcagtaatcttgtgccctggagtgctagaaagcagccaacggtgtcaaggtcaagtaccgaagctgaatacaaggtctattggggatg

SEQ ID NO: 5622 - DNA, 778 bp, Zea mays
tgttaatccataggactcatcaaaggctctagccttagccaaagcatccttgctgagcacgtaccccttttctagcatcgtcttcatgatatcttgagccactgtaaaagcttcctgcggagtagtgttgtactggcatgtttggtagttctgttcataaaaaaaaattatacatcagcccagcatttgggattgggagagtgaattcctcgtcagacatcaaagaggattattttgagaatttagactagtatatcttaaaatacccatgttggaatgagataagcttccttctttttttcctcagttctcatcactgtgcatctctaaagtgtgaaacccacattttaactcatcagttatgtaacagaaagattagcataaccaggtgaggtggtaagttacatggccaaaaaagttatattgtgacttatgcaaaagagcatatgtgcttatcaacagcaaggacgcactccaagcagtttaattatcatgattggtgtgatgcaaatcatgtgtgtgactagagataatttgcttcaacgccaatctaatttttttatcggccggggagggaaagactgtcctcccggtattatattaagaagagaccgaaacaatagtcccggctgagaaaatccccaaaccctggcctcccatcactaacaggcccggcgtcaaccgtccactctgcaacggccccaaccgaaaggtgggcgcacaggggcatagtaaacccgaaagcggatgtgacatagcgaagagattttttaaccaa

SEQ ID NO: 5623 - DNA, 806 bp, Zea mays
attgctcagtgtaagttgtctttttttggaaacaatgttttccacacaaattaaatgtagcacccttgatgtgcctgatacccatgatggcttcatgtcatgttctctaagtcgacttactgataaaatgattttcctataaagcaagaaagttcttgagcctctctttagtgtgtacatcattcagagcaaaaattcttttagaagaagtttctccttctaaatcgaagaggcccaaaagctttatgtacacatgcaattttacatgtgacgccctgtttacctttacccagactatctcaattcttaaatggattttgagctggtcgtatactttgccgaaccactttgtcaacaagtctcctgggtagcaagtaccttgttgacttggttgtttttgttgtgctttgacaacactttgcatctttgatagggggctactattgtggatcagccagtatgcataacctattggggacaacctgagggaacttttaatttctgggacaggccaacttgggaggttgaagaggaaatcgaatacagggtatgcatctctctgttctactaattttctgcatagttaatagcagtcaactaggacaaggaagcatttttgtacatatagttcatttctgccttgatcaaccagttttctcagtatatgacaattaattggattgacgttggcgaaagggcctctagcctagtggttaacgacttccgaatagcacctccaagtcttggattcgatccctctcggaggccaattttcaggcttggttaaaaaatcctctcgctatgtc

SEQ ID NO: 5624 - DNA, 801 bp, Zea mays
aaaataattcgttaacacacgcctgctttgcacaagcaaaaagttaaagtgggacagcagacccacttggatcacggtgcaggagtcttctgcacaaatcaatgcaatcaggacataaatcagcttcaatttctgaagggaagttaagatcatcggtagccatgacattttggtgcagctgtattcagaaaagaatgggcaacaactagttttagcaggcacatgtagccatctagttcatatgcatttgatgtgttatacaagagcaacaaacctgaaaagcattactcccggtgaatagcaacttccctgtgactagctgaaaaagaatgataccaacactccacaagtctgactgcaaattttttttccagtagagttaattacaggcttattttgaaatgaaaacctacgaatttaatgaaggaaataagccaacctttgcatcatagtccttcccttgccaaatttctggtgccatataatatggcgacccacatattgtagcagctaaattttcatgcaccagcgacctaaaatcactccaaaaatttcactatacattgctcagttacaacaagtccaggataaaacagtactaaaaaacgatagaagtcagtatgaacatatatcactgtggattggaaaggataatgacaaataggcatgcgatagtgcgggggcatactgctctaacctggcaaacccaaagtcaccaattttcaatacgatgtcatcccccgttggttgataggagaaggttctgcaagtttcatcagtattgaaacaagtatcttaaaa

SEQ ID NO: 5625 - DNA, 1769 bp, Zea mays
gcgtgcctgcagtcccaagcttcaaggttgatagtttggtttctctgcacttcacttccaattagattcatatagaaatcccagaaaacctcagccttcccatcatgggaggtgaacagctgatctccatcccgaattgcagtaataaagttcttcctcttgcgaaatcttgagcaagcatgaaataacttggtgttggcatcgccgtccttgagccaagacagccgagatctggtcctagccaccgtcctgagcagggaagcaaggaacaagcaatgtttctttaattgctgtagcagccagcgttcgagatcagagagaggtctaccatcccttgctgattctagctgcaacatcacttctctagctaactcgagctgtaacttgaagttgcccacttttttgtcactccatcgttgtagccccttggctgtagccttgaacttgagggagagagatttaagagggcaagcattaatctgtatagagtgccaagcattagaaactgcatcatgaaagccctcaaatcttgtccagaaggactcaaagtggaatctcctcttgccccgaagattatccttcaatccaagaaggagaggacaatgatcagagccctcggaagcggaacattggagtaagaaatctgggaatttctgctcccactcaacggaacagaagactctgtctagtcgtaccaacacatcatgtgcccctgaccaggtgaatttccttccatgcagatcaatgtctttgattcctaaatcctgaatacatctcctgaatctccccatcatgaatcggttgagattaggattatttttgtcttcatctctataaatcaagttgaagtctccaccaacaatccaaggtccagcacaattagctctaataaggcgcagttcttgcatgaacatgagcttcctatcattaccctggggcccgtacacacatgtaagccaccactcatcaccaatagctggacagaatttgacagagacactgaagacatcaacccgggagtcaacaatagctcccaatttggacctccacgccagcagcacaccaccactagcaccaacagaattaagagtcacgaaattgttgtcgaagtcaggaccccaataacgagagaacaagacgacggctacagctctacatcttggtttcttgtaaacaaattatgtctgcacggaccgactctactagactccttacagaatcttgcctcgcggcggagtttaatccgcggacattccagaacagaatcatggaaggatccattagtaaacacttacaagacaacacacatccaccaaattagcagaccatggtggccgctccacccaagtcatctgggactgcccaaccgaaaagtgctgcaagggcttgaatctgtgaataggaaagaggatggcagaacagcttggcataagtctccagatcctcactgttgagctgattcgtgtctgaagtattatggatagccttcatcaccaaaatcctggccctggggatctgtggaatgtgctcagcgcctagaccagccacccgtcgactacgacggagtccctgcgaagggatggcaggttctctcctcttcttagcttttggagtaggaagtaaacaaccaattttcttggacaccatctcaaagaactgctgtttggaaggagatacgtcctctggcgcgtcaacctgtccaactgaaacacgttgtcttcttctactataaactttaagtgatgtcccgtagacatttggatgcatta

SEQ ID NO: 5626 - DNA, 815 bp, Zea mays
  unsure (1)..(815): unsure at all n locations
gaaaaaacattacataaaaatgcatacacaaacatgtatcttgtaaccactatagttaaccacggttgatgaaaaaatagtgtacagtcaatcagctggagaaagcaaggaggttgatagttattctgatatgattgacttacatcaccagcctgtcatcagataaggatggaagaatgtgtttgacagcaatgggtgttcctcgccaatttgctttcagaatttcaccgaaagagccttgttgtaggtagcaggtttggccaactttaagataatccaatacaaaactaaaagtgaagtacagaaaatcactaaattatgctaatactttatcaaataattgtattgggtaggagatgtttcaagactttaaacctttccgataacaagtgcttttgtgaagtccagtttaagtggattaatctcccagacagtcttatttctgaatcgtctttggttcaaaatggcttccagttttcccctacacggtaaaaagggggaataaaatccaaggagatgggaatggtcatatgatgcatcaacctacaaaatcatatcatatttacaaccgccagtttagaaactagtccagtagcatgattaatcaccaagccctccccacctaatgctttgccaaagaaagaaagcacagctctgcttccgataaaaatatttggaaccgtgcatcctgcatatttatttagaaaccattgcatccgataaacaggttgcaggagcaaatattacagggggtacctcacccaacctaaaattccatacccataacaagtgaaccaggntggaaaaattgggaa

SEQ ID NO: 5627 - DNA, 768 bp, Zea mays
tagtaggttggtgccagactcttgaacagattcaactctagttgcttgggtctactgcatcagctttgaagccacagaagttttctcaagagcccaggagtgctgttctgctctcttagctggcctcaatggccatgtcgccatccaatccaatgcgcaagtactcatggtggtgggatagtcacatatcccccaagaactccaaatggctccaggagaatctcaccggtaaactttcttggttcactatggtgatttcactcagtctagaaactggagtgattatagccactgccagaaattagtaagatgtacatgccactatgtacttaagtgtcaactttatgtttctattaatagtttattcagagtcatcatgccgcagatttggatataagaactctgccttacctattgtagcctcaactgttcgtgagattatcttagcaccgccttgtgatttttaagggtttaactgcaataacttaagtgtttaataaacacagttctagttggacgctcttgactctgatttattgtcgaattaaacttcttgtggaaaagacagcagatttgtagggcacaagttcataaatagcttgtggcataaacctgtaccgctcatgggttgcagctattttatgatgattggaccactaactctgttgaaacaaattcaaatcttggatgctgtgagagctaagcttactacacaaagagaaacaattagatttggtgtctggcccatgctggcggtgttcttgcacc

SEQ ID NO: 5628 - DNA, 722 bp, Zea mays
acatcacatcgcaagcagcttgcgtcaataacgagcaaatgcagcatctacagcatctagatggtcgcacttggagcctgcgaccagatcctctgccgactgaccaagcaacctacactacagtagcttagctaggacgaaagctacgagccaaccaagctgctgacctgacgcgttcccgccgtatagggtagggcgggcggtcacttttttcgcaaccaaaacctacctccgctgaccaaatctttttgcgattccacacgccatcgcagcacgtgatgtgattgatagcctttcgtctgtcggtgatacatgtacatgtactgtttggtggtgttgaacacaattgaaacaagcgtacaagccacgcttcgctagtgtggcgtgtggtacgttgagctgatcatcgatcacccgccgccgccgccgccgccatggctgctagactagagtactagactgtggatcgaagcagacagtacagtagggtacctgcgcagggaagcgcgactcgccggggcacttcttgtcctcccacgccgtcgggtcgatgttggtcccgccgaagctcgcggcctggcgatcggaggatcggaaccgggttcccgtgagtacagcgaacgaagaagaagcaaggaaagggaaccacaaccacgaacagtggctactgtgctgtactgtacctaacagatgccgtggagcctgtgcgtggagtagtcgaa

SEQ ID NO: 5629 - DNA, 823 bp, Zea mays
atgtagcattgatgcagttggtcgttcatgatgaaacaaaaaaaagcaatcattttgctttcttatgcttacaaagtccaactaagcacaaaactctgaactctggttttactttactggtgctaatggacaaattatgactgggatagtaggctgaaattcaatttctaaattgttcaaaaattcagctcctacttttgcagacgacatattaacctttataagctagaagtgattatgatatgttacagtagtatgtgcgcacaagcttcaccataatattattcaatgcttgtaacagaaacagaagtgcaggcaaatacagttgcattgtgaggagcattgcaaaatcaacatgcatgttgtcatgttgacatacacagggatgatataacaattacacacaaatcaagcccgaagcaaacaacaaggcccaccaggaccaaccaaggattaggttatataaccagaatgtatctgatctatgttttcattttggttgtatttgcaagccataatgatcaactttggttgttgttggtcaattcatccagatcgtatggccagaaaattgtaggtttgtttaaaggttgatttcttatctattgagcagtttaagtagaaatggtgcaagccatcatgttatcaaacacatgcagcatgctactttgtcatggcggaatgcagcatgttacttctggtgtacatgtgttcaaaccgacaaaaaaatgcaagttgtgagaaccaaacaagccagccaagggccaagggccttaaattgggttaataaaagtgaatcccctggatttaagaagggtttttc

SEQ ID NO: 5630 - DNA, 676 bp, Zea mays
tacgtacaaaaagaaacaaatagaagaagaagggaaaaaacgacgtagaatgcagtaaattaaagcattacatactacatagcaaggcaaacgacaacgtaagattctcctaccacacccctgcactgcaccctgcatgcacacagccagcgtgcaagacatcaaaagccaaagggcggcaagggcaagatgctgccgccgagcccagacgccaccgacgaccggcgcatcctccgcttcctaagcttctcggcgagtatgaaggcgagctccagggactgggacgcgttcagcctggggtcgcattgcgtgtggtagcggtctctcaggttgtcgaaggtgacgttgcttgacccgcccgtgcattcggtcacgttctgaccggtcatctcaaggtggacacctccaggctggcttccctcttggtcgtgcacatcgaagaaggcccgtacctcggcctgtaaatatatatatgcatgcatggtgtatcacattcatattggtttgaggagtacgacgtcgacagaagaagaaagaagaagaaccagaatggagtcaaatggccgagtctttcgtccgcaaggagtcttgatggtgttcccgtgcatcgggtcagtgatccaggtgacactctgtccagcctggcggaccgcgcggataaggtgaggtaacttga

SEQ ID NO: 5631 - DNA, 546 bp, Zea mays
ctggcgttccggaacgaggccgacggcgacgtccggtacgcggtgctggaggcgtccacggtgtccggcgtgctgcacgccagcctgtacctggacgccgtcgtgctgccctactacacggggctggaggcgctccggtggtcccgcttctccggggagtgcgcgtcgtgcctgtgccggatggagccgctgctcgtgggcggctcggcggtgcggtaccgcggcctctccaagacggcgctggcggtcatcttcgcgctctgctcgcggatggtgtgccgcatctacggcgaggagcgcctcagcgcgtggacgcggtccgcgctggaggccgcgggctgggtgctcgtggccgccgacgccgtgtacctcgtcggctgggtcgccgcggagggcggcggcgtcggcgtcgcggcctacagcctggtcgccgggctcgtgttcctcagcgtcttcggcaaggcgtaccggttcctggcgtgggtggaggccaggcaatcgcagtggaagtccagcctctgccatagcgccgtttgatcgacgaca

SEQ ID NO: 5632 - DNA, 753 bp, Zea mays
gacctgtctctgccgactgcggacatactaggtatgcaagacagcaacccaaggtatgcaagatcttaagcacacccacgcatacacacacctctatctatgactctctatcctggcttgggatcttgcactagtagcagttaaaatagcttacagacaactgccatggtcatgtgcacttctacagtcactgggcctccctagtggcctagtagtatacaatatctgatgaatctcgcagcaggctgtagctgtactgctctttacatgtgacatgtgcctggtaccagaatcgtggattaacctcgcatttagtataataaacctagtgggggtggggtgggttggggggcctgtcattgtagagtacatcaaggacagtgtcacagtaacatctttgtgctcatgttacctgcctgctactggtaaacattaagtacagatactattatatatatctctctctaaaaactagtggtgacactggattatttgtatatataatatatatatacttatatctggcaatactgcatatgctgccgttttcttaatcaaggctaatggcatcttcttctcttgtggtttagtagaactatcctctaaaaaaggtactagaacagaagggagctaacactatgctgacactcgactcctttttttccctatatattgcaccatcgcttctcttggcttttaggttttgtggcacaaccacatagccgtcgttcgaagaatggagaaaaaaaattg

SEQ ID NO: 5633 - DNA, 774 bp, Zea mays
tgtctgcacaatcgaaatacaaatgtaagaaacatctaaatgccacattcaattgttacataaaagcaattaatcgttgagtgatgatgtgattttatttggtagggagccagagtactacatgtgtgcatgtaaagttaaaataaataaacctgcaaagattcagtatcgaagactcaaaactcatcttcaatgttgagattcaaaacaacacaaatgtccttgtcaaaacatgatgaacagtccctgattggctactgatctattttgtttcttaacatctaggtcaaatttgaaacagaattgttgcagctatacttaaatttatgtgccaatcatccggtccaaccatgagggatgccggtctgcgaacacccccaagagcaaaaaagtaatgttcagaatatcaatacccaagccgaggttaaattgagccctactacatgagtgatgtggcaacaagacttccatcaattcaccaggatggatgcagaattcagaaaaggtcaatatgatggatgtatttcagaaatccttgttcttgaaacaaaaaggctttgtgatgtgttgtcttcttcgtggtgtgcgcaagggagaatgcagcagcagcgaggattggggaagagagcacagggcatacggaggacgattaccgccggccagattgccgaaggtaatcgccccagaacagggagacttatttttttctcgaaaacgcgcaggagaactgtgcccctttatatattaagaagatagaataaaaaggtctaaaat

SEQ ID NO: 5634 - DNA, 1125 bp, Zea mays
gtgtttacctctacttccgaggaagtgggaaggaagcggagatgaggcgggaagcagcacgcagtgctgcgagggcagcattttgacgaaccgtgtatatattatatagcacggcgtgcgttttgttcatagtttgaagtgtttgtagatcaacatacatatgtagagtagtgttgccgtgttggtgtactgtaaatcttcagaatttttcttaccagtatttttagccctaatacaaataataaaattgtaatgatgatctcactcaagcttttaggaaaaaaatatatacttacgttgtcaagggttgtactcatacccactcgcaaagagtcttttttcccctaataccagcaaataataagttcttcgacatttgggaaaagaggtttcttagcctgtgttcagagttcttcaacatttgggaaaagaggaagtcgttgcggcatggatctcatctcttcatccatctggaggaaaacggtaacattcttcagaataaaactgatgatgcatttgttttcttctctgaaaagagctcagatccaaactcaagttttcagatgcaaatttgaatttacacgggcaaaaaaaataatgctccagcagcagcatcagtgctacaaacatgagtttacatttaccccatgtatttatttctacaagctcatcagtcgtcagcgcaagcaatcttgagatacttatcgagcgcttcgtccttggttatgtcagtgtagtatccctgctcaacctcaagtccctggtctcctgcaatctgttccacgacggtctgaacttgataggggctggcatgatctggatccagcaagcaccccatctcggtgcaatcattttcatggaaaaccgcagagccttgaccgtgggaaggccttccgttcgtccaatgaaaaccccggtgatccttttgacggttgcgagttctttcccaaaacggggaaattgagttttcgaccacgggtggcacccaccccgtggccctttttttcaaacaatgggccggcccattatttttaccgagaattgtggccccctcctaccctttttcctgtttttgggggatgaaatcccgaaggccccttttcccggggggttttcaaaactgac

SEQ ID NO: 5635 - DNA, 536 bp, Zea mays
ttctgtttgtttgtcgtgcatccatttgcatagttcttattctctgttattgtgcttttggcaataactcaaatacttgaatttggatcaaatttctttaagatcatttgaatctcagtagagttaacatgctctacagatgtgtggctgaacttgagagccaactctccaagcatggaactcttaaaaactctactttagttattgctgtgtgattcgattagtccattaaatcttttctatgtaccgtgcagtaattcaatcctactgctggccaaaatagtctaacactgtggtacatgtagttcctaggtgctgcgttgatggagtttatgatggatatcagaatgggttgttgttggatgtctcactgaagatgtggttgctgttatacatattaccatttcagttcgcaacgtcagcaaccgatttcagttgattaagggcactattgttggagcacaaaaatattttgtgcccaaaaacactttagttgaagagaccccttttaatttatagggcactattataaggca

SEQ ID NO: 5636 - DNA, 885 bp, Zea mays
tctctgttggccccacctccagacaccatgtctaccgtctactccccccagtcttgtacgtatatattccacgcacctggtccacggctccacgattatgaactgattaactgaagcacaggcacagctttcacttgcggttccagcgacgcggaatggaaaccgcagcagcagcaaaactgtagatacacctggtccatgcacaaccgacgtgggaagacgagctacagggaccgacaggtggacccatacgacgttcgaatccctccaaaacgggggtggccaccttgccaatataactgaccgccccccacgacgccctccgtcccacccgcttcgcttctccctcggcctcgctcgatcgctcccacgccctcgcgccccctccacaaaccaccaccacccaagaccgcagcgcagggcgcgagagggatcggcaggtcgggcaagatgagggagatcctgcacatccaaggcggccagtgcggcaaccagatcggcgccaagttctgggaggtcatctgcggcgagcacggcgtcgactccacgggatgctactcgggtgtctccccgcagcagctcgagcggatcaacgtctactacaacgaggccgggggcgggcgctacgtgccccgcgccgtgctcatggacctggagcccggcaccatggagtccatccgcgctggccccttcggcggcatcttccgccccgacaacttcgtctacggccagtccggcgccgggaacaactgggccaagggccactacaccgagggcgccgagctcatcgactccgtcctcgacgtcgtgcccaaggaggccgagaactgcgactgccttccaagtatgcacccctacgcggtaattccacgctagggctagctg

SEQ ID NO: 5637 - DNA, 857 bp, Zea mays
tgctattcctcctccctttactctgtcattcattcagtcgtctcaatttcatctcatctgattgcttcggttcgattccaaccccacggctgccgcgcaggctcatgcggagctcgacctccacacaagccccgccggagttactaccccgagttatctcgctctctttgtcaggcacttctactcgcaggtcagccgtcagatactcccccctccatttccatacctgccaacccatcctttcttttacaagtgataagcaaaccagtttgccacaaaatttaaaataaacatgccatgtatagctatcagccaatctcggagctggcgtccagttgcacaacggcgatgacctcgcctacagttttcgcgccaagaaggccgtcctgttcaaaccatataatgggttcctaggtctgaaccttaaagggcgcctacttaccgataaagagttgaagccggtaattttctcgagcaaaaatacgcttgctgtcagtccagtgtgtgtgatcttattaaccacaccacaatgttgctctcagtctcaagcctgtgccccttggtccttgcagacgaagacaactggatccgttgaactggcatggaccatacttgacttgaaacagggccaagacgtaaggctcaaagttggttacgaattgtgtgacaaggtaatcagaccatttctatttccagccgatgcaaaatgttccaccggcaagcaagccacctaaacagttgcttccttttagcgatcatggccatgcatgggtgtaaggtggggaatgaagcatgattaatcatgaacagtcacagcgttcaaaagacgcacgggctgagtgaaatatctaatcata

SEQ ID NO: 5638 - DNA, 1102 bp, Zea mays
agtagatatttttttcttcaacctgattggtacaaatgtgggcagagatagaatcattgatttagatgctcttgatattcccagtcacgatctctctgagttggatgctcctttctctgaaaaagaggtatgggacactattgtaagtctcccccctgataaggcacctggacctgatggttttactgggcgattctagtattctacagagtctgttggcacataatcaaacatgatttcatgaaagtggtgtcagcagtttgggacagaaaattcaacaactttgacaaactcaattcagcttacatcactctgatccctaaaaaggaggatgctgcccaggttaaggattttaggcctattagtttggttcatagtgttgctaagctgatcactaaaatccttgccaatcgtttggctgctaggcttcatgagatggtctctcccaatcaaagtgctttcataaaggggcgatttattcaggataatttcatgttggtacagcagacctcgcggctacttcatcatcagaaaaaggccagtcttctcttcaagttggatatcactaaggctttcgattcgatctcctggccttttctcattgatgtcatgaaacacctcggatttggtcaaatttggagggatattatttgtgggctgctctcctcttcttccactcatgtgcttcttaacggtttccccggaaagtgcattattcatcggaggggtcttaggccaggagaccctctgtctcccatgctttttattcttgccatggacattctgggtttgctatttgcttaagccgaagatgccggacttttaccaaccttggcaccatctcagagatggaccaggtccttttgatgctgccaatgtgcttattcctcaccgcggtgggatgatatcttgaagtttatgattttcattggttaggtcccccccggcttcgaatatgaaggaagaccattgtattctatcaatgcttgtggggtatccagttaccaaatgctcctgggcctcaagatatccttcaaattttgatccatctcattaagcgtctatgaccatacaccgttgatggataatcgacgaccctcac

SEQ ID NO: 5639 - DNA, 697 bp, Zea mays
gttctccctcttcgctgacatgaactctcttggcattcgccccaaggatgtcacgctggcatcagtgcttgcctgctgtgtgctgttgagtgccttgacctgcgtggtgcacagcggctacatggtcatatcgcaaagaggggctttcagtccaatgtgattctaggcacggccggcactggtcgacgtgtacgggaagtgcctctcccttacggacgcaacgcaaggcgggcatttgatgacatcctgcaacctaatgacgttttcatggaacataatcatccggaggtatcgtcttgctggtatgggcgacatggcacttcatatgtttttcatgatggtacgggctggcgttaggcggccgctggtatatactgtcgcacatgcaatgcttgcttgccgggatagctgtgcacttaaagaagggaagagcatacatagttttgtgctccggcgagtgtatgaccaccaccacatacatgcgcggagctctgttgtagacatatatgccaagtgcggcgacattgatgcagcacaaaggctcttcaacttggcgccaaagaaggatgtggtgatgtccacttcggttgtctcagggtagagttggctgcttgtgggaggatcgctgatgcaaaactggtgtttgatggcatggaacagcacaatttggtgtcctggaatgctatgttgaccggtt

SEQ ID NO: 5640 - DNA, 692 bp, Zea mays
tatctgatgccgcgagctttgccttgcagggtgggagaggacgccgccgcgcaggcgcagcagcagcagcagcacgctatgagcggcaggtgggcagcgaggccgccggcgctcttcaccgcggcgcagtacgaggagctggagcaccaggcgctcatatacaagtacctcgtcgccggcgtgcccgtcccgccggacctcctcctccccctacgccgaggcttcgtctaccaccaacccgcccgtaagcaagcacggcccccgcgccgcctccgcaccccttcacactcacacgcacgtttaaccgcttttgcactgcacaaacccggccgcccggcggcggcgtccgtgccttgatctggttgtttactcggatcgagggattcagatgtcctctccgcccgtttgttaatcggctccggtcatttcttaatctcgtcctggattcggtcacgaaaagctagaggtcaagattttgctctcgattactatatcctcgcctcatgttctaacggagtttattttattggtctgatgtgattagataggatgctagccaggctggtctccggccaaaagcggcggtttagtttattgatgattgctcctttccttgggggatttattcctgtctggttgttgggagcctaaccacgctcctattgctgctgcgggttagtaaccatctgcgc

SEQ ID NO: 5641 - DNA, 797 bp, Zea mays
cagtcttgcatgcctgcagaagcagaaccttatgaatcttcttgatcaattcattaaactagttttgtcagacagctacatataacttttgttcatatggtgactttgggtctagaccttgtagtatttcacagatggatcttaaaaatgccttgtcttggcaggttatcacattgacataccttctgccttttctgaggaaggttacccttgatagtgaaaataatgggactcagtaaacaagtctttatattgatgaagtagtgtttggtgccggctcataattggttaagttgtggtctacgaagttttgaattgccatgaaattgtatattatgtaaatgctatgattaattaccagctttaatggtaatcgactaatcgttcttttaggtattataccaaatttgtcaaatatatacgaacaaagtttttgctggtgtgtaaatgatatgatcgagacactatttatgtttcattactattctcttgtcgtggctagttgcttagtgcttactctcatttttccattttaccttgttcattcttcattcatttagtgattgctattaacctacttattattttttcttaaagacggcaaaatagtttatttaggcccatttggcaataatacttacatattgctgatacttgatttacagatatcaagaatccgcccgcagaacctactttttaaactgggcactcccaatccaaaaataaccctaccaaaaaactgtggtttttttgctttaacatttatttctggccccaatattttttaaattctaatc

SEQ ID NO: 5642 - DNA, 960 bp, Zea mays
cattcacccaccaggacttcgctgggcacaagggcaccatcaagacaggggacgtgcagtggatgacggcggggcgaggcatcgtgcactcggagatgccggcgggggacggcgtgcacaagggcttgcagctctggatcaacctctcctccaaggacaagatgatcgagccgcggtaccaggagctggagagcaaggacatcagccgcggggagagcgaggacggcggcgtggaggcccgcgtcattgccggggaggccctcggcgcggcgtcccccgtgtacacgcgcacccccaccatgtacgtggacttcaccatgcgtcccgggtctcgcctgcaccagcccgtcccggagggctggaacgccttcgtctacgtcgtcgacggcgagggcgtgttcgggcgggagacggccacggcgcactactgcctcgtcctcggccccggcgacggcgtcagcgtgtggaacaggtccaccaggccgctgaggttcgtcctcgtcgccgggcagccgctcggcgagcccgtggtgcagcacgggcccttcgtcatgaactcgcgcgcccagattcagaaggccatggaggactactactatggcaagaacggcttcgagagggccggacagtggagctcctccgcctgatcggcgaggcggggagccgatggctccaaattaatctcccgtgcaaactaaatatactttattaaatttggtagggtggctgagtttgactattttttagcaactacacttggattggtaggatgtcctctaatattggcaattggattttgttttaaaccctaaggaaaatggatagttttattataccattgtattttgaggccatgggaaaattgtatttcaagtgccatttgtgggttgacttgatgtttttcagggctaaagtgatgaattaatttaatccctttaatacattttaaccccgatatgc

SEQ ID NO: 5643 - DNA, 750 bp, Zea mays
tgattcaacctcttgcagcagatcgacatgcaggtctcacaaaacaaaactagaagcagctccatctgatccatgggattatatatctacccctaccctagctatttctgttctattgggggaaaaaattgtatatctgctaatctgcacccctagctagtgtaccccctactcagacgacatggacaagaatgatggtacccctggcctgcccctcggcgtcgcggtcgttgaaccggtccgcgcggtccactttggcgagtgcgacgtcacccacttggcagttggcacttcactttgccttgacccgtggccattgcccattgcactccttctttttcgtctttcctcgatcaatcaaatcacacgccacgctgcccgtttttttctttctttctgggcgcgagggggacgggtccgattgctgctagtgtgacgatatgtcaatatgcatctaatcgaccagacattattttctatttatttttagataaaatttatttagttccctactattctttgtgaagaatcgttaggatcacgattaattactacccctaattaaagaacaatttccatcggtctctacgcaaattctggttgcaggttgcggagatacatgaacatgatacgtatgtgatcgcgctgctgttgtaccacaagagcacgtgtcgtcgttatcgcagctccagctagtctttagtcaacgggacccaaacaacaattaaaacctcgccgaatacccactcc

SEQ ID NO: 5644 - DNA, 784 bp, Zea mays
tttgcatgcctgcagcagagcacagtagtatcatgcatgtgatcgatcctcctccttgcgccgtcagtaaaaaaaaaaggtcaatgaataatgcatccatgaacatgcatgcgacccgcctagctaggtacacgtacgtacgagtacgagtacgactcatgcatatgcatcttcttcgtgcagtgagatgacgatgcgtgtttagatttcttggatcgatcccgccggcctcctactagccacgtacggcgtgcatatgtgcatgcatgtgagacgtgacgaatgggcatctctaaagccatgcatgtagcagctccaggtcgtcacgcgcgctacactacactacacactgccacgctcacgcccgcagtaggaggcggcgtcagcatcagcactcgaccacgtacggtcgtcgtcgtttggctggcggccggccagtcgtctacacgtacggcggcgcggaccgtgtcaaatccagcacgtgtcgtctcccagctcgctctgtgctcccggccggcccgtgatgagtcgtccgtgaccatatgatacttccagcagtacgtacgtaaaaatagatatggcacgccacttcacttgctagtatgtatatgtgtacgtatgtatgtagctagtatacatatacgagtatatatacggcgatgcatgtacgtacgtacgtaccttccatcttggagatgtgctttcctgacttttcccgcgcagcccctggcaagtggaatggccacctttaataaacaaccacccttacaaacaccacaacccc

SEQ ID NO: 5645 - DNA, 913 bp, Zea mays
agtcaaataataaacagcaacaagatcctgaaacttttacaggtgccaatgccagtcctacagatgatttatgccagcttccattagataataaggattttcaggtagttaatatagaatgtggcacaccagttgaagttggtggatttggtttgtcaaaatcaatacacaataatccagtgttggtccagatgtctgtagctggatcttccgcagagttaattaataaacagcaagaaggtcctgaaacttttacaggcgccaatgccagtcatacatatgatttatgccagattccattagataataaggatgttcaagtaattgatatagaatgtggcacaccagttgaagttgatggatttgatttgtcaaagtcaaagtaagtttctttgactccaattatttcctactctatgctgaagtttttgtagtgaattttttttttggcatcatataggaattcctgatagtcctgtatgcgtctctggccttttccctgtgtgtcaagagaccagtgagatatggttcatgacagtgtttatttcgttagcacgccaatatattgtttgttttcagtgtcatgatatttctgctaaaagttaaaatttttgattcaaccaggaatgagatgatgtgctctagcatggatagcatgatggaccccggccatggaatacatacggatattcttcctggtattcaagatggatacagccttgcattttctgattttcttggttctgatataccatgctacccatcaatgcaatcagatcttcatgctggaataggtgccaacgactctgaggtgaggacgggaggctgcttggtgcttttatgtatttttttctacttgcaggcaattagtgaagtttcaggaaataattactgtttctttcttgaatatcat

SEQ ID NO: 5646 - DNA, 809 bp, Zea mays
tcgcccgtaggccgccgtgccggcagggttaatagagggatggcccatgtctgtaactgattacgctgtaatgacctgctataaccccctaggggggaatattccggggataaagtaggtaactaagggtctaattgtctttagcaaggcagggtataccctcggttacctataaatacccccgcactgtgccattgcggggacgaaaaaaaacattgttgctcaagtgaattacatctactcgcatcaaaccgctttccactctcccaccgtttgagcttgccagattgagtttgcaagttccaacacttaaaacacatttttgtcaacaaaggacaagaaaccacatttgccccactaaaaggaaaggccatctaaaacacaactgcacatttaacctttgaaacacgatccaatgataggtgccatcaacactgataagtgattttggaataaaataaattcagagctgttgatctatctgtgtctatattcatataacattgagactgcaaatttcttaagtatgcatctcaaactgggagtacacagaaaacagacaagtgggcattgagacctaaagcaggaacatattagacatagtatattaagggaacagaaagaaaatcgtcaacttaccaatatcagagagggacccatatattggatcatccatgacagcaatggcccttgaaggaaaggggaaatcattattccttgaattttgatatttcaaagaaaggaaaccagtaattttttttcttggaacacttacttaaattgccctgcaaggttgaaaaaaaaaaatc

SEQ ID NO: 5647 - DNA, 1467 bp, Zea mays
gatcctttttagtcgacctgcagcgggagattattccacttggcagcgcccggttcggtcgtccgtgcgtgccttgtggatcgtgctctgctttgtacttggcacactcttctttccttttcagtcgaaacggggaacgcctcttgggcttggctcttgcttctcccccgacgcgagcctctttgatttggcgtctctttttccttctcccccgacgaaacgggaaccctgaagtgagccggtcgggccacgggaatccgcgcgaccggacgcggcgagcgcacgctacatgattccaccacactcacacttcgtcttcatcccccggccgtggccgatatgcgctctgattggctgcgatggcgagctatgttaagttgttgtgaaccgatagatcggtctctctcgttagtctacgcttgcattgcattgcattgcatgctttgggtgggccggtatctggtactctacccgatcagattagcggcgcccgacccgaatcagatgccgtcacgaccacgctatccgacctgatcccacaccagtacaccacaccgcacgggacctcggcctccttccggggaagcgacggggcgggcggctgcgggccgttgcttgggctcaattagcctggcagaccgatgcccgtctgctcgagcttagcgacgctgcacggacgatacgggccgggcctcagtacagcacagtacagtgacagtaataatgggctgggccggccatgcgaagtcattgctggagagagaagaaccgaacggaacggaacggaacggaggaagggccgagcgggtggggtggcgtaccgggaacggagaggaaggacagcatcgcaacaataagctacgcgcggaggaggagtcagcggatcctggtgaatctttctggaagctccaaccgcgcggcccagctttcggagtggtcctatcctactccgtccggatggattggttttggttttggtttcgggcaccgatcgagctgaggcctgaggctgagctagcagcgaaagaagcgcccgcgcgatctcatcttttcgttcccgtcgcttgtggctggtcctggggtggacacgagaaagatatatagggttgttagatacatggtgacacacgaaagagagggagaagctagggggggttgcattgcattgcagctgatcgatacgtatatgcatgcctgtgctgagatcccggtgagatcttaaccgatgatgtacgtgcgtgtgttgctatactttactgtgagcagagcaggtggtggatggatggacgagtcaccatgcctgctagcttcttgatttgtcgtcagcatgcacctgcctgtgtgctatgtatatacgagacatgagctagacatccggattctccttggctggttaaaaacagaaacacccctacgcctatcctattaatcctatccatcaccagcgctgcagcgatcaagcaaact

SEQ ID NO: 5648 - DNA, 772 bp, Zea mays
gacctgcagatcctgtgtgcatccgctccaggtagtggccctttgctcggctcccttcctccttcgtccatgctttgatggttcaatccacgctaattttgagttctcgcccctgtctagcgtcaaagactagctagaacttgaatttcctgttgcatggttcatttttatctactgttaatacatcacattcttatgaagccgtacaactcttttttcctacaatggtaacctaatgattatctgagcacagtacttattactacaatggtatatatgtgctataggtatcacaagtaataccaatggtcacatcaattagaaatccttacacatatcaaactcaataacctggtgtgccctcgcccaatgtatacgagcaatgcaaaggacgagagcctaattgataagcaactaacaattatttctagagtgggatgtacgcactacatttgtagtggaaataagattagctcatgtgattccaagtatacaataaaaagaaaaggtatggagaatatcgtaggaaactgtattaaaaacatcatcgtgaacataacagtccaatgcaaagaaagaagaaccaactaaaactcaacttaatcatgcatatatatatatagttattagcacatatgtacttcactaggagttaaggagaggctcatgcatgatcaccgcctactcgtgcttagcttttgatcattaaagtatgtaattaaatatttataggaataggtatttgtctaaatgttccaggaaaaaaataaga

SEQ ID NO: 5649 - DNA, 757 bp, Zea mays
aggagcagtgacggtcctcacaaattagaggctcggggcaagatttaatatagggccttactataataatatatataatacatattggtaatgaacatttaaaagtatatcaaaaaattattcatcataagaaaaaaatacaaatatgtgattaccttaaaattatcttctaacatgtctcgaagtgaagtcattgatgatagcatcagtatcaatttcatttaataatattttctcggtgcataaaatagccaaatcatttagtctttcttgagacattttggacctcaaataatttttcagcaacttcaactttgaaaaacttctttcagctgatgcaacggtcacagaggcaagggatgtgccgtgcagactttggcaagcaaacgcgacggccgacgcgagattgccgttttgcttccgtgatctgctcctggtggtttgtgttccggaggaagcaaagcaaggcctcggcaggaaagcaagtgtctgccgattctgatgatggggcttaatctgtgttgccgatttaattgatacgtatactgatatggtgtcaggggtggggcccatcattccgggggcccggtgcgaccgccccgcccccccccccctcaaggtcgttgctgagtaggagacaaaattgatattttgaccatataagatggaccaagttcggtgtctttgtctgtgctgtgaatctgcatgatagtagtgcatgggagccacatctttgagtccatattggcttgcacat

SEQ ID NO: 5650 - DNA, 1034 bp, Zea mays
  unsure (1)..(1034): unsure at all n locations
gcgtcagcacgcgatcggctgaagatgcgccgaacgcggagagcgctccgaaaggcttcaggttttaaggaacctgattatataaacaatgaactagagaataagtttaatgaataatgctgtagacgcagcgtctgcccgttctgccgcatcgcaatcgcaagctacaaaaggcgaccgtcctccagcatttgccgtagggattttacacggcccggaccatgccatatcagacagacagtagtcagaatccaggccgtccgagctcgtgctgtcttgctctatcctttctagatcctactcaacgccgcagctctggactgggaccatcatagccacagccctgccgccgccgtcgtcttgcagcagcgaacaccagcccggggaggacaaaccggaccaccaccacacggccaggacaggcgtcgacaagtcccaatcatacacgctgccagtccttcattctgggctgccccctgcacagtgcgtgcacacacaccaacgttcagcagtagatcttgttaaacccctaaaatactaatccgtaactgcaatatctagatgatgagtagatctattgtactgagagttatagatatacatacctttattgttatttatagcggaagccattgcggtggcgtcttgcatcgaagacccacctcctcctcctcttcctcaggatgatttctattctcagggtgattaaacgatgacgaacaaaaaaaacccgagttcaatcactttgacccaaggccttttttctgtgatctcaaaatcgaaatgcagattaggagatctaggggtcttagggtgtctttgataccattgttatattttatggtgcctaggatcgattcctaaacccctaaaatataaatccataactacgatacctcgatgatgagtagatctattctactgagagatatatgtatacataccttcattgttattcatagtggtagccattgtgacgacgtcttgcagcgaaaacccacctnctcctgctactcgatgtccccgcgtgtgac

SEQ ID NO: 5651 - DNA, 752 bp, Zea mays
tgcatgcctgcagaaccctgacccgcaccctctcctcgcgcggggctcaccagctccgcgggggcttcctccgcctcccctccctcgcggcgctcccgaggctggcccacccctgccgccgccacgtctcggcgtccgctgcggcggcgcccaatggcgcctccgttgagggggagtacgactacgacctcttcaccatcggtgccgggagcggcggcgtccgcgcgtcgcgcttcgcctccgcgctctacggctcgcgcgtcgccatctgcgagatgcccttcgccacgatcgcctcggacgagctcggtggcctcggcggcacgtaagtggatgcctctcttgttcatctactgtatttggcatgtactccgtgtatttttgcttggcctgatcgtgccttcgccacatagtttgcttcagttttgcatctgccattcgcacggttggcatgaacttctcatgcagtgataacaactggagggtgattgcctagcaaactgactggtgactgcgcatttaattgacagtgttgtttggcggcgagatgtttttgttgggactacacctctgtgttactaccatgtgcattaatagtttatttgaacgcatatttggaccgagaacactaaatgcaatcgcacatcaaatggcataatattatttttatgatttttttggggctgattattgactgatgatgtcactttatgtgatggagatgttggccctgatgttacatcagtgtttga

SEQ ID NO: 5652 - DNA, 1294 bp, Zea mays
tgcatgcctgcagcagcgctgcttaataatttcataactttaaaattatgacagcagtggtaacaaacaaaaactccagaggcatctacataaaattccccacaagttttgtatacaatttataattaaattccaacatctaattagcccaaaacagtccacaagatgaaccctgtaatctgtttttctttctcttttggacagcgacatacccagattcaaacagcgatatcttttaaaatataattccaaatcaagcacataagtactcattggaaagataagacaaatccctacatgattatcatactggttaacactaattacccacgaaaaattcccagaaactgctaatactactgctgttcacccacctgaaaaatctgtttttttggacagcaacataaccggattcaaacaacgatatctcctaaattataactccgaatcgagcgcataagtacttgttggaaagataacataaagctctacatgattctcatactgatccccactaattactcccgaaaaattcccagaaactgctaatactactgctgttcatccccctgaaaatctgttttttttggacagcaacatacccggattcgaacagcgatatctcctaaaatataactccgaatcgagcgcataagtactcgttggaaaggtatgacaaagctctacatgattaacccactaatccccactaattacccacgaaaaaatcccagaaattactagaactactgctgttcgcccacccacaaaatttcaggacagcacctctaccgattcggataggtaaacatataatcaattggattacagcacaattaaacaagatacaatctcaaaattaccttgaatcctccccctttcctcccttcttcttccctccaccaaaatccaattggagacttgcaccaacgcgacgtagatccgagcgggaaaggaatgacaccttggagagaagggcttgaggagggggcggctagggtttgatgggggaggtggcgtggcggctgcaaatgggtggaggagtgagagggggcgacatccaaggctagagagaggggggcggctgcacaagagaaaggggaggggcggctagggttatggggaactagtgggccggatcaagaaccacgacccaactcgttcacacgtcaaccccaaccccgcaacgcatgagtctgaccaaaattctactgttttactggtgaatgcttccccaaaaattcccaaccccaaaagcgtaccatccgaaagaaagaagggaaaaacaaggaat

SEQ ID NO: 5653 - DNA, 851 bp, Zea mays
cattaaattattctttcaaatcgaatggtaccccaatttaggtattataaattcggtaaccctgatgggcccaaacataatcaagtatacccctctttaatcgacagacgggaataaccatcgctgttttacttgctttcaccggaagtttgagcaaatccataagtacgatccgtaagtccaccacttgtttttgacgcacaacttagtgcaccaattccacataataacgctcataaatgacgtcgcacctacgcacaatctcaaaccccgcctcgggtaacaactctccccacacccaccaaaatgcagcggcgctgcttaacaatttcataactttaaaattatgacagcagtggtaacaaacaaaaactccagaggcatctacataaaattccccacaagttttgtatacaaatgataattaaattccagtatctaattagcccaaactcgtctacaagatacaccctgcaatctgttttttttggacagcaacatacccggattcaaacagcgatatctcctaaattataactccgaatcgaacgcataagtactcgttggaaaggtatgacaaggctctacatgattctcatattgattatcaccaatttcccacgaaaaattcccagaaactgctaatactactgctgttcgcccacctgcataaatctgttttttttggacagcaacatacccggattcaaacagcaatatcttctaaaatataactccgaatcgagtgcataagtacttgttggaaaggtatgacaaagttctacatgattccccactgatccccactaattgcccatgaaaaattcccagaaatcactagaactactgtt

SEQ ID NO: 5654 - DNA, 1061 bp, Zea mays
  unsure (1)..(1061): unsure at all n locations
ttgcagaatagtccgttagaaaattgaaaaggcgtcttaggtagtgtttggatggatggatgaggaaggatgaagaaggatggggtgagattattctaacttgacccatgtttggtttagaggtccagagtcaggatcaaggaatatttttcaaaaataatgaatggaatcatccctcaaaaaataagaaaaataagggacgtgatcaactcagggttaatcctgtcctatccctcgttgacaccgaaccaaacacatccttaaaaccccgccatcacccggagaccaaccccactacaccaggaccttgggcagaccatagtatagtagcagctccgtacggcgacacccacccacccgctcccggcagcagtcgctgttggcatcgtaccacgtcctacgcgtgtgtttgttagttaacaccctgcctccgttttgcctgcgcagcaggtcacctggatggatgttttggttgcgaacctggacgtacgcatgcgtgctccagccaacgacgccaggcggccaggcccaggcaagcagaaaaacgatcgcctgcctggatgaaactgagagatgaacctgaggttgcctgagcattaatgatgaactgtgccgcttttgttctattaattagcaactgttctattaatgttttaccattttactttcggatctacactatgggttcttataacgactgattgattatctgaacgagcgcactcacgctcacggctcgcccgattcaggctgactggaaacggaggttttttttgcatatgagtggatacagctaaagggtcttaaaatgatttgttttgcctactctcgtgcaactcatgctccagatatacaggcaatcaaacaaatgctcaggtaaagtcaatgcaagtagtgacgcgagagaagacgattgcaccaactaatcaaggggnatattgaattattattggaaaatctttatttattctcatgttattgaatcaaaagtgtacaccacggtcgtagtacgcagcaaccaaacgcgtnttgattcttgcacccgccggttgccacacatg

SEQ ID NO: 5655 - DNA, 445 bp, Zea mays
tacggtctccagtctccagaatccagattcagagcttgtccctgttttctggtgtgctctgttgtactgtagcctgtaggtatgggcgtatggctgttggcctgttgctgcccatgtccatgtttgttggttttcagttttacttagatgctgaaagcctgaaaccttccagtgattatttgcttcatgttgtagtatggcactatggctgttggcctgttgctgccctgcccatgtccatgggcgtatcacgtatgactgtttgccttgttgaaagcctgaacctgaagccatgtccatgggcgtgtagttatatatatgaaggttgatcggttcctatagccctggacgatcaggatgtctgattgaccgatcagagcccggttaatcgggctggtcgtcgactaatcctgattagtcggctgatcgcccctctggcgatcag

SEQ ID NO: 5656 - DNA, 695 bp, Zea mays
  unsure (1)..(695): unsure at all n locations
gccaaggagtctgatccggtcacgagaggagggtttatgaggaccagaaccagatttggccaggtcaggtgagcagctttgtctcggtagtctgacttgactgttgtaatccatgtttgctattatcttctgttgaaataatggaacacctcccgctaggaggagagagagagagagagagagggagggtaccgaacctgggtgggaatgcaaagatatacaagtatgtgtgagaatgcgagatcgtgaaaccagatagatttgtgtgatcatatttctttcatatgtttgtaaacattacattgccatccatattctaggatggtattttttgtagcttcaatgtcattcttttgtcaatatgatcgattgtttttgtgtatgttacccccttcctcgactatatgctcccccgtgctgaattgcaacacacacacacgcacgcacactggccgcaacgattaaaaaagcaccctgcgatgcgaagcctagtcagcagttaccgcctcttgggaagctgaaatgtgcgcttcaggaagtggctggcgacctcgtcgtcgcgatggcacagcacgcgcaggatggtgtttggctcactgcggctccaccgcctggtcgtccgcggcaacggtaggcgcttgcctctcgagacccgctcgtgcactcgtacgccgngatccaaactcctcacgagc

SEQ ID NO: 5657 - DNA, 642 bp, Zea mays
tggccgcgcgcgtccgggttgtgctccgccgccgacgccgccgccggcctgtggggggcgcaggtgtgttcgccgtggtagatgacgtcgtacagagtctggtcctcgtcggtgcgctgcacctgcttcgtcgcctggcacccctgcgagtagcggtgcgagcagcggtagtatcccctgcgaggtttggcacgacggaggtcagagcgacggttccaatgatccaattccaaatcaacaatacgtgtttgagtgagatagatgtgctaaccttgggtgcttggctccgagaatctccttctggccgtacttcctccagctacggccgtcgtcgaccgggttctcgccgccggccgagctcaccctctgcctccgctgttccatcgccttcctgcgagccggccgggttcaaagagcagtaatcagcgaaagagtcagacacagttcgttcgaccggctgtgtctgtccattgccttggcttgccttgagcaatcaacgacaaagcattagcgatggatggcgaggttcacctcttcttggtgttcttgaacggcccgtcggtgacgccgctggtgggcgtggccgatagcggcgaggcgaggcccggcgtcgcccgccggagcgcttccggcgggcgccgt

SEQ ID NO: 5658 - DNA, 816 bp, Zea mays
ggtactttccactgagaaacatcgcggaaaaaggagtagtatgagatatatatcatgaaacaaacctagaaaaagacaggtgcccacaccaccagacatgcatgcaattttaaatacatttgttaatcgaataggtaccaagcatcttcgacttttttggttcagatttttgggtcccgtcccgtgcggccatgccacgacgcaccagcagcaccctgggtttcccactctgatcccgaccctctcacaaaagatataccatcagtccatcaccacttcaccagcgatctggtgcagacgtgaaatccgatctagcgagggcgagctcacccagtcaccctcaccccccccaacccaaacgaagcgtccacgaaatacagctgtgctgtccggactacgtgttcccgatccgacatggcacatcagcggccaatgactgaggccccagccgccggtattctcaccggtcagttcacttcctgttccctcggccgcctcgcccggacgcgcttcgttttttctttaaaagggcagctctggtcgagctcccccttcgtgccacactcgccatcgcggcgtccctcgagagtcgaccacctcgacggccggccaatatagcaacctatacagggcattctcatctcatggcgacgacggagacgatggagatgggcatgggcgtcgtcgtcgacggcgtaagtagcaacggatcaggcggctgcggcgggctggtggtgacggagctgagccacatcaaggagctggtgaggcaagctgaggtgcacctcggcggctccccggacctgtgcaagcacc

SEQ ID NO: 5659 - DNA, 694 bp, Zea mays
gttacaacattagcaacacataaactcaggagaatcccgaagccaaaacgcaagaaacattagtatcaactgcaagataaacacaagttagcaaaatttcaccacagctgatgagcaataagccaataacgagtaggccaccaatcatagagggaaatgaactaagaggaaagtaaagataccaaccagctcttgtctcggctctagactcgcgcaggagccgcgccccgagccgggaaatcctggggaacatcgcgtcagctgatcctgctccctacgaaccctagaacagctcacaagacaacgaatcagcgcaacagcgtgctaggcgagcaatcagcagggctcagctagtcggtgtcacaaaatgaggtgtactcaaggggaagctgggagacagaaccgatcgcaagcggcgggaatcagccgcgtgacctcctctccgcgacggagggaatgacgaggaaggcgacgagttggggtgaggctgtgagacgccgtgccgtagaggagtttggactttggacacacaagccgccgccaccgcaggaaatggaccgcatggcccattgaaggaaatatgtatataacccgaacaaagcccagcccatcaacgcccaggttataagaccctcgggagaaacccgccctaatctctttttccgtccgccgccagagcggggagcacctgcac

SEQ ID NO: 5660 - DNA, 744 bp, Zea mays
aggaggtgcagctctatcgaagatagacaccaaggcaacatatcccttagtaccatcttccaccagcattgtagtatctgatggcgcgacgggtcctcagctggaacacagtcagcaaaacaaacggacgccaagctcgactcctgaagcgctgaaaaggaaatcttgcatgaaagtttatccgctggacattgacgagggattgttccccgaggtacccgacttggcctttgagcaagagatgttggatacctacccagagctcttcgagaacatggatgtcgatgacttcttaagctgcgattttgcaatggtgaacagggacgaaccagtagatgcaacgtctgggttaccgagggacgacttggaggaaggggagattccaacattgtgaaggaagaacgtgatgcttcacaggatgttgcactcgagcggaatgagtctgtgtcgtgcttttctaggacatgtcatgcgacgtaatggtagaacactcacatgtacctagcttgtatagctgcaacttgaaactatgcagcctcttttattctttatcgttttctttagtctcgctgttgtgttatgtagctctgccagagcagcaagaaattttggggttctaattttgtaagagatgatggctgtttggggatatggatgtcgaggatttctcaagctgtgcaatgatgaattgcgatggatatctcaagtaggtaggaataccctggggaatttatgctgactgtt

SEQ ID NO: 5661 - DNA, 772 bp, Zea mays
gcctttagagaccacctgcagggcagcgcgggcgaggcggcggcgaggacgacgtgcgcggacgccatggcgagggcggcctcggagtggggctttttccaggtgaccgggcacggcgtgagccgggcgctgttggagcggctgcgggcggagcaggcgcggctgttccggctgccgttcgaaaccaaggccaaggccgggcttctcaacggctcctaccgctggggcgctcccacggccacgtcgctccgccacctctcgtggtcggaggcgttccacgtcccgctcgccagcatctccggcactgcctgcgacttcggagagctcagctccttgaggtaaattaaagcttgctgctttgcacaattgcactgcactgcacgtaattgcgtgtgggcctacctgcctgctatagctagctagctagtacccaacttgttactgtagccgttgtttacgggctagttgctagtttctatatatggggtgagggggtataaattaaacacatattattattattattattggtattatcagccgccttctcaatcatatgaccatgtaatgcctgtcaatatataacagagacgtacgctgggtatctttttagtgagccaaattaaaaggaagaagagagaaaaaaaaggtggagtcgacatgctatcacatatatgtgcatctcgtaggtcgtacgtagccgcaagcacatcggcacatgtgtgcttcggtgctccacccgtggtatatagcatgcaccttaatatcttct

SEQ ID NO: 5662 - DNA, 572 bp, Zea mays
gtcgacctgcagctcggtgtcggcctgcaccgactcgtccgacgggtagtacgtggccacgtaggcgccgcaccaccgcgtgatggccgaccagaggagcagcccgtcggtggcgtacgggtagtcctcgatgagcagccgcagaccgtgcggcttcgtcgggtcctccacggccattcctctgtgacaagggaacacacaccatgtcagcctgcggctcgtacttccgattttaatttccattccaggtgtttttgtgtaccttctgatgagatcggcggggaggccctcctggtcgagccgccagagctcccggtacgcgaacgagctcatctccatgcagtagcggccaggggtgaacccggactcgatgacgccgtcgccgttgatgaggatctgccgcgccagcgcgttgatcttgagcgtgtagcgcatgtgcggcttgagcagcttgaagatggggtgcatcgcgctcagctgccggtgcgccgcgatgatgaacggctccatgcacgcgtgcgtcctcagcctgcacacgcatgcagcgcaatgattagtcgaatccaacaacg

SEQ ID NO: 5663 - DNA, 718 bp, Zea mays
gagcggcgttccatacgggcgtggagatggcggagaagagcccgcttcgccggtggaagcgcttcttctcggcgttcggcgccatcgacgctgccattgaggccgccacacactgctcccgagacaatcaccggcaagtgaggggcgacatcgtggagatactctgtgatgtcacgggcaacgatagcgtcgagcgagcggagtggctctgccagctgctcgacgaggcgatggtggaggctctcgagacgctgagggtggtggaggcgaccccgaccctgctggcaaccaccaacgtcatcgaggccgtcggtgatctgtggagtcacgagtctgggagggtgcgcggcctcgcatgcagcatcatcgacgggtggacgacatccatcaatggtaaaatctccagatgcagagccatctttgagaaactatcgcagatagatcaagaacaagaggcagtatgcgttccggtcgacactgatcttccggttcaacgagacaagaagcaatggttgtgtgccaagaagaagatgtctcccgtcgccgtcggcgtcgccgtcggtcgcatccgcagcgagcagacaggggatgcaaagcgcaagttccctggaggctactaccgagaagaagacgaccagaagcggcgacgcaataacaatgtcgtcaggcatgtggttgaccagaggcccagaaagacgacttcgaagcgatcggagag

SEQ ID NO: 5664 - DNA, 726 bp, Zea mays
aagagacacaatcaatttaacaaaaatgacagttatgctagatgtattatacatggaaataaagtaatgaacatctactaaattatttatcccctcaatagtcaatacaaaataaaattataaaattatcttcaagcattcgactaaacggcatatcctatggcattttgcatatctaaattaccaaatagaatgacagttgttcacttttcttacttatatttaataaagatcagctcgaaagcaacaggccaccaaataagccactctctgaaatatgaagcacagtcacaactcttatgagtgggtgtttgtttcagcttattttcatattctggccgccagaaactgatacggactaccaaacgcccgccttttcagcccacttctgtgagaatcgttttggtgaaaatcatccaaataaacataaacatagaatcggtcgagtcatcacgataggaggaatctgtcacttcctagatcctaagccctatagacctattcatcttcctccacacgtaatccccacaactcatattcaccccacaactagattcgctccacagatagattgtcagaaaagagagagagaaaattgaaccaaacaccccctgaaactgctggaggaagaatccaaatgctaatagatgagaattttcttctaggtagcaaaatgttctaaaaggcaacagcagtgacaatatactagcattctagacccaaacg

SEQ ID NO: 5665 - DNA, 753 bp, Zea mays
  unsure (1)..(753): unsure at all n locations
accaccagcagcagagccagctaaaagatcaacgacaggccctgtacctattgatgaagcagaattattcaatatccagcacctatactgctcatatgtcatgtaatgcaatgctgcatatggaacaatccgaagcacgcttgcaccgttccctctgcatggccaataacagtggattgagatcaatatacttaattcagcagtaaaaaagcctgaggcatttctgccatgctactcacttgtagaagcctcgaattccctcgtattgccacagcttcctcaaggactggaggatcccgagggactggaaaccttcagttcttgtctacatagcaaatagcaaatgtgcagcaagtgagctaaacattatcataaattcataaccaccacaaatactgaaaatgatagaatgggaagttcggaacctgcaataagatcttgaccctctccagtggtgctaccgcagtctttgcaaatgcaccagcagcgccgccggcgataagctccttggcatagaccgggagcaagtccaaagcggaagcattaacttgtgcagccgctgaggccgacgtgaaggtggattcttgtgaggaactcatctccccaacggccgangataatcaagaattgtgatatgtgcactccccaccagtactgaatactgatatgaacattcaactaaacttaaggccaagaaatatgttttgcacagaaccggaaatattccccaagaatattgttccccaaaaaccg

SEQ ID NO: 5666 - DNA, 693 bp, Zea mays
agacctaccgccaatcgtgtgacgccaccaccgctctctgactcttcctccacgaaccacatcaaaactgatcaactctctccctctgcttcccgctagagcaaacgccacgagagtcgcgattcttccaccacttccacgggaccggtcggatccaatctgctgccgcccagccaccgccaccgccgccaccgccggctcctctataggggtcttccctcctcttcgcccttcgcaacccgcaagttccgagcgattgatgagtatttttctccccgtcccttggagcgactcggtggatgcgagggacctgtccgcgctcgacccgccttcgcccctatctcgccgcccggcgggcaggctcctgctctcgccttccgttcccggagctagccgcaggcccatgggctagtgggtcgtcgttcgccctcctgcgatcgcgagcggagaggcggcctgcgggatccgcccgtctccaatccaaataactcctctccttggacgatttcggagttactggcctgcctgaaaatcgattcctgctaacgccagtattgtgcttttcagtaacaagagtgtacagttgttgcttcttgggatgtgaatcctgtcttgggtggggatccagctcacgctagatttccccccttttgcctttcacttttttcactcgggagggaaaggttgggttcc

SEQ ID NO: 5667 - DNA, 751 bp, Zea mays
ggaaaattgcggctttaatggaacatacacaggactctgtagaaccgcgatagaagaagccaacaatgagaagggcctcatcgatgaatccaacatctatgcaccgttctgctggaatgcttctgatccccaaaagcagcatgcctcggtataaatgttctcacagattttaaacaagttcaacatctccataactcacagtatagtgttgcaggtaaccaacaatgacccctgtgccagttactatatgcggtcatatctgaaccgccaagaggtgcagagagcacttcatgctaacaccacaagattgaagcaaccatggtcggattgcaggtgaaacaaacgtagctgatgttcttgcaagtatttcttaataaaactcagccttaaatcagttaaccaagttatgtattctttctgagcaccagtaatatcatttctcccgaaaattggaaagatgcccaagtctctatgctaccatctattcagcaattaatttcaagtggagttagcacatggctgtataggtaaatccacaagcattaaagtttaagcatggatttatgcctcatcaaagaagagttatctccctgttattagtgaatggctaagttccatcttgtttgtcttcttagcttccctttttgtttgctttttttccttttctgggtttcttctctgctttgttcctgttcctgttctttatatatataaactggaaatgaccaagtctctatgtttccatctattc

SEQ ID NO: 5668 - DNA, 732 bp, Zea mays
cgagcatcgggtaggagctgagcgacaggtcgttgagcgggtcgaagcagccctgcgttcccagctgcttcagccggcgcagcctctgcgacgggatgcaccccagcggcgggatgctgatgacgctgaacttcctcgcgcccatttcgtacagcgactgcgtgcaggtttgtgaaagtgcagaagcagaatttattctagccggcctgaggaggatctggcgattgatgacgagtgcggcttgtagtgagcagtacgtagtacgcaccatgatgtagtgcttgtaggcatcgaccagggcacccaagaacgcttcgtcgtcgtcgtcgtcggcacgggacgacgcggagtactcgaacatgtcgttgctgccggtgctgatgaaaaagatggacttgcggaggagagcggcggtcttcctctgacccgagagcttgaccatgcggtcaacaacccccgagaagtgctccagctggacggacatggggatcacctcgccaaactgcacaaaacacgtacgcgacgcgcgagggtttttttccccccagagacatggattagcttagctagcttcgttctgtggtcaagcgaggacgagtgcaatgcaatgcgtgcgtgtgtaccagtactctgccggtcgagtccatgagcccggaccctgccgacgcgaagctgatgcccttgcacatgtgagaccggatgcccttctccgacagggaagagtaagccggc

SEQ ID NO: 5669 - DNA, 817 bp, Zea mays
ttttgcatacttgcagacatttgtagtagtagtttttagccatgtttagtttcgttgtcttaattgtcatgtctatctcgagctttggatatcgaccaactgaagtccttgtatcctcactttgcaaattgtattgtacccataatagtctctaatttagggcatcaagatcaatgctttagttaattgtgtgtggaagtaagcattatgtggaggttttctctggtggagggcattaaccagcacattttggataatgagataactgtgaattttctgtatggcatctattctaagtcaacttttatggagtactcatattacgtatccaaagtcttacaatttacaatcaagaacagattcaaggaactaaattctttagtgtatcttcattactctctacctctagtggtctgcgccaaagcaaattttattgtttgtggccttcttgctcaccatgaatgtttactgaactttgcttttagttcatgttgtattttcttgtcaagtgctagcttgcatgtagtatttcttcagaaagagtggtgtgcaggctggttgtgcttaactttctctatggcatttggttgcacttaactttctttatggtatttggttgcttttgttccgtgtgctagaataaagaagctatcctagagctaggaccattcattggtgatgcggttgtgtcagaaatggtttaaaaaggttctgataattgctaaatgccattgaccagatacctacccagaatccatatttacaagttgttccaggcggtttaaaatctttgtttaccaaatccaaaatcaaattt

SEQ ID NO: 5670 - DNA, 497 bp, Zea mays
cttgcatgcctgcagtaatcctggtagcctggtggctttggaacacgggaactggtgtgtctttgatggggctactccaaacattaacaaaattatccagaacatcaaggatgatgctaggctctggggactagcaggggctgtgggtctgagaaaaatatggccctgctagtgctggtttaagaggggcggggggacaggtcattattttcttttattcatgtaatagtcctctaagtttctaccaaactgcctttttggcagtttttgtacaggtcatcattgaagcttttttctattcttcttaatataatgatgagtagttctcctaagtgttcgaggaaaaaaatagctgtgattttggggacctggaccttatggaatcatatgaacaaataatttttttatggtgtcttcccctccctacaggtagcatatcaattcttcaaggagttgagactttggggtcttctggagccaaaaagctccaagaactg

SEQ ID NO: 5671 - DNA, 657 bp, Zea mays
ccgccgccgcaagctcatctttgtctcatccgctcctccgccgtcttcttcgtcttcacggcctccgaagccgacgtcgaacccggaaccaccaaagcccacacatgaggcccgcaaccggaacccggatggatccaccgaggcagggttccccacaaccaagccccggaagccacgccgtgggcgccgcagcgagtcggcggccgtggaggacttcgtccgcaaccgccttgagcaggtctttgcctccatccaggagcgcaaccccgacgtcctcgagggcaaaggcgacatcctgaagccgaaggccgatgtggagcgattaccagacgacgagggagagggagaaggaggagaacagaagcccgtggtggaagaggaggacccgagctggccgctggatgccgatgtcggatgggggatccgggcctcagagtacttcgacaagcactcgatcagaaatgtcacagtggacggggtggagatcgattgggaaggggacgtcgacgaggggtgggtcaaggaaatcaattgcttggagtgggagagcttcgcattccaccccagccccttagtcgtcctagtcttcgagcgctacaacaggtaaggaccatccattccctgtctagttttgatttgtaaactgttggcattatg

SEQ ID NO: 5672 - DNA, 764 bp, Zea mays
ttaagtatcaaaacattttttttcatttggaaaatatagaaaaaaaaacataacttaatggcaaggaacataataacaataataatggtgatacaggatacagaaataagcacatggagcaataaatctgcacgagcgattattaaaataggagtaccgtttatcagcgctttagccaaaggaatgcaaagcaaagtgaagggaacctcacagaattgcctcttatgcactgcatggctcggaagcgagctggctgcccttggtgaaaatgccataagatattctgcttgtgagatcttgttgcatgacatagcaagtcaccttcatccaggaaatgagcttgacgaaagggttctagcatgcatgtgtctctataattacacctctggaaaaggtaaatagtacatcatcattatcttctatccagttacaattaaatgattttgttatttactaaaatccaatatgtattttgcacatcttaaagacttatacaattgaatggttttgttatttactaacatccaagctaaagctgaaagaaagctccaagcagtataatttatacaaagttgccatggtccaaaaaaaattataaaaagttaccattttttaacaacaggaaagcaaatgttgatgagcttgccagaaggttcccgagaatctcttaggaggctttcatcgttcacatggatggctgaagagttacttaagttacaaattatttcttttcagcaaccagtgagtatgttggaattgactct

SEQ ID NO: 5673 - DNA, 1558 bp, Zea mays
ctatcagttgtccaacatttatttctaattgccaacaaaagaaaaaaattgcatttgggtggagcccaagtcttccataacctcttccatggttcgaaagtaattgaacccatgaagaaggccctataacacgacttcgaagagaactgaccagaggaagaatgaatccacacatgtcgatcaacctcctgagtgagcaccactccccttaatgcatcccaaaggttaagatattgttgcagcccaggcaaattaagaggggtctcaatgtcactgatccactgccagttttgaagagcatgggccaccgttctagaagaaatagctcgtttcccaacattagccacaacagcaggggcaaaatcttggatacaagacccatccaaccaccgatctgtccaaaataatgtattatacccattaccaaccagggtaacaatagaagaagtaaagaatctcttgacaagttgttgaataggaaattccaaaccagaccatggtttgttaggatctgtttttttgcaaccataaccatttagcttgcagcgcccaactttggtacagcagattagaaatcccaagcccaccgaggtataaaggccttgtgacaatgtcccacgaaacaaggcaactaccaccatttacctcctttcttctttccaaataaatcctctccgaatcttatctatggaattgatcacccacttggggattttcatagcaatgagaagatagaccgggatggctgaaagcacaaagcgcaccatagctgtcctgccagcaagactaagcaaccgagccttccaattaggaagtcggtccgcaactttgtcaacccaaaccatgagatcagattttctgagcttcgtgtctaaaattggcagccccaaataagtgcatggaaaagtggatgaagtgcactaaagaacattgcagcccatctgcatcgcctgatcattacacctgattggaataacgaaacttttttgcaaattagagaccaatcccgtggctgaaccaatggaggtccacttagacgcttaccattatgtttggcatgccaattggagactattgtaagccactccgcacctgaactcgtgatctactaagctcaccatcacaagatgtgataatttgctggacatgcatctctaaatgtccaccccaaatatttgtgatatattctatgggtttgtaggtccaagcatgcttttatgtttccactaatctaaatttgtatctacttctaattatatactccctccgtctcaggatataaggcgtaaccactttttattcttgtcccacaatataaggcgtgctctctctatgcatacgtatatcgatgcagtggtatagagacaattaaatgcatttcttggtctttgaaccagaggtggttacgccttatatactgggacggagggagtactgatttcatagagttaaactgcttgagaaggtattggaatctaatttgcacctctcgattatgtgtgtccttggtctaacatgtatctctcgtcatatatataaactgcaggttgatttaaag

SEQ ID NO: 5674 - DNA, 785 bp, Zea mays
tgcctgcagccaactacacccacgggcgatgctttgtgcgtccatccggtacagaagatgtggtacgggtgtacgcagaggcatctacgcaggtagaagctgacggtctcgcaaaatccgtggcacaccatgtggaacgcctccttggataacaatttgcagccttgtttgcgactattgagtagactacatcctctaatttcatttctcttacattttgacctgtaacttatacaaaacgtgagtccaattttttgaattttgtgattgatatgcgctgaacagagatcttgtatcgagacatgatacaagatatttgaacgggtgtaaatcattccgtcgcaatactcattcttcttgattggttgcactcattgtcatactgtgcagttccttgtttgttgataaattttgaattttgtgattgatatgtgcatcactgatcactctcccctgcatgatgacttgatgagatcatatactgtgcagttccttgttcgttgctaaaagttccccgtcactctatcccatctcctattttatctcatattttaatttttattccgcaaatagttttaaacaatatcatctacagtatcatatcatttattttacatgatccatcgaagacagcccataacaacaccatcctaagtctagactaggctcaccatgaattagaaaacaaaatagaggacatatctggtgcacatggaagcttagtgtacatgatgcacatattaaatcattatcatccatcttagatttaacatctatggttgatt

SEQ ID NO: 5675 - DNA, 836 bp, Zea mays
  unsure (1)..(836): unsure at all n locations
aggacaacagtgactaggcaggtacctgtctgcggtccagcaaaaaaaaaatgacatgcgaaagaaaccaaactttggtttatctctctctctctctctctctagctgaacttgtacagatctaaagaagcggtgaaaattccttcagcgccattgatttatatatactcttctgttttgtggaatggaagattatatagacttccttcattgtcgtcggtttgtaatttgggttcattattattattgtcgctttgccacgcatgaacaccgttaaatctcacttagcaagaaaatgcaaatgcaaacaccttctctgtgcgtagaaaacaaatgtggggtcacatttaaccatatatcttgtcaccagccaatagctcaaaccttaacagaagcagcgcaagcatccgcagcgacggtggtggtctgggcgaaacaaattgatctgcacagcccactggcgcagcccaacccattggtcggccagggcccaggggcgctgcggtggctgagggccaaacggcacgcacgggcgaggcggccagcggtggtgacgagcttgcaagtacggctgggcggggcttgnccctcaacgggctgtgggcggcgcgcgggcccgcgaagcacaagttcagctgaagcgggcctttacggtggcgggcgaccgggggccggcacccaaaccaacattccggacgggcgttcccacctttcttcttgggattgcccgggaccgaatcctttttaccggtttaccggggcttttctttccttttggaacaggggggaatttccaagggggtggaaatttggaacgcctctcttttaaccttttc

SEQ ID NO: 5676 - DNA, 715 bp, Zea mays
cccacgcaggcaggggtcggcgccgcggggtttgcccagatcccccgctcggggtcgacctcacgcctctccacggccacccagctccagcagtacgcggctaggatgtacggcgggcagatgagcttctcgggtggcggagggctcgtgggccagcagcagctggcggggcgcgcccccatgcttgggcagggccagctggggatgctgcaaggccagggtaacgcggcatctgcggcacattttgggcttcagtcgcagatgttggcgcaggtgaattactcaatttggaggctcgggacctctccaattaaacatatttttatctcctcgtacatagtgttcaccattaccgccaaggataaaacgtcaggggttttaggcttctgctttaggtttctcatgctatcgaagcaatctcagggtatgtttggttcagcttgatgaagaaagtcaaattcactgtaaaaaatctagaatccctaccaagaggtatagaagatgaatagattctgaaaaatctatagatttatctagttcaatccagaatctccttctacctagattttttagattcatgtcatccaatttttcaaaaatattacctaattgtccctatttataggaccaaattattatattttctattcaaaggcccctgacggcctcacctcacctgacgaccgacaacatatagagttgccactgcctccct

SEQ ID NO: 5677 - DNA, 745 bp, Zea mays
atgatattcaatcattagcaacaaagtgatcatggcaaggaaaagacagatatgtaagagagcagaggcaacaacatcaaaacaagtgattatcatagcaaggaaaaggcagtaaaggatttattaggcgctcatgatcatattacaaattaatgcaactcaatgcattcatcgagtaattaataactcctataacagtaattcactatcaacattatcgaacattgtatgcataaaggataacgtggaaaacagctaaagaacaccaagttaaaaaaaatgaactctgtcaagcattagcagaatcgaggtacaaactacaaagaaatgaaaaccattcttggtgttactttagaaaaaatataaccattaggaatgatccagggcattttatggagtaaccaaactgagaaacttaaagcgacaaagtgaggatatttcaagaagcaatttctagtaacaaatgcttttgtctctcgtccttataacacaaaccatgccacatgactggccaagcagacagcagcaagcaacattacatccacactaaaattgtacgtgtttttagaatttaaaataatgggttgatttgatacatccagagaattcattatctaaccgtataagagaaactagtcagataaagacaaagtatatgtacaaccatttactcctatccacctatgggaaaatgagaatagtcaggattgggaaccatacactcaaagctctgctttctaaattt

SEQ ID NO: 5678 - DNA, 763 bp, Zea mays
tgcatgcctgcagcctaagtggaaggttaaatgaattctggatgttcttcatgttataactaatgtctcatttggttccgatgctcacatctggttcagtgttggaatctgggaccttccccgatcctcattgcccttgaaatctgattagcatgacttattttttgctacaatttctttggatctttttctttacatcctactagaacttgatgcacctttaattgaggtgtcagcaaatcctggggatcatttgcttgcagtgccaagttagcggtatttgtataggtaaaccctctgtgaatgaatgcagaattcaggttataggctggatgcgatttgagctttaaaagagattgctttttaacaaactgaacacctgcactcacaggtgctacataaataatatgatttcatttagtcgagtcttgtatgttctaaaatatccttaagccctgtgctagcatcttgtgtttgttctatttcaaagatggtttttactgttctttgctgtattgcttctatgcatattctttagagccgtgtgttaacttgtgctattgtgcattgcagaagctagaaaaggcgaaaaccgaagattgaaaaagaccagcaagcagttttagagagcagatgaaaggcgggcatttttgttgatgtcttatctttcgtgtcaattgtgtttttgcttgtcccgtagacctttcaggatatctggagtgtatcttcaagtatgtgatatatatatacgattcaagaacct

SEQ ID NO: 5679 - DNA, 778 bp, Zea mays
tggtgaccatgtttacttttaaccaaggttaggggcggcaaatgatttgaaatcgaggtccaagcaatagcgtacacagataaggttaggttccccctgtatttactagtcagattaaagcatccttgtggagttggggttgtgggccacaacaacccaccaatacagcagtggaaggaaggaggagcgagagcagcggtgtcgacagtaccttcatcttggatttcttggcttgcagcttcttggcctgcttctccttggcctccttctcccctgcacaccaccaaatatcgattccaaatcaaggcgacgatcgaaattggacatgcaagggaaaggaggcaatacaagatggaatcgtacgttggaggtcgaactcgtactgcttcttcctcttggcaagattgttcttcttcgacatgttccctcccttgctgtcgccgccgaccggcacgacagcagccaagggaaggaggagacgcgagcaaaccctagccaaacacaacacaagccttcctttggcagtcagtcgaagagtaagtgggtcgttaaatctgggctagtggcgtcgttgcttgtcttcaggcccaggtactgcacatctggcccataccggaatggcagttaaatctctcttgcagttttgggcttgttctcgtgtacgcacgcatactactgcatgctttcgttgttttttttttttgctcaagggaaccgaactgtagtgaaaccattgtcctgtagaatgaatatgacctacctacctacgtacctattg

SEQ ID NO: 5680 - DNA, 813 bp, Zea mays
agcggcaagatcgtggcgctgaagcgggtgcgcttcgtcaacatggacccggacagcgtgcggttcatggcgcgggagatccacatcctccggcggctggaccaccccaacgtgatcaggctggagggcatcgtcacctcgcgcctctcgcacagcctctacctcgtcttcgagtacatggagcacgacctcgccggcctcgccgcgctgtccggccagcgcttcacggagccgcaggtcaagtgcctcatgcgccagatcctcgagggcctgagccactgccacgcgcggagcgtcctgcaccgggacatcaagggctccaacctcctcatcgacgacaacggcctgctccggatcgccgacttcgggctcgccaccttcttcgaccctggcaagcggcagcccatgaccagccgcgtcgtcacgctctggtaccgcccgccggagctcctgctcggcgcaaccgagtacggcgtcgccgtagacctgtggagcaccggctgcatccttgccgagctgctcgcgggcaagcccatcatgcccggccagaccgaggttcgtccaatcgtcgtgggcgtgcgcttcgccttcttctgatttccttctcaacctgcctgaccccgacatgacatgcccacatgcacagatcgagcagctgcacaagatcttcaagctttgtggctcgccgtccgaggactactgggccaaggcgaagctaccggacgtgacgctcttcaagccgcagcggccgtaccggcgcaagatcgccgagacgttcaggacttcccgcccctcgccctgcgctcctgacac

SEQ ID NO: 5681 - DNA, 506 bp, Zea mays
tgtaatctatatagacaaaaacattatagaagtagtagaagtcggtacgaattaaagccgtttaatggctcaaaaacggacctctgtatcagccattctgtcaaaacctacaagcagcagcctgttgggatacacttcgacgtgaccaaaagcgctggtaccaggaggacactccaaggcagcctcaagggtgcggtggtgcacaccgtgtgagtccacagagtggccacccttgtggtcatgaccggcaaagcaggccttgacacagttgtactggtgaacaatagccatcacctcatcgtagttccacatcagagctgctggggaagacgccccgggatccattgggagatggctgcatatgatgacattttgatgttgcgtcgatgcgtcctggaggacatcattgagccaggacacctgctccttgccaactgcaccattgaacttcacgaaccgcctatcaacaccaaccagaccatcagggctgttcttatcagtgtttg

SEQ ID NO: 5682 - DNA, 754 bp, Zea mays
tttgcatgcctgcagcgtgccaacgtttagtttagctaggatggatggcccgcaacgcagcaactaaaacaaatcacttttcttaggggtgtttaaatgcacgataactaatagttagttgactaaaaattgttagtagaattaggtcttgtttcaatcacactagataaattttagcagcttttttttagctatttttagccatttggtgatctaaacagtatagctaatggtggtgtgataaaatttatcacatattatctcataagctgctcaaaggatgctaaaatgagctaaacgtgtgccggggaacctcattttccacctataccctctaatcccatcctctctcttcgcattaggggcatgtatgtattttttattccaatatgttaaaactttattagagtagtccaaacatcttaaggagctaaacttgagcacttcaattaatatggctaaagtttagcaggaagctaaagtttatcccgtgagattgaaacggggtcttagctagctaacaaataactacctaactattacctaatttatctaaaataactaatagctgaactattagctagagtgtttgaatgtgtcaactaattgtagtcactaaccattatctctagtgcattcaaaacacgcacgtagcgatcaagtggcagttacgctgcgaacaaaattaacctttcgtctgagacacacatgcaggcggaaaagggcaacacatgcatcacagaggaaagaagaa

SEQ ID NO: 5683 - DNA, 742 bp, Zea mays
cagcttgcatgcctgcagaacaggtaagcatgatttgcagactgctgtttgaaatttcctttttctgtttacgaaattagagaaaaggcatttgcatgttcacatatctagttatagccttttgccatttcactgataaaaatatcttattttagtagtacagcattttctataactactacagtacaccttttcagctaaacctttctcccaatttttttccctttttgccatgagagcaaaatcaagttacttggtaccgaatcaaggtagctaagcgcaccatttaatatatcattttctagtgatctatatgcatctaaaggcccattatgaaccgttctggtacacttaacacttctatcaaaacccagctgttgtacttgctatcgaacaaccacgacatcagtacctttttttaccagaaaatatgaattccagatacaggacctcaaaatcgtaagtgtggaggtgcgcaattatcaactttaaaattataggtattgaccgtacgagcaagaaatttgataggccatttgaatttccaaggcataaattgaacttgcatattccgtatcggatccgtacgcttagatggaaacaaaaaaaaacgcatgatagccgctggatatttgagctctcggtgctatggccggaatgttaggatgaaaaggtggatgaagaggatggcgcgtttgcacctcaagcctggttccgtcagggaacgactgccacgtgggga

SEQ ID NO: 5684 - DNA, 790 bp, Zea mays
tctgaaggacaaccgcaacttcccccaggcttcgctccaccggagggcgtggacgtcatcaaggacggcgaagtcatcggcgtctcagcggaagagcagctacagctgcgcgccttgcgcctcaagaaccgcaatctccagaagcaaaaagagatacttgaggccaagcgccaacgtgtgtctgcacaagccaaggtgcggcagatgatacgcgacgaagagcagaaggctcaagagctcgaacaagagatcgcgctaatgcagcacgaaggccacctcggcctgcaacacggcccacccctgcaacagcacgcacaagtcgaagacctatacttcccccagcgtggccacgccatcccacacgccgcgccattccaaggggtcaactacctcgatgagcgaagtcccctagcgccacatctgcaagtgatgccttggcccgccaacttccgggcagggacctatcccaagtacaacggcagcactgacccagcacggtacataatgagttatcaggtcgccgttgcatcttccggaggggacgacgccacaatggccaagtctttcatcatcgccctcgaaggcccagctctcacctggtacactagattgcctccgctgtccattgattcctggagaagcctccgggacaagttcctgctcaacttccaagggtaccgcctagacaccgacgccttggccgaactctcgctctgcaagcagctggaaaaggagactctgtgggagtactacccgcagtttctgaccctcaagtcacaactgccttcgg

SEQ ID NO: 5685 - DNA, 749 bp, Zea mays
ttgactatattgcactactttcacagttttaaaaacttaactccaaaaattttcaatacttgggcctagctgatgctcttagggaggtaggatagagtctgttctttattgtgctgtaatctgtagtttttgttttagttgttagtgtgtgcagtgtgtgtgtgcgtgcaggtgtccctaacctatacctctcttgtaagaccctttcttctatcttatctataaagacgtgcaagtctcatgtttctttcaaaaaaaagttttaaaaactatggtaaaaaatattgtgagtatgtcttgacatttcaaaactgaagtatttcaaaactatagctttcaaatactttgtttccaaataggacctaattgtaaattagtccggtctattggagtcttcaactatccaccagttgcaaattcaatctataagttaattgtaattttccattccaatgtattatcaattggaatacctgaatgcttttgaactgccactgtgatttggcggcagctctctcaatatcaccacaggaacaaaggatcagaaatggctatgcaggccgcaaggaggctagcgtctttgaaactccaacgacgcctactacttacctctcaagccgagttcccaagcataagcatcccaaccgcaacagcggcggcagccttcctccactcccatgccaccagcttcggaacacattgctcgaatccatttttttctgcttatatagatcctaaaatcatgtagt

SEQ ID NO: 5686 - DNA, 796 bp, Zea mays
tggcgcgctggaggaggtcgtccgccgctgcgggtgggctggacggcaagaaggcggcggcggcggcggctgagcggtccaaggccagagggagaggctggatccggagcctcactcggaggcgcgcgcacggggaccgggcgtggtaggtcgccgtcgtcggtaaggaggcccggtcggtcgggggcggggcagcccatgcatgcatgcatggtgtccgatggatggatggatctgcgagcttccccccttgctttggatggagacgtagtaattgcttgcttgtgctttgtaccaagtgagatgagtgagtgcctccttttacctactataggctactatacgtacagttaatagcagctagctgttggtgtggattgctatgcgttagtacttgttaaaagaaagaaagagatatgtatatgtatatggtgcatgcaagaccggcaaattaaataaagtaatgcaatgcaaatacagaatggaaaactaatagaaatacataaaacaaaaaaaggactgcctttttagcagagattgggacagaggtgccaccagaaagatgcatgcatatgcactggggcaacattcgtctttcacaagtgagcaggcaaggtaggcatggttccacatgagctgatccacacccaacaaacaattaattagcgggggaagggtcattgacccatatcattaccaaattaaacccacatatagttgcgcgcaatgcaattgcaacagcagagcagaagaaagtgatacgaccaaactcccagaattggatcaaccaaccaac

SEQ ID NO: 5687 - DNA, 785 bp, Zea mays
tcaagttcaacggcggtggtgagtcactgccctgtactcgctccacatctatccccttcttgggtaccgtgctttttcttattttgggggattattatctgagcggggcgaattttatgggttcgatgaaggctaagtgcggtttttttcccgatctcgtgtgatctgattacgaaaaggtagatgttgttgacctccctgttttcagcaagtgttcctgtaccgtgtaccctgagggtttcggtggctgtggtggaggttttctcatagacaataaatgcagatttagacggaccatcgaaggctcggtgggatccaattaggatagtacatgttggagtctgcccccctgcctcctattagtgcttctgtaacagtcgaattttcgagattagttagtgctaccattatgttcgtcttgtgtctattattatgtgattttggtattatttacctttttcctgtatctagctgcatgtcctttctttactatactgatctagagctgatggtactagtagcatttgcccggttgtggttgggttaagttcttgttgtgcagcaaccagtgtgatttggttgcctattgaaacttttagagctgtagttactgatgttcgaacccaaggttttaaatagagggctatgacatttgatggcagcctcttccagaagctataaaaagttatagtgggagctattttatttagcggttttgtagaaatcatgtataaggatctggagaacatatttttatgtccattacttaaacaatcaacatactc

SEQ ID NO: 5688 - DNA, 761 bp, Zea mays
attgctccttactttagcaaagaaggagccctttgatcatttgctgatcagcaaccagagttctaacaaatgcatagaagcagagtccatgcagacggattatatgtccctaaatgcttctcttgttctattcgctgaggctgtcaaaggatctctgctatctactaacctagaagttcaggcagggacattggatttgatctttcatttcctgtcatctgatgcaaatatttgtgctctacttcaaactttgatcgatgaaaatgttgctgattacatatttgaggttctcaggttatcaggtaaaagaagctcacctttttgtagtcgtgaactactttctgaaagcttttatgcattattatgatcaagaaggcttacaaagttgcacccctgttatacattttcaggaaataatgatctgcttgtcatttcctctattcgagtactattactttttgcgagatcagaggaaaatttcaaagaaaagcttgccattggattttccactcttcttcctgttcttcactatgttgcagagataccatttcacccagtccagtcccatgttttacgacttgtttggatttgcatggccaattgttctggtatcctctcactgccccaagaagaacagatagcctgtactttgactgcaatcttgagaagaaatctcaatggtgaacttgacatgagttctgaaactcttattctggtttgctcaatattaatagaaattttgaagtcacctcatgctcatg

SEQ ID NO: 5689 - DNA, 765 bp, Zea mays
tttatcttacttacactttaaataagttaacggaactgtcacaaagatgtggccatttaggtcctcttcccatagatattctttttttttactctttgttctgttgttccaacttccaagtttctgaattctaacgttgcccttctatagggtgagaagatggtgcttgtggcatgtggatggcgccatacaattactgtttctgactctggtaatctgtacacttatggttggagcaaatatggtcagctagggcatggtgattttgaagatcatttagttccacataaagtagaagctttgaaagatagcactatatcccaggtaaatataccttgtacaaacattccgtgacatggtttcaagaacttcattttcgctttgctaggatttagaaagatgatggttccatacttccatgcacaggttgacatagacataccttatactggtggcttgaagaatctttttttttacatattggtatatgtagtgaagtttacattaaaagtttagggaaacccccaaacaaatgggaatatatcttatgctacttagccgagagccccagacaaaatgtccctgtcagaataaatcagcgtgtcctcaagtctttattactatctgactatttgagccttggaacagaaggtttacatacacaagctcttctgatttagatttcaagcggctggaggcatacgatggcacttacatcaagaggaaagctttacggatggggatggaacaaggttcgtatcatcc

SEQ ID NO: 5690 - DNA, 700 bp, Zea mays
aaaacagatatacacgtgtcagctagctgcctgcctcgcaatcgcaagaagcatctgcggccagctaaaactagccactagagagtagagagagtcaagccaaggtccgacgacgaaccagacctgcgaacggggctgccgtggataactccagcttcttgcaggcagaaccgtctgagctcagggcatcgatcaacacaggcgtgttccttcagaatggtgacatgttagttgtcagatcagatcagatcagcacaggcgtgttcctacaaggggcaggggaagacatagacactgagagctcgcgcgcggggtaagaaccacctgtcgactatttcaccgttgccgagctgtccgctagtgcccctcccccaggagaagacatttttcttctcggagagggccagagtatgcctccatccgcatgcaacctgggagattttctgcggcaaaccacattttgcttgaggaaaaaagtcggcattacgcgctagccctcccatatataagcacgccatacctgatcctctggaaaactgacttgtccgggggagctgtggtcgtcgttgttgccgactccgacttgtccgaactggaggatcagaataggagaagcgttcagtgttaaaaaaaaccctaacacatgggaatgggaaaacagaatacagtggagatggaacgcaagcaaagctctgcatat

SEQ ID NO: 5691 - DNA, 780 bp, Zea mays
cggggaggagaggagggctccgaaattcgaacgggaaaaactgatcacccgttgcatcgtgggccgagatattgaatcggattaggcccagtagttcagggcctccggtaccaatgattagttgtcgtgttttccaaaacaataaaaaccgtgagattagttaccggtagttctgaattattttcattaatggagtttgacgaatatttgaacaaatacaacatccgccatatatatagcagaagcatatgcaggccgaaagggaacggaaacattgggatgcgacctggacctagtttttaaaaaaccagtttttattttttagaccagctttttggtttttaagaaaatgagaatctaattcctataaactgatatataaatcgatatgtttttttaatctaatgtttttttaaaaaatctaatttatatctctaatttttagaaactggtttataaaaaaaaactagttaatagtgtttggaaccaccataattttcataaacaggttttagttaggagactagtttctgggtttttttaagaaagaattcagtttctatagacatagactgggatataaactattatgtttggaaccaccttaattttcataaaacaggttcttaaaatttgggtgcttccaatcagtatctaaacaaaaataaatgggcatttcggatactgaatatgtactagccaattaggcagagcatatataagctaaaaaagaatacagacccgaagtctttcacaccctttgttgcgcatgcgatgagt

SEQ ID NO: 5692 - DNA, 794 bp, Zea mays
ttcagtgaatctctctaccatttcgtttcttgtttggaaacggggaacaggctgcaaattaccaccactcacacagtcacattaaagtgaagggaacgcagcacccattctcttccaacctttttctcagaaatggggtgccatgataaagggacttgctatatttcaggtacacaatcaactagtatagttggaaaattcacattttttcttctagcctatagccaaacaatgatacaatcacatgttgcccgaacaacaacagtcaacagagaatgaggcaccttgggatataggagagttgcatgataaatcacagatggacgcaagagttactactagttaagcttggcctaattaattggtgctcgtcagaccgaactaatgaactcaagcacaatcactgtgttgtgttgtgcaggtaaaccggcagtcctcgtccatgatgacttgagtccggttcaagacaccagccccatcgcaacagtcccctccacgaacccgtcgcccgccatcatcaccgtgccttccacgaatcccaccatcaccatcccttccttgaaccctctgcccacacccatcacagccccctcaacaaacatcccttctccttccaccatgctgccgccggttccggtcatatatccgctgccaacgccgtcaacatcctccccaccagctgtgccggtcaccaatcctgctgtcaccacgcctttcacgtcccctccgtcgacaccaacaccattcaacaacccaccattgttgaacccaacgccgacccctggttctacagt

SEQ ID NO: 5693 - DNA, 807 bp, Zea mays
tcgacctgcagcgtacttgacattgggactgggagtggcagactcttgcagcagcttgcgaagcaggggtatgctaaggaaatgttaagcttttattttttgcattgttaatgccagcactgacctgtcaatttacaatatacaggttttctgatctgactgggattgactatagtgaaagtgcaattgagcttgctcgtagccttgcaatcggtgatgggtttgagcacattaatttcttggtgagtcagccgctgaagcatatattataatctgtagattcacctcgacatgcatgcccacatttgctgtccttgcccttcactttataacatatccccaatggttctcgttgtatcttaggtgcaaaactagccttaatattataagagcagaaaagaagtattcgagtttatacgaatggtccttttgcaggttgatgatgttttggagtcgaagttggagagaaggtttgaacttgtcatggatgaagggactcttgatgcgattgggctccatcctgatggacctgtgaagaggtaaatgcatgtgaaaatgttgatgtgttttttagtccttgtgtagtattcacactggtgcttacatgttttcaattgctaaactttttaatgcggaaaggaagagatgatttgtttgcacatgtctaagcctctaatttatgttcgcctcctgcatttcagaatgatgtattggcagtccgttgatagcttggtttcccgtggtggtatattggtcagttcttccatccaaaatggaccctgggagtctcttttcttatacattaat

SEQ ID NO: 5694 - DNA, 748 bp, Zea mays
cgagctcttagaaatctataaagacaaatatgtgggcaaattgcttcatccaatcaacaatggacccaggccggcagatggcttcgatcggagcatgtagcgccacaccgctagctcatcatccaatcgacccacccgatccattggagcactgggtcgaagcaggattacatgtatggacagaccggtgcttctggactctggagtattcatttggttctatgggtcacatccggtttgctccacggagcaactaaccccatatttagccacgatccatcacgggtcctaaacgtatctgatctacgttctggagctcaggcacaattacagggccggcataagcatgaatcagcagcgcacaagtaaaacaaggcaaccatatgtaggggtcagatctggacgaaacatgtaccctaaacgcaggaattcaaacaggcgagatatgcagaacggaattcgaataggcgagacatgtccaatcgacagaagagcaatacgcagagtgatctacccaaaacaaacctcgcaaccaccggcagaagagcgggtggagggaaccgccggcagaagaagagcgggtgaagggtggcagatggatgtatgcgcacgcacctgacctgacgcctggcggtgatgaatccgctgttctcttctccctctcgtccttgtacagtcccgatggccgagcgagatccgtgtacgccgtacggtccgactgacccgcgttatcacatgtatatacctg

SEQ ID NO: 5695 - DNA, 683 bp, Zea mays
tagatagatactagataccctaaatatctcccaaatcaagatcatccattgcattttcttcaccaccagcaccggcttgagttggactgctatgtggggattcaccaaagtcatccacttcttcatcatcattaggcatatactcttcatcatcttgttcattgtcctcgttgccttactcttcctcttccataactctctcctcctgtgtatcagcagcctgacaacgccttgaataaacagactcatatcgggctcttcttgggaagttgcgaccttgaagtgaactagaagcaccgattgcatcatccacatgagcccatgcaagatcatccccttctctaagtatttcattttgattgtccacccactcattgtcccattggaaatcctctaaaattaaagggttaacaatatttccctcctcacgcaatctttggaacctagctgccatctttctattgtattggatataaaccaaattgtttaacctttggtgctccaacctgttccttttttttggtatgcatctatgtgttaaataatgaatcagtggtggtgtcctaaaatcaattaaaaagatataaactgaaatgacaattttttacttacaaattcaaaagtgctccaattgcgctcacatccggaagcggaacaacaaaggctaacgatgcgctttgcaa

SEQ ID NO: 5696 - DNA, 818 bp, Zea mays
  unsure (1)..(818): unsure at all n locations
tatgtgaaagattatgagtttgttgttatctttgacgctgattttcaaccccagccagacttcctgaagcgaactgtgccccatttcaaggtttggcacgcatcttttgcttgcattttcatctagtgatgagaccatgtgaattcaattgtctgactcattgtgcgaggggtttctagggaaatgaggatgttgggctagttcaggcaaggtggtcttttgtgaacaaggatgagaacttgttaactaggctgcaaaacataaacctgtgcttccactttgaggtggagcagcaggttaatgggatcttcctcaatttctttggattcaacggaacggctggagtgtggagaataaaggcacttgaggattcaggtgggtggatggagaggacaacagtggaggacatggatattgctgtccgagcacacctcaagggctggaagtttctgttccttaacgatgttgaggtacttgcatatataacattttactttatcgttatattatattgtgtcgagacttctgattacaaatgaagctgtgttgcatgattatcctttcagtgccagtgtgaattgccagagtcatatgaggcatatcgaaaacagcaacaccgatggcattctggtccaatgcagttatttagactatgctttgtggatattatcaaatcgaaggtgtggagccttccttgcatacatattttcaaaatttgaatattttcaaattgttgtgatctctttttgtgcatgatttaagaccatccatccttttcttcctgttgggaatgtatttggctgnccattcaatttgaa

SEQ ID NO: 5697 - DNA, 709 bp, Zea mays
tcgcctgcagcacaggggacgccatggggatgaacatggtctcaaagggcgtgcagaacgtgctggattttcttcaggatgacttccatgacatggatgtcattagcatatctggttcatcttgctctctcggtttttggtaaagttgaattacctcagtttactgagtcacgtagtggctgcttagtgtactgaactttcagagcattcttctaccattaaaaaactaaaatggattcccacgtcaagcgttatcttatttgaatcctgaccatacgcccattctaaggagtcttcaatgaacaataagtatgagagacctattggcagtttaaatacccagcactatttgttctatacttctattgaatcattgagggaagcttggggacaaaaaggtggattgttgaatataactgcacctgtttaaatttagttggtcagtgaaccagtgtggcatggtctatgaagttttaaggactccatcactttgctacgcactatggtttcaggaaggaaaaaaatggcttattttttcatacaagataccagacaacacccttagtattttgtaatacaacaatactgcacataaaccaagactgacttcaacttatacttattataagtagttacgactaggttttcttggacatcatccatactactaaaacgatcaggagacggcagaccaactacaaaaaaaaaa

SEQ ID NO: 5698 - DNA, 1174 bp, Zea mays
aggataccttgtgaatcttttcaatctctggaagataagtgaacttcagcttcttgccaagagagacttctgtcctgttcctgcttgaaaagagtttctcctgcttaagataggcagaagagaactaaatcatcaaactttggcagtttcatcaattgtaaaattactaatatttctttaaaattctgatatattcattgtcacaaaaactttacactttgctctagataagctattccagtgtgacctatgaagacacactcagaaagtcagaagcggatggaggaaaacgcatttccttcaaagtcccccccccccctccacacacagcgtcatgtggcttggatacatgcaagtgaggtacttaaattccaaactttgtgctaacagcctaacatatcccaagctaatatcatagatttaactatatgtcatgaaaatcattttttatcacagtataataaatataaaaaattggacccacccagcgttattaatactacgtttaaaccttcaaactcttaattagagcgtgaaaccgtgatttaacgcgttgggcgtcataaccccataatcccgctacgtcgccatgccgttatcataccgattatcttcgttattgtgggcgccgttctatgttgactatcctttatcgcttgtcccaccgacggtccgtccatccatcgcttctcgaacttcatcacccaagccgatccactctgaggagtcttcatgatctgatctactacgcactgcttctattcggacctagttcatcgccatgttcgctctaccaatctgagtcgcctctgaagcgctgcatgatccacacgattcgctcggagtctcactcaacctactcgatccgcatgcacacggagccataggctcgtatccatatctaagactacgttcagtccgtccatcgtaactatggtctaatcgacccatcgatgcttggtctcactgtcgactggttgatctctcgccccccgatgatcgttctgtctcacgaggagcatcgccagtctagatacctcatgcaccgttgacggtcgctcttgtcgacgacccactcccacgactgacctacgacgctactgtcgacgctggatgactatcactgacgctcgctcgcagcgaccaaggatgatgaccttggacctcccagtcc

SEQ ID NO: 5699 - DNA, 746 bp, Zea mays
aatttagtaacccttacgtcagcaggaacgtaactatttttgcagaaaatgtggtgaaaccttctgtccttatttgggagcgagtgtaatagaggggattgagggggctagaatcccttactattcaattttcaatagtaaggaatcctaaccccctccattacacttgctaccaaacaaagcctgaacaagactggagtaggtctggtgagcatgtttccaaggggcatagaataaacatcctgtaaaaatggttggcgatggctaaatgtataatgttatccaagagaatgtcgagaacacagttgatcactgatgttggtaaataaatggtagattcagcatagttccatctgtgaaaagatttaagataaagtaagatacaaatacaatccaaaaggccatagtagaaagtttgtgttcagagatggggggaaaaacatgtgctgcaataaatacagaccattaaaggtcgcctaagcataattgtaaccatgagttcaaataagctaatgtgattggcatagccaattagccataatgagtaaaaaataactcagagctacaagcatcgatttcaaataatgtagtttaaaagaatcactattagcataaatcaaaacaggcaagattttcacagacataagacttcctaacaactggtttggttagaaacacacctgaaaaaaaaacgaaaattggtgcaacctcctactaaattagtttgccttttcttttgcttctgt

SEQ ID NO: 5700 - DNA, 804 bp, Zea mays
gcatgcctgcaggccaggatataaatgtggctggcctgccgccgcccggccggcggtcagttaccttacctcttcgagcgccgagatggtggccggcgcatagtccagctgccgggcgccgtggttggacacgatcaagccggccgcccccgcctccacggccttcctcgctgctcgacgccgccacagagtcgtcacagttcagtgagacaagacagtgaccatacaggtaaccagttctccggttcagcaccatgcatgccagtgatccaaccgctggtagagtacattttgtgctagttattcattaccgtcttccgcggtgacgatgcccttgagcaggatcggcaggctggtgatggacttgagccactccacgtcctgcacgcacaaattcagcaaaacaacacaccccatcaggccatcatcaaccactcgcctgattccaagagaggtgaaaccggatttttcattctattatctaaaaaaatgctggcaacgaacggcaggtacagtgatccaaggccgctgtatctttttttttgagaaactattgtagccaatactgcgacgcatgcaattcaaggccagtaacgtgtccttgggacaggatcgcaggagagacgatgcccggaggccaccgtcgctataccagcatgctgttatattaagtgccatacggtccgtcaagaacagtctttcagtatccagcatacagccctgatgcccgatggtggtgcgtccctgcatatgcctgcccagtactggggatgctggaccacgtgctatggattcaacattcaa

SEQ ID NO: 5701 - DNA, 738 bp, Zea mays
aggaggttgcctccagttgcgacgctattcgcttttatcagttatatgtatgatgccttgccattgattttttttagtaaattccactttctggtgttacctgatttctggaagttttcatcgtgtaccttaggtgtacaagagaagggatgtttcggcaacattggtacggcgggctgaaagtttaggattcagggcaattgttttgacagttgacacgcctgtgcttggcaggcgtgaagctgatatcagaaataagtacagcgcttgtatcgttaatgaaatctcctaaaattgagggaaattatgttcatttacaaaattcataattccagtttcctaacccgttgctactgaaggttaaaattttaagctactatcttataccatattgtagatcgttgatacatttatgcggagcattgcagtagcttcaacatcagaatgttgcaaaaaaacaatcccattttcttttatcttgagatgttctgtaactgagctgattgttcatgcaggatgattgctccacctctgtcaaaccttgaaggtctaatgtcattagacgactttgatgatgctgtgagtgaaacatttgctcgataaaccactcatttaaaactccaaaaaaaattaatggatgaacttcttttctttcttaaaaactgaaccattatggtcttgcaatcttgatcttcgttgtaggaaggcggctccaagcttgaacgattcgcacgggag

SEQ ID NO: 5702 - DNA, 800 bp, Zea mays
aaatgtctgaagatctttttgaaggagtgaagggagaagacgctggtgatccatctgttgcctacggtgacagcacaactgggaacacacctaggaccagtttatttgacaagctatacatagtgttgatcaggtacataatagtttatttaataacttctacttaatattttttgatacttctatgtacatgctacagattgattaagctgcatgtaactaattcatcatataacaatatgctatttatatctgttgcaaaatgatttacattaaattgaaagaaggtcataaggaaattgacttccacaaatttagcctgaacactgcatactgttcatactattcttagaattggcagtttcacaagttgtccatataatccaattaaaaaacgatgttatcctttgtcttgatggtatttgtgttgaaatatatttacaattgaatttgtgttatgctgtattatattgtagtctgcatggcctgatacgtggagagaacatggagcttggccgtgattcagatactggtggccaggtactggtatcgtcagtgcatttatttatagaatcaagtatagctgcaattctttcttcacaatgaataactcaaactttatcctgtagtttctggagcagctatatattccatttgatgtttcgaagatattcactaaaaagatactagtatcatacaaggacatgatttcactttcatctactgtatgctgtttcataggtcaaatatgtcgtggagcttgctaagcattaagttcatgttctggagtttaccgggtg

SEQ ID NO: 5703 - DNA, 776 bp, Zea mays
atcttgcatgcctgcagcttctcaacgattctgaggaaagaactcgcaggattattgaaattctggaattgcatgttgactcacatatggatcctaattatgagtctgctgaagaaacagatgagaaaggaactggtatatatcttcctgtaatgttaatgcttcatgttgcatgttgattagtaaatatcggaatgtaactgtttctcttgcattgaataaatcttaagctgtagcataatttcatgtggtttgttgcaatatattctaaatatacatctactagaagtttctgcactgtaattttcttgcaaagttgcaatgcagtacatttgaatcaatgtgacgataaacatcaactctattaaaataaatcacatatctgagtaagcgttaattaagtgtagtgtttgagcatttgcttgtttattatatgcagttggaaagtcggtaaatcagacaagaccagatacaaccatatcacgaaggatatcgagatatcttagcactgtgcaaaaccatcctaaaaaagtttctgattctagccaccttccaaaaagcttgtccacagaaagtgcaatatgtggatcaggagcaagaagtttggagaacagcacagcaaacagaactatgtatggagctggaccactttcatcttctgtagtaacaatgacaaatgacacagagccagagaaagtctggcactacaaggatccttctgggaactgttcaaggtcccatttactctttttgcaaacttttcatattgggacaag

SEQ ID NO: 5704 - DNA, 708 bp, Zea mays
tgcatgcctgcagccatcttagcagccttgcgaacactagattcacataacttcttcatctcagcgtcagtatcagtgtcagctgattcaatcttcttccctttgtcagattctggtccatcttcatcagcattggtgctaagactaaaaatctgctctatttctttaagctttccatcgtaatatgttttctggtcagaattaagtttcccctttttcctattaaacaacaatgcatagtggcttgataatgcttccagctcctattacaaacagaaaaaaagaccacatctaattaagagagaagggggcatattgaagaccaaacacataatatccatgggaagacaaaacatcacctctaattgatcaggccccccataaatatagaagcatctgtcaaatgagacttcttcaaactgttcctcttctgtctgctggtcaccttcaccggtactgcctttatcaacttccataccagtttcttcaacaataaactccattgtctcctttccaacacgttcaagcacttccattccttttgctgtaaatgacttccctgtctgtgattattgaactttgatattaaaatatttgtttcacgtatatgtagagacaatgcaattactgactcctagctacctctaaaatggtcggtgctatcgcagatgcttttgcaggcagttctccttgctgaatggtttcggc

SEQ ID NO: 5705 - DNA, 771 bp, Zea mays
aggatcaggatatgcacttggaaatttgtttctttattttttccttataggtaacgccctgatgaggtgtgatttccacgtcactcgccatttttcgatatgaaaccaagttattgtagactgtagaggttacgatacataggggtgaaaacgggtcgggggggtatacctgtcgggtaccggatacggatagtgcaaatacccgtattttcggatacggattcgggtatttttatattcaggacggatacggataatacccggatactgtagcttcggattcgggtcggatacggaacgaagactacccggtaaatacccggatattcaggtcggatacgagtacccggaattcaggtacccattttttctttttctgcataataatatagttataaaatcataacttttacatatgaaatcggatgaagacaaagttcatatgaaaattgtagagctcgaagatatctataactttgtagtacatcatttttttgtttaaacatatatttgggccaaaatcattaaatttatgtccaaatttatatcaaattaatatactttatcatttttatgtggggggattaaggttatctccacgtgggaacttaagattatctttgtatagactatatattagtattggtaacttatttgcaattttcggtcgacgctacgttatttgatggatttaattgtatcttgatgattctctacgacaagaaattaataatatataagtagcctcaaaatatcatgaaattgtacggg

SEQ ID NO: 5706 - DNA, 924 bp, Zea mays
tgaagcataattaatacaacttatggccatatattttcgtcatctggaccagaggagctagttcaattaaagaagatgattcttgtcagaacgacaaaccagtggtagtatgaggtatggaattcaaccgaacccctattttctaaataaactcatatagcctaaaagatccactagccctaaacagggtgagttaaagtataagggaggacatatgtttcttcccagagggacacaaaagctgtaaatatagtcgcaactcgcattgaccttgtatcgttagggatgaaaacgggacggatacaaccgaatacagggtcatcccgtatcctaccctaatgtatttctctcgggtacgggaccggatacgggtagttaagattcgggacggatacatgacggtaccgggtaataatccgggcgggtaagaaacggataacagatactactcgtgtaaatactggataaattgcgtagttcgtcccgataatattaattatccaaccacccaatatataccgtaaattaaagtaataccataaatcattgttatattgaatagaatcaaaaatgttaaggaaaaagaaaaaaccccgaataaaaaatttggaacaattcattggccaggtttccacaaagttttaccttaaatttaaaccaaggggtaccatatttgaaaatgaaaccccaaaccaaccccggaaaattaatttaaaaaaaatatccattaaaaaagttatttttttaaatgtttttcaaccttaaaaaaaaaaattgggcaaaaaattaaggttttccccaaaaaaacccaaatttagaaccttttttttatataagggaaattttatattttccaagggtccctttcatttatggaaaaaatgttttaaagagtaaaaggacctcggatttattgtgttaaaa

SEQ ID NO: 5707 - DNA, 827 bp, Zea mays
agctcggtccctgtggtcctacagagtcgacctgcagcactcgcactccgcggggttccgcgacgacacgcagcccgtggcggcgaggctgcgcaccgagtgctcccgccgcaggaaggcggcgcggacggtgcacgcgaagctgctggcgtcgcgggccttcttccggtccttgttcgccaggactaccccgtgctccgacgagcaatgccgcggcgccgaggtccgggccagcaccagagcggcgccaccacccggcgagacgaagagcgactgctgcaaggcggcgtttgcccagatcaataacggctacggctacggctaccacagcggcagggcggcgccgaccaccctgcggagcagcatcgagcaggagaagctgatggacgaggaggagctcgccgccgccgcccggcagcgcaagtccttctccggcgtgatcaagtggcggcacgcggcagcggcgcctcccgccgcggcgccggcgaagcctctgtcgtcgtcgtcgtcggcgaggaggagctccggggctggcggcgggccggcgctgaagcggagcagcagcgcccggtcggagtcggaggggctgatccagggcgccatcgcctactgcaagcgctcgcagcagcagctggggctcgccaggaagagcgtcagcgacgccggcgcctccgcgccttcctggccggctcgatcggccgtaacagcagcagcctactgccactagccgtgagccccgtgacgtgtgcaaaaaaaaaaaaaaattggataccgaaagcgaagtgaccaccaccacatgagcagtaatgtgaagtttgtgctgtctt

SEQ ID NO: 5708 - DNA, 501 bp, Zea mays
cttgcatgcctgcagggtgcgggctgctggctgtagctaagggtagagccgtagaggactagctagagggagaatgttcacgggactggctggagctaggcgcctgagcggtcgcgtacgcattcggcctcttcactttactaggccgcgacctgggctacagacagcctatgtcagagatcggcccgtgcatggaataaattattacatgtatgtttcttattaaacttttatgccacatacgcgcggctgacgatagcatgcatggatgggtaaaaaagttcgtgaacgcgacataaaatgaattatagaatatttacgacaacaaataacgttccgaacgaagttgcagtggtatttcgatttcgtgaactgccgccgcggcgccatgcaatggtgccatgcagacgtgaactgccgccgcggcgccgcgcgcccctgccttgttgtcgttgcccacgtcctcgccacacacgcacgttctgacgttcggacgttccc

SEQ ID NO: 5709 - DNA, 773 bp, Zea mays
ttgcatgcctgcagagatagtcagcagcagagagagacgatcgatgctccggccggacacccactcacaatatatgccactgacacattccagcgcacagctaattaaaggatacgtacgcatgtatatacgtacgtactgcggccatgcaatgcaatgcatgcatggaataataactgcgaacgaggtgcatgcatgcgcccactgcaattgcattgcatctttgcttgcagcacggatcgatcgatcgatatgatttcgtctctgctgatcagatcacatcagatcagaccaaaaaagccaaggcatatatatgatcgattgttccctctgtatgtctgtctccatcttaatcttctctctgcaaaatgcatgcatatacatatttatatatgctatgctagtaccatgcatcaatgcatgcaaccaaaataaaaagctagtagtagacaagctcatcacatgacctcatatatagagaggtcttgcaaaagacaagaactgatgaccacttggccctgtatctactgtttgcttgtgatccatctcagctagctagagatcgaggaggaggaacaacgaccttgtagttgaagggaatgaaggaatcaatgcaaggaccaatgccaaaaattaatacagtcgtcaattcagaaaataaaaaggttttcaccatgcatattcacgatatatcatatcaatcgagctatagatgcatgctcatagtcagaaaataccattctggaagtaactgcatgcgtacatgtagcgtc

SEQ ID NO: 5710 - DNA, 758 bp, Zea mays
gcatgcctgcagcactcgatttcgtgggcgtgagttgaaatatgttggtgcaaggttgcgaggggtcggcttggatgattctaggatagggagctacacggatccgagcaaaatcggttccattgtcttccccctttaacataacattatggagtgttgaatgcacttcgtcgtcgtcgtggacagacacgggccccgggagcggtggtcctagtagttgggtccattgtagcttcctatatcaggaattcaggatccttgagtgtatcttggcaacattcacaagtatgtcgttccttgggcgctaacacatactactcctagtttcaattaattttgttacgtgtcattcaaacatgaatactggaaacgattgtggtgctgttccctgtttgctgctagttaaattcttgtagccgatgagcaaactagaagaggtctaaaatatcctctcaacaacttgcatgtattgaagatgttttccttccctcactactgctacctttggaaaaggactttattggaccagtacctagtatcaagatcctggaccaggctgggtggatgactcatggtaaggctgtctccaacaacacactgtaaatagttctgtccgctaaatataccgtgtagtcagctactttactcctccagcaaaatctgccaaaaggttctctatctttcggatggtacaatcgtccttcaaatatggcgtctttctgtgctcacactaaatctcgtcttcgtactgtcatcgt

SEQ ID NO: 5711 - DNA, 770 bp, Zea mays
gctctatagtctacctgcagcatatcaagcctttcagccaaataaatgagagagagaaaagagaggaaagcgacgcagcgggtaaagtatcaaggagtgctttaatcaaaacatgaaaaggcaaaccatacacgggactcgaatctagctacaaagatcatactgccaagcaattagcacagttcttttacatagctatattatttctgtgacttcaggtatatctgtagcaccatgagcaaatcccttacaggactacatcactaaaaaaatcaatgtggaaaatgcagcaaagctaaataaaaatttatacagatcagatgcttacacgataatgaaccttaatcttgtctcctttgtgtgcttgcagggtacatgactccggtttgtactgaaaggaagacgagcaagaggggaaaaaaattgtcacaaagaatcaaaatgatatctcctttcaaaatgtaacaacataaaactacagcctattcaacaaaatatttgataatacagcaattgcgtaagcacaagcagaacctaatgacacacaattctccacactatcacactacctaactctcacatcggactgtaaccaaatattctatttcatattatcatgatccaatgattcttagttttctttgtggactttgaactggtcgccataatccaaaacaaaggatatatatcctttgaagtttgaaaaagaccatctacagcaggttacctatactcataccaatattcaaactacactctataatgcaata

SEQ ID NO: 5712 - DNA, 702 bp, Zea mays
atgcttccgtgctaaaaccagccatttctcctccaatctattctgcaataatgtaatgcatatgttcagatgacagcacctcacctcaatccttcttcattcagcaaattaagatggtagatttggattaatcaggctgaacagctagaggacggtctctgccattactcaccagtgaaggaaagctagagggcggtctctgtagtggccggcggacagcgggagcggctggactctggagcgcggctgagcggcggcctggaggaagctgcacgggggaggagcggcggcctagagcggcctggagcataacggtggcctggagcagagcggcggcctggggcagagcggtggcctggagtgtcgcggcctggagcggagcggcggcctggacttcctggagtgtctggagcgtggctctggtgagcgaaaaccctaaacctgggcgggaaattgagctgggccgttaaacgctcgaaacgtggcgtttcacgctatacagcgtttaaacgccaaaacgtgacgttacaaagaatcgtaaaacgtttcaccattttggtttcttccagcgttttatagtttaaacgacgtttaaacgtcgttttaataagcatgcatattaagtcctttgtgttaggttcttgctccatcttgcgtgtattctttatatattttcatcaatcatcatcatatagtttcaac

SEQ ID NO: 5713 - DNA, 739 bp, Zea mays
ttcaacatgtcattgaaacaaaacctccaggaagtgagagaggggacgacatccctgaagatgcagtcatttcggtatttccaaatggtccaagccatcaccgcaacaatttccatgagaaaacatctgccaaagatattattcgtgtcttcaaacatgctgaagaagtcaagatcaaagttccactggatgcctgcgtggtaccagcaatttgaactgaatgggcactcgaacaaaagatggaaggttgtctcttcacaggtggtatcacataggacacaatgaagattgttagtcgcatccagaaggccttttctcttgagcagattattcgaattaattatgtctctgaaaactaaccagagaaagattttgatctttttgcagactttggactgccagatccataaaaaaggcacgggagggttgatggatgtaaagctaagattatagaatttcgaggagctgaacttgttgtttccccaagggtaaattcatttattcgtctcttccctggcatgttgctgaaaagataatgtattcctgttgagcctgcatggacagaggagtgtgaaaattatcttccaaggacatgttgctgatgaaggccagcattgtgggttccttgttttttgcggaggaatagaggcagggaaaagccgtcatgggggcgtgattgttccaaacatcctaccaaaggaggacagtgcttccatcacccacacgaggcatggcatat

SEQ ID NO: 5714 - DNA, 759 bp, Zea mays
ccacatgatttcgtacggcatggcggtttcccgctcgcattttcggctcccatcgaactaccgcggccgcttgccgcccttgcgcgctgaaatctgaaccgtcccgcgcatccagcgcctcagatatcgccatctcagcgatccgcgccgccaccgcttccaccaatcacatcccgcctcacctttctatataatcccagcgcattctccatccagagcatagcacacagccaaagccaccagcgctcgtcacctccaatcaacaaattcccaatccgccgcttcccatcccgcgttcgccgctccatttgatcgaattcccgatggcgcccaaggccgagaagaagcccgcggagaagaagccgacggaggagaaggccgagaagaagcccagggcggagaagcgcgtgccgggcaaggagggcggcgagaagaaggggaagaagaaggccaagaagagcgtcgagacgtacaagatctacatcttcaaggtgctcaagcaggtgcacccggacattggtatctcgtccaaggccatgtccatcatgaactccttcatcaacgacatcttcgagaagctggctgccgaggccgccaagctcgcccgctacaacaagaagcccaccataacctcccgggagatccagacttcggtgcgcctcgtccttccccgcgagctcgccaagcacgccgtctccgagggcacccaaggctgttaccaagttcacttcctcttaaaacgccggcgaacggtgcgac

SEQ ID NO: 5715 - DNA, 670 bp, Zea mays
agtgtgacgatctaagatgatgaactttggtgtgtgtgtatactgtatatatgccatggcagtagccgatgcgattagacttagacatcaagctgagttaacgttacgcttttcaagactttctcgaccctggcgggctgcttggactgccagaagaggagccccagcaccacccgctggaatgcctccttgagcggctgcacgatgtacctggacagcgggctgcccccctcctcctcctcggccggcgcggcggccggcttgttggggtcggcgaactggccggcggagttgaggagcacgacgccccggaccagctccggcacctcggtggccgtgaacagcgtcgtgaagcctcccaagctgtcgcggtgttgatggaacgttggtttcattgggcatgtaccgtctgaattcagaagccgaaatgccatgtgtgtatcagttggttgccgcgtacctgttgcctacaaggacggctggctccttgacgatctcccggaggaagtcggagacctgctccatccagatggtggcctcgtagtccaccagcgccttctcgctccagccgaaccccagcaggtctatggcgtacaccttgtacttcttggccagctcagggatgttgtacctggatcgattgacagtcacagcattcagacatccaagc

SEQ ID NO: 5716 - DNA, 1568 bp, Zea mays
  unsure (1)..(1568): unsure at all n locations
tgatggagctggtgattgctaagttgtggctgcccctagtggcgtcggcccatggggacgaagatgccgtcaacgaagatgatgtgatgaaatttggcgttgtccctggggatgggcacgccggtgtccaggatgtggtgacaaaattggcaggcgatgctgcccatggagatagggacgccggttgccaggatggcgtgacgaaggtggcatgcggcgcaacccatggagatggggacgtcggttgccaggacggcgtgacgaaggtgacatgcggcattgtccatggagttggggacgccgattgccaggatgacgccccgaaattggcagcagaagccatgggatcagatcgaaacccaagctagccgatatcagatgttatggtcgctagatcactgagggattggagaggggtatcgatggataagaacgtcggccgagggcctctgcccacggccgagcaagaggagggtttctcccttctaattcttgtctgctttatttctcatccattgattacataaataggccggttgactgtccctatctagctagagatccttatctcctaaaaactctcaacaaactactaactgataaccttcctagataatctcaactaatctcctaaataatctcaactaatcttctaatcttatctctaactatccttatctaatcccccttgagggcccatagctgcttctaccgtagcccctccgtgggcctccttaggccctgacactacacccctcctggacaagcagctcaccctcgagctgccgcataacgggtgctcaaagaccgagtctacttgacccaaaaccaaacacctagaagacaagccttttacatctcggcttatcttagtattccgaatctaaatttttttaccccataagataagacggacaccctccgcgtattggacttgcacgtgtgcagccacctggatctcatggacgccatctggacgaaaggggagcacatggacgggcacctggaataggtcgcaacaataaccagcggaggcgccctcgtggcggtcggtagcggaatgtggtggcgctaaatagtgcgcccttgccgatgacgaggggagtgccttccctaccgccgctgtcgtagaattgaagttcgtcgcccgcgggacacgtaccatgctcgcacttggagatagcggctcggtgccgctgctgatggccatccgacagggcgaggtcgcgcccccgtgtgccgaggtcaaccgtcaccatggctgcctcgagcatatgccgacgcatctcccgcactctccgtcgtgcaaggaagccacgagcagcagcatgtatgcccacagccgccgacgtctggagccgtgcggacaacgccagctggtgctgctcatgttgcactgctgccttgatttgcagcagcccctgctcaaccatccggagcgagtcttgcatctttgcgagatcagcccttatgttagtccacaagtcccccatcgatggagctggtgattgctgagccatggctgccccaagtggcgccgtccatggggacngagacaccgtcaacga

SEQ ID NO: 5717 - DNA, 805 bp, Zea mays
gcaggctatcttaattgagagagaaactgagtcgttgcgtaaaaaaatgacattctgccttgaagcaaaagataatcttgaaaggtatacattttgttatgcctcggcttgctgttactaggtttattactattaatcaatatgttttcttcttctatagactattgagatatttatgtttttagagatggctaataatattcccagtcactccaaatggtaagttggttaggacatggacatggtttctaatatgacattttgacttgtaattttttttgaacaaatgcaggagagctgcgtgtcattatattaagaagacgaaaaacaaacataggagagacaagacttgtcaacccctaatacaaaggcccctaggccgagaccccctgacattaacacaacgcgctacgcacacatagcaacaacccgaccaaaacgaccaccagcaggcaaactgctagggtcccctagggagctggcgcgggaggaggtcctgcagagctgatgcaccagccaagcaccaaacgctgccctcctcaatcacaacattctgaactcgctgggtgcagggcacaacccctaaaaaacacaagcattacggtgcttccaaatctcccaagcgaacaaaatgatcaaggaattaagaccttttcttagactcttctccactttctttatactttggcaccaccaatttgagaaaacagtgcaggtacaatggcttggaggcctatactattctaaatagatagaaaatgctatatattatgaaaggttttttcatcatgaatatagtaacatc

SEQ ID NO: 5718 - DNA, 761 bp, Zea mays
atcctttagagtcgacctgcagcaaggagcgcaggtcaaaggataagattagttgagattatctaggagatagttgagattatctaataaggttatcagttagtagtttgttgagagtttttaggagagttttaaagagatctctagctagataggggcggagccggccagccggcctatttatgtaatcaatggatgagaaataaagtaagcaagagattagaagaaaatcacttctcttgccgaccgtgctggccgtgggcaaagccctgcggccagcctccccagcgcccctaaccctagttgtcgccctcaaaccctcgcagccatttgctgctcataacactccctcttgcctaaccctttgccatgacagaccaagtaccaccaatgtcatctgggtaatggatacaaatgccttatgcctcaaactccagtgggacccatttagagcctgtgatgcataggctctaccatttatgtttactcacttatgcaaaggggtaaattagcaagggcatcctaccttattccataactgatttgcagccactacataggtttttcaattacaatttacttcaccaaagaaagttttcgtatgggtatgaatggcataaataatcttttgaatcaattgagtacgtcaaaactcggtatggaattatggattagcagaaacaagctaagggtcttttttcatcggatgaatccaatcatatgtcgaaatgtaataccttatttacctggagtctgccaaa

SEQ ID NO: 5719 - DNA, 768 bp, Zea mays
  unsure (1)..(768): unsure at all n locations
atacagacatacagtaagtatttcaccttattctttgcaaagtaggtgtcttgctgtagcattgcagatatggatgatgtatgctcgagaattatgtacgtgctttttccagttgttccttgaccctcattatagcaagcaaaaacctaaaaagaattataacagcatgttgcagaagtaattctacatgacatatgaactgcccttgtttatgcagtaaaatttgctacaaattgcaatgaacatagctagctgcatacctccattcagccataggacaagaggtttgtttgaaggatcttgaggagcctcaacaaaatagtagaacaaagcccttccagccttggcatccacagtcacatatcctgcatattggtcaaactctgctacccctgtttgcccaggcatacatatgatcttatcctgctcccgttgattgcttgttgagcctctatgcactgatggactggttccgttcttgggagttgaatcttgttttccttgaacatatttccttgatactctcaattgattgaactcaagaggctgcttggcctggtttctagtgtcagcgtttgcaacactgaagtagaacaaggaccaaagtaccaggaggcctcttttcatcttgataggttgcgtgtgcatgggtgtttggtgtcttgggctaggttgccattggtgaatctttatttatagaggggacattctgttttcagtaaagttgaagagtcctncaaggaaaccataacatgattctttgacttt

SEQ ID NO: 5720 - DNA, 773 bp, Zea mays
cggtacccgctggacgtctaaactcgacctgcaggacccagcgaccgaacaagaacaacagtatatacctcgaaaatatcacaagaataacatcccagcccagagccccagacgaccaaatatatatatcttcgtccagcacggccgtacacacaccggcaccacgcgccagacgacgactcctgctcctgctcgatcgtcttcacatccctctacctcacgtcctcacctggccagggcccggcggccgggttaatccaaggcgcgcgcgcgtgcatggcagaggccggtggcggtggcgtcgaccaggacgccggtagcctgccgagccacaccaacggtgttggcggcggcggcagcagcacgtgggagatagaggagctggagccggatgacggaagaccgccgcggagcgtcccggtcgccgacgacgtgtacgtggcggtcggcagcggcggctccagcatggcggctctgtcctgggcgctgcgccgcctcgccaagccgcgcagcttcgtctacctcgtccacgtcttccccgtcgtcaccagcatacccaccccatgtgagcctactactgcttggtctctctcccctcttctgcttctgcctcatcatcttcgtttcttctactaaataacatgtcgtactactgatttacgattgatgattataacttcatcactagaataattcaaattgttgcgtgtactgatcactagaatttgcaaaacgaagccttgttttcaagcgataaaagaagtggcctcccc

SEQ ID NO: 5721 - DNA, 798 bp, Zea mays
atttaggaaactaatcagagttttaactaaaatcttgtccatttgataaactgatttatagcttaatagttgtgatgccatgttatatggacatttaattcaggaatactgacactacatgttgagtttgatgctattgttgtttgaagattggcaagaatcacaaacaattcactgtagtgtagtttagtagtatgtatagcacaccttttctgcccccaccgttgcaatttcctgttgtttacaattgatgccaagttcatatccagttgtccatcatcaagaaatgttttcttctgatggtggattttaatgtgctacttacccagttaccctacaccttcttcctttccttttatgtatactctgcttgaaggtcttgccaatcgagcaaatatttctctcccagatttatctgaatcggcatctacttgttgtgtagattatgatggcatatgtgggacccacctctaatgtgcgggttgagcgtgtatcatgtgaatggtttggcaaagatgctgctttggctgaactgataactttatttgaaaagtctgtaaacaatgcttctagggctgaagatgataggaagctgatagaaacaaatgatgataacaacaattttcatgggattgaggtactgttagcctttctattctattcttattggcgttttggtgtattccttatcatcctacctcagacatcaattgtccatcatgtagtatatgaagtctcataactaccgtttgttaaaactagggtattatggcgatgccagaactagttgttcaagca

SEQ ID NO: 5722 - DNA, 606 bp, Zea mays
ttcggtacccggctttccgctagaaccgacctgcagagaagtagctgacaatagcagcaagtgaagcaggcaagaaatctgcaagatctcttaaacctgaaataaagtacaacggtaatatgctaataagtgtgcaaggacagttggatagcagaactcaaaaaaagactgctttttagtgcagtaaaataaagtaagcctctacagttctacttacaaatatataatggtcaatataaatacaataacaaactttgaaactcaagcagtgttttaagagcaggtgactgagactgtttggttcagcttttttctgatcagcttttctgagaatctggctgtggggagaatctggttgtgggaagaatctgagtattgtggggattacgtgtggaggaagataaagttgtccataaagttcaggatctagaaagagagggatttctactattgcaacgattcagccgattctgtgttcatgttaattttggatgaattttaccaaatcgatttttatataagcggtctgaaaagctgagtgtttggtagtccacagcaagttctggtggccagaagttgaaaaaagctgaaataaataggccctga

SEQ ID NO: 5723 - DNA, 724 bp, Zea mays
cagcgacgtgaggtaaaaaaaaaaggctattaacaggtttagttttagacacgaaaaagtacacgatatagcttctccaaagtactcccgatgaagcttgcagaccggcggcaggttaggtaaagtaaagtaacccgtgccgacctagcagcagcagcagcagcggcatcgacagtaacagtgaaaacgcctttccatcgctgtcctaatctcggatctttccgaaagcagtaccgagttaccaccgcacacgacgacggctactaaccctgttgcctcaccggatctgaaagcgacggggcatcggaggtcaggttccatcctgccgggatcgaattgtggctataataataacagcttcaattcgggggcggagttttttttttccagaaccgggatgagatgcatcgagctagctatgtacaggtccgcatgttaccgaccgagcttcttctactagctccaccaaaagcacagctgcgactgaaagaatgggcaggcaagccgaggcattacagagagagaaaaaagggggggagaaaacctcacagtcacaggatcgtgcggccgttggtcttcctctttgcgtcctcccacggcgccgcagcagcagcaggaggcacctgtgccgaaggccccatgtccagctctcttccaaccatcaatgccgggaggccgcggctggccgtggagccgcccatggtccctcctccgatgccgagcc

SEQ ID NO: 5724 - DNA, 799 bp, Zea mays
gagctgacaatgttgtggcttctgtttgcagggtttgcaccttgagctcgagttcgccaatatattgcatcttcctttcctttgatcttgcagcagattgtctattagcccaaatcctgtcaaatgatatcgataataaatcagtgtaagaattcttatttacagaataaatttgaatttatcttgaagaatgatgcatgtgatatttatcttgaagaataaatttggcaacggaaagactcaaactgagagaacagatcctatttgcactctttgattgtttggctgcatgcatgtgatatttcttattcctctcacctgcccatgaactatctttattgtaatctgatcaatctttcttataacctgacccactctatgatttacttataccatttccatttcattcaaagttccaaactacataacatggtaaattttcccttaggcctcgtttgtttcctttcattttgaggaatttgaatcttactaatagaatatgctatttttttagaatgtgacattccaccactttccaaagttatcatataagcctatctcaaattcatggggtgagagatgaaaattgattctatagatttacatactatttttccgatgtacaacttatagcacactcttctacttgcttcgctataacatacatgtagtatataactatcgctctcgtatgatttaggataatatacaaatatattacatatataaatgtatggaattaattagttttgtctaaattatgactattgaaaatgggattcaatttcaacgaaacaaa

SEQ ID NO: 5725 - DNA, 765 bp, Zea mays
catgcctgcagctaggagagccgcctgcgaaaccggtctcacctgctccgccgagggcaggaaagcgtgctcctacacgtgctgctaggggcagaaagggtgccactgggaaaggagtgccccctgcacctacgactagaagaaagcggggtaatattgtcgacttggaagctgatccagcttgtgaagacccccctaaagctgtcaagggactggaagttgctgctgctgctgcacccaagaaccttcctttgaaggaggtagccgaggttggtgttctgaaaatgaatggtgtgagtgcagagaagattattggggctgaagatgaatcaacagcgacacctgtgccagagagggtattactttctcttttacattttttccccacatggactgctatttgccttctttatttcctactttatgttatctgtttgcagctcacctaattgcataaacacactggtttttactaactttacataaacacactgttttttttactagcttttattgaattgtcgcctgatattataaatgcaaaaaaggatataaatcatgtcgttttcccatgatgctttgcatgggagcccttaagtcaatgtagtccttgggattgcatgtcatttattggtattctgtggtacctattatttagttaaatgaagcattccaaatcctgtaaaatcatacttgttgtggcttgatgtaactatgtaagggttcacctattagttacattcaactctagttgggtcctttcca

SEQ ID NO: 5726 - DNA, 726 bp, Zea mays
aaatgaaataagattaggtgaccaaaaaaacttctggaaataagaaattatgtcaaagttcaacataaaatctttgtatagcaaaagggcctctagctgagttggttaggtagcttgagtatcactaaagaggtatgcgtcgactccatgtgagagtgaatttcaatctggggttataaaatcctcttccataccaaagctcaggactaaggtctggccatggacccatggtcatggtcattcccatatgggctacggtgtcattgtgtatgggtggggcaagagttcaatggttttctcaacttacataagaagggctgcttcatgcaatgccagggtgggtgccccatccccttccatgcaggtcgagtttaaaaaaacagttgtacagcagtcttatgattttatgcaacaaagcaagtaaactttcagttgtcatttgaatgtactactgcaccacagaaattttaccgacagttttacactttacttctaccaacttctaggctatgaataacaatactacaactatgcataactagttattccttttttacaacaacaccctgggcttatagtctggatgcagatggaagtgggactagaaatggtaagcatggtgccatgtttaggaggcatgtgcttggccccttctgatgttaaatgaactcatcttttaaacattaagggtgtcatatgccaggcaatctactgtggaaaggaccc

SEQ ID NO: 5727 - DNA, 869 bp, Zea mays
attcaagcaaacctgaacaagtctgattgcctgtgactgaccacaaggcaccgagcacattcagttcaagatgcacaagaactcaagttttcttccttaggaccaaaaaatgagagccttcactgttcaccgtaaaagtgcctgcaatctacaccgagcacattgaaaagacaaatgtatctgcacatgaaatgtatctgcagcacaggcaagcgcgacatgggccctattgggcgtgtatccaatgcggtgattatagagccatgaagctactaccagagccaattggtggggtcttgtccatggccgtgttgatcctaaaatcattgacatcacctatgactgaactagtgccgaagggactttccagagcttcatgatcacatcattagaacaaacctgcatcaatgaatggcgctcgtccacttcggacacaggcagacctctgctcttggatgattggttcctgcccgctagatcgcggaagacgtacgaaggggaggtgatcaagacctgcgctggccagagggtacggtgagacgtcgtgcttcaatttttggacgatatggcacgacgaggctggttagcggtaatcgctggcgtggtttcgatcaccgtctcggtcctgtgaagccgaaggcacccactaggaaacacgatcgatgtcttgatccaagtgaagggagggttgcaaatgaaaagggcaacgaagggaatgtgggaggatcactttgaaaaatcacaaagaagtggagatcgtctgttggatgacagattgaacgtcgagattgtatatgtgcaccatgtacactgaatacttttccttctccaaagagtaattacatttttaaactaaaccttgatatctt

SEQ ID NO: 5728 - DNA, 732 bp, Zea mays
gcaggctccatgatggtatcgttcttgttgctgccttgatcgatttcttgccggataagctcttcctccatcctgtcacttgcatcgttcgctgctggttgacctgtcttctctgcattttgcccattattcttgacatctaattaacagtttgtcatttagtaaattgtagtaaaaaagatatgctactagtaaataaaggccgtttaatttgacaaaactacagatccatgatcagaattgctttgagctagacctctgccaaattaaacgggatgttaaattgcacgtgtttttttatcagttcatcaacaaaaagggaagcgtaacctcatttacctaatttggcttcagattgattgttcttcccgattcgatgagcatcgtcttggatatgttcctcctccgtcttgttaggtttatcatttttgtgcccgccatcttcctctgtatcaatgaacatttattcgttataaaaaaaatgaaggtaaatctccaactgtatctgtcctatttcatttagagcttactactgaagggtttcaacttgtttctttacattggctttttcgggaaaaaattacaccaaaacactaacctcatgaaaaccggcttcttatgacgggaacccctttatataccacattcaaacgaatggatctttattttaatttacccaaacaagccttgaaaaagttacaattttataaaaaccggatagacccttcccct

SEQ ID NO: 5729 - DNA, 1472 bp, Zea mays
gtcgacctgcagcgcggggcgtcggcgtgggcggcggcctcggcagcctccatgtgtacgaactcggcgatgcgaacgaccaggtcgttctcgaagtcgttgtcgtcgcccgggacgtccttgtagccgtgcctgatgacgcagcggtacatgcggaactcgcgcgggccgatgcgcccgatgaggtggcgctcgtagcagcggacgtgggggatgggcacggccttgacgcagacgaagaccagcacctggtggaacgccggcaggttggtaacgaagtgcgaaaagatggcaggcacgccggtggcgagctcggagtagatgaggccgatgccggggacccgcacgatgccaaggctggggccaagcgcgtgcagccacttgagcgacaccttgttctggacgtcgaacaggtgcctccgccgcgtgccgtagtgccacacgtacatgatggccaccaccaccagagacagggcgagcggcagccacccgccctgcggcaccttcatgagcgcggcggacaggtagacagactcgacggagccgaaggccagcaggaacatggctgccaggatgaagccctgctgccacacgaagaccatgacgagcgccatgaggagcgtggtgaccaccatgactcccgcgcacgccatcccgtaggcgttgccgatgaggtcggtgtcacggaagccgacggtgacaccgaggcagatgagcatgaggatccagttgatctcggggctgtagatctgcccgtggatgcggttagaggtgtgcacgatcttgacgcgcggaaagcagcccaacgcggtgcactggcgcacgatggagaaggtcgctgagatgaccgcctgactgcccacgatcgccgccagcgtcgcgatcaccagaacaggccagaagatggggcctgcgcgcgcgcgtgcaatataatggactctcagcttcacatcagaaacggcaatatatgctagctgagctaattattccaatcacgtacggggaatggactcgaagaagatgaagtggatgttgcagtcgggagacttggacaggaaggccgcctgtcccatgtactgcaacaccaggcacgggtagatgaggcccacgaacgcgatctgttcgattaattaacaggcacgattaattaattctcatgcatgtcatggcaaacagacaactaatcatacgtacccttatggatgcagcagtgaagtggccaagatctgcatacatagcttcggtgccagtcatggagagtagcactcctcccagcgagatccagccgtctttgccggtgcgctggaagaacctgacgacgtagtagggagagagcgcgcgcaggatcctcgggttccagacggcgatgttgtagatgccgagtgccgcgagcaagagcagccaaaggacgaccacgggcgcgaacaggaaggccacgcggcgcgtgccccagtgctgcaggcatgcaagat

SEQ ID NO: 5730 - DNA, 734 bp, Zea mays
atgcagagatatcactatatatgtccgatccacacgcgatgatgtatagcccggccgcacgccacgtactaaacgttttaagtggctatcatatcttatcacaggcagctagttgcagttgcagcataaacacggcagtgatcatgaagcaattaatagacgtactgctcactacgtcctgattactgaatcgataccaagagcaatgactaaagtgagtgaaaagtaaacagagtgagtgtggattgcattgacagacgacggccgcgcggcggagctggatggcgttccctctcaactcatggatcgcatcgcaatatataatcagctatagctggtgccctcgccggccggcacacaccgccgcagcagatatatacaacgaacagccgcaacggcacgttccagttctccgacgccggccggccggcccaccacatgcaagcgactgactgcatcgcgctgacagagcgcccgcagacggatggcgtaggcccgtcgactgccccagaagtcaacgacagatcggtccatgcgggggctatgcatgcatgcagaggcagaggcagagctggtaggtaggaagtaggatcgcagggtagcagcgtcgtcgtcagagagccatgcatacggccggcgcacggcacatagcttataggagcctacgccatgaacgacgagcgttcgatccgtcgggctcggggtccagccacgtgacggcgagccaccgaccc

SEQ ID NO: 5731 - DNA, 790 bp, Zea mays
acctgcagcggcgaggtcgctggcaacagtcttgctgccttcagcggctgcctttgcacggtagtacttcacgatgggtagtttgccgaagacgaatgtgtatagcaggaggcacaccagctcgaacaggcatgtgattgaaaagaacagtactgcaccaagtaatgaaagacgggttatttggcagataaatatcatggtcttctgttgaatacttgaatttgtagacatgattgtaacaagacccaacgacacaacaaatggaagagagttatgaacaatactgttgatgagatcagtggattaattcccatcttaacaatccagcaaatggaagtataatgccttggccaaaacagacgcaaatacataaatctatagcaaatatgttctcaagaaaataaatacctaaaatgatcacagaacataatcacatatagtataacctcatgcttttggccatctcgttcaattcccatatttgcttcagaatcatgtgcttttattttggaagtgtcaagatatgttttcttaataccaaagaatgaataactttactaaatccgcaaatggttcacaaaattctgacttactagctccaatgcgaagaccatcttttgagctctcaaaagctgccttggtaactaatctcaaagctgatgttaggacccctgatgcagctagtcccgccatgaaggactgaaaactcaaagcacaatacatgtcatgaaaactctgaatgagatacccaaaacagcggcagaaatgattgagaatagacaacgtgaga

SEQ ID NO: 5732 - DNA, 767 bp, Zea mays
attgatttgtactgatgaggttgcttctgaaaagattggtttgtactgatgaggttgcttctgaaaactgacaggggaaattccttggtatacttgtctgctggcttttgggaaatggaagccttttcgcgtggaacagtattctaaccattgaagattactactcccatctcttcccggtacttgctttcagaactcagttgatgattgattggaatgagttcagtttcagtgtagcagggtagcagcacagttgaaaaacatggatggggtggcatccttgatttatctttgttcgtcaaataaactgaatggaacctgtgtttgcttctatgcagatattcagttacatttgatatcacaatgtctcactagtcaacgatatgttaaccgcatttctactgatatggtttctcacattgttctcattccagactatttttcaatggttactgagaagatattcgttccagtatttgttgtatttatacattcagatttgtaacaaatatgttattgttgcaggattatcatccaacaagagtactcacactagtttaccagccttttgcctttggaataaccctcatcatgacatattatgaagcaaagatgaacacaagattgagaaatcttgcaggattttcccttttcttcctcgggtcttttgcattgataattgtgagtacattgcccttgcaaacattaaagaaaaaaaggagagtgcagattagtatgccggcatatgagctcatgcatcacattgt

SEQ ID NO: 5733 - DNA, 712 bp, Zea mays
ctcgtcacggtggacactgtcgccaagagcatcaggaggcttgccgctgcgaggaagtggagggatgccattctgttgtttgatcagctggaggacttgggactggagaggaacacggagaccatgaatgtgctgctggatgcgctctgcaaggagaagaaagtcgaactggcgcgcgaggtctttgtcatgctcagccctcatatcgcaccagatgcgtacactttcaacatcttcgtccatggttggtgcagcgtgcgcaggattgacgaggcgctgtggacgatcgaggagatgaaaaccagggggttccctcctatcgtcatcacatacacggctgttcttgaggcgtactgcaagcagcgcaacttcaggagggtctacgaagtccttgattccatgggttctcagggctgccatccgaatgtgatcacatacacgatgatcatgacctcactgacaaaatgcgaaaggtttgaagaagctctgagtgtctctgatagaatgaagtcctctggttgtaagcctgataccttgttctacaacgccctgatcaaccttctcggtagagcaggtcacttgtttgaagccaaccaagtgtttcgcgtggagatgccaaagaatggcgtgctccgcaacgtggccacctataacacgatgatatcaattctctgccaatatgggcgagatgatgacgctctcggtgtactga

SEQ ID NO: 5734 - DNA, 714 bp, Zea mays
aaaacaatcaaagagagcagcatattatcttacaaggcttctagctcttttatccgattgaaaacactaagttcagagacattatattgcagctcttttatcgaacctagatgcccaccctgtctacaaactacagcagacagctcgacaccagtcctctcggcgtacttgtgaacttgtggttaaggaaaaagaatttcctggagcttgaagctacagaagtaaaaaaaaaatgcatagcacacgacacagcacgtaagaaactacggaagggatacctgccagcaacaagaacaggacggaaacacatgctcccaactactcctgtatggctgcctgatgcatgccactacacagattgacctgttgccatactactacagcacccttgatggacagcaagagctgaccaaatgacaactccacgctacaacaaaatattcaagaagagcagcaaatttgctcagacccaaattgcagtcagaaaacgaagtttagaaaacacaaagttcagaaaagaatcacagacctagatgcccatcctgtctacaaactacagcagacagctagacaccagtcctctcgggctctcggcatacttgtggagttgtggttgaggaaaaaagaatttcctggagcttgaagctacagaagcacataaaaatgcagaccacacagcagagcacttaagaaaggtatacctgccagcaacaa

SEQ ID NO: 5735 - DNA, 674 bp, Zea mays
agctcgcggttctgctcggccagcctgtcacgcatcgcctgcgactcctccagcagcgaggcgtgcgagagcgccacggccacctggtcggcgaccacctccacgatctccagctcgtgcggcgcccacttcctgccgctgggcggcaccagaaccagcacggcgtagctggccttgatcacctggggcgtcccacccttgaagtcggctaccctgagcatcggcattcggatcgccgccaccgtgccggtcccctccttgccgccgccgctggcggagccaagtaccgagcccggcggcagcagcttgaccccgtcggcgcccttgacctcgaggacgtccgcgtcgtcagcgcccactacggcctcgccgtcgtcgctgccccgccggagctcgtgtgtgaggcacattccggacttgtcctcggatggcatccagacggcgcagttgtcgagcgcgagcaccctggagagctcgatgagcgtggtgtagagcacggtgtggcggtccagcgagcggcggatctcctgggtgagcatgcggacgtgccagctcgcctcctcctgccgcttcatgagcaccacctcgcggtccagctcgcgggccttgatccacagcaggctctcgcggaccttgacgcgcagcagttgcgggatgagcgtgagcagcgtgat

SEQ ID NO: 5736 - DNA, 726 bp, Zea mays
caccgagcagcacagcgcctggcccgccgcgtccacggcgccgtcctccgcgaccactgtctccggcagccggcgcaccgcggcctcggggaggcccctcacgctgccggtctcgaacaggtcgctcgtctcctcgaacggcgagctgatggcgctgatctgcgtgcgtccacgacaaacagacggaagaaacaggtcagttacatgcttacagcaggctgacgctgaccatgagcttctctcctgcgttgctggcactggcagtgcaatacacgcggttgggtcgggagagcaggtgggggcaattaactgagacacgtcatctcatttgtcatcgatgccgaagtgtctttaatttacttgagcctgatggcctctctgaaagtgatctagaaggcaggcaccagcacagccccattttttaaggtaacaattcttgctcccttctataactaacaagggtattaaaggtctaaaaagagggcgcgcgcgcctttgaattgctggtgttactccatctaggaagaaatcgacgcgttggcttcagggcagggcaatgcatggaggacatggactaaccaccactcagtcagattatgcgcacaagcatctccatatgtatatcctttgtttgtttatgatgctgctgctacctaaacttgttgttgatcgatagagccagccaatggaccaaccgagaccaaatttaggattttgcagtgcatt

SEQ ID NO: 5737 - DNA, 1384 bp, Zea mays
acccagtgtaggtgaagctttctcaagttctgtcttcaagccctgtacaaagaaaatgtgaatgattaaaatatttcatcttatgaaaattcagaaggaagtctgtagaaactaatgtgactggacatgacaagcaatattctattttactctccctttcccctcaatacccacatggaagaaacaagaacagcacaaaatgcaacagcacccaactccttcaatgcatcaataacaaaaaaaaggttcttggaggtgattgatcgtgtcactttcattttaggaaagaacggaggaggctggttatatttgcaggttattaactagattgtctaacttcacttttacaaatttaaagtttcagatatatatacctgaaaaaacatgctataaaacttgggatacaacatagcatgggagcggcacaacattacttacatgcttaattccctcatgaagatggttcacatcttgagatatatgacacttaagggaatatactgattctgtctccatgctctcctcaccactttctgcacagtggaccctggaaaaaaagcattcatcaacaaatatcacaagttcacggcgatcatttcatatttgttacatacttacatgaacacccaatctaccagttgttatgacaaataccaaatggaaacagaaggactgtttggtttgttgcctaacttgccacactttaactaactttttctgcctaaggttagttcttcaatacgagcgactaactttagccaaagtgtggcacagttagccgcgaacagaacaggcacagaatacggaacacctacacaacaattactcgatgacagcactaaaacaatcataagttcataacaggctttacaggcacagacgcccatgtatttgatatgcagacatcaaaagtataggaggtgcagtttgtatcatttaccgttctggacatgcattgggaaataatgtttattgtattcagctaacaattaggtaaaggccaattataaacataaaataagatactgttgtatgttggaactgtctgtgtactgtttaagatatataaaacaggataactagccttatgtcagtatagcagggttctttttggtgtgtgtctaattagcacatggcacatctcacataatcttttgctggtttgaactggacctgtaccatatttttcttctataattatatgctattctatgcacctctcctgcctgttcgagtaaaaaataaacagtcgcaccaaactacaattgtagaacaaaaagtaacatatacatatatagggcatataatacaagggaggggggacagaacctgctcacgagatctatccctaatagtgtatcatcggaagagctgcaggcatgca

SEQ ID NO: 5738 - DNA, 738 bp, Zea mays
acgagccagacacgcggatagcgtgcatcggtgacggggcgccaccgactgaacgtgaccccacccatgcatttgttgtgcgtgtgctatcggcctatcgctgtgcctgtgcgtgcgtttgtgtgagctgctgccgctaccatgtgtgtgcacttgggctacggccgtgagagggcgaaactcgcgcggcggtcccaggacaagcaaaagatcgagacggtggcaggcatttgttgcatgacttgcgaccttgggtgtattccctacgtgaaaaaaaaagttacaaaaaataagagtctagagcacggtccgaaacgaagaaaaatggatcaggccgatacgatggaccgggtcttgaactgttacacgaattagaaaactaacgtttaaatagccatgctccaataagttatatctcttcataaaaattatagaaaacattgatttctctttctaatattatttgtttaatctagagcaaagttatgaatgctttgaagatgtattttttagatatatataagcttttggactgtgtcatgtttgagccgacacggcacgatcgtaggcccaccgtgttttagaactgagtcgggtctagattttagtatctggacacagcataactcacccgaaaattatttcttgtcgtgctggctcgaaaataattagccagaaccacgattggcccaagcggtcccgcccaactttcagctctacgggttgattggttggctg

SEQ ID NO: 5739 - DNA, 751 bp, Zea mays
catcaaaacctgcaaggaaaccaagcattgggatgcttgagctgggagttctgggtgcccggaacttggtaccgatgaagcccaaggagggacgcaccacggacgcctattgtgtggcaaaatatggaccaaagtgggtgcgcaccaggactattcttgacacactgaatccacaatggaatgagcagtatacctgggaggtgtttgatccttgcaccgtgatcacagtggtggtgtttgacaatggtcaaattgggagcaagaatggtggtggcccagatcagcggattgggaaggtcaggatccggctctctacactggagacagacagagtgtacacacatttctaccctttgctggttttacatccgagtggactcaagaagactggtgagcttcatttggctgtgcggtttacctgcacagcttgggtgaacatgatggcgctgtatggtcgtccgctgcttccaaagatgcactacacgcagccgatcgctgtgatgcaattggactacctgaggcaccaggcaatgcagattgttgcagccagactcagccgcgctgagcccccgctgcgcagggaggttgtggaatatatgctcgatgtggactcacatatgtttagtctccggcgcagcaaggctaattttcatcgtatcacctcactgttctttggttttctggcaatgctcaagtggtacgacggcatcatgagctggtggaactcgatcacgacggtgctagtgcacat

SEQ ID NO: 5740 - DNA, 734 bp, Zea mays
ttctgtaaagggagcactccatggacaaatgctgcgaggcctggcactccgtcttggaaatcatggggagcttactagattgtcggtatgtttgaccacaaatttatggctaataatttacattgaaaacttgagattcttacccatgaggagtattggtgattataaagttctaattttcattcataatagcaccaatgtctggtactacctctgtcccgagaatgatgcaattctagttccgtacttagtcaaactatctaatattcgaccaagtttgtagaaaaaagtgtcaatattcgtgataccacataggtgtattatgaaaatatattccatgaggaatttgatatcataaatattgatttttaataaatttgatcaaatttaagatgtttgactcggtactatgctagaattgtcatcttttccagacagagtagaaaattgttattaaacagttgagagcttttcttgtgcagctttatggggtatagcatgacacagttcatgcgcaagtgtgtatgtttcctttttttgttttggtgttggattgtgtcttctcttttgatattggcatattacaatgctgggagacacactgacaggctcatacccatgtatatgagggaacatgggccccagcacatgcttagaatcatgggcactatgtctaagtctaacttcacctgttgcaaatgcaatactgttctctgaattgccacaaattcata

SEQ ID NO: 5741 - DNA, 729 bp, Zea mays
atacactgatacaccgcattttctgaatggaactgccgcatctttgtattatttttacttttatctctactaactattaagcgcttagtatagaccgccctcgccgctacccaccccccctcccccctgctaccgcacgcctgctagcccccgtgcaacccgccgcaaccccacgcccgccgccgccgcgcatctcgcatgccctcaggcctgctgccgcaaaaccctctgctacaccgtcgcgcatctccgtgaccccgccatcagagtcctcatcctcgcctcacgccgccggatcacgcccacgccccgcgcgagcaacagcttccctgatccatccgtcctccccacacccctctcccacctaactgcccagctccgatcccgccgccgacgcaacctagaccgacgatctcgacagaaggccggcgggccgcagggcgctcgagctgccacgcaacccctcccccgcgcgagccgcagccggcccccgctcgcgtccccatcgcctataccgcgtcgccccaccgcccacgcctcagccgccctcaccctggcgcattctcctctcggtgccgactgccgagatctccccggccctctcccgagaggagtgcccgctcttgacccgacgtccgcgatgacggtggcggctctgcaggcgatggatgcgctgtcgcggtggaggaccatgctgcgggactctctgcggcgaaacccaggggaaca

SEQ ID NO: 5742 - DNA, 804 bp, Zea mays
gcaacattaatccatacatttttacatcgcgcataagagcgtgaactttgcgttttcatgggagcctggtggaagcaactcgacagactttgtgttatgcatccggatgaagtgttctacacagccgtagagcctacattcggatcgaaccacaggataaagaaacaaacaaccaatgaaagaatgcctggttggcgaaacgagctagattcacacaagagggttcttcccgcgcggcagggagacactgcgccggatgtccggcaacggcatattggtcctctcggcgtgcggcggcttgctccagttccggcgttgccttccttcggtcagaggctccatctccccccggacagaggccctgacactgcaaggaaagagcatttgggactgtcaagtataccacagtaaccacacagagtgtagtgaaaagatgtagtaaactacgagagaaacagaaatagcagcggaaccttacctgacatctatgttctgggactgtcttgtcatcacctttgtcggtaacttcttcgcagttcggttgaagtggaaagtaggttcatcgcccgcaaactcgttctcgatttcggacgagtccctcgtgttcctggcctcagacctcgctttggtacccgagtgcctgttcgccggtttctcttcattgtgagtctttggcgtactctcagacctgttcttcaccatgctctgccggacaggcggaattttggttctgttctcctcggagtccccgaatttccgtaggttctgagctgtcaggacagatgaaggtgtggtcttcgagtt

SEQ ID NO: 5743 - DNA, 788 bp, Zea mays
  unsure (1)..(788): unsure at all n locations
actggtgctgatgagagtgcccgtttgagcgcttggaaggcggagtcggcttctggagaccactgaaagccttctttctttaggagtttggttaacggtgcagcgattaacccaaattccttgataaatttccggtagtagcctgccaatcccagaaatccccgcagtcctcgtggtgcctttgggatcggccaagaagtaactgcttccaccttgctgctgtccatagtcactcctttagctgagatgatgtgccctaaataagcaacggatgtcgcgccgaattcgcatttggactgtttgacaaacaaattgttggtcagcagggtctgtaggacagccttgacatgtatgaggtggtctgaccatgtggcactatagatgaggatgtcatcaaagaatactaggacaaaccggcgaaggaactgacccagtacttcattcattaacgcctgaaatgtcgctggggcatttgagagaccaaatggcataaccagaaactcaaagtgcccatggtgtgtcctgaaggctgttttgtgtacgtcttctggatgaacacggacttgatggtagccggatcggaggtccaatttagtgaagaaatgtgcccccttgcagttcatctagcagctcatcaaccacgggtatagggaatntgtctttgactgttttctcattcaatgctctataatcaatgcagaagcgccatgatttgttcctctttttcactaggagtacttgagctgaaaaagctgatgtgcttgaacggattatcccctggtgaacat

SEQ ID NO: 5744 - DNA, 519 bp, Zea mays
gcatgcctgcagtggatcatggccgagctcatgaggaacccgagagtgatgaagaaggcgcaagatgaggtccggcaagcggtcgccgccgccggccggcagagagtgacagaggacgacctcagcaacctgcgctacatgcacctggtcatcaaggagggccttcggctccacccacccttgccgctcctgctcccacgggagtgccggagctcgtgccaggtccaggggttcgacgtgccggcgggcacgatggtgttcgtgaacgcgtgggcgatcgctagggaccccagccactgggacaggcctgaggagttcgtgcctgagagatttgaaagcagcagcgtcgacttcaaggggacggacttcgactacctaccgttcggggcaggacgaaggatgtgcccgggcatggcgtttgggctcgtgagcatggagcttgcgctcgctagcctcctctaccattttgactgggagctgccgcctgggatgacggccgcggatgtagacatgaccgaa

SEQ ID NO: 5745 - DNA, 770 bp, Zea mays
tcccagtacaggacagcagcgaacattcaagaagttgacgcctgctgagatggctgagcggcgtcgccagggactttgttataattgtgatgaacagtatgtccgtggacatcgctgccctaaattgttctatcttgaggtcacagactatgaggaagatgaatctatagaggctgattcagtgccaggggacccaacaccagtgatctccttacatgccctcacgggtatccattctgagagtaccttgcagctggaagtacatatcatggggaaagctcttacagccctgttggacacaggatctactcacaacttcatcaaccaagacacgacacgcgctctgaaactggactaccagccaagcccagccctccaggcatctgtggccaatggggataaaatcatgtgttgtaagctctccaacagcatcagcttgactatcggccaggaagactttctgatggatgcttacgccatcccaattgattctttcgacatcattctcggggtcaaattcttgcgcactttggggccaacactttgggacctcgagaacctgtgcctagctttctggagaaggggacaacggattgtgtggaaaggactgggatcagatcggaaggccattaatgtgtacccagcagtgagaacaattagcacagatatcacaaccaccaaaccgatgatggatcgtctgctcctgcaatttcagaaggtgtttgctacccccagtgaccttcctccagcaagaagtgtgatcacaggac

SEQ ID NO: 5746 - DNA, 777 bp, Zea mays
acatggggtttggacgaaagtggtataacctgctctgccttcttctctccacctcctccacaaaacttctggttaatggtgtgcctggagaattcattctgcatcatcgggggctgaggcaagggggtcctttatccccagtgttgttcttgctagtcatggaggcattgaatgccttaatcactaaagctgtccaagcatatttcctacagccgctggctgttcagcaggctaagcaccggatttccttatatgcggatgatgccatcttgttcctcaggccaaatcgagatgatctgcttctcatatctcagctgttgaaggcttttggtcatgcgttaggcctccggaccaatctcgctaaaagctcagtgtgccccattaattgcacaattgaagacttgaaggtcatttctgagctcttggattgtgaaatcaggaatttcccttgcacctacttggggataccgcttactattcggaaactaaccaagactgacctgctgcctttgattgataaaatagcagcttgcctcccaaaatggaaggcttctctcatgagccgagccggtcggcttgtgacggcccccgctgttttttctgccatccctatccatgatatgctagctctggatctccccaaatgggtgatcaaagctattgataagctgcgacggggtttctagtgggcaggccgtcaaaatgcttatgaaggcaattgcctgtgtctcgggagaaagttcaaaggctgttacagcatggtggcctggggattct

SEQ ID NO: 5747 - DNA, 715 bp, Zea mays
ccagagaaagatgactcccaatatccctcacccatcgccagttgtccatggtccgagcaaccgtcctggtagagctgactctactgtccatcacacaaacaacatctggagcaatatcaaagatagccttcccattcaaccatttatcttcccaaaaaagagtgttggtcccatttccaaccatagttaagaccgaaagattgaaaaattgtctgacttgctgctgaataggaagattcattccatgtcatggtctggacggatcagttttttgcagccataaccatttcacctgtaaagcccaacttttgtattgtaaattagaaacttcgaggccgccatatttcagaggccttgtaactatctcccatggaacaagacagcttccaccattgaccttcttccttcctttccaaagaaaccccctctggattttatcgatggatttgatcacccatttgggaacactcatggccataaggatataaacaggaattgtcgaaagcacatgcctcactaacgctgtcctgccagccagactgagcaaatgagccttctagagccggtcagcaatcttatcaacccacatcataaactcccttttccttagcttcttatcagagataggcagccccaaatagctgcatgggaaggatccctagctgcattgcaaaatattacagccagcctgaacctccagcccatcacacctaat

SEQ ID NO: 5748 - DNA, 749 bp, Zea mays
tgcatgcctgcagcaccggtcaagtgaacctatcgttttaccaaagacttcttcatttacctcatttccaccacctgttgctggtggtggtagagccccttaccctgctcaaggccttacacgtcatgggagcattccatcaattggcgctgggctccaaatgggttctccgagcatgtcactttctgcttctccatatcatatggtcggaccatctcatgggctgccatacacgggaggcatgccttatggtgctcttaacctgcctgtaaacaattcagtgcagaatgattggtcgaatcatgttaaccctttcactggggagcatcttaatctactgcccaatttattgcacaaacaattatcacttcctaatagcccaatgtcgtcactcctattttctcagcatcagcagagattggcacaggtccaatcatcccatcagaattacctcaatataatgccacacgtcctatatccccatcactccgcagagattacaagcaggtttggttctgttggcagttcccattcatcaagagacaagagatcaaggtcggggaagggaaaacataacattcgattctctcaactaccatctgatactggtagccagaatggtgacagcggaggtataaagtttagatccaagtacatgtcatctgaagagatcgaatcaatcttaagaatgcagcattctgcaagccacagcagcgatccttatattgtggatactatcataagcttga

SEQ ID NO: 5749 - DNA, 720 bp, Zea mays
aacaatgttaaagatcacaatgctactaattatgcttcccatatggccatatgggatcatagtaaccatgttacatagtctgaagggatcaaagggatgagcgaaagatatgttgcttcagtataagttctgagatcttacaaaaacatagaaatcatctacaatatagtttgaaataacattcctgtttcagtaatttagtttcttacaattagtatacttaacctgaactaggatatacacttatttcttaactgtttctatagacctaacatcagttttgctcagtgactgaggtttttagtcacaattcatagttacacttgctacattataattgataacacacaatgccaacaatgtcaatgacatggccaaaataatagagatgcacacttaggttaaataataacaaaagacttttagatggccacacaacaaggcctgaagtttagattgcccatcaggtttcaaaatctgtggcatgggtcagaaatctaacgttagttgtgatatttagagattgagtactttgttgtttggccatacaacaagtcgaatactttagagattgagttgtttagagccttagttgcgatacttgtatcggttaagatgagtcttccctttaaaggaacatgcattatacttccataaagcaatcaagaaataactaagtctctcatcccaatgtgagtctaccctttctagaaacattac

SEQ ID NO: 5750 - DNA, 769 bp, Zea mays
tttgcatgcctgcaggatcaatttacattctgaacatttaccagtactttccaggatctacattggaatacctcggtccaaatgtgatattcctgaacctctttaatttttctaatacatgtacccaataaaggtataaattgattggctacttatatatgtactaaacgaatccagggaaaaaaaaggtcaaggggagaaagcccatattaccatttccccctgcttgcctgcaacctgtagctattgcaaaattttcaccctatctacgctctcaagaaaaagaggataagctagtgctagggtccccctgggcagaggccaccagacattatgtaagttgcacagctaaagtttatattgtgaggttttcctggatggccacaaacgagccacagatgttcccacccatatctgggaatgttgtgcatccgggtagcggtttcaccttgcctttacggtcaacgcttactggatacttcatgaggtggcctctcatctccgtcacctcatcggcaacaaactgcttccagttctcttccccaagatgacgtacacgcctcatgcactccaggctctccggatagttgaagtcttcctcaatgcttccaatatgctcagcccataaggacattctgtagccataaatctacaaggtaaaaatcaatatattaaacttagagtatggcacaaaatgaaatcaatgacacccttaacataacaaacagctggaacaaatgtatagcctcaggaaagcagtagcaacgag

SEQ ID NO: 5751 - DNA, 731 bp, Zea mays
tggagctcctactgaatctgaaacacttgttgaagattccacaaagcagacagcagctgcaaccacgtttgaacatggaacggaatgctacggttatcatgagaatgggagtttagttaatgaaatttctgcaccaacccatttttcacctgttggtgatttgcagcatataggcaaacaaatgaaaggaagtgttagtggcaaaatggatatattgaagcaagatgctaattccagccaagatgttcatgttcctatgatccatgagattatgatcactcctaacaaacgagcaattgagaaagactctcgggttggtcaggcttcaaaaacaatttcgaagactgtcaaggtgacttctagtaatgtttctgatcacacatacgtttccaaggtattcacacattgattttggacatcttcccatcttattcattgttgcaatctgtatgtgcattcttttctaataagttgactatcgtcctggacatggctcagcacaagacaggaaataaatgcctcattatttttgtgaaacgtcataactagaattcataagctatgccctatctatttgaattaccttgatgcatgccgagatggctagattgatttcttcagtttcctgctactttagccataggcatatattatgtgttttattatgtagcccaaaacctgtacacttttcgtgaagctataagctattttttcatgaatatttttaggga

SEQ ID NO: 5752 - DNA, 803 bp, Zea mays
tcggtacccgtggtatggtctaaacccgacctgcagacattgcaagaaaaccagcacccatgtccacctcctgcaatccaagtacaaccaacccaacttctggcgatgggagttttagccaagctcttaaagactcgtaggatgccttttcttgcccaacattccaagaacccactaatactttcatgtattcaaaacttttgtatgatgaatctttctccatcaactctgagcgcaaaatgttgtcaagaggccctggtgatgccaagttccatccacggatttctccatgaccagccagtgtaaagatatatgaacctccaacagccatactcagaattggactactatgtgcaatccatcctcctaacaagttgccttcaaggtccaacagctggatgttgccatccatgtaacccacccatattcttgttccaaaattgtaaatgcattggacagatgacgaatgatgcaggaactcttgcaaacgattaccactgccatcccattgggcaagagagccatttgccgatcctgtccagatcatcccatccgttgacattgtaaatgcttcaattctacgagtgtcatcaccaaaacctgctttaacagcaactctccggactgcatcagctgctcccaacaaagcattccgtgatctctgcaagaaaccaacaggactgcgagctttctctttcctcggagagaacagagtttgctttgtctcatagctatatgaatcctgagcagataagatgtcgaaacgggtatcaacttggccatcaatgtttaccacttttaga

SEQ ID NO: 5753 - DNA, 773 bp, Zea mays
gcaggtccgcggcggccacgacggtccggtgttggcggaagtgcggtggcgtcatcccgcgccactgacgctccgggtggcaccgcatgtggccgaacagcgccttccacgacgggaaccgcttgccgcactcggtgcacggcggcgtgtcgtcccccgtgggcgacgaccgcacccgagcgacgccgccgccgtcgggggagagcgcgcggacgacgaacgcgggaggcggaagcggaagcggaagcgcgagagacagcgtgagcatcgtgtcgtggtggggcgccgccggcagcggcagtggctgcggaggacgacgagcaggagcagccgcggcaggccggaccggagtggccatggcgaaccaccaaggattgatcgatcggggaggctgggcgacgagggaagtggaagttgcatttgcgaagggagcgggggcgatatgtaatgtacggacgcgctcctgctgtggcggttgccgacttgacggccggcggcggttgcttgctacccagcgtgcatcttggacatggaagaaaacgccttcgggcttgccgttgccggctaggcttgcttcttttccgcctatccgttattaattgggccaaggagagctaacattggagtaccatgattgattcgtttgctgcaagtttatacaagagcccagtccatgcatttccaggccggccaggctttgtgttggccctgcactagctgggcccttttttgcgcttgccttgtacgtttttttagccttaatacgaaccaaa

SEQ ID NO: 5754 - DNA, 732 bp, Zea mays
tagctagccctgctacgtagtaccatgcacctacgatgacagacacgaggcagctatagctaagcgggcgaggcacgtgccgtccttattacttctcccggcggagctgcgcggcgacgacgaccgcgcgcgtagaggacggcgcagagcagcgtgccgacggcgcacgtggcgccccacaccgcgaacgtgtccctgtagcaggcggcgccgatgcactggtggctgctgctgccccccgccgcgcgctggtacaggtaggccgcgaggtagccgaagcacagggagcccacggggatgttgctcaccaccacgttgtggttcacgccgaagttctcggccccgaacagctcgctcgtcgccgacacggccaccgacgcgatggcgcccgtgcacgtcccgatcacggccgtgctcaggtacaggaagaagtcgctcgagttcagcagcaggaagaaggcgcccgccatgggcgccatcagcgacgccatggatcccgtccttgagatggagtacccactcctgagaatgcaatgcaaatgatatacaccggccagttagcacgattaaagagaacacttgtaaaaacatagactggtgatgataccgatcaaattaactatatatactagtagcaagtggtgtgtgaacagaatgcttgctttgcttctcacttacttggcggagtagtagtccaagaaggacgggagcaggcgaccgaagaatccaacc

SEQ ID NO: 5755 - DNA, 766 bp, Zea mays
taaaatacatgtcagtgtatgatcccaatgtggatacacgggagtaaatcttgcataactaaatctgaagttattagggcaacctgacaattgcacataagcttgaaaattataaaacaaatatcggtgcacatatcaattcaataaaaaaacatatatctctgtttaacctcaaaattaagtatgtagtggttgtcttgttgagcagaagttgttaaacaaagtatattgagaaaataaagcatcagcatgtgatgcaaacactacccccccccaaggaaaatatagcaagtacctgaaatgaatttatcataaacaggaggtaatttgttttctctgccatattaagagccctttcctgcatgatagcataagaagaaaatttcagaacaaacatcgtaatatcaaaatattttcataagtaaaccatccagaagccacagataccatactgacataagcagataagttttgagctggagatgaacaaacaaataactacttgttggaaaccctaaccgtaaccagggttgggagatgtatttatattagtagtagttgggcctaggcccgttacattaagcaatacacagtaactctaacaacttgtatatgaattatgaaaacagctggtatgcacaacaaaaatcaaaaaagaacgtaagcaacaaagaaccaatatcccctgtcccctgatgcctctcaactctatgacccagccagtagaaaatactccctccgttcttttttatttgtcgtgtttcag

SEQ ID NO: 5756 - DNA, 716 bp, Zea mays
acccatagttggaccgaggtacatggagatcgtcccagtccatgggttgtagagggagggccaggttgccggcgcacctatcgccgaggtgctgccattagcctggttgcgcgcaggaccagcagggtgccctccctgcctgtgatggttagcaccagaaccccgaccacccttcccacggccgcggccacgaccacgtccctgtccctggccgccactgctaggggggcgagaggaggaaggtggctgggagttgttgagtagaaggcctgaggtggtgctgaagtcgtgtctggcccaagttgtagttcctcgaggaccagatcatcccggagtttaagaaaactcgggaagggaggactgcgtgtgatgatcgcccgaagatgctcatacttcttgttgaggccgcgaagaacattgaggacgaggttccggtccgagaccgggcagtcaagatcgccgagggagttcgccatcgccttcatcttgcggcagtactcagtcatcgagagatcaccttggacgaagttgctaaacatggcgtcgaggtgaagggcacgtgtctcgctgttgccgatgaactggatcttgagcgtcagccaagtctgatgcgcagagatgccatgttcccgggcgatgtcctgaaggtcaatgttgatgggggccgaaaatccaaggagacgacaacgctgtccatccgttttcaggatggatcg

SEQ ID NO: 5757 - DNA, 785 bp, Zea mays
gtttttttgatgacgtgttgcatggatggatcgtggatgtgtacgtgcagcggaggagctgacggggtcgtcggagtccggtgaggacgacgacgggtcggacgccgtggcggagccggagccgaagcggcggcggctgaaccggctggggtccagcgtggtgcgcagcgcgacggtgctggcgcgcaccctggtggcgtgcgaggagaagcgggagcggcggcaccgggaggtcctggagctggaggagcggcggctgcggctggaggaggagcgcacggaggtgcggcgccagggcttcgcgggcctcgtctccgccgtcaacagcctctccagcgccatccacgccctcgtctccgaccaccgcagcggcgactccgcctcccggtgatcgggccgggcaggccggcaactaacgctcggccttgaacgtccgtcgttgtcaacacctctcccagctcagctcggctcggctcatctgccgccgcgccggcgttcgttgtgcgatccgtcgtccgtcgcggccggccggctatatctgggctccgacgacaacatgatccaggtatcgaccgacaaaccgaccgaccgaccaggatgtaaataaggtgaagcgtgattcattgttggaggctgtgtgactccgaattcttttggaggtggtggaagcgtgtgtgtaactagcattgcattggtccgtgtgtctcgtgctcgctcgcgtgcatgtagtagtggtaagtacaacgtgtcctcctgctggtgctgctgcttgtgcttggtatctg

SEQ ID NO: 5758 - DNA, 581 bp, Zea mays
aggtgtggatgctgttcatagttatgaggcgaccactgattatttgtggtacagattctccagctggtaatccttcatcttcaacacgatacactctctttgataatgacatcacaataataagaacaagcacacataatccaacaagtgtaccggcaatggtgaagatgatgacgaccaaatagtgcctctttttcttaccagtagtaggagtgtcattattgtttcctgtaccatttacaattacaagaccaggatttccgacaatatctacagtttgacttggaccgaatctaggaatagacccagacagattattataggaaaggtccagcagtgtcaagctttgcaggctccatagtgaagatggcacagcaccagacagggcattgtgagaaagatcaagaatctctagttcacctaaagagttgatgtttgaaggaatagacccgtcaagaaggttatgactaagattcagaagagatgtggtcacagtggttggcatggttgggatgttaccagtcagagcattatcacccaggttgagctcgattagatcctttgatgaactgatggagaac

SEQ ID NO: 5759 - DNA, 799 bp, Zea mays
cacttaacctgagcaccaaccggctggctagcccgctcggtgagttggccggcttcccccagctacaagttcttgacctgtccttcaattcctttgccagcagaaatcttagtgcggaattgggttatttccccaagttaaggagcttcaacactagttccaatgacttgaatggtgatgttcctaccagtatggtcggctctttggaggagctggtattgtctagtaataatttgagtggtccaattcctctgcgtttgtttgaatatgaaaatcttactctgctagatctcagccagaataatctgaccggtgctattccagataacttcacgagtctctccaagcttgagactttgctcctttctggcaacaaattgattggggaaataccatcgagtctgtctaatgtgacaacactgtctaggtttgcagctaaccagaacggtttaactggacccatccatagctggattaccaagcatatagggatgttggatttgagttacaacaagctgaatgggacaatcccctcagacttcctctcgcatcaggggttgcagagtgttgatcttaccagcaacttgcttaacggagccattcctgccaccttgtctcatagcctctaccgcttgaggcttggtgggaaccagcttggtgagaacattccaaggtcagtttgtgataccatgggcttgacttatcttgagttggatgacaaccaattgacaggagttatcccttcagaagctaacaaatgcaagaacttgacactgttgaatctggcatcaaaatcgtt

SEQ ID NO: 5760 - DNA, 773 bp, Zea mays
cggtacccgctgatgctctagactcgacctgcagaaatggcttttaaatgtgcacgagggcttcctcctgaggccgcagctgagcaaattgttaaagtacaatactaatacccttcccacccatcctaacacaaggtctcaaatcctcagttgtacatgtactgttcctaactggtgtattgtttgcaggaagcagttgaagcaaaaggattgagagatgatacaacttgcattgtcattgacataatatcaccagagaaaccaaaacgcactatacaatctcaaagaacgccaggaaaaggccttgtgcttctaaaaaatttctttttaaggaaagcagcatctgactcgttgtctgtccctgataaggataattatcccgagccagatttagaggaggtctttgaggacggatgcccatccctttcaaggaggtttgtacccttacctcatcttgattgcggatgcattatagctggcaaataattatactataaacttatgctttccaattaataaatgtattgtcatctatgaagtactgcttcaatactggttctaagatacttgtaattactactctaataaataagtacgatgtttcctgctactaacttgatgccacttgagccggaagtattttacctaaatgtggaagttgtatgtgctcaaatacaaaatacattagattgtttgatactgctggataccataccttggctaattcctgatagagcataatgaatgctgttgtcaagtaagagtaaataacc

SEQ ID NO: 5761 - DNA, 649 bp, Zea mays
cagcttgcatgcctgcagtcgtcggcgctggagcggagctcggccgaggtgttccactgcgcgaggggcacgtgggagatcctcccggggatgtggcagctcgacgtgcccccgaaccagatcgtggcggtggccaacaggctgttcagctccggcgactgcctcaccagctggaaaggacacgtcgaggtctacgacggcgagctcaacatctggagcatcgtggaccactccgccctgcccgacctgtcgctgctcgccagtctcccgtcttcagctcagcggctctacctcaccatggccgtcgtcggcacgcagctctatttcctcgccggctaccaggtgccgtcgggcgacgacagcttccgaacagtctcgctagtgcacagcttcgacgccagcgctgcaccggggctggcgccggcgtggagcagcttccggcccgagatgagtcacgaggacgccgaggacggcggcaaggagctgttcagccagtgctgcacggtgcagctctccaactaatcgtaattacagaattacagtctcagtcttccaatccaatcacagcatatgcatcatggttctgaaacttttctgatcacagcatcatgccattgtgtctcatctacagacttgggctcctgtggtg

SEQ ID NO: 5762 - DNA, 628 bp, Zea mays
agcaggcagggctggcccgtcgtgagagtggaggagcacggcgtgtcggcgtccatccatgaatgatccagcgtctagccatgaatgatccccgggcctggcgactgcgagcaggatcggagcagcgagctagcagggcacggcgagggcgtgcagcactgcggcaggcagcgaactgattcggagggccgaggagagcgacggggcatcgaagccgaggccacattaactgatgcccaaaaggccacaggtagccagttaccggaatcagctttaccgcgggcagccttggggggcgcctggcccagcccacttttgcaaaaacgagagacctgctttgctttgcttgctggtgttggcctctctcggcccccgtcgtgttctccccccaattattgaagcgcccgaattagaaacaaggaatcccctttctcgagcaaaatgctttttttttcccaacttattttaatttagggctagtttgtcaaaaaaaaatcaaaaaatcattttctaaataaaaattagttcatttttttgaaaaaaataagaatcttttagtaaaatagggaactccattttaccaaaagcttcatattttcttaaaagaaaatgaacctaattttgtttg

SEQ ID NO: 5763 - DNA, 713 bp, Zea mays
agcacttctgtagcaactgggcaacctcaggttgttgctgaacctagctcgatatgcaaacttcaggctggtaagaccacagcatcttttgggtaaaaaaccagaaatggaatacctttttcagtgttgacatttttctaacatatctttaaactaccttaatccgctggccagatctccccattgccaggaggcactctcttcagcgtttccttgagaaacgccgtgacaggttagcatggtagatgatagcaacagcgctatgatgttctgaatctcttcttaggctccttctacatgttgaaaactttagttataaactggtatatgtggtacaacagtattcaacagcatgctttgttccgtgttctatttttatcctctaggtagggtaaaaaattgaaataatttgctgttataattgtatttaaatgattgcactttgtgctcgatgactgcataaagtaaacgaaatgtgactaattcatttaaaacattcctcaaaaatcctaaaaatttgtttacagcaggaatgagtagagagcctgcttacataatagaacacatagcagctaacagcgttggatcatgcaactttcctgactttttaaatatctgcaaaaaccgaaattaagggtggtcacgggtcacctaaaggcccatgtgtcatctgtaggttgcaaactagctgaacaccattttgttcttcagat

SEQ ID NO: 5764 - DNA, 825 bp, Zea mays
agcaacaagtgtgaattgcactacgagtgcctgaatatggcttgtgcggacagccaaacagacttatctggatataatggcgagctgggcaattcagtggttaccgacgacaccgactcgtgggcgccgccaacagtccaggggttccgcatgcatctgcgtgggacgacatcgaaattttattttatttttggtccaacagaaacggcaagagaagcaaggaacgaaggtgatctgagcgtatttctatcattttcaacctccctacacatgcatctgcgtgggaccatttgagctgagaacaaggtagcgaagagaagaacaaacgttaagtgccaaaatgggaaatggtagtggaaacaagcaagcaaagccccatcatctttcacactaaacacatgtccacacgtggtactgcattccgttactactagacgatccatgtaacgaagtcagacagacgagaccaccggcgtcacggcgtgatgtacaacagacacagttcggtgtgcggagtgaaggaatccacttcagcataaacctagcacgcgacagcacaaaccacagtaacagaggttccggtccacattattagtgcggttccacgctgccgccgccacataacataaaggcaacaacagcatgtccctgccccttcccacaacgtcagccttcaccgatgggacttcgcggggacctttcaagttactgggccttgccctccgctgtcacctcaatcctcggtgactccatgccatcggacgacttggcggggctgtatggagctttgctcacgaccctgtttcatgccaacagcagtcgagt

SEQ ID NO: 5765 - DNA, 832 bp, Zea mays
acaccgcaggtgctatatagtcgacctgcagagccgtgaaggcccgagaagttacaccgtaccaaactgtcctgtggtcactaacaataatcgatagaatggtaaaacatggccgagatggcctgtgtggatctgtgttgaaaacaatccaaatttcactctgacagaatggcggggaaggccagggagcacgtcagcaagttccattccatgatagatatcggagacaagattaccggcttttacagttggagttgacttggcttttaaagcagtccaaaaactctctcgatctgttatagagtgacagtggtccagatgatagagagaagaagcacacggtgcatgcatgatacgacctcccggcctgaccagattgccaacctaccgagtttgacctgaatgcccccggccggtaccatccaaacaccccactgtagacgacgactgtagcgagctagcgacacagacagaggtgcacagtcgtcgtcgtcgcactcgcacgtacggcggaacagaaaccacgacgcgcgctagctgctgcatgcgatgccagggagaaagagagaagaaaaactaggccttggattctagcaatctatagctaccggcacgatctgcatgctagtcgccacgccagggcaagataaccgcgtagtaaaacccgcgttgtacgggcggcggccgcgacaggacaagcggcgcccgcgcgggcaagaggccccgccaggcccacccaactagcctgcttgccgggggtgcccagggccctaagcttaggttaaaccctaacgtaccaggtacaagcttctttttttctttcttacaattg

SEQ ID NO: 5766 - DNA, 756 bp, Zea mays
aggtggtcgtggatttgtttgctggaattggatattttgttcttccatttcttgtgaagtacattctctttagcccttggtcaaacacttctgattctgattttatcccctctaaaaagtattattcttaatatcttactcttgcagggctaatgccaagctagtttatgcatgtgagtggaatccacatgctctggaggctcttcggcgcaatgttagtgacaacagagtggaggatcgatgtattatacttgaaggagataaccgggtgactgcacccaaagtatgtactgggcaaattccatcttttggtctaacacatgaattacaatggcggctgatctttctttctttcttactggacttgaattagggtgttgctgatcgagtctgtcttggattgttaccctcaagtgaatgtagctgggccactgctgtcgaagctttaaggtgatctgtcttcatcaccacctgagttgtttcagtcatgcttatttcattctaggtttcttatagtgttccaagaatattttatatagaggtctaactgcctaggtaaactttgtcttggcctctagtcggacctgctgaggttcttgtttctattgcacaagtagctgcatcattgagtaattaagatgatttattagtattgcttgggttggttttaccagggagacaggttgtgttagggagtcaattgggaatgtgcctatcttttgaaagtcttgtgcctatgttttaggattggttagc

SEQ ID NO: 5767 - DNA, 752 bp, Zea mays
aaattgggcagcaaaaccagtttttctttcctttttgtttccccgaacgggatgcagcaggccagaaactatctcataaggaaaaaaattgcacaatgaagcatgcaaaatgtgatgaatacctcaagaacaatgacagtgcaagttcatagagcaactgatagtgtgaaaccatgggagggcgattgatggaagctctccggactgctgcctcttttgcaactctcaaccattcaggagtagctatatttgatgcttccccacaattgaaacctgccacatatccaaaaagtcctcacaagctgaccggaaggactaacacacaatacacagcaaagcagtgaccaaatgacaacttaagggtgtatttggtttgacttttagttttggctttttgtccctaaaagctaaaagccaaaacaaagggctgggaagcagcttttttctaaaagctaactttctcacagtgtaaaactgaaagcacctcttgacccgcttttagcggctttcggatgcaactgtgaaaatatatatggaagaacttttagctgcttttaatggttcttccaaacgattttagaacttttaacagctcacaacccacaacagctttttcacagcccacatcgggttttttcacagccacagcccaaccaaacagacacaagcttacttttacgataacatgtgatacagtgatagagaaggaaatcctaatgtgccatatgcacatgcacttgtgcattttgaca

SEQ ID NO: 5768 - DNA, 764 bp, Zea mays
attctgatgctgcaagtattatgggaactctttctactggcaaagatgaaccagtaaatgttgacccttctgttgatgaaaccaaagtcagcacaatgaacagtcgttccagagttgctgtttttaaggatactgaaaaggatcgtagtgacccagactacgatcgaaactacaaaaggttagcatattcatcagtatttcttttgtcgccaccaattagtgttaataatgagatgatgaaggtgtaacatatatcctcttgcaggtatgttaggagctcagtgcctggcttcaacttgagcccaggtgtttttaactttgttgtgcctcagtttatgcagtatgacattggttatgtgcaatctcctggcatgtccacaaaccagcatactatgtactttggccagcctgatctaacaatagggtcttctggagctgctgtttatcgacattggccaaccccaacaatgatgtatccccattgctatgataatgttagtccaatgatgtctcaggtgagcataatcatataaggtcccgtttgttttcttttatttcgagaaattgaaatcttactaatggaataagctatttttttagaatgtgatattccaccacttttcaaagttatcatataaggctatctcaaattcatggggcgagagatgaaaattgattatacagatttacatgctatttttccgatgtacaatttataacacacccttctatttgtttcgctataatataaatgtatataacta

SEQ ID NO: 5769 - DNA, 726 bp, Zea mays
agggacgaagggcccgttatgaccaagtatggcctgtaccatacctcagccccgctcactagatgtgtaaaacctaatttctctagtagccgggtctatcagcaggtgcaccccgcacgccaagtcgccaagcttgtgcgcgtctgtctccctactccgcggccggcggcggatatcgcccataaccaccaattgtccagcttctcggcggccaccagccgctagctctatgctcgacacgctgcagccaaccagccccgcgcagtcgcgcacaacacacaggcccggacctagggggtgcgaggggtgccatgcccccccaagacatgggcccccaccctccaaaaaacataggcatctgccttgctcgtcagccttttcactggaagactgtgtctgcgtatcgaacacaattacacaaaccccgcgctgctctcttggactggaagttggatcttggttgcgccgcctacgcttagcgcctgcccgccctgccttggcgatcggtgatcgcttgatcggcctgctcctgccactgtgcctacgtgcccgtagacggttggacctggacgcctgtgcctgcgcgcccggccacccaccggagccatctgcgtgtcgcgttgcctgccgctgtccgcttggaaggtaaattcatgcttacctaaaggatatttgtggtaccctttatttgtttttaatttagttaatttgcttttaattctgatc

SEQ ID NO: 5770 - DNA, 1454 bp, Zea mays
gctagatcagtagtgctccaaaacggccaagcttcaagccagattagtagaaaacatactaatgaacaatagtgcaaaaaaataatacaaatacacccagcactaaaatgagatgagtgtatgtacctgtgcagcttgaaggtattaggcccataccggtgagtggtatccttttccaagtcttttggaaggttgatgatttcaatggcatcaaatgggcatttctgcaacagagattacagaagcaagaagtgcattacatcaaataggcacatcatacacagttacctggagtaagttagaaatctacctttacacagataccacaaccgatgcacagttcctcagaaatgaaagcgagtttcgacgccgaagtcacttcaatgcaaagtttccctaaacagtaaaacagaatattgtcataaaagtgatccatgccaagccagaaactagatgatgtgcagaacaacaaagggaagagaacaatatactgtatctatttcagcgaaatggatgatattgtatttggacactggaccttcacaagttacagtacgaactatacatccagcagcatgtgagaattctattcaattcactaaacaagagatattaaccaaatttctacagctgaaaaaatgacgcttcagctgctagtggttccgattcctcggaccttgcaaaggggaccaacgaattacgaatcaacaaaaaaacctttgtaacattgaattcaccatgcgtgaacaggttccctgatggtaaagccctcccatatcaaaatttctggttggtcaggtactgacgtactgtcacggtgtaccatacgaccctggagttcatgatgctaaataccatactgaaggtagcatttggttgtttaggctgtatatttttgagccagggtcttggttgtatgaaggaatgatcacggagcacggtaacttctctagtgctcgacataactgatgagttgcactatggttgtctgacttccctcgtccttgatgtcaaagaaggatttggggatgcactttgattgttgggcaagaactgtggtgaagatgcagtagctatacggattatgcatctgtggccaccacctaaaattgttgaggtgaagcagtgtgatggagctatcgtcagtaaattggccaacctttagagattgttagtgtcataacagactatgattgtgttaggacatttcttatgcgagaagtcactcagcctcgcattcagtcaatactgtatgttgaaaagccctatgttttttacagtgaacattgatgtgaagcttcttcctgggaaatggctagaaccatattttaatgtgagatgttgctgatcttctactcaaaggctattgcaattttctgatatgaatttacaagggaatgatgtcctcgcactaaacaaaagtcaactgtgcaatatatatgaagaatgtactt

SEQ ID NO: 5771 - DNA, 834 bp, Zea mays
gggctcaacagtcgaccagcagagcaagtaataaagaactagagcatttaaaacctctctattatagataatgacaacaagaatgcataatgctaattgcccacctataaaatatatatacttgacaaaaaatgcaactattgactgattatttacagaatcagaggaatagtttacttacaaccatacgaggcatataacgaccataacagttagcaccacgcttgactaacgcacggagcttcctcgcaagcatgacttcaaaaccatcatacaagttccattgttcttctatttcttgccttgtgcttgcgataattatttcagatgcatcaagagacaactcctctgcctcaattcggcgcattattttgtatgtcacatttatttgttctcttgtctgtctcccttgcttgagaagcccttcaagcttatctttcccaagaaaatgcccggtaaacaacatcgggacattaagtgctccagatagtagagcagcagcaactcctgcactggcataatggccatgaatcacagtaggccacactggacacacactgccagtttcttcgcctatagtttttgacatgcgcacaatatgacctagtgcaccatcaacaaattcttgaatgaaaggccagatattttctttagctagatgcttttctttggggccaaatggtattctgatgatatgtgcaccactgttctctcctcgttcgcatctaaagttcttgaaacttgtcgaagccagcatctcgtctggttcaccatagccacgatcaaaatttggggctaagatttgtcttgtaatagaacaacccgtaaacttca

SEQ ID NO: 5772 - DNA, 786 bp, Zea mays
agcgcccccaccctctctgttctccccccctgtccccgattcgggagtaggtagtgccgtttcgatgagtgaagtagcggttacttgctctgttgcctagttggatttctcgcctgcctcggtctcctgcaactgcaaatgctaaattccgccgcgcgcctgctgcaaatgcaagggtccgtttggatcctggtgctgaagtttagcactacactcttagctgaactttagcacttggagatccaaactggagtgctaaaaatgaagtactaaactttagcaccttttagctagctcatccaaatgtgctaaaatgagctaaaaatggtccaggttgaggaaaaggcatctcctaccctcctctctctctctccctccctctctgtctctctctctctctctcttcccacccgtctaggggtatgaatgttttgtgtgctaaactttaacacttgcatccaaacgctacacatgtgctaaactttagctctctatttgaaaggcctaaactttagcattctgctaagtttagcacgtatgatccaaacatgccctaaattggtctagtttatgtgctgcttctaaatgttgacggtcgcttctttatttgttttgtctcctgggtccaatgtgacagagaaagcctctgtcgaacctgttagatatgacagtggtcaatggtcatttgtgagggcacctatgatcatcttcggggtacctgaatcttgcttttgatgggttggcgtgtatctgtggcacactttttcttgtgaatgccgtgttggt

SEQ ID NO: 5773 - DNA, 814 bp, Zea mays
tgcatgcctgcagcaaggcctccgatccagaaatactctctcacaacacacatcactccccgccttaccccagaggccactcctaaaataatgtccacttctgcttctccaaggcgaatgtctaccacaggaacacccaagttgatgtctggttctacgtcaccgtcaaaaactcgaatcgaagctcacatgtcaatgacaccatggtatccatcaagcaagcaatcctcggcggcaaactcgcctccacgaggacgttcaaacccaggtttgtgaagtcagtgtttgccatctgtggaagtacaatgttacatggatagaataaataaaatacggctgatgatgctgggggttttcaggtcgcactcctcgaatcgatggaaaggagttctttcgtcaggccaggtctgttcctatctggacctctctcctgaaccatcagcgaatgagaggtggatgataccataattaacaaaaaaaaatccattaccgtttacaggagtcgtctatcctacgagcaatttggagcattcttagccaacatcaaagagctcaatgcccataagcagtcacgtgaggttggtcatgtcggccactctgtttttgttttatttttattttatttttgaattgaaaggtctgtctgagtcgtaacacaagtatataactgctcatgtttccattttaaaccaggaaactctcaagaaagccgaagagatctttggtccagacaataaagatctgtacctgtctttccaaggccctgtgaaccctaacatggtggcataaaggcttcacatgtcgctttccaagt

SEQ ID NO: 5774 - DNA, 695 bp, Zea mays
tacgccggagctgctggtgctggacatggtcgtggaccagcccggcatggacgacgcccacttctggtcctactagctaaccgcgccgcgcgttccactcaagctaggttgttttagctgattttagtcgtgttgatcgatcgaatcgggtgctgtttttgagtcacagatggtggtacggtagttggtatgtgtgtatatatatgtggtatcaggtatatggtgcgcgcgcgctgtaacagcgtggcactaggaggaaggtggtgactggtgagcgtacgtagaagggcgctgtcctttccatgggaagctggaacattgattgtcacggatattggtgtggactctgctatggaaatgcaggtaccttttacctatgtttgtccaagctttcggaattatgttatgtgccagcttttactgcactgcaaaaaaaaccagagaaaagaacgctgtacaaccagagcaaaacgatagaggttaacctgaggttaccttctttgttggcgacgaaatgaagatttttactctcatgtttacctttttcacggttttacaaggacgcgctccatgacagactgcaccctgatttaggcaatgaatttgtcatccgctttcggcaagtacacacaccacttttacagaagcaacactgctggtttgcacactcagtcgttcagagagatccgttcgtt

SEQ ID NO: 5775 - DNA, 743 bp, Zea mays
gcagccccccctcaattagtacttagtggcaatcaactgtatcaatcaaattgatcccatcttttccctagaaatagaataaagacaagaatggcccttaaaattgcggaggtgcttctgaattccaacgcttccacagagccgccggcgccgcgtgcgttgctaagctaacccaccctctccgccacggctgacctgctcaaccgcttgctctcgtggatcttggcgtacaccctcttcgtccggacgcagagcaggacgtcgaggccgaacccgacgacgcaggcgagcgccatgatcaggaagacgaggcggtagcagtgtgcgccgacgcaggtgttgccgccgccgggcaccgcggtggcttccgcgtcgtagaggaggcccgccagcaggcccgagaagaggaaggagccgagcggcaggttgaggatgaggacgttgtagacgagaccgtagtacttgaggccgaacagctccgacgccgtgggcacggtgaccgccagccgcacgccgtagcagatgccgacgaccaccgagccgatgaagagggagcctggcatcgccagcgccatcacgatgtatccgacggccatcaggacctgcgaggctgcgttccacagcgggcggggaatacctcgtgtcctgggcactatatatgtcaacattttcttcttctggatttggagttatatgattccattccataccaattgccaattcgggtaataagtaacttactt

SEQ ID NO: 5776 - DNA, 778 bp, Zea mays
agtgtagatgaacagaaggtctggcacctaaaaaggagaggctagtaaagacgagcgaggattacatctctcggtgttctgattacacggttatacggcggtagtaagagtttacagacttgtatatgttcttcattctagcagcagttctaactcggcaaagccgtcgtcgtcgtcgtcgaggtcctcgtgatcctgtactcccgattcatcattgtcgaccgccatgagctgatcgccacgggatccatcctcgtgacattgagctcgagcctcctgattcatcgttgtcgatggccatgagctggtcgccaggggatgaggataatcctgtcctctcgtagaacccctccttctggacatcccattctttgacgacttcatctatcttgtcgcccaacagcctctcactctgaaggaggtgcttagcatcgtcaacttcgacagtttggcttgcctctgtccaggtgataggggcaaacagacagcagttggattaggaacagcgttgtgtccggagtcttacgtaaaggagaaggaaaatgcacatatccgacaatggcaatggacaggcacctgcaagggccagttcctttgcttctgcatactcctttgacaatttcttgatgctatcaagctcgaactcagcaccctacaggaagatgaataaatcagtaacagaagcgtaccctgcgtaatgtttgtagtatatataaaaaataaaggattggcaggctgccctttttatgatatatttccaaccaagacagcatgataa

SEQ ID NO: 5777 - DNA, 736 bp, Zea mays
tgcatgcctgcagtagcttggggactacgagctctcccttgtcgtttatgccaactgacgctcggatgtagtctctcatggactcctgaagctcagctcgaacgttttcagcagagaagatccttacctggggtgataggatgttgtcatctttttttccaaaatatgagtagggaagaagtgaagagctaagtattgtgacagagcacactggaaacacaatttattgtgtgcaaattttctgaaaagaaacggtctttagatccatgctcagttagttacttcaagccatgcagtgctatctgctgagaaaatttctaactccagcaactatacatgaaagcatcccaagaacatacccgcccctataattagtttctgtaacagggtcccattgtttttactcggtcacttaccgcaggagaagagaacatcccacagcagagcgcgaagaggacgcgaggctcagtgccatcgattgaatatctcctgaggttctctgacgttttaaacttgtgaagggccagcatcaaggactggaaaggaggaagaatagtaagatggattgttcaacttgtatgatgaatagaggaacctgtaaaaacgaggaacagagttatacgagctgtggccggtgcaccggtgtcttcatcttcagaatcacaaactctatttacgctgcactgacaggctgtccgccgatcgtgtaacaggcctgccacattgactctagctc

SEQ ID NO: 5778 - DNA, 692 bp, Zea mays
atatcggggatgtctcatacaagctccagttgctggcaaatgctacgatccatgatgtgtttcatgtggcacttctcaagaagtttcaaggtgatcccccgtcagcgccagtgcctttaccggcagttctccatggcagggtgccccctgttccatcaaaagtggtaaggctcgcttgaacagaggtgtctcggagcttctggtacagtggatggggcgcgcgccgtctgatgctacatgggaacaatgtactgaattcaagaggcgttattcagaggtccaactcgagaacgagttgtttgtcggagaggagggaaacgttataaatgctattgtgggccgccagttttctaagcgcaagaaagggaagcagagcccgatcagttcctgaatcatatgagaagataagtttccttagaggatgggtttcctttcgtattatttcctaaataatagcagaggattagttctacagtatgatgcaccaggacacctgccactataagggtggctgggcatcgtttgtaagaggcatccaagaaataaagatcttcctctagggcgggatcatcttggatcatcctggctaggcacaacgccggcgcaggtgatctgggtgatcagcgccctcctcccccctacactctgcgtcattcccatcttcctctccactctcccttcagagacaccac

SEQ ID NO: 5779 - DNA, 813 bp, Zea mays
tcttgcatgccctgcagaaatggagaccattggtaggatcaaacaccgcaatcttgttccgctccttggctactgcaagtgtggtgaggagcggctgctggtttatgattacatgaggtttggcagcttggaagatgtgttgcatgaccggaaaaagaccgggattaagctaaattgggcagcaaggaaaaagatcgccattggggctgcaaggggattggcatacctccaccacaactgtattccacacatcatccaccgagacatgaagtcaagcaatgtgcttatcgatgagcaattagaggcaagggtatctgattttggaatggcaagaatgatgagcgtggtggacacccacttgagcgtgtccactctcgccggcactccaggttacgtgccaccggagtattaccagagcttcagatgcactaccaagggcgatgtgtatagctacggtgttgtattgctcgagctgctcactgggaaaccgcctacagattcaactgacttcggtgacgacaacaatcttgtaggatgggtcaaacaacactcgaagtcgaggctcacggatctgtttgatcctgaactcgtgaaggaagatccagccctggagctcgagctactggagcacctaaaagttgcttgtgcatgcttggacgacagaccgtcgaagcgtccgacaatgctgaaggtcatggcaatgttcaaggagatgcacgccagttcgacagtggactcaaaaacttcggcgtgcacagacgatgcatgttttgccgatgtggagatgacgaccctgaaaagaagacagggagg

SEQ ID NO: 5780 - DNA, 634 bp, Zea mays
  unsure (1)..(634): unsure at all n locations
gcatcctggatcaataatcaactaattacttaattaatccatccagttcttctcttacgatcacctgagctgagattcgtccatccatcgaattcttcaaaacattattccctttttttatttccttcgatcgaaaaccttagcctttgacaaagccaaaaggaagaatcaacgacggtgcaactttacaggtttaccggttccaactccgcatgaatggaaattaaacaaaaggcgtgcatttgcgcgtatgcatatacaaatctatatcatattttttaaataaataaataaataaaagagtggacgtacgacgcgcgcgcgcgggcgggaaaggaggcgacatgcttccatgcttttggcagacagaaacacaacaactcatctaaactatgctctattgttgagtagagtgaccttcatttcgtcatctcagtttcgctttgaattcaccaactcaatctcactttaaacatatgtggatccatccgtgcggtacgtgcaagcggccggctttcatgcttgcttcgtgcttcgtgcaatctcactttaaacatatgtagaagttgtagtcagagttgatcgagcgaggatccaaacccgttggttgcttaattactcgacngttagttta

SEQ ID NO: 5781 - DNA, 1082 bp, Zea mays
ctttgcatgcactgcagtagtgaatgaaaccatcatcagtgtagtgcttcaaccgagcaatttttttctcgaccgcaagaggattgcatgttatattaataagaattagaagataaaaaatgtcttgcacaattgcatatttgagatgattctgctctccaatattcgaaaaagttaaacatttttttctcaaacacgcaggagagctggcgtatcatttcactagaagaagaaaaaacagtatttacaaggacctaacacagcactcacacacgcacacacaaacaacaagaggtataaccttctcctagcgggattgaacacaaaagctaggtccgaaagacgggtcaagcctttggcccccgcaaaacaccacatattgaactcatcaccggctgaggtaagcaatctagctatagaaggttgagcaccattagaaacacaatcattgcagtgtctccagatagtccaagcccctatgttcaccaaggagttaaagccatctctgaggtccttaggaataacctcagccgatctaccccaccaagctacaaaattgatatcttccatcccgggggagagtgcggacaggccgacccgctggagaagaagataccaaaattgcccatcataaaatttgatgtcatgtctgcggtctcatgtgtgtgggcttgaaaattcaggaacatggagatgctagttaggtggtccgagagcactccttaggtcctgagttcgaatcctagtgggagttaatttcaggctgagggttaaaaaaggtcactcgctgtttccctggttgtgtgcacacgagatggacagacctatgggggagtcggatcctcgtgtaggggctgggtgatggaataagtcatgtggtcttcgtgtggaggacatcatctctaattttgtggtgtggaggacagtccgcacaacatctctgttgtaggacagcagcaacaacagtcttttgactgcaaggacaacgtgctgcacaacagcagtcttttgactgcaaggacaacgtgctgcaggcatctccttttccatttttttagcttttggaggacaagagctactgc

SEQ ID NO: 5782 - DNA, 724 bp, Zea mays
  unsure (1)..(724): unsure at all n locations
atgtaccggttcagccccgcgtccgccgacaccaccgtccgctccccgaacaggctcgaccggtatatcttcccgtacctgcatgcacgcatggacgtcgccgcgttagcaagcaagctctcggtctcagagctaattctgattccatcgatgtcgcgccatgcatgataggtgcgcgctgctcgctgcaccgtgcatgcatgtcgtctgctgtctgcacagaggtagagacagcggcggcggcggcgacgcaccgtgcgacatgccgctccatgaagcggcccacggaggtggccgggtgggcgcggaggtagccgaaagtctcgccgaccaagggccatccgcgggcgcccgggggcaggttgggccgcttcttcttctgacggcgccactggtgggtgccgtggcatttggcgacggtggtggtgtacaaggcgaggagggccagcaggatgaagggaaggaagaagaggagctcgctggttatggaggccatcatggcgcccatgagctcctgctgatcagaggtctagctttcttcaaatttatttcctgcctgctgcctctgcctgatcactcgcccgcttcgttggtttttatgtgtggagagagaggacggatgggttggagagagaaagcaggagagggaatgaatgaagncgccttatctctggatttctctcttccctctctctcagcaagtccaagctttgcgcaaggaaaa

SEQ ID NO: 5783 - DNA, 731 bp, Zea mays
cattcttgcatgcctgcagtcgctgatcaaggggagagggcactgtagggctctggtggcactgtagggctctggtgaatggtcacttcggccgtaacctcgcgcccacggtgccgtgcctctctagcctctaggctgtagtaatgtgtatcctttttttttatatgaacaaacttgcttctcatcttcctgtgtgcgattttgggcaggcgaacagctactggatatttttgtttttaaaaaaactagtgaataaagtttggtagaccctagaatctagattaaaaatctaagtttataaaagagatccgaggtacggggcaggctgaacagcccaacgactgataactagcgcacaccataagcctgcgctgcgctgatgcaggaagaaagggagaaccaggggggagggaggatcttgtgggcagggagggagtttttgcttactgtcgggctcttggtccatatcgatgctgaagtcttgaggccgccgccggcagcacgccagcgtcttcatcctcatctccgccgccgacccctcctcctcctccgccgccgccgccgccgcgccgcgctagcgctaccagcagtaactgaaagacatgaatgaagaggcgaaaccccaccgtatagcatcaggatttgatgaatgaggaaggggggccggtcgtcagaccgcaaactgctgcaaaaaaataaatgcgctgcgatctcgcaaagatagatggcac

SEQ ID NO: 5784 - DNA, 798 bp, Zea mays
ttctacagattctagactagcacattgttaaactaaaacgaagtgtacagataatttaatggcctcacactgatcaaatccccctaatacacatgctatgttcaaacatctcatcataaataataacgatctcaagtctcagtgactaaaacataatttgagtagaatagattgctgaaagccgtcacagaacttgcagataataataaatgataactagacaccgagatacaaaaccgatccaataagatttacggcagacgtctaatccagcatgtagagcatttaaaaagcgccggcagcaacaggatataacccatcaccaccagattcaaatcaaatgaagactccgacccatcgattggacggttggagggtttagcgcacagatctagtctacgtagtagtctattttaactttaaaaccgcaaagagagaagaacgatcgggccgtctgggggagcgtgaaacccactcacatcggaggagttggagatgagctccctgaggaagatctccttgttggagtagaaggtgttgatgatgagcgagagcagctggttgatctccgcctggaaggcgaacgtctccgtctccgaggccatggcgaaacgaccttcccgaacgcgaggagagcgcgagcggtaggcggcggctagaggggactgagaaagtggcacgagacgagggtttgtggggcgaaaatgcgttgcggcccggggggatttattggtggggggagaggcgtggggtttccaatgttttacagcccctggggccggttagcccccttcctac

SEQ ID NO: 5785 - DNA, 761 bp, Zea mays
tctagaagcttgacgcacctgtctctcatggtgtcacacccggcgaggtagtcccgagcctccatgaccacggcgttgaagatacgcctcgtgtcgtaggcgtgccccggcagcatgtccggaacgaacgccaccaggtaggcgcagtactccgacatgcacttggccacgaggcggtcgccggtctgctgccgcggcgtcgtcgtgtcgcagatggtcgtcgcgatgtgccacacgaggaccgtgtggacactcgtgggcaactcgcacgcccaggtgagccggctcgcgtcgttcccggcgacggcgagagctgcgcgcccatctgctaggcggccgtcgttcgccttgaaccgcgacaggacgtgcatcacgacttcctcgggcagctcgaccttcttggaagccttctgcccgtccctggttggctcgatcaggccgagtgacagaatggaggctacattcctcgggtggtagtcgaagctgtggagcagtgagtactgccccagcttcctgtcccagttcctgcccgtcagcttccggtgcttcctcttcttgatccctttcgtcgcctgcttcctgctgccgtcgtcgaacggaacggcttctcccttccaggtgatcttgctcgcgccagtcaatgtatgcagatcgtcgaccacccttcactttctggtcgttgatgcgcgatttcacgaccagcacgacgaccacgaccaccatcaacacgatggtaatgcagtgaatgacgtctgtccccg

SEQ ID NO: 5786 - DNA, 748 bp, Zea mays
cccgggaccctgtgatgctgtcctgcaggaggccgaggccgcggcgcacgccgccgtgaacaccctggccaagcgcggggaggaggtgatcgtgcgcgtcctcgaggtcgaggcgccgcccgtcgtcaacgctagcagcgtgttggcggccgccgcgaaggccaaggccaaggccaacgcggtggacgtggggcaggagaaggagcgggacgtgacgctcccgacggtgacggggggccgaggcggggccgacgaggcccggcggcgcgctgacgaggaggtcgctgagaaggccgcgtcggcgaaggcggcggcggccaccgccgctctgcgcggcgtggtgagcgtgccgcagacgtgcgacctgtaccggggcagctgggtgtacgacgaggtgagcgcgcctgtgtacaaggagggcgagtgcgagttcctgacggagcaggtgacctgcatgcgcaacgggcggcgcgacgactcgtaccagaagtggcggtggcagcctgcgggctgcgacctgccgcggttcgacgcgcggctgctgctggagcggctgcggaacaagcggctgatgttcgtgggggactcgctgaaccggaaccagtgggagtcgatggtgtgcctggtgcagtcggtgatccccgacagggggcagaagacgctgacaaagttcgtcaacggcgggtccagcaacgtgttctacgcgcacgagtacaacgcgacggtggagttctactgggcgcccttc

SEQ ID NO: 5787 - DNA, 781 bp, Zea mays
  unsure (1)..(781): unsure at all n locations
gtatcactacgcaaccagaagcaggatgcgctgtgcacgaactacacttcatggaccaatcttacttacaaagttacaagtcgatgaaaaggaccacctgggagaaaagaggttatagcttttgaatcacatcaagttgtcgtcaaagaaatccgataaaaaaaacatggtcaccataacggtaagtggtcaatagttgcaactaactcatgtttgaagcaactgacctagcctttctactcctaaaaacatatatctagcatagaattttctcaacgacagcctgtagactgcctagaacaaagagcatcataagaaaacatgaagcttcaggcatagcaaatacttatcatacaataatcagcagagattaatgcaacatacacattcccgaagctgttcttcgcatatgaaccaccatggtgaccaacatacatgaagagggaaccagaatgcttgagtctaacatgagggaagtgatcatcataatcactgattacctcacacaaataaacacccattttttattttaaagaaaaaccaatatgtgatacataccccaaagtttgcaagcacatgggaatgggacaccatctaaatcattctggtccttgtctgtcatcactaaaatcaagggtaaagcttaattaaactttttttattccacttactaaactgcantaacagaaagccatagaagctagatcaatctaagaccccaagggatttactgcacagtgggttcattaaacatttcttcattagcagaagtattatgacc

SEQ ID NO: 5788 - DNA, 771 bp, Zea mays
  unsure (1)..(771): unsure at all n locations
agcttgcatgcctgcaggcttttgggaacatcgcgttcgcgtacggtttctctatcatcctgctcgagatacaggcacgttactaccagctgtcgtgatcgcctaatgatttctcggtcggtcttcaggcctttcgaatttgatcttagactgataatattacgtacgtgccgttgccgttcatgcgtcgtctaggacacgataaagtccccgccgccgtcggaggctaaggtgatgaagaaggcgacggcagtgagcgtggcggtgaccacggtgatctacctgctgtgcggctgcgtcgggtacgcggcgttcgggggcgcggcgccggacaacctgctcacgggcttcggcttctacgagcccttctggctgctggacgtggccaacgcgtttgtggtggtgcacctggtgggcacctaccaggtcatgtcccagcccgtcttcgcctacgtcgagcgccgggcggccgccgcgtggcctggcagcgcgctggttcgcgacaggcacgtgagggtggggcgagccgtggccttctccgtcagcccggcgcggctcgcgtggcgcacggcgtacgtgtgcgtcaccacggcggtggcgatgctactgcccttctttggctccgtcgtcggcctcatcggcgccgcctccttctggccgctcaccgtctacttccccgtggagatgtacatcgcgcaacgcccagtggcgcgggngcaagcatgcggtgggctggctcttgcagggggctcagcggcgggggtgcctttg

SEQ ID NO: 5789 - DNA, 768 bp, Zea mays
gctgttatggaacctaaaacatgtaagggaattgttttattggatatttcactaaggatgcttcatataaaaaagcagccatggtttggaaagcctttcatcaaatcttttcaaagtctcctaaggtaacttgtattttgtactcccatcacaattttttggtgctaggtagttgcttgttataatgcatttactggtttctaggaacactattgttgggaagctattttttaatgctgttgctacaccagaatctgtgaaaaatattctttgccaggtatttcctctctagcatctcatcttgtaaaattatatccagaggatgtaatattatgcccatgcgatactaaggcgagaagttccaaaattttcatcataaaaaaaacactgttacattcaatcttatgttgaggataatgtagacttatcttaagaaactatttgtgttacaaaatattgcacttgtatattgggaccaatagcttgggcttgtggacctgaaagctaccataagcttaagcctatacatgtagtttatgagtcagagtttttcagtttataaatttaaccctttcattacgtggtgaaactatgtgcctgttatgataagcatgtaacccttggatatgccctggccaggagatgagccatgtttagttagatggataaggctcatgtaatcaggtagatatggactctccttggcccgcacactaagtcagttacatgatgtaaatctcacgtgattcaatggtcatataacacgta

SEQ ID NO: 5790 - DNA, 711 bp, Zea mays
ttgcatgcctgcagaaagtttagttagaaccagaaaagcataaaagtcgaagtgtaggcaatctaaaggtataactacctcattaaagaagccaaaaaaatcacattatatacttgcaatgaatcaaaaagatctccatgcctcagcaacgaaaaagaaaatttaaagagttctttggtaggatataattgtttcttattgagttgcatgcaatgaccaattaactaaaagtttatggtacagacaaaacatgcacaatgcactcatacttcaacgcccccttcacttgtaggttcccttaagcttgatgtcagatagaactgtgctataacttttattaaattgttgcatccaggatatagtataaactattaaatagtatccagtatttacagtagttcagtcaaaagtctaaccaaaatggcatgttggtattgtcaagaatatggggggacccatgatacgttgatagctaagacagtgaaagagaagagcaatccgtctaggcccagtcgggagctcgggttgagtaactcgggaaaggtttccagattttgggaaattgactcagacttgggtttgagaaggtttgggccacgagtcatgatccgatcaacaaatggtaccttccctgacaagaaaacttctgcttgttgtatcctcacgctatccaaggagcagccgctagacttcggttacatacgactatac

SEQ ID NO: 5791 - DNA, 593 bp, Zea mays
agcatctgcggtgaacttgttgtcatctcgtagcacatggtaatgcgcaggacggcttgttccctgcaattccacgagcagctataatcttcagattctgaattagttgtaacacatgctacacacataccttggccccagcatggctgcacaggaagaaatcaaattctgttgggtggcagatattattatcaactacggtgcctgcaaattccataaacgtttcagcaaaagcattgtagaaaaaacgcaatagaaaaaacagcaaatgcgcctgcatccctaaccagctcgaatattcccactcttgtcctcgtattggctattgctggggaagagccttgtgtggtgcctcttctgcaccactacgaaggtgatctttggcttctcattgtaaagagctgtccatgcctgaagaaagtataaatgttatactaactgagggaacaacacttgatgtctcaaattgtttctaccttctctatctcatggatttcttgctccagcacttgtttgaattggctctcacttacgccatccctaacggtgaaagagggagtcaattaccattgcatgtcagtcagaaaagcaac

SEQ ID NO: 5792 - DNA, 774 bp, Zea mays
cctgcagacggtcttattggcagctagaatgcatctgaaagaaaaattacaaacatacatactcatgccaccatataccaccatataagacttttcaagtgttcgcagagtagagtttaaatatgtggatgtataagctgttggcaagaggctacatgattctagggcgagtcattcatgaagaaattgtccttcccatcaaaacatattaggcagcactaaactacagtgattggagcactaggatagaactgctcaaactaaggaaagcttctgattttcagttgtctccagtgaagctcttcaatattaaaaaactgtcataagctatacagtagtctttcgaatgagcgctcgggttgcaacatttttctgcaaaaatagtggatgcgaccggtactgagcactgtgatcctgcgtatggcacagaagaactcatgtgcggggtgcacgacccgtggaagagccattctggaagttccatgaggaattcgctttacgggatcgtcctggggcaggaagtgctggcctttgattcgcatctcggaagcccgtgtgaagatttcctgcatgattttgcaactgagtaagatctcagaaccataggaatcatgtttgaatatgtaaatcaagtgagcaccacaaattattagcacaagtggcacaaattattagaagtgtgattaaaagctagccaactgaaggcgtacactcaaatgagacaacgaacaacacattctacatttgtggtgctgctggctacaggggatttgt

SEQ ID NO: 5793 - DNA, 765 bp, Zea mays
cttgcatgcctgcagcagaaacagaggaatccgcagtggagacagaggtgtctgtgtcacctagaacacctacaccagctccagcaagcccgcagatagagcatgtgactcctctggagaatgatagtgaaagggtggatgcttgtcatgatggtgaagagcttcgttataggaaggtccatgatattattggtaatcagccaacccctttgccggcacagaggttgtttgcaaaactaaacctcactcatgccggtgagcccacaagctatgaagaggcaaaagatgatccagattggcaggcagcaatgaaggaagagctgagctcagttgagcggaatgggacttgggaacttgttactcctagtccaggtcatcgcccaatttcattgaagtgggtgtttaaattgaagaaggatgaacatggtgctgtgatcaggcacaaggcaagacttgtggcccgtggctttgttcagaagaaagggattgactatgaagatgcctttgcaccagttgcaagaatggaatcagtacgtgttttacttgctctagcagcacaagaaggttggacagtacatcacatggatgtgaagactgcatttctgaatggagaactcaaggaagaggtttatgttacttcaccaaccagttttgaaatataaggaaaagagaagaaagtgtacaggttacacaaagcattggtttggcctaaaacaagcttctccggcgtggaatgcaaacttgatttaactctaaacagaaggg

SEQ ID NO: 5794 - DNA, 740 bp, Zea mays
gggaataaattctgttttgatgctaccttcttccacacagtccctgatgaagtgatgcttgattctaatatgtttgctcctgtcatggaaaacaggattctttgccaaagctagagcagatttattgtctactctaagttccaccacctcaacttctcttcccagtaattctgcaaacaaccttgacaaccacaaggcttgggttgcagctgttgtcattgccacatattcagcctcacagcttgacaatgcaacaactctctgcttgatagattgccagctgaccagactgtttccaaggaaaaacaaacatccagtagtgcttctacttgtatcaatatctccagccaagtctgagtcactataacccacaaatcttgccttgcctgtcattctagtatagcatagcccatgatctagagtaccagtcacatatctcaagatcctttttacagcctgaagatgttcagctgttggcttctccagaaatctgctaacataccctacagcaaaagccaaatctggccttgtgtgcactagatatctcagactaccaactagtcttctatactgagttggatttacctccttttctgtactttccttgctcagtttcaacctttcttccatgggggtggtagctggattacagtctgccataccaccgaactcaagtatcttcttagcataatgagtctgtttcagagtaatgcttccctctgattgtcttaccctcaccc

SEQ ID NO: 5795 - DNA, 725 bp, Zea mays
cgacctgcagccatggatcaaaggaataagagttgcaggttccacctgaaaagaagaggatataagtctacgcttttatgaacttaattaaacagaggcacataaaattctattatccaaattgataacatcaatggtccatgatgaaagcaatgtttaaatgtttcctcaccgcttgtgcagcttcatcaattataacaacatcaaaagcacgggtcatcctgctgaaaattgatgatccactgaaactcagagtagaaaatacctgcaaattttacttggcagtgagaatactgtaataggtataatcaatgaacatttataattaataagaagatgtacaatggctgcttcgtccagtattgaagctctaatccgatcatattcaccagcacctcgtctcccaccatctaatgtgcgatctacaccagaaagtttttgttgaatctgcaaggttgaaatcattgtagttgacagaatttatacagaaaatgtatcgcaactttatgccacttacaagataatccatggaaactgctttaacagaatgaagggccttcactccaatgcgcacaattttagggttataagtgttgttattttcatctcgaattcctgaaacaaaaaaaacatcacttaattacttaatctatgcatgatgcttcctaacgatagcattagtctaaaaaacttatgagtgcactgtgcaccaaatgccccaaaag

SEQ ID NO: 5796 - DNA, 709 bp, Zea mays
acagtcttattgtggttcgttgtttcttttgcacacgtaattttggttcagtcaacagttaacacttgttattagcaatttagctcaataatctttgcagcagaatggtcaaatggatcaagacaccagaacttagttatctcaatcagacaatcaccgtcgtctcttctatttgaccaatctttaaacaggagtaccagtgaagccttgcgtttactacaagaggggcagtcatagaatccaatagaagtctgggtttgctataaaatacaaaaggtgcaactgtaattgcctaatttgcagtaactaagttcaccaaagtgttgtagagctgctatatactaccagacaagaaatacattttggccctttaacttacaaacacacacacacacacatccactttttcttggcttcgcctcatctctcctgtgccgctatggaattgaatgaataaatatcccgttgcagtgcacctcatggaatccgacatcaacttgaagcttgctaaacatcttgatcccactcatcatgcataagccaacagaacagccaaggcaacccagaatatcaagagtgggagtgtcaatgcttgttttgttagagggcttgcattcggcagccatggataattttcaagagatggcatgacacaattatcaccattgaagtacactcgggggtgggaaggcccatcccttttcgaatg

SEQ ID NO: 5797 - DNA, 727 bp, Zea mays
gagtgattccttgccaatcacagaaaaagaaaaagcttttgctgtcgtgcaacatttgggttccgaaattgagtttatcgtaaaatttacaagtgacctaaacagtgagattattagagaaaaggttaatatagaccaaaataagggcaacgttgagagggtcttcttgaatagttatattcgaactgacaagtctcatggttttcgagctttggttgtaatggaggatcattcactcttgttaattcaacaaggtgaggttgtttggagcagagacgacgggttggcttcaattgttgatgtaacaacatcagaattgcctgttgagaaggatggtgtatcagttgccggtgtggaacacaatctctttgagtggcttaaggtaacccatagaaattgctagtatgagttattcactattgcaaaatgcttcagataaatgttattttggaaaatctagcaggggctgcttggatcctttcattttagaggaaatagaatctacttaatggactaggttatttgtcttgattttgatatttcacaattttccaaagttcatatataggtctatcttaaattcatagggacgaagatggaaattgattctgttgatcaccaaaaatggattttttttgtactctgcaacttataacacgctcttcggctcgcttctctacaataaaaatggaacacataaatatctcatatggccaacaatagtttg

SEQ ID NO: 5798 - DNA, 709 bp, Zea mays
actatcacttgctaccacgcactcaggttccacatcatatcctcacattatcgcatcgaattcgatacaggtacatcgccccggagcaagtccccgtccagttcggcggcctgtacaaggaggacgacacggagttctccacctccgacgccgtcaccgagctcaccgtgaaaccgtcctccaaggagaccgtcgagatcccagccaccgaggttagatcggtcgatcgactctctgttcctgtatcctggatcccatgcgaatctcatcctcaccaccgtcgcatgcagaactccaccgtggtgtgggagctccgcgtgctggggtgggaggtgagctacggcgccgagttcacccccgacgcggagggcggctacaccgtcatcgtgcagaagacgcggaaggtccccgcccacgaggagcccatcatgaagggcagcttcaaggccacggagcccggcaagctggtgctgggcgtgaacaacccggcgtccaggaagaagaagctgctgtgccggttcaaggtgaggagcgccgccgcctgatgagggtcgttggtctgggtcccagcaggtacagcctgccagctgcttgaccaccagcccgacatgtataattcgatcgatcgccaaccaggtccataccgccaccatttgaatgaacatgctgcattgcattacatgataggagagagagagagagagagaga

SEQ ID NO: 5799 - DNA, 798 bp, Zea mays
tcggtacccggctatccgctagagccgacctgcagctgaatctccccgctctccacgttcctgaggcggaggatcatgtcctgcgcgaacttgccgttcctccagcacacgtggctctcgtcggcgaggcagttcgtggcgctcggccgcaccgacaggatgatggcgccgttcctcaggctcgcctccgggctcgcgttcgccgcctccaccagcggcgccacgtcgatctccgcgtcccccatcgggtcgtccctgctgaacgtgtccttgtcgaacacctcctgtaagacgacgtagtaatgcaatgcgtcacaagacagttagtctttagatagaatgcattggcaatggcaactgacagactcaccagcttcagagctaggctgggatctgtgacggtcagagttagctcctcgtgccagatggggttcacagatctcttcttcacgctcgtcttaagtttctgcgtgcatgcagaaccatgacacaacacttaatttctgcattcaaacgctaatgaaattggcagcagtgccaaaaacaaaaaaaaaataaaaaatacaaccttcttgccaagtcgtaggacgacatacggatcgctgcctcttgcgtcgcggtaggcaaggttgatgcccctcaccacccggactttcaagaggcctaccaatccgtccatgatccactcaaatgttcctgtaagcttcagattacaaataaagaccgagcgtgggacgaagaaagcgcctaattcgatcgaaagaattaggcgactttttttcgtcctcactgactggt

SEQ ID NO: 5800 - DNA, 749 bp, Zea mays
  unsure (1)..(749): unsure at all n locations
atcttgcatgcctgcaggcgcgcaacttgctcactcacatcacatgcacgctactacacctgtaccgcttgctgctacctgccgcgcgcggtcactaaacctgattgatccggctttcttgagccagcccccgaggatttttcacctgctctgctcgttcctcccggccggtcactcacactcgcatgtgataagagaagtgtatgcagaaggactcagcaagctgggagagagtgataccggtatgcatgccatgccatgccatgtgtgtggatcatgcgcgaatgattcggccggccggccggccggcaagcagtgcttctactcctcctcgtacgtacggtgcggtgccgggtcgggtcgggtcgggccgcaattagcatgcgtgccgtggctttacgtctctctctctcttccatgcgtcccgcagcataattgtgcatggtgaacggagagcgccggagatccatcggtcaaagggagaggacgaaagggatctccttctgcctgcctgcctgcccttcaactgctcaccgcccttctccttcacacgcacacgctcgcgttctctctctcttcactatctatcttctctggcgaagccgacagacggctcaactgcctctctctctctctctctctctctctctctctctctctctctctctggctctctgnccatcccgtccactgttccagcatctctgatcagtctctcgcggtctctcctgagcagagcaagagcagtg

SEQ ID NO: 5801 - DNA, 751 bp, Zea mays
catggcctgcagctcttgcagcttgctgatatccggagggattggaccggacagataattctgtgacagattcagctcatagagactgctcagttttgcaaccgtcgttggaatctgacctgagagctggttgtgtgcgagattgagcacgttgagggacgccaagctgccgagttcaggcggcactgttccattgatctggttgttgtcgagcgacagcttcaggagattggagcagttgctgagctgcaccgggattgctccggtgaactcgttgttggagagtgtcagctcgccgagctgcggcagcgagcccagccagtccggaatcgcccctgacaggcggttgtggctgaggacgacgaggctgagcttcgtgcactgcgcgagcgtcgctgggaagccgccggtgagcgcgttgcttgacacgtccagcagcgttagcgcggtgatgccgccgagcgacggcgggatcggtccggagagcatgttgctccccaggcgcacgcgctggagccccgacgaccggccgaactgcgctgggatcgcgccgtcgaaggagttgttggtggcgtcgaacgacaacagcctcgccgtgccgcagagcggcaggaggctgccgctgagccggttgtgcgcgatgttgaccctcgtgatgttccggcactcgaacatgccgtccgggatggctccggagagcgagttgttgtacagcatgaactgctccagcgaacggagctttccaaacgtc

SEQ ID NO: 5802 - DNA, 589 bp, Zea mays
tgcatgcctgcagcgtacctgcatcaatttgtttcaatgaacttttagcctcctcctaggctccgaccgacgaagagcttttgtgtggctggcttcatatgcagcagcagctagctagctgttcatcatgagcttacttgtcagcacaggtctttgtccggctacggcaggcctcccacttcttctcctcatcagcccactcctcctgaacgacaacatggctggcccccatcagtacatacacggacaaaaaagctcaagtggggtgttggatccacgtacgtacgcatcacgtacacatgcccactactccaccctgctattccttaattccctaccgtgatgttctgctggatggcctgtatcatggtgctctggtcgttgccgtagaagtccttcatggccgtctcgatgacgttcacgtcccagacctgaagaattggatcagttaccgccgatcgagatgcatggtttgccaacaagtgattagaggcccggccggccggccggcgtacgtacgtggtgcaggttggtcttccttcggtaccagtggacgacgatggtgttgccgccgaggtcgtcggtgtgg

SEQ ID NO: 5803 - DNA, 789 bp, Zea mays
agctttctgacgaaagaggcatcgacggcggtgaaggagctgctgccggggtgggccggcggcgagctcgcggagacgtgctcttgggcggacacgcagaggttccggtaccgctggtccagcccgctgcacttcgccgacacgccaggggactgcgagttcgactacgcccgtaagcttgaaccctgctggtatccattatgcaatgttgttgccgtttcatagagaattgagatcaggtggtccgtcgtcgtgtctgtctctccgttaacgcacaacaagctttgctacctcctgcctgcctggctatccatgtcgtggtcggccattattgatgcgaacacacttcgcttaaagatcgaaagctaataattaaggcattgggcgggcgagagtagctagctagctagcttgagatgcatggaccgtggctttagatggcacgccgctgtcatgccgtgcgtttactcgccagagaagcaaccggctggccggcgtctgccatgcagtgccagtgccagccaacgcaaacggttgggtcgttgtcgttggagttcgaggtccagacgacagtgttcgcgcgacagaggtacggtgttgggcgcaacaagtttcccatcctttgtaggatcgatctcgagggaatatatcctagcacacgcctccttccttgcttgcttgtatggttgggcaagcaagttaagctgcttgcgtcacacatgcatggtaatgcaaagcatataagcaacgaagttagttaagcttgttggttggtagcaaaagcgatgt

SEQ ID NO: 5804 - DNA, 728 bp, Zea mays
ttcatacttttcatcttccactggtttctcggctccctgtggagatgctgcttcattatcactaggttgattctcttcatagttttcctggtttagcaaacatcactaattaatcagagctattctcttatgtgctttggccttttgaagttccacaggcactggacacactcaccaaactcttgctctcagtatcggcacggggtgcttctctgatatactcttccattgtcacaagaaatgaaggaggcggctgcatagtggtgattagtagccgatcaacacagtgaatgactattagtacagtacagtgtgcagaggacaaaatttaagtcgttccaatttccaaataggattcaaacgactgacatttttacacttaactttggtatagtcagtgatgtagtattatctttcctgaagatttatctattaaaatcagtaacgaatgtcgggacatgcctgcctcagagtgggaaattggaaagtcctggccagctcaagaagtttgcagtggtcatagaagttagagagtttttctgcctgtcaaattgatggcacaagataccatgagattccaagaacaagatagttcatccaaatgtatactcttcaacccagttcatggtttaaatctcttagtttctatatacctgctgaccagctcgtttatagatttcaagagccttgattgcatcatacttcggcatcttaaaatactgcatcac

SEQ ID NO: 5805 - DNA, 787 bp, Zea mays
  unsure (1)..(787): unsure at all n locations
cagcttgcatgcctgcagtggcccatcatcattgtggggctcgtcctcatggtcatctccctcatgggcttcgccggcgcctgctaccgccagacctggctgctccgcctctacctcttcgccatgttcttcgtcgtcctcgcgcttctcttcttcatcgtcttcgccttcgccgtcaccgaccgcggcgacggccaggtcgtcatgaaccgccgcttccccgagtaccagctctccgactacggaggctggctccgcgaccgcgtcgccgacccacagtactgggccaccatcagcgcctgcctccgcgacggccacgcctgcgccggcatgaggcgcctcgcacgggaccccaacactggcatgctcgtgccggagacgtccaccatgttctacggccgcaacctctccccgatccaggtcctcttttcaatccccaacaccggcatgcgcgattcatttagtttccatgcgcggttcaaaaaattcctctgctaagggaagattggatttttcttccagtttttattatattctaccggtgcacaaaagtcggggattttgtgacgattcagcgtttgatttccaccatcagttttggctttgctgctgcgttagctacggagtagtaggtatactagtttagaggggggaacaaaacaaaaaaagctgcatttttgtgtaggcaactttcctcagaaatgagaggccatcaatcaagaggataaacaaccatctaaaatccaggttcttcctaaccttncgatgcttgttgcaaaggtatcgt

SEQ ID NO: 5806 - DNA, 721 bp, Zea mays
ggtgagtggtgactggagggggtaaataactggctggaccacgactcaattgaccaatgagtcatgggatgcttactggtaagcgtcttaggtgtactgcgtacagttgagtggtagtatgtagtacatattttcttcaatggaaaaaagggtcactttcttttggagatataattcaaagatccttcatcctttagggctaactcatttttctaagagatttccattttcgcaagagaaagttgattttcccttaggaaatggagttgccaaactagttcttagcgaaaaatatcagtgacatgtttcaccgtcatggaatggaggcagtgcagatctgtttccccatccatgatttgagtcaaaagcgtctgtacttagaggcacctgctacagaattatgcacggaatttcttccggtgatgtaaagcaaagcaattcagggaaccaaagtaacgcagggaaaaaaagattgcttttgaagaaaggtatatgctggaaccgaacggggctgccaaagtcagtggcccttctagctgcttttccccaaatcaggaacaagcaaaaggcctgatgaattaacagtttctgggaggtggaaagctgctccagaaatgaaggaaataattaaatactagttagagggcgggcccaatgaagttgctacctttgcttaagacgaaaaaggggggcctgggctggctaaatttgaaaggggggc

SEQ ID NO: 5807 - DNA, 786 bp, Zea mays
agaaagtcttctgatccagcaagggcacatgctgtgccaactttgtgacatctcagtcccgaacatgatcagtaaagcgagatagataaaagagacaaaagatgaacgacaacatgtcactgcttgtcgttcacttcgctgccctcgtcccttttcatattcccctgtcaaaatgccgtcggagtgcctgcctcggtaaatggagcattcggccagcctccaccagcaccagcaccagcaccactgcgtcccatctatcgaaccgggtcacaggatcaaagggagaagcgcaggcagaacgcacaacgcagctcctttcgcctttcggcaaaagacagtcacgtcgagtcgaccagcaagccggacgcgtggtgggcgatggctagcatcatcatatgaacaccacggtgactgaggaaagctaccgccttcagctgtggaggtgctttatttcgactgtgtgcaaatcgcaatccaagtgttgcggaagcttgtagttgaatactactcctaactcctaagaacggcagccgatggccagcacaaggtagctgaagtcatcttggacccgattgttatagattattagcaagtgtttagtacgtagggccattgggcattaactgtggcgagctgtgtggtcagcatagtgggctgcccacaccatcaactgggttatctaacgggcacagtcgtcagacagctctgcattctttagcgcaacataacattgcaggggcaaagtattttaacgagtactttggtgagtctgtgacccaaaattct

SEQ ID NO: 5808 - DNA, 728 bp, Zea mays
agcagaaaaggaggaggcatctgaagagattcattcgctgcataaaacgctcgatggaatgatcgagcacaaagcagaattagaaatacaggtagttacatgcttgtcaaattttcttcttaattgtagcttcaatatatgttctcatatacatagcagtagaaagaaagcctgttgtttgtttaactaagtagaacaattttcaggtatcttctactatacaagagcacgaagaactgaagagcaagtaccaaaatacaatggaagagaaacagacgttgagtgataaatatgaaaccgcaaagaaagagctcgaggatgcaatagccaagttggaggaggaaatgaatgtagacaagtcagaaaaagagtctcacatctcaaaactggagcgacagattacattatctgagataaagtacatggaggaggtaagtgtcccctgttcatctctctccaaactatttgggatttgacctgggaatgatatctcatctgtataacatatgtactattttcagataaagaccatgcaagtggagacaactgaaaagaatgaagcactaacagccaagatgcaggaacacacagacctacagcatgagaaagatgagttggaacaacagttgctggaagtgaggaaggaactggatggtgcctaccacaccaatacaaatcaggtaactggtattattaaatatattcccgatattgtattgctctatttt

SEQ ID NO: 5809 - DNA, 766 bp, Zea mays
ggtggacgctgctctccggcaccacggacgtgagcgtctgtgtctccacgcaccgcagcacagactccggccagcccaacggcgtcgtcctcagcgccgccacctccatctggctgcccgtccccggcgaccacgtcttcgccttcgtccgcgacgagaacgcgcgctcccaggtacgcacgcgccctcccttccgtccggactctggacgagcctggacgcgctcacatacaccacaaccacaccgcccgcgctcgtcatttaacgctcacgccttgaatggttgccttgccattgcagtgggacgtcctgtcgcacggcaatcaggttcaggaggtgtcgcgcatccccaacggctccaaccccggaaactgcatctcccttctgagagtgagcaaccgaccagtcaccccttgctcctccgtcgtccattaaacgcgcactgtgcactgtgctgttggattatgacggttttgacgatgacgaccactgacgacggcgcgcgacgtcgcagggcctgaacgcgaaccagaacagcatgctgatcctccaggagagctgcgcggacgcgtccggggcgctggtggtgtactcgccgatcgacatcccggcggcgaacgtggtgatgagcggcgaggacccgtcgggcatcccgctgctgccgtcgggcttcgccatcctgcccgacgggcggccggagtcgtccggcgcgggcgcgtcgagcagcgccatcccgctcgcggcggcggcgccgcctccgggctgc

SEQ ID NO: 5810 - DNA, 585 bp, Zea mays
acgtcagaggccgaaggtgaatgcggtcccactgccacttgttgtttattttccttttttgatttttttttggaagaatttagtggggctagctcgaaacgatctgtcctgactcgatcactcgaataaagaatttcgcggcgacacatttaggtaggaccttggctttaattcgcctcgcagcatgctagctcgaaagtcgaaacgatctgtcctggcgcacacatgtattagtattaggtacaaaccaccctggcgagcgagccccaccaagaacaacgtgtgcgcctattgcttcctattagtccctgtgagttgtgaccattagtattcaataatcgatgcgtagttttctagaattattatggaggaaatctgcacgtagttttctgctgtttcctccaggtagttggctggaaagttccatatagctgcaaatcgcggcgaaattattgtatatattcattattgaaaaacaacgtcgtgatgtgatggcaccatgctacttgactcctgatatttttcgatggaaaacctgttagttttaaacttttactacaacctgaatgcacccgatcagtaata

SEQ ID NO: 5811 - DNA, 746 bp, Zea mays
ttggaggtttggtaattgtgtgattgctagtgaagcaacagtcaaggaaggcaacagatacgttagcatacgttcccttgtgtcagttactaatacaaccaatttcattgttgatttacgtctaaaaggaagaatttctcaaagtgcacgggcagatgaacagggagacagttttggtaaagaggatcaaatcctgattggaacgctggagcccaattctactattccagtcccactatcaggcctctcacatcctcttatgccctatatgttgcagttaaggccggcaaaacatcatgatcatgaaaattactcctggagtgatgtccaggagaggcgcagtcaaaccgagtttagaaaggaggagatcctagatttatgtatatcagatctgtatgaatcggaaaacttgctattctgctcacaggtagatggcacctcgaattcttgtcatggactgtggttttgcttgagcatagaaggcaaggaaataggcaaagatgtacagatggaaccaatatatgattggtgcatcattattaagtccccgttgtgtttgacatactatcttcccattgctgcacattatactgtcagttctagccacctcgataatgaagattcaagttgctcccttggcaccttaagtccgggtgaggctgtaaaggttcacaatgttgatccaagaaaccccttgtacttatccctggttccacatggaggatgggaactgatgcatgtattga

SEQ ID NO: 5812 - DNA, 721 bp, Zea mays
atggccgtcgtgctgacgttcggcggccaaatgcccgttgtcaaggtaacttacctacccatctacgtacgccgcacgccacacaaaaccacgtgaatcgaaaatccccttccattggaaggaactgggcggatggcttttatgtgttcgactgttcgtgcgccgcaggtcggtaggatggccggccaattcgcgaagccgaggtcggacgcgttcgaggagaggggcggcgtgaagctgcccagctaccggggcgacatcatcaacggcgaggctttcgacgagaagagccgcgtccccgacccacagaggatgctcaaggcgtactaccaatccgcttccaagctcaacctgctccgcgccttcgccaccggcggctacgcggacatccaacgcgtgacacagtggaaccttgatttcactgagcacagcgagcagggcgacaggtgaaataaaatcttgcacgcactcactcactgattgcagttatattatatgtcatgggtgactgagtttcattattcagttatgttatatgtcccaaaatttcatcctttttttatgacatgcatgactgagtttgtaggtaccgtgaattggcacatcgggttgatgatgcccttggattcatgggtgcagctgggctaacagtggaccagcctttgacgacgatgatcgagttctggacctcacatgagtgcctcctcctactttacgaagc

SEQ ID NO: 5813 - DNA, 731 bp, Zea mays
ataccaataactgctagcagtaacgaaagaaaacaaaaagctaccaaatttaagtacctatgaagcatatccattcctccaaaaccaggaatttaacagcaacaaatatcaatttgacacaccaaactcatgataataattcaatcagtaaagcatgtcgtatgcagaacatatatacaaaataaagcagaaggaaatgtttcatcacaggctttgcaaacaaggaccaaccttcaagctgccgtggtgtgacatcaaaatcctgccaccaaaccttatcaccatcagatggaagcttcactttgagaaatttagcagccaaaaagatagcacctgctgcaatatgatgaggctcgaattgcaggcaaagcgaagtacgcagtctgtacagtgcacaatattaagtgtagtagatacacaactgtgaactgcaatttcaaacgacagtaagggtagcactagcatacccatcatttacaaaattccaggcaacctgaggaagcgaacttttactaccaacattgaatctccttatagctccaaccaagggcttgtaagcatggtcaatattcaggtcaaacccaagtgttacaagtacaacacgctcccggagtaaaacaagatcttcttggttatcagatattccctggaaaatgaaagattgagccttcactgtaattaattatgtaaatgagaaaaccttgcttttgattcatttgaactggtgcatg

SEQ ID NO: 5814 - DNA, 774 bp, Zea mays
ttgcatgcctgcagcagaacgcgctgtccggcccgataccgcgcggcctcgccggcttggcgagcctccaggcgctcgcgctcgccggcaaccagctcacgggcgcgataccgccggagctcgggacgctcgcggggctccagaagctcaaccttgggaacaactcgctggtgggcgccataccgccggagctcggcgcgctcggcgagctccagtacctcaacctcatgaataatcgcctcaccggccgcgtcccgcgcacgctcgccgcgctctcgcgcgtgcacacgatcgacctgtccggcaacatgctctctggtgcgctgcccgccgagctcggccgcctgccgcagcttactttcttggtgctatccgacaaccaactcaccggcagcgtccccggcgacctgtgcggcggcgatgaagcggagtccagtagcatcgagcaccttatgctctcgatgaacaacttcaccggggagataccggaggggctctcgcggtgccgagcgctgacacagctcggcctggcgaacaacagcctctccggcgttatccccgccgcgctcggcgagctcggcaacctgacggatctggtccttaacaacaacagcctctccggcgagctgccgccagagctcttcaacctcactgagctccagacactggcattgtatcacaacaagctctccggtcgcctgccggacgccatcggccgtcttgtgaacctggaggagctgtacctgtacgagaaccagttcaccggcgagatac

SEQ ID NO: 5815 - DNA, 811 bp, Zea mays
ggcattccggataggcacttttggagggtgtccagctccagaaaatattcagcaacctcggcttatgcaaccatcttccatggatcattgcagtcggatgcttttgatcgtgtctggaagacttgggctcctcctaagtgtgctttcttcatctggctcgtgatccacaatcgatgctggacagcggatcgcttggctaagagaaatcttccccgaccaagctgttgtcccctctgtgatcaggacgatgagacaatcaatcatatcctggtaaactgtgttttcagcagacaattctggttcttcctcctccaaagaatggggttcaccgctctttgtccgcagccttctgatttgatctttgatgattggtggaggaatagtatcagctccgtgggaaaggagctccagaaaggactcagctcactcattgttttgggagcttggattatatggcgacaaaggaactactgcgtgttcaatggcaaatcaccacatcttgctacagccctgatcacagctggcaatgaaatttggtgctggagttcggctggcgtgggacggagccagaaaaaaatttagaaggggctgaactaaactagtgtagtatagaagtccctcctacattgtatatgtacgctaaaaatttagaagaggctctagtggggctctatgtactcgacagcggtaggaggggctcgagccccgcccgctccacccgttgctccgtcccctgccccgccaagggttctagggcctgtttgacaggttcaaaagtgaaacttccttaatgggtttaagttgtttcctt

SEQ ID NO: 5816 - DNA, 704 bp, Zea mays
tgcatgcctgcaggtactgcatggccgtgcccatgtcctcctccatcatcttcgccacctggtgctccgccacccgcagcccgccgccgttgccgctcttggtggtagcgctagtgttgccgccgccgcgcttccattgctctttccctgcacgtgcgcgtgatcaatgcatggatgacgacgatgctcttgccatgacatttgttatgttggtggtggcgagtggccgagcgagtgccaaatgctctggttggttaccgccgtacatacgtacctctgatgaagccatgctcgcaaccagaggcgccatcccgccggcggctccgcccagccggctcatgctgagaacctgtgcgcaagcgcaatgcaatgcacaactaacgtcagcacgtactgcactggcactcgatcgcactgaatcaaagacatgaactgccaactaaatagcatcaccttgacttggagctgcaagaacctgacgtagtcgatgatctcgtccagcatcgacgccttgtccgtctgcaaaaccacaaacaacgacgatcgaccgccccacacaacgtcgccatttcagtgttgattgttgacgacgcgagcgagagagaagaggaaggagctagctagctagctagagggggatgccgaccttgttggcgttcgggaccatgtccttgtagcgactttattcggttcgggaaccttta

SEQ ID NO: 5817 - DNA, 738 bp, Zea mays
aaaacgaagaaaaacgcagagaggccgttgcatgcctcacttaaggcccacacgttcgtttgcagggcggacggccatgggcctacatgtcaggtttcgccggcctgccaacggcgagccatggccagtcgctcgactgctccactccacctgacacgaaattgaaggacgaaacctactttgtcccattcccatggttcctcaaaggagctgaaagcgagacattccttgcagggcagtcggagatttccgttcccagcgtcggctcggccggcgcccatacgctgcgcagtccctactgcggccttctcgccgtcgccatcaggtcaggtccatcatcacgagcgctgcgcctcccgctgcgtcacagcaggtgaggttgggtcaccggccgtggtggctgacagctgggacactcactcgtgcgaggacaatgacggagtgggccacgttgtcagcgcggtcgaggactgacgagacacgtgtccagtacgtggggcgcgcacgcggtgtgatactcacgtcgatttggaccttaaaaccacctagcgctacaaatgacggattttgcggagtttggtcctcaaaattcagcgacggttccagtgggaatcggtggcgtcatgtggcacccccaacgaagagtgcatatagacgaagcaacttcgtgtggagcacgtgatcgtaagatcgaaaactctatgaattggtccatatgccccagtggaatggatacac

SEQ ID NO: 5818 - DNA, 782 bp, Zea mays
tggcaaaagcgggaaagctgtcgtatttagttgtagacgaacgcacgtaaggtgcgatacgtggtagagtagtagctgagcttttgctcaccgtcacggcgaacaccgaacacatccgtcgtcagactcagagctcgcatgaggcaagaatctgtccacccgtcctcttcagcaaccagtggcacctgagcgtgcgtcagtcaccagggtcagtcacttgcaacgtgggcgaccctgttgctgcctaccgtctcagagcaaagcggcagagcgggggccgtagctactgactcgaggctgctcaaggaaaggaaaggcatcaccgacccaaagcgccaccattggttcacgctagcagcaggtgtgcaggcctgtgcaccctctcattggcctcgctcgccgctgtgaaactccgaccaggaggaagaagaagaagaagaagagcggcggatttagtggcacggccatcatggatgcctctgcatctctgattagacggaaccaaatcatactacctagtatcgcgcgcattccatgcacggtctctcagctcgggtggcataggatgcggcagtttagtggcgtttaaggggggcgccgcggaaagcacttctttttatttctgatcagatgcctaggctcggttcgctgaactacccggcggtgtccggttcctcggcacggacgcatcagtggggcaaactgttgcgccacgctgtgcgcacgatctctttactaattttaatcgcggcgttagcagctaacctaggtttgtgtcagtt

SEQ ID NO: 5819 - DNA, 646 bp, Zea mays
tcatgttgacttagcgagtatgccatttttatattcttttgtttgaactacatgagatcaaaccttactggaggtcaataattaaaaaaaagaaatgtctggggttaaacaaacaggcagcaacttggttcctgcccaaggtctaggtttttatagaaagtctttgaaagctcatacacactatggaaaatttagaatctttcagatttcttaccttttgactgcaaatacaatgatttcattttggtctcagttatggtttttattcattcatttttctagatctgagctccagatcatttacctgtcaatacttaagcttgtctcattttgcagagtcattgagacaaagtgtcaggaagcctaaagttaatgttgatctggcactcacggaacttctgaatcaaccattaattggggaggaaagactttctgctcatgattttttccttactctggctgcctgcaacacagtaattccagtgaacacagagggttctcacgatttgacaaatgaagtggatgagataggtgcaattgattaccagggtgaatcacctgatgagcaggctttagtaattgcagcgtctgcttatgggtatacccttgttgaaagaacaactggacacattgttatagatgttct

SEQ ID NO: 5820 - DNA, 788 bp, Zea mays
ccttgcatgccctgcagcgttacataggctatagacttcttttggaacctgaatagggaattcagcccattgtctccttgggttgatcttctgcagccaaagccacctgacctaagagcccacccaaataatttcagatcgaagagaccaagaccacctagatctttaggacgggtaactataggtcaagccactgaacagtgacccgtcttaacttccttcccacccttccaaagaaaggcctttcttaacctatcaattgccttgattgcccagctagggagatccagggccatggccaagtaaacaaacctagaagtcataactgattgaatatagatggcccgaccagctttggacattagctcagctttccatccagggagcatcactgcaatttgatcaataatagcttgtagttgagagtgagaaagatgttttaaaaccaggggaagcccaagatatttgcagggaaaatcagataattggcaagacaatacgtcctgtatagtggccaaatcatcctcactgcaacgaatcgggtagagattgctcttctgcatattagtcctaaggcccgaagcctcaccaaacagctgcaaaatctccttaattgcacccaaatccgcaacatccggccgtataaaaacaactgcatcgtcagcataaagagagatccaatgttgtagattccttgatgaaagcggttggagaactccttcctccacagcccgttgaaccataagatttagaacatccatcactttctaattctaccgatatttcac

SEQ ID NO: 5821 - DNA, 768 bp, Zea mays
ttgcatgcctgcaggtttgttcgcaggaatgatcagaaacatcagctaattgagctggtcgggtcatgaaacaaaatggaggcacacagtcatcatcatccaccagcttctgttgcagctcaaaggatgaatgatcaggattctttatggaacacatagaagttccaaattcagaataatttgtatcttcagtttttatttcatatagtacatcaggttttgcacaacccgctagaactccagctgtattgttcacttcagcacaataaatttgctccccaactatttcttcagcagaatctgaaagtgcagtacagaaaaaaaaaacatttagccacataattgaaaaagggtatgtttatttcaagaaaaagtatatgagaaacaagaaaaaaactctacacatgcatctaacacatctagacaataatagacacttagacagtgatataagaattggacttcatatgaacaggctagtcactcaccaataacaactttagactgctccagttctgcaattctccttccaggcttctctaatcctcggtcttgcattgttgctttcagcaggaaagtctgtgcagaactaagaatcttgtctctggctgatgttggatctttctctttagcagcacatggagaagatcttagcgcatccatctttatattagccttagcaggagatgttttcggccctcttctgttttcaatgcaaacaaatagggctttatcaaagaatccaatgtcaatcctttctggttttta

SEQ ID NO: 5822 - DNA, 804 bp, Zea mays
cggaaccctttatagtcaacctgcagccaggcgctgactgccccgccaacgccgcctacttggacggctcctacgccgggcaggacggcaagcccgtcggcggcgagaacaggatctgcgtgttcgagcggcacgccggcgacgtcgcgtggcgccacacggaggccgggttcccggaccgattggtgagcaagccggcagcatgcagcgaacaactctgaactctgaagagcgcgaacacgttgttttgacgacgagattgttcccggtgcagatcacggaggtccggcctgacgtgaccttggtagtgaggatggtggtgtcgcccggcaactacgactacatcttggactgggagttcaagaccagcggctccatcaaattcgtggtaacgtaacgtgtatctgaattctgaagcgagaacgcatttccgcagtgaccgcacgcacgcacgcatgagctgaagttgtacggggcggccgttggcgcatgcaggtgtctctcaccgggctcctggaggtgaaagggacgtcgtacacgcacgccgacgagatcacggtggacgcgcacggctcgctggtcttcgagaacacgatcgccgtgtaccacgaccactacgtgacctaccacctggacctggacatcgacggcaccaacaactcctttgtgaagaacattattaccgtcaagcgccacaccggggaacccggccacgggcggcgcccgcacgccgaggcggagctcctggaccgtgccggtgcgaggtgggcccaaaccgaaggcccactggccatgccggcctta

SEQ ID NO: 5823 - DNA, 469 bp, Zea mays
ctttagaagatcgtggaacaaatacaccatcacttcctatttcagcctttaacaacagtagcttgagaagaccaacatgtacttcccccaacaacgaggagtcctggaaatcacatttttggattatggggaagaaaaacaagaaaccgtcctaattctagagaaaactgatcaaaattttgaaccttgtcatggaatgcttgcacaaactcatcaaatatgaaggggtggacatcaatactgccaaaatgagtgtatacataccggataatctgtcaggattaattctccaatcaataaatgtgggctgatcattagataacaaattgagatagaggaaaatcaactaagcatatgacacatataaaatgtaaccgttctgagcattcaggcgcttaaataaagttacagtgtttaatggtgaatttcccaactcttgtggctgctacattgattatcttacaacctt

SEQ ID NO: 5824 - DNA, 762 bp, Zea mays
ttggcatcatgacagcatgcgtccacaagcggtgggtgggttctaatttttataaatgatttcggttgtcgtatgtcagtaaaattatacaggtgacccacatatcagaaccggcaatgaaaacaagttttcactagcggttcaagtaactaaaccgctagtggaaatggacgatttttactggcggttttattaaacgaattaaccgctagtgaaaacatttttcagatccggctaataaaacgaaccgtcagtgatgtttttggtataagtatcacttctcccggatactccattgtttctcgcagccacctgcaattgccgcggttttgttccaggtttcgcaaaatacaaggggagagattttaatctttattgtttggattaaggttgctaagaaagattggcttatgtttctcttgccaatttttgtttattcttcctcaattttagtcgcattttggatctcaggtttcaccatgtgttagaagaaaaagtagctattttctctatttcctcaaatgaggttgcttaagatggatagattttgtctctcctctctctctttcctctctccctttcatgtttagtttctaatttagtttatccaacatatatttagttgtttaatgaatgaagcatgtgtctgtatggagagagaggaccgtacgattggtaattaagattttttataagttgctagaaaagtctggtttaattatgcttctctcgccaaatgttgatcgttatttctcaatttag

SEQ ID NO: 5825 - DNA, 703 bp, Zea mays
tgaaggagtagaacccaaacgagctgcttgtgccatcgacgggacaccgggcccactcgtcgtcagagtcgtagggacacaacaacggcatcgcgtcacctcttaacatgcttctagaaatctctagaaaccaggattcatagaaggtgaagaagtagctagatgcatgtttgaaccagtaacatagacaaatttatatactctctccgtcttaaaataaaatttggtttatctttttattgattcatacaataatcaatctatttaacttatatatatgtcatgcattcaaacataaacataaaaattaaaagctaaaacaactaatattttagaaccaagagagtataaattagagggtattagggtacacatgcaccaacggaaacttgcaaaaccgatgatttacactaaacttttactatatatacaccacctacaaattataattatgcacgcaccgtcaaaacatttgcaccctaagatttactctagcttcgccaccggtaatagagctctagcctctgggtgtttcaaagatcaagctgtagacgaaaaccagtagaggtctgacattgaagcctacatgatcgcaattataaaaagagaagaagaaaaaactatcatgaaacttttcaagcccaccaaagcacaaacattataaaccaaaggagccacaatgccacattgatttttgacaagt

SEQ ID NO: 5826 - DNA, 719 bp, Zea mays
gggcaaggtgcccgacgtcgccctcgtcgaccccaacgaccactacgtcgtctacttcttccagggctcgaagctcttcggcttggacctgcgcgagaagaaggtcgtcgcctgcgaggaatgcctgatagaccgcgatcgactcgagtaccaatcctcccgccccatcgtcgacgcctgggagctgtcgccaccgccacccattctttcgggcgatgacgactcttcgacagacggtaagcgcgcgaacatttgcattgccttgcctacggtcactgaatcgctgcctgcaataaaactttttgcgggtgtcaaaattaaaacacttgacaaaaagcttattcgtcgaatgtttttttttaccgagtgttttttttgcgtgacactcagcaaagagcttcggcaaagtgttttttttttgcgtgacactcagcaaagagcttctttgccgagtgaccgaaaaaaaacatttggtaaaatatttggcactcgacaaagagccaaattctggcagtgaatgcagcacgcatggctgctggaaatctcgacatgatgctctatgtgtgtctgattttttcttcttctgaatttggcaagtatagaacgagaatatatttggtgcgcgtggaagtttagtgcacatggtgcacatattaaattatcaacagatatttaattttcccaaatacccaaactcttgtattattataatgtgattc

SEQ ID NO: 5827 - DNA, 820 bp, Zea mays
acactgaggatagacatattttcagcttatcttcgaatggtagatactctgcaaaatcagcttatatgggtcttttccttgggtctaccacctttgggcactatgaaagggtttggagatcttgggctcctccaaaatgctgttttttcatttggttggtggcccaaaatagatgctggacagctgatcgcttggcaaaaaggggattgaatcaccctatcagatgtcctttatgtgaccagcaaggggaaaccctgaaccacttgcttgtgaattgtgtcttctcaagagttttctggtacaacctgctaagaaagtttgggctgcatagtttagccccacagccagatgcagtctcttttatggattggtgggagatggtatcagagacagcaaatggtctggtcagggaaggtcttgactccctcatcattttaggatcgtggatgatttggaagcatcgtaatagagtcatttttgatggagggtctcccagccttcctctgattatggagcatgcagatgaggaaagaagaggctgggaaattgctggagtcaaaggtctttccttcttggctgaccccctgcatcggttgctgtagggagtgtgtgtgggtgtttttatggatcctttcatgtacgagtgttactggccttcataaggagtgccttgttaatgtttttttgggtactcttaaaacctttcctctcttcttaaataattttttcaaaaaaccccagatccttcttgggtttttttttcaaaaaaaaatatattccctccgcgcgaatagtttcaaattttttcacccaagaattc

SEQ ID NO: 5828 - DNA, 774 bp, Zea mays
aaacttcagagctcctatttcttctggtagctcaggcatatatgtgcgttttaacccaaggtacctcagatgaattagattcccaatatgcctagcattgtgccagctcgtagtatatacattctctaaatctaggactcgcaagagcttaaagctcagaagaaacgagagctccttatcagcaccacacctgtagactgttaatgacctcaaatgttgcatgccctgcttataattgtgcagatgagcatccattgtactcttttggtgggctaacctacgcgtgctgcttatttctgacaacatgtcctcatcattatataagacagtcacgaagttttcttcgcgtgccaaagaacggaggagatcaagcaccatatcatgcacgcggcaaccatctattatactgctgtcttttgatgccactgcctggatcatgcttctgttgacaagatcattgaagtatccctctccaacctcaaataaccaaactcctggtttcttatggacaaaattttcagctatccacttccatatcaaagaattcttatcaataatgtaatcctctgggaatgaacttagatataataagcaagtccttagatgacagggaagatcatagtagctaagagacaatattgacatagttttgtctacttgctcaatatctttatcgccaaaaccaatagagttgcagacctcaaaccattgtccccatgacttacccaccaataaactagccattgtgatgatagctagtggtattcctccaca

SEQ ID NO: 5829 - DNA, 756 bp, Zea mays
cactcaataactcaagttatacatgatgtaggtcacgattatttactaatcattatgaccgttgtacattccaagcacatgagaagtttatgttttacttgtaaactaaaatgagtgattattcaatttgtttcttcggtgttaattcaggtacaattaaaaaaaactctcatatatgacaagcaatttaaagaagagatacaacaagtttagtgtcttcaagaagaaacaactaggtccaatatccacagcataagaaatgataaaaacttgcactagggaaggtagtgcccttgtagtttgttatggtatattcgatggccatcaataattcttaagacatcaactaaagatgcgatgcttgtttcttatgacaatttttttgtgcaatatctcataataaaacactaggcattgggggtggccttaagaaatatatatcttaccttggttagttctctccagtgtttcaggtcaccattgttcagttctttatctagtcacatttcactacttatagatgcttacacagcttcactaactcagggttctgcactgtcataggtacatcattgttattgacgacgtatgggaagcaaaatcttgggaaacattaagattggctttcattgacaataataaaggcagtagaataatctcaactacccgtaaatctgaagtcactagtggtaaccaggtttacaagccaaaaccactttcagatgataactccaaacgattattttatacgaggat

SEQ ID NO: 5830 - DNA, 888 bp, Zea mays
gacctgcagtgtcctcgggtacccacttaccttgcgcatcctggagaattctgcttctgttcgaactctgcaatctgtctaacgtgtggcctctctgtttgatccgtttgcagagtgattccgagagcactcatgccgcttgaggtgtgtattaaaattattaactgtccttttcttctgttctcttctttgtgtgtaccattggtaattctactagttattactctgctctagcggctaactggttcacatttcacaagagagaattataatatctagctaactgcgaaacaactctcagctaaaaactagaatctggctcgcctttggttttgcacctgcttacagctgttccatttgaaatctatccatgaattctgccctggatgttggtttcacatgatcttgctctagtatgtagcagctcacgtagtcctatgtcagtagtgctctccaggtcaccatttgattcctaaggtttgttggcgctgattgattcccctttgcttctgggggttagcaataggtgagtaggtcatcacctaaggaaatggaacttagggcttcggggaggtgaattgcaaactgccagattatattttagggcgatacaacttggagttttaatgtttaccaatgggtgggatttaataataacaaatgtgccaacttgcccaataaggacatctttaacctttgagggggggaaataatcgttgctaaaaataaaaaataaatattttccatttataggcaagttaaatagatatagggtttacggggaataattaagccccttatatatctaatatagaataaacttctcacaactctgaagaacaattctttggaaaatagcccggcaattaaaaccaacactatatatgc

SEQ ID NO: 5831 - DNA, 670 bp, Zea mays
tcccgaggttgcggctgcggcgcgtagcccgcttgaccggcgtcagcagagtagccctcctggccgtgcaacggggacgctgcacttgctgggcgggccgccatggccacggagcttaagtggggaatgctgctccacatctgcatctgctggtgagttgccggatccgacatcccgatgctggtttggctcaggctgctgctcctcatccttgcgcagagctcggtttgtagttccgatatttgggacttgagcgaactgttctcctcttgcagctcattcttctcggaactgacctgtccatgagagtgtgctttaggcttaacaggtactagtagatagtaagctgaaacatctaccaaagaactaaatcaagcgagcagtgaatatgaaacgggtgacgagagtcaattgaatatatcagttgagtttcgcatccacggtcagtttcaatgaaccagtcacaggattcacaacaggtaatgtgtcctacttttagaggataaactcaagctagatgtttatatttctgaacaaggcatgtggcgactgtagaggatctggtggtatatcagctgagaaacatcagaattcatgcacaatatatcacgctgatcttttttttttatgaacagtacataacataagtgctttagtttggaaactcaca

SEQ ID NO: 5832 - DNA, 742 bp, Zea mays
gtgctctggacctccagtagtgaatgtgtttccaccaaaaggtggatgggtaggaatagtctcacaaaccaactggttcttgatatttctggatgttaagatgtggcacagaattgcagtggaccttattgtgaggggcatcatggctaaatattttggtggattttttattatacaaacccacactggctgcggaagttcgtgttcacaacaagcaacttgacatcgaagtgatacctggaacaagtacagcttgtgctgccgtttgggctctggacccacttgttgtggtctaagcaaactctgttgtgaaagctattccccagaagtagtgggtagaaatacttttccattttctgtccatgctcctgatatgatgtttaacttcccgagaaatacttcacaaggcttttttgggcaatatgttttgattggatgttgatgttggtgtagttggtgataatattttgctagcttattttattgtagtgttcaaggatcttaatatatatattacgacacagaatattaattcatctcttcggaagtcaattcttttggatgtctacatcgcattgagggtattatattattgagtagagtacacttaaaactgtgacagtgtgatacgactcttggggggaaaatactgccccaatgagccatagctgtctgttaattctaatcattgcctgtgattggcctttatatataagatatgaactgatgcttcatctgttct

SEQ ID NO: 5833 - DNA, 775 bp, Zea mays
catcttgcatgcctgcagctctaggtcattgagctgctgctcctggtccatctcgatgatgagcggcagtcccagcaccagaaaaaggttgaccccgcaatccacgccgccttccctgtgctacacataagcttcttcgcattgcactactgcgccacaacctccgactgggagagggcgaccaggatgccgtccccagtccccaccgtcgtcgccacacctgagagctgaagattgcgacatcctagaaagagagagagggagctaaggtttagtggggaggctaaagggattaagggaatgaaggaactcggtgtcacgatgatggggctgagatttctttttacttaggtgttgtttggttcacatatttgtaacgtgaacaataaccttgaaatatgtttatttaaatctaaccgtaattatatatcatactagaaattgatatcgtgcaattcaaacttattaccgctaataatcaaatataaattattatcattgtcaattacgttatatttcatgaacgacaccttaatacttgcgatacgtcaaacatggacctttcttggctgcgttgcgcttcatttgggcctcttggcccagttcagaaggaatgatggtcgctgggtcggcccaaatcatgatggcatggcctcgcctttcccatttgatcgcccaggtcgaacaacaggtcagtgacccatccgctcgccgcgccttgttgccttcctttgttgttggttggggggacctgggaagaagagagaaaccccag

SEQ ID NO: 5834 - DNA, 774 bp, Zea mays
ctcggtacccgctgtacgtctaacgtcgacctgcaggcatctgatatatagttccgttcgattctgaggccaaagaccttcctatatatagttagttacctttcatgtgttccatggcgtggcagatctcatctttcgccggcgtcttgagctgccgatcggtgaccagctcgacgccgagcatgaaacccgttcccctcacgtcgccgatgactgcgtgaacgaacacaggcaaaagaagaagaagaagaagatcaggatcaggcgaggttacgttcgttctggtcagaaagaagaccgaatgttttctgaataaaatccaccagcagctgggccagcagacactcactctcgtgcttctcctggagaccgcggaggcggtccttgaggtaggagccgacgacgaaggcgttctcctggagcctctccttctcgagcacctcgaggacggcgagtccgccggcggtgcacagcgggttgccgccgaacgtgttgaagtagcagcgccgggtcagcacctgcgcgacctccggcgtcgtcaccacggcgcccagcgggatgccgttgccgatgccctgaagaatccaggtgtccggccgggttcagagcgtcgtgtcgtcgtcgtcgatggcacagaaaaacaagggttggaatggcgcgtacgtacctttgccatggtcactatgtcggggacgacgccgtgggtctcgaagcccccagaagtggctgccgacgccgggcgaaaccccgcctggaacctcgtcgggcgatgca

SEQ ID NO: 5835 - DNA, 1001 bp, Zea mays
tctcgagtgtttggtttgagtaatcataccattcaaattaaggtggtgcatcgtgggttcatctctcagatttggtgggatgacttcattccttatattagtactaactaactaactatgatgaatgagatggtgatggatcaactcattctatttcacaaaccaaacaaaaataatgaggagtgagaagacgatggactatttcattcctcaaaccaaacacctcagtcatggtcccggtcaaaccaccccgcccaaccacattagcagcgcatttgtatatttagttttgtttgctttgctgctgccggatctcttcaaacaaaagttaagcaaaaaacgaatacatagatatatagaggaccacgacgtgtggttcctaatacgtacgcgagcgagtgcctgacaaatgtgagcatatataccagctagctgctaaatacatatacatgcatacataacaagtcaaggatcgatcgagctactgacaagacgcgacgacttgatccgagtccgagctatcaatcttctgaaacgaaatgacgttcaaatcagaaactcaacacttgctgcgcgtgcatgcgcggccgaccgaagatcgatctctcacctgctaataataatgctccatttagcgctagtggtatatgcgtgcatgtggactggagaactattctattccctcgttcgttaaaaaaaaaacagctccgtgctgccgatctgaatctcaaagccaatgtagtatgcatgtggctagtcactagtagtactgagagctagtagcatgatgccgggcgggcgcaacgcaaaaaaggagacaaaaaatgatgcggagaattcgtcgggtcatcgagcacacgtcgtctatctaccatatgttgggtgcttgtggaaattaagggagagagaaagaggtgggctggctttcaggacgacagtgcattccatgtgagatgttcttttttcttagatcaggcccatgcccctgctgctgctacctc

SEQ ID NO: 5836 - DNA, 750 bp, Zea mays
tgcagcactccaccgtgctctacctcaaccacgccatcgccgatttcgccgaggcgctggcatccaagctgcccggcgacctcaaggcacgttgctggctgatcgcgtcttgtaccgattctgttcgtctctttatgacattgacatgatcgtcggttgcatgtatatatatataggtcgtcttcttcaccaactccggcacggaggcgaacgagctggccatcctgatggcgcggctgtacaccggctcccacgacatcatctccctccgcaactcgtaccacggcaacgcggccgggaccatgggagccaccgcgcagaagaactggaagttcaacgtcatccaggtacacacacacgcacccgattgacgccatgcgatgcgtgcacatatgtgatcttcgctggctgatcgtgcggtcctcgttcgtcgctgctcaagagtggcgtgcaccacgcggtgaacccggacccctacagaggcgccttcggctccgacgccgagaagtacgtgcgggacgtgcaggagatcatcgagttcggcaccaccggccaggtcgccggcttcatatccgaggccatccaggtacactttataacactactgatgcggcagctggttctgttcctctcgcggcgccgcgacgtactgggctgggcgtcgtcatgacgtggtggaatggaatcgcactgcgcagggcgtgggcggaatcgtggaggtgtcgccgggctacctgccgttggcgtacg

SEQ ID NO: 5837 - DNA, 804 bp, Zea mays
tttgcatgcctgcagccgcctccttgagcacatgcgagttcacttccccgaccttggcgtcacccaatcggactgcgaggagataagctggatccagtccaccgtgtacttcgccttctactcgagctccaagccactggagctgctcctggacaggagcggcgagacgcccagatacgtcaaggccaagtccgactacgtgcaagaacccatcccacggcacgtgtgggagagaacatggtcatggctggagaagcccgaggccgggctgctcatcctggacccctacggcggccggatgggcagcatctctccgtcagcgacgccgttcccgcaccggaaggggaacctgtacaacctccagtactactcgtattggttcgagaatggcactgcggcattggagaagcggatgagctgggtcagggggctgtacgaggagatggagccgtatgtgtccaagaacccaagaactggatatgtcaactacagggacctggatcttgggacgaacgagttggaggacaatgtgactagctacgccagggcgaggatctggggggagaagtatttcaaaggcaattttgagaggctggcagctgtgaaggccatggcggatcctgatgacttcttcaggaatgagcagagcatccctcctcttcccgctgcaaaaggatggggcttcatttgagtggtcgtttgtttcgtagctttgtggtggtggatttcttggctacatttgtgaattgtgaacaccggtgaggaattgcatgggtgaagtgtaaaatcacttttggatttcgg

SEQ ID NO: 5838 - DNA, 749 bp, Zea mays
ggatcctctatagtctacctgcagtctgcgcacacccaaaccaccccgccacacaaagagcgaaaccctctttctctgcccctcagtcaccgccgcgaacttgcgtcttgcgatcgagggaggaacccaccaaatggctcgcgtggagaggcagccgcggaaccctagtaggctcgcccccacctcccacccggcgccggcgcctccgacgacgccggctgctcgccgccccggcacgccacggaacgctgcccaggtgatcggacctttccttcctctctgcgcgaccgctttgcttttcctcaaatcgtcctgccgatcgcggttcccttcggtggggttttgttggggtgaagtgaaatgcgatgcttttttttttcctgggatgctcttctggctctctgtttgccgtgcgggggttttgtgttcgcgcttgcttgtgcgggggacaatgaggaaatattttattttaaacctgttatgacttttttggttgttcctcaatcctcatgatccctcgcctatagtttgcgcaatgccacctggctttgtaatgttgtcatgtcctgcctgtcctgtactgggtgtactaataactactggtggggttttgatgccagtggctcaccgaaatttgtgctgtttttttaatcttttaaagctagtttggtaaatctatttttttcgaggaattctaattttcctaaagaaaaataaactaatttttcttgtaaaaatggaaatcactt

SEQ ID NO: 5839 - DNA, 1143 bp, Zea mays
ggcccctttagagtcgacctgcagcttgagatggctagggagctcctacatcaattgaaggtggtgcaggacaatcgttccttatctcctggtgaactgtggctccgaaacctgctcaagaagcactctcttgccatgtcctctctctctctctctctctcgtaccatggcaaggctgaaatcgcggattgggtggatcaaagaaggtgatgccaatacctctctttttcatgcacaaacaaggttcaggaagaagaatttcattgcagcggtacactcagaggatgggcaaatctggactgcccatgaaggcaaggcagcagccttctttgatttttatcaagggctccttggaactgaataaggaatgttacagttgatctggatgctctggggatgctatcttttgaccttgctgcccttgatgtgcctgtcttggaggaggaggtctgggatacaattaaggcccttccttcgaacaaatccccgggtcctgacgggttcactggtagattttacaaaagatgctggtcggtaatcatggctgatttcatggcggccgttcactgcatttgggctagaaatttcagaaacctgggtcctctgaattcagctttttttactcttcttcccaaggtggagggggccactagtgtgagagacttccgcccaataagtctggttcatagtttcgcgaaagtggtaactaaattgttggctaacaggttagcagaccggctgcaaaatatggtttcccccaatcaaaccgattttataaaaaaacggtttattcttgacaactttatgctagtccagcagacgaccagattcttacattgtcagaagcaggctcgtatccttctcaagcttgacatttcaaaggcttttgactcggtttcgtgggcctttcttctcgaggtcttgaaaaaactgggttttggacagatctggtgtgatataataagtgggctgttagctacctcttctaccaaaattttactaaatggtctgccaggggattggattgggcatcaacgtgggctgaggcagggtgatccactatcgcctatgttatttattcttggaaatggatgtcttgaaatctgccttgtgcagccgagccctctgaagaaagggtttctt

SEQ ID NO: 5840 - DNA, 898 bp, Zea mays
aatcagattttttaccaccttacaaacatgagtggggaagtccgtccaaggcctactgggatctgttttctgcagccatggccaacgagctctcaaagcccaacagaggctctttaactcactaatcccaagaccacccagctccttgggacgggtaaccttaggccaagccaagaggcagtgaccaccacggaactctttcctacccctccagaggaagcccttcctcagcttatcaattgctttgatggcccaaacaggaaggtcaagtgccagagctgcataaatcatcttagccgtcatgacaaactgcacatgaatagctctaccagccctggtcataagttcagctttccatcctggcaaaaggctggccactctatcaacaatggcctgaacctggtcccttgagagtttcttgggagacaaaggcaaaccgaggtacttacagggaaaaactgaaatattgcatggcagcaagtcctgtaaacaattcacctcttcttccccacaacagattgggaacacactactcttctggatattagtccttagacctgaaactgaaccaaataaatgaagaatatccataaccatactgatatccggggcagtaggacatagaaataacactgcatcatccgcgtacagcgagatacgatgctgcatattcctagaagaaagaggctgaagaaacccttcctcagaggctcgctgcacaagcagattcaagacatccattataagaataaacaacataggcgatagaggatcaccctgccttaatccgcgttgatgcccaatacattccccctggcagaccatttagttaaatcttggtagaagatgaagcttaccaccccctttattatatcacccagatctgtccaaaacccac

SEQ ID NO: 5841 - DNA, 675 bp, Zea mays
tggtgcctgcagagagttggttattacagtttttttacactcatgatttgctcaacaagttcttcaagagacattctgcaaacctcatagaagtatgcaaggccgcagtcagtgaggtgagggttgaggtcagcatcgagcaagacgttggatgccttgatgttcttgtggatcactggaggtgaacacgcgtcatgtaggtacctgaatcaaccagacatgtcaatgcccctttcttttgaactacaaacatcttatctcctctgtgcttgaagatgcattgttttttttatctaggcctaaataaatattactagttgtcaacttactccagagcacaagctgtaccaacagcaatccttacgcgggtgtcccaggtcagcggcttgctgtagtcgtcggacaagtgcagaaagtcatagagggatccattcatgttgtagtcatagaccagcatgtagtgcccaggctctgagcagtaaccaacaagcacggagatgtttggatgatgcagcttggaaatgctgttcacaagatccatgaagtcgctgcttgccgataagctcaatggatcaaacttcttaactgtccacacctgaattgtacagtgcgtgtgcgatatagagagacatagagagacactatagtgtcaacgtgaatgcaaggtatgaactg

SEQ ID NO: 5842 - DNA, 627 bp, Zea mays
attttatgagctattttatgagctagaattggtctttacgatttgcttggatcttgtaagtagctttctccttctcaaaaaggaaaaaacatttccccttttcccattgaaatggattccttctttccttttccttttgcattgacttttcttttcaaaatcatatattcggtttcgttcatagtttttctatacactatactaatacaaagagacaattccttatttgacactagtaaagttcttggttcatttcttgacctttaaaatataaatcttctatatttaacaatgtatgtaaatttagttcactacattatattaacttttatgtgaaaaatatgagtttactcctatttaatattatcccaataattatcagtgacaaatttggtcatttttatggctcccacctatccactttaatctatcgtggtcttttgtgatcattgttgtctggtgataatccttagtatattgactttgtgaagggcacatctgagtgtccaattttttatgtctaatcttggttctcttcgttattttcttgggatcgaggtctcctccacgcctgaaggcttctatctatctcaaaaagtacattcagaggcttcatgattaatgctc

SEQ ID NO: 5843 - DNA, 704 bp, Zea mays
tccatacctaaagaaagagaatgaaaaatatatatcaaaccttgtaaaatgaaagaactaaataccgatgggtacaaaagttttctgaatggctggaaacataagcccgacaggtaatttattagcactgatacaaatcaaacagaactacaacattagtaatcatctggccatgttctaaataaatcacacattcatggctataatgttagttttatctttccaggtaaaagaagagcaacgtaagataactaaacctgacatgacaatgcgataggacaacactgagagtctgagattgtagaggcatacaaatttgaatgacatccctatgacagtgcgcagaacatggtaaagttttcagatggacagtttataattcaccaatatggaggtcatgctccatggagaataaaggaaatttccatactccttggttgccagctcccatgcccatgtggttgcttccttcttgaagtaatcaccaaaactgaaattcccaagcatttcaaagaaggtctgatgtcgagcagtgcgacccacgttttcaatgtcgtttgtccgtatgcacttctgagaggtagtggcgcgtggcacacgcctaggttcctgtaagtagcaacacaaaagacctggaatgaagtaaaatgaaacaggaaacagtgcctgttccagtcgaggtcaaaatcttagttcgagtctga

SEQ ID NO: 5844 - DNA, 731 bp, Zea mays
gccggagcagcaagcagagcgcgctggagggggatggcgacgagcgggacgtcttcgagaaatacatcatcgcctcccccgagatgtgcacggagcagatgcagaagctgcggatcgccatgcaggaggcggccgccaagagggaggcggcggcaggcgagaacggcaaggccaagggccgccgcggcgggagggaggtggtggaccttcgcacgctgctcacccactgcgcgcaggccgtcgcctccgacgatcgccgcagtgccaccgagctgctcaagcagatcaagcagcatgccagcccactgggggacgccacccagcgcctcgcccactgctttgccgagggcctccaggcccgcctcgccggcacaggcagcatggtttaccagtcgctcatggccaagcgcacgtccgcagccgacatactccaggcgtaccagctgtacatggccgccatctgcttcaagaaagtcgtcttcgtgttctcaaatcacaccatctacaatgctggactgggcaagatgaagatacatatcgtcgattacgggatccattacggcttccagtggccgtgcttcctgcgatggatagcggatagggagggtgggccaccggaggtgaggattactggcattgacctgccccagcctgggtttcgccctactcagcgcattgaggagacagggcgccggctcagcaagtatgcccagcagtttggtgtgccattc

SEQ ID NO: 5845 - DNA, 635 bp, Zea mays
actatcctagacataaggttccaaatctgaaggtaatccaccaaaactcccgctgagagggcccccttaatatctgagatccatcttctatttagcagagcctcttgcacagttctttttgtaatcctcttgggaatacactgaaaaatccttggagcaatatcacaaattctctgccctgagatccatttgtcagtccaaaaaagggtgttggcaccattgccaacttctgaaactagaacagtggagaagaaggcccgaaccttacacggcaaatgaaaagggagctgcgcccaaggacgagttggatcagttttgtgcaaccacaaccatctcatccgaagagcccaacacatctcgggcagactggagatgcccaggccaccgagcctgagcgggcgacaaactctcccccaggacacaagacaatgaccacccttggcctctttgcgacctctccaaagaaagccttttctgattttgtcaatggcatcccaggccccggaagggaaatcgatagccattgctaaatagaccatcataccagtcaaaacatgcttaacctggatccttctacctgctcttgtcaatagatccgccttccagttagggagctgccttgcaattctatccac

SEQ ID NO: 5846 - DNA, 729 bp, Zea mays
ctgtacgagcgccctccacgctgatctgagcccgaatcacttttttttttaattggcgcggtaatcagactgcgccttgacccccatttgttaattggagggcaggcttggagcggtccatccgggggggtgaatcggagcatcaaagcacacgagacgagaactggctgctcggctttggccgcaggcgagttgggttgggccatcaccacctcccctgtaaaaaggcacggcacgccacgccatcccctgctgatcaacagagcacccgtaaacagggcaggcgaaatgatagcgtgccggtgtccccacccaccctgcacggcggcggcgccattggccgagcagccctgcgaacctctgctctgcgtctgccgtcgcctgcgcgcccgtgtagaggtcgggtggatgtggatccatgcatgttgttgcagcgccatagccagcccgtgatctaacggggcggcgacggatacacctgaatctgcgtagtagctgtgaggtagcgtctttttcttttcttttcttttcgcggtgaggctggctatggaatccgagtccggtagcctggtgctaacttgtcagaaattctcgcaaactaaaatctgggccggaaccgaccaaagttttagtggttgcagggttgtggcgtggcaggagacttttcctgtatttacagccatgagccgaccggaaacatgacagtgacctaacagtgagcatgtaagc

SEQ ID NO: 5847 - DNA, 806 bp, Zea mays
ttttcttcctatatatcagcaggtatttatttgtgaattttcatttataatggtgtacgcatatttaaatttcgagtgtaaggaagtgcagcacaaggttaattttcaggcatgacgacatctgacacatttctattgagctccagggtttaattagtgggtcggccgagacaaaagaacaggcagctgaaggtctaggagagttaattgacgtaacaagtgagaagactcttaaggaagttgtagtgccaattacagggtatgtgttttatccttttgaaattgcttcagttttgtgattgcccttttgaatggttcacatatgaggatttgtgctgtttgaggaaagcccaacatcattgcaaccatgaggcatcccaccacatgtccagctgacagccgaacagctccttaagatctcaaccgttggatttgtggccatagaagaagggatcgagtccggaacgatgatatacatgataggataggggtaacactaaatcactaattaaagaaaatcttgttcaacattggttgagatggtttggatatgttcaatggagacctcttagagatattagtgggatcctaaggcgtgatagctattgaaaagggcaggggaagatcgaagttgacatgaggacaaacattcaaaggagacttgaaatgatggaatatagccaaagattttaccttgaatagaagtgctggaaaacagatatacacatacctgaaccttgacttgtggcttctgggatttaactctagtctaccccaacttgcctgggactaaaaggctttgttgt

SEQ ID NO: 5848 - DNA, 765 bp, Zea mays
cggctgtaggtgttgaccactccactcgctcttccgtacctgggcacaagctacgctcacaggcaggtcgctgcacccttccctactccacaatgcaaaacactagcagagccatggccaaatcgaccaatcggggatgactggcaggagacggcactgccaaatcaattaatgagcatgccaaagaggggcaggacagtggctagcggaggctggatgctggaatggcggcatggctggaacctgtgtgcagagcaccgtgcttgtgctgttgtgtacatggacgatcgtcagccaacgttggagagcatggcagcaccagcactccaacaggtaatagaattccccattccaaaatatctattactacccattcatgtggtgatgccagttgtgagcacagccagtggccgagcgtgacacaaactgaagaggaggacaaataactgatttttttctactgtggtcatatagttagctactacaaaaattaggaataaacaattaaccttctctatgaaaaaaatagataatctcagcttactagcatgatatagcactaggattggctaacttgcattgcatgcatctagttcttcagggttattacaagtttccaaacaaggaaaatgacaaaggaacatgcaacgtatcagatacaagaaaaaaaatctgctgagaacgctatgtcctgcattacaaatggagctggtggtttggttatattataatgttatatgctttctactaatgggtcactgaatt

SEQ ID NO: 5849 - DNA, 778 bp, Zea mays
atctcagcagctccacccttttcttccttttgacctgtggctgcctttccaaacggcgttcaaattatttgctgttttttgaactctctgacgaccaaaaaaaaacaaaaaaaacaaaacatgctgcatagcccccgaaaccactttcaacacggtttgcgtagccacagctgaagctcaaaaaggatgacgtccatggattcgacaagcaacaagcatcacggtgcattcttcacacatcttccctgagggagagaattcctacctcgtctttctttcagattaaagactgctggaggctgaaccgaaaagttcatacacagatggcacacaacaaggcacagcagctttgtcttatttgatctcagttcaatcaagaagaagaaaaacaatatacgaagctagaatctcataaataccctgatgaggtgagctctctccgcagcgcataactaggaacagaatcatgctggaggcagatttaatctgcaataaatctaatcaatggctcatcgtcatatcagatcattcgctggccttcttcagcttagcttcctctccgtccatctcctcaagcgctgcccagagcttaggatcttcgtagtccttgacgagcaacgcggctcctgcttccaccaaagacttctccgggtttctcgtcgccacaccgacgacaggcatttctccgccggcgacgcccggcccccggataaccaggccggggaagaaatccttaccaccaaaccaaaaaaaagaagaatcttcattcttttttaat

SEQ ID NO: 5850 - DNA, 719 bp, Zea mays
aactccttcatttttgcccgctgaataggaaaaaatgacactagtgagcaaccaacattcaaactcctaagaaccatgttcaactacctgattgttttgagcatttgatgctgcatcctgctttttgttctatatatttcaaaattccacaagcaccaaaagcaaacaaatgtgtcttaattagcaaaagctagtgttttctgatgatgtgcaccagttgtactgtgatatgaataccaaccagatcctagatagaaataaacaaggtacgaggagttattataacttcaaacaatggcaatgctacagtagaaaaaacaaagttttctaactgcctgattatcatatacacaagatggttttcagagtattaaatcttcactgatagtggtcttcggtcaatgtccccacctaaagctagttgcaataaggaatttccaaaatattagaatgatagccataaacaatttgtaaaaatagcacaaatctacaactacatacctgagactcataatcgagtgaagctggcatatcatcaggtacaatcacaggttgcagctgtgaggcaatctgaggttgttggccatgatggatatcattccccaaatcagttactggtaatgaattagttatgtaactttctccacgtccacaacttccgaatttattagctggcctatctttacaaggaccaaggtaactgtttctcgaagaatcac

SEQ ID NO: 5851 - DNA, 754 bp, Zea mays
ttgagagtaaaactcaataaaaccataaccttctgagtgcccagtctgcttgttccgtataattttcacagaggcaatctacagttacttgagagtattagtccaacaataaataatttaacaaaagaattaggattccattagagaacaagcaaagtagatcaactaaaatacatcaaaacggacttatatattatgtaatcgtacattcaacttccaaatttgcaaaatcaaatagtatatatgaactagcaacaagaataacatggaaactatagcacctgccttacgaaaccttggtataagttcattgaaaataagtcaatgtgctcacctaaagaatgacttattatcagttcatgaagagatgcttgctcattatgcatggcagagataagcattaaaagttaacaacagaaaaaaaaaaactggcatctgtgcctacagcttacaatcatagtcgtatgcatgtttctgggcctaaaacctaacacgttggttgaaatagcatataaccatgcaagacatggcgccccttagctcctatgagaataaactagactagatgatctaatatacaatgctataacagaaagggtaccctaacagaaaacataataaattaacagtatagcacctacagccgcgagaatattaaaaccaaattagccaaaccaatcgtacaagggtcactctaaaattcccaagtcacggctttaggtaggggagatagagagaagattcacctgctggg

SEQ ID NO: 5852 - DNA, 1448 bp, Zea mays
ggatcctctatagtcgtcctgcagctgcacacatactagccttgtgaatgatgggcggcggtattttcataacatgactcatgtatacagtataagccctaggattgagcattatggttgtatggttgacctgttgagtcgtgcgggattgctggaggaggctcatcagctgattggtgacatgccaatgctggcaaatgccgttgtatggggagcacgcctcggtggttgcaagatccatcggaatgctgaccttgctgaatatgtgctgaagcagctcatccgactggagccatggaattctgggaactatgtcatgctttctaacatttactcgaacagtggaagatgggaagatgctgcaaagcttatgttggaaatgaaggcaaaggggattgagaaggtcgctgcctctagctgggttgagcttgatgataaggtccacaagttctatgttggggacgattcacatcctctttcagataagatctatgcaaagcttgatgaattgggccacggcataccttgtagattgagcccatagcagcccatatttgaagaaaaaacaaaagaaaaagagcccaacacgtaacaagcaacatctcgcattgattttgaagcgtgagaatctggtctgcttattctgttcgctgtgtttttttcgttccactcagcttttcgcagccgccgttttacgttagccaattctgctgtcagcttgccgctgtccgctcgtcctttgagctttggtaggtactaacttgaatactagatgcatgcttctttgattcaccaccatttatcatcagaatgtcataatattgtaggtccaaattatcgtctctagtagaacaacgccggtaaattatgtcaatcatgcaacaaccgccgtgcttactattttttttactttaagtatatataatcttaggaaatactgttgtcctaccatgaatagcgctctggtgactagctaaacatgctattagaatataataaataatatatcgatctactatatctatatgtgtgcaatctgttttatatatattttagattacatatatttaaactatacttatattgtattctgtgctggtttgtcaggttgtgtctcccaaatatcttgcctttttgttgcattggactcttctgtggttagaatggcagcacccaagcccatttctcgtcttatttctcacgtcattcttgatttggatggcaccctcttaaacacaggtgacttaaaacttggaaacaactatgattaatggttttttgaggtttagtgtactgaattcacctatctgagctgacttcgattctcttgtcgactctatgtggcagattctgttgtaagtaaggtagtaaaaccatttattctaaagaatggaaaaacgtgggatagcaagaaagctcacaagctagttgggaagacaccttatgaa

SEQ ID NO: 5853 - DNA, 699 bp, Zea mays
acaatgatgagctgaacagtgtttcctaaatgcggtgtcacctttgggctgttccttttgtggaagaattgaaagagatccaaacaatcccgacacacgttcaagcgtcgtctcggagattgatcttttaaatgtctgccaagaaggaaaaaaagtgctcttctgttagcaattaatcgaggcatgagaatctgtgaatgagcaaaaagatcaagttcggcaacaatatgcagacatattacatcatcatatcaatgaaaagcaaactgaacgcaccagtaatttctattaataatgactacacctgaatggcgctatgggcatgtcacaagaaaaggtaacctcactacctcagaaagctggaatgttcaaaggccttcttaccttctctgtgcctccacctgtgccatatttgttatggatctgtaaggaaggacactatttggttacaaacgacatgatttgtgaacgaagggagaatgtttcagccaaactgacctttataaggaaatcagtaggatctagcaagagcaactttgcttgaaaatagtgggcaagcgctctggctagcatctgttggtagagctcttcaagacaggaccttgagtcttagttcagtgaagcagaaacaaattggctgagaggagtgccaatacaagcggacgatgacaatgtacctgcgggacctgacagcaggat

SEQ ID NO: 5854 - DNA, 804 bp, Zea mays
tcctcgtcacaagacgatgaagacgacgatgtggtgcggcaactggttatgggccgttggcgttcgtccctatcgtcaggcctccgtgccgccctcgcctgcaccatcgtgggcctcgtctccctctacgcaccggacgccctccgcagacacatcaccttcccggccttctcctacgtcgtcacggtcatcctcgtcacggacgccacactcggcacggccctgcgcggcgcggtgagcgcgctccacggcaccctcatgggcgccgcgccgtccgtggtggcgctgtggctcgcgcaccgcacgggcgccgcggagtcggcggtggccacgtcggccgtggtggccctgacggcgttcgcggtggcgctcccggagtcggtgggcccggtggcgaagcggatcgcgctggggcaggccatcataatctacgtggcccgcaggttccagccgggggagcgccccagccgcggctgggtgctgctgcacccggccaacgtggtggcgtgcacggcgctcggggtggcggcggcgctgctggccgcgctgcttccctggccgaggctggtcacacgggaggccaaagacaagagcaggacgtacatggtggctgcctcagagagggtcaggggtcctggctgaagcccttcgtcgttgacgctgctgccgggtgtgggggacgcccctaacgggtgcaccttgcaggggcgaatgcagatgacgagtgtatgcttgacgaagccagccggttgtgcctagacagcaaccctctatctgccaatcgcccttccggttaaacccatc

SEQ ID NO: 5855 - DNA, 825 bp, Zea mays
gaacctctaggagtcgatctggcagcaggggagcagcagcggcatcgagcaacaccaggtctctattcttgtattgtttttttttttgaaccaaaccgtggggcaaagccccccggcacccccggcaacttttaattaaaaggggtgagacaaagttacagcatcatcctcccatataattcccaacttaaaccagcgcctaacagataaagtgcaatcgaagaaaatatgttccattgtttcttcaaccccaagctgacagagcacacagttatatccttcttccaagaatttctttctccttctcagcatattcctggtatttaacctgtcattcagtaataaccatgcaaagaatttgatacgtgggatgcatttggatttccagatccaagtggcagtcggttggggctgtagggttctgaagtgatacttgtagtatgcagccgaggtgtatctttgctggccgacctggccccatatatagacccaaaggtcttttgactccaactgtgtaggacctagggcatgcaacaggttttgtagcatgatgaattcattatgggcctgccttgtcatgggaattctgaaacattccagcacttgatcattgttcctgatcccccagagggatatttttggattctttgcaaagctgaagaggttggggagaacatcactgagtatccttccatctatcagatcataccataggctgattgggtcccctgtgtttgggatctattcttgactggtgatactccaggtcttggatcttgggtggaaatattggtttaaagacatagagttcactgatttgggggg

SEQ ID NO: 5856 - DNA, 766 bp, Zea mays
tggaatggaatctcaccatcttgtcttctccctattggtgcggtggtgccacctgacgccaacgttcgcggctgttcgtccccctcggcacgctcgtgaacccgatacaccacgcgccatgaaaccccgagccctctcgctcccgttcgcggccgtttccgtatcgtggaacgagcagtcacggcgacccaccgaatacgtccaagatctctatgcccaaaggcgaggaggaaaagggccttgtcgcctcccacctcgcccccatccgcttggacctctcctcctgtcgtccatggcgtccctttccactttcacatcgccgacgagtcctcaccattgacatgcacgacggcactggtacccagctttccgttttggaccccagtgtctgtcgccgttccacggctctacctgtgtgcttttcaaaaaattctacttgcccgcgctgccgcgcagataattgtcacccctgcgccccgcgctataaaaaagctcacctcgccgatttctcggtcaaacccaaacacagacgaaaatcagaacaactacaaaaaccaaaatgcctcatctccaccactactcacccgtgctactgctcctcgccgtcttcgtctacctatcgacacgctacgtgcacggtgaccatgccgacggcggccaccaggacctttccgccctgctctccttcaaggcgtacaacccgaacgccacggccctggcgtcctgggtcggccccaagccgtgcaccggcacgtggttcggggtc

SEQ ID NO: 5857 - DNA, 991 bp, Zea mays
aagagcctaacatcacgcgcatcaggaatagatagtgcagtacggcagtcagtcaaccctggacccaagttagagcaggattcctccgttacaaaactgttacaatctttaggttgtaacacaacaacttagctcatcaacaattaccgttaaacaaaatacagcctaatggttcatatcaccaccaatacaaaaaatgaatgtagctgctaaaaaaaaggaatgaaatgtactagaacagaatctatgggagacatccacagctactccggcttctgctgcaaatcatctccatgccagaccctgacaacgtccttcaaccctggctggatgccctcttccaacagtttctggtactcaagtagatcgccactagtttgtttcatctgaacgagatggcaggatggtgtgatctcaaagatctgcgtgtcaaactgaaggacaccattgcccccatgcttcctcccttgaatgatgacagtgttgttgtccttcttccttatcctgagattcagtgctttcgcgacatcttcaagctttgagatgatggccaatgcaggcttatctgaagtgaaccttgtctccttcctacactccttgataaacagaccagaaaggtccaaccctgctgagaacgcgatgatttcaaaggcattgagttttgtggcaaccaggggcttcatatcttcgtgagcaatctccttgcgcctagcagcaagcactggggcagcatttgtggcggtggcattctcgctaagaactttctccttcactgcactgatctccctaggaccttttcgaaaccaggtagactcttttatctcctgaattgaaggtctcatgctagggttggggttcagaatcttgtatagcagcctcttgagtttgtgtgaaaaccaactggggcacctgaaatcactatcatgtatctttcgataaatctccatcatgtttgggccctggaaagggaggtagccagcagcgagaacaa

SEQ ID NO: 5858 - DNA, 792 bp, Zea mays
aggtaagaccgtaccagcggcattatattaagaagataccttcacacacaggtcgagaaaaccccccgaacccctgccccacccatacacagcggcaccatagcacatgtgagaacgatcgtgaccggaccttagacctgtgctttggcatgggacagacggggagtcgaactcgaaacctgagaagtgcaactcagaccacctaaccaacttagctagtcacattgatttgattctatgactaaatcttcatcaatatccccatctctctatagcaatgatcctaaatactgaaaggtatacttgttgggcaatacttgaccttccaaactaacatcttcctcatgttcggtttcagttctactgagcctaaaacctttggactctagagtctaccgctacaaagacataaagaaagcaaattaaattgtaaaagactttcagatgtcataccactcgacgaaaaagctgatgaggcaaaatttccatccacaaaagtttcttcagtgaatctagtatcccacaacaaaagggaaaatatgagggaaaccttctcgctgcaaaagaaatcagataatttattttttataaaaaatgcaaatgaagagtgaatgagtgatcaagcctgagttaaacaagtgcaaacaaacctactctataggtagcattgtgtcagttgacactttatcaagcagtggaccatcaactgaagcttcgtcagaatgcttttgagattgagaactcagtatcttccaataccgaaatatggaaatcattttgcttcttttcatt

SEQ ID NO: 5859 - DNA, 777 bp, Zea mays
cagggatcgatgtgtgtctccacgggatgagacaaaagcgaatctgcacacacaccagcagcacgctgtgtggccgacttctctagcttcccatgcatgcatgcactccgcgactagcgttcgagtaatctcatgcatcgtgtacttatggttttgtatttctacgaggctgtgttggtatataattatatattattcaaattcgtgaagcggtggataattggttattaggaaaactagcatgcacacacagaaactccgtaattgatttgagcttagcgtgcatgattggtatatatataattgcactggaagttggcacaggacaaacattatggtcagttgatcgctctgagtttatgttgtgaacccatctcagttgatcagtccgagacttctttgcttctaaacagaagagacaacgaacgaatacgaagcttatctgcgctgctggtggcgtgttgttattgcaggacgcatgaatgcatgcatgtcggtcgcaatgcatgaatgcatacactgatacccatatataataacaaaacttgacgtctccgtgaccaacaactcatgttaattagcaacatagacgacaagcaggacaggtctgagtatgaaagaaacctccctgagcttgattgacctccttgtctcgagccccccggttctggcaggcacacacacacacacgcaccagacggatctaatcaggaaccaataatactgcttcaagctaaacatgcctaaaaccacatgctggcaagtgcatgccgagcg

SEQ ID NO: 5860 - DNA, 770 bp, Zea mays
cctcggtctctggggttcctaacaagtcgaccggcagccacccagaagaaatagctttttgtctaaagcttcaatggtaacacctttcctccctgagcatgggggttcaatgacatgcatgattcgaaagcaccggcttggaggatctggagccaacacatagcatttgatgcctgcttccctacagattacatagatccacggctcgtccaagttattcctcttgcggcacaagtgccattcttcactgcataacagagctctccatctccttgagacacgcctgagaatattatgataccgccgaggaactcttgccaagcaaatgagagctacctcatcaggaagaccatgtataagaggggtatgagcaggagctgattccatgtctctattgtacagcttcccaaactgcactatttcgtggtgattgatcatcctgacatagaattaagtgtgttgcaaaatatgaggtgctagcacgaaaggcaaattgagacgatattccaataatatgaaagtacaaaaagttagaatgtgagtgcaataacatagctaagagaaaaccacttcctagtatagccggtagcacaagttagaacgtgagtgcaataaccaactagaaaggaaaattttagagaagtcacaagatcacaaaacattattaaaaagtgaacaagccaaccccaaaacttatatatcagcacagctaggtatatgaaataaacaagaaatcttcttaggattaatatctgaaataaagcaggcat

SEQ ID NO: 5861 - DNA, 809 bp, Zea mays
aaaccatggagttttttccctagcccctctgttctttagagtactcataacatctgttgaccttcatgcaggagtgtgctgattttccccaaggggaacaatgtggaccacttctcaatgtacttggatgttgctgactcaaccagccttccgtatggttggagccgctatgctcagtttagtcttgctgttgtaaaccaaatccagccagagtttacgatacgcaaaggtgtagtcttgctttatgctgtgttatccgcgtcttcatgccataaatgcgcacttgaatgcagagggaagaatgttaaactagaaaatattacatgccaaagcagcacatataaacacgggagtagaagtgtttgaagaatgaagacaccactattctcatccaaacatttttgtgattttgtctggaaatgcttctgattttaaagattttcttgcatcaggtggggagcagttaacctcatgtataatggttttgccgccaatttaaatttttatggtctcatgctggattggttggtgtagacagtcttgctgataacttaccatggttgcatccctgacctacttagcttagtattaggtctctgagtttgaaataaacctttgattcttaaatctgtaatgaagccccaattaacagatttgcaacttgtgttgtgtcatctatacaactatataactagagtaaaattgttagctttcagttttttgagaacacacttgtgtatctttgcatcaaaaagagaggttagctttcagcttgcaccattattgtgaaaacccaccaactttagtca

SEQ ID NO: 5862 - DNA, 805 bp, Zea mays
tgcatgcctgcagctgctcaggtagacatttgggctattcaaattcaaattctaattctattgtattgttatatttcaatttttaggccttttggttttgcaatgataggcttgtgcaagtctgtttcctaccgtcctagatgaattggcaatttgatgtaaatgaatccctgtttgcctttttcttctgtcataatctgttaggaacaggatgtggccactgaaaaatgaaaaaaacaaaagaagtattaaatatttggggctttaatggttgtatttgctgattagtcattttgcactttgatattttggtaaaaggtttagtgccttttctaaatcaggcctgagtttatggtgttgtatgaagaactgagtgctatgtgggcatgtttctaatgcctaatcttctcctagattgatagctataaattggtatgatggcatgttctgcctcggtgaactagtcagcttatctttgaactgctgtgtgtgtaatgtggattcttggggattggctatgcaaaatacttttgttgattgctagacttacttggtaatatacattaattgacttgtcattatttcaacatgtgctagctgtatactcattagatgagtatcctgtttctttagagcaatctttgcttctaaatttttgtatgcagaaattgcccttctctgttgactgaggatttgaatatttgctacaattactcaggtgaagactatatatgtgaagaaacctacctgaaaatgtttctaaagagaagataaaggacctgtttgacaaaccttggagagggtc

SEQ ID NO: 5863 - DNA, 707 bp, Zea mays
cgacctgcaggtgtgactacctgcaaccatttgacatcagaagtaggaaatacatggcaaataaaaatgaatatgactcaaccagcatgttattaccttaacatctgaaaattctatatggtttgcttcactgacataatttccaggagaactgtgatccagtgatctatcacgaaccccagacagctcacgtgaaacatccaataactcacgaatccggtctgcatagccactgtgaaattacattgaaagtccatacgcatcacaatcatgacggtgcaaagtttaaaactcaaaagcagaagagcataaaatgcatctggaacacaaaaggagcacaggactccaccaaagtattccaaagaagttacaatgttttttgtatgtaagtcaacattctccagctgtgctatgactaaagtatggttcctaccaaaacgatcatagatcaagtattgttcctaccaacgcaatcataaatcaagtatggttcctgccaaaacagtcataaatctgtggcggacatcagtgcaaaactttaatgacactgaaattctcgtatactggaatgtagaaaagccacctacacagcatgcaacaggtcaaattatataaaaaataatgtcataattgggcagaatttgaaaactaaaagggcatattgggagaggatgttaatgatttccagtctccgtcaaagcactaaa

SEQ ID NO: 5864 - DNA, 699 bp, Zea mays
acctgcagtagggcaggtctgcttccacagacgtcttcgccgtttgagaggtggcgcccacctccaccgtctcgtctgctgcctgctctagtggtgccggacctggggtggagcggagatccacaagggcttggattgctttcgttgtcttgctggtacgtaatccgaacttgtttgtagatagattgtgctcggagttcgtatcgttgtgcggggcatattaatgctgctactgtgagtaatcaattcggaatcttgctttatctacactcaactacctgtggatttgtttactatctgctgcgctattctagtccgtccatagttcgattatcctggggttcttccgggcatgatcagtgccacttggccccacaggatttggtatccaaaggctcgagtgtaattgatttcacaaaaatctccgaagtttcctttcaatgtcctgtatcttgtcatttcctgcataagttccaattgatatagaagttagggcttgtgttgttcccttgcagattatataatccagcttatttcatattgattatataatccggattatatagtccagtttatataatcctattagagatatttctttacacaaattattagtgagtaaaaagccaatcaataatctaaaataagcacctaatgacctgcttatggattatcataaatctagtacctagattacat

SEQ ID NO: 5865 - DNA, 808 bp, Zea mays
ccccggttttccgctagagccgacctgcagcttcctgatccgctcgctgatcttcgtcctcctcacctggatgcatcatggatggccggtcaaacatcagccggttactcaaagtcgcactcgcatcgcaggactctccaaggttttaggataaaatctagcatgccccgctcacccgctcggcgatgctgcgcgggtgcgtggcgcacccgcgcttggcgcggaccttgcagggcacggcgtcctggaactggaggaacttctcgatggcggccacctccgacgacgacgtcttggggaggctgaactggtgcgccagcccgccgccgtgctccaacgagtcccgcgggcgtttattcgtcgcgggcaggctgtccggcaagagcgccgacgacgagtcgtcccacccgccggagctcatcgggtaccccggcatgtaggcggcgtccccgccgccgccagcgtcggggctgctcgctccgacgacatcctcctggctgtccatctccgagatctgggacatgagcgacccctgccgcgacgagaagctcagctggcccccgagcctgccgctaccgccgccgccgcccgcgagggagtcactggcaccaccgtcctggaaccccatgcccatgctcgccctcagcatcgccccgtaccctggacgaaggaatcgggcaaaacagcaacagagcatgcgggcgggtggcccctccctccgtgtcagttccggaaatagaaatgtttcgggggaggagagactccctccccaggcaagaactgcaataattgctgctgccatccatga

SEQ ID NO: 5866 - DNA, 776 bp, Zea mays
acccgattctctagactcgacctgcagtagccacctatgcaaaatctccgggggcgcatacgtaccatctctgttgctagtacctatcctgttcctttatccctttttcatgccgtccttttttttccctgtgccgatcgactgaaccatggaggagaggaataataatgcatgcaccatcctgcttcgtcaggaatgatttggttcctgccaagcgtttctcccttgttttttttttcttccagacgaaaacattgtagacgaagacgcaggtgtgatgactgatgtgaaggcagaagagatcacgagaggaccaccccttgcctttgctatttcgatggggaaaaaggagcgcgctaggttgttgctagttcagcattcggacggcgcattcctgagacgagaagcgccgcggcggcttaactgtattttagtttattttagttcctgtatttaacaatttagagactaaaatataataaaataaagagactagaatatacaaaccaacaccctctaacatcaactatataagggtctgtttgaaacaaacaaaaaaacttttctgagaatctagttgctagataatttagttgtcacgagaatctaaatattatagagcgtgtgtgtggagtaagatgaaaggatcagcacagttcacgttttagaaagagacgaatttcttctgtggcaatgagtcctagtcttcattcacattgacttggataatttccacagctggggagaaacgaaccttttggttggcacaagaagaa

SEQ ID NO: 5867 - DNA, 740 bp, Zea mays
gtcgacctgcagtggtgcatatgtaggctggaggcatggttcgctactgacatggacaatatatctctgaaaacttgggatcaggtatgcagtgcagaacagaacttgcagatactcacatgcacatacaggatgtgctttattctttgccagaatcatgccaaggatgagtttacttgccagaatcagagctgcatcagcaagcacacactcgcatgaaaagcgcgctgagctttgcaaatttgcaggaacatgtgcttaccggtggacatggtcttatggtgaatggctacgaccctgtcatcagagctctcgctcaaggtctagatattcacctcaaccacaggtgtgcagaagaaccatgcatcatgtgatgtcaaattgatgaatcccaaataaatagcttgctcactgtctcttcttcttcttcttcttctttgttgctcagggtcacaaagatcatacaacgctataacaaggttattgtctgtgtggaagacggggcgagttttgtcgcagacgctgctatagtaaccgtccctctcggggtactcaaggcaaacatcatcaagtttgagcctgagctaccgaaagagaagctctcggcaatcgccgaccttggcgtcggtatcgagaacaagatagctctcaagttcgacactgtgttttggcccgacgttgaagtgataggtagggtggccccgacgtaaaacgcctgtggctactttctcaaccttaaa

SEQ ID NO: 5868 - DNA, 656 bp, Zea mays
agcagattgcagtgtgaagacaaccgaaaattttctagaggttgtgtgtgtgtgcggttagagatttactggttgctgcaaataatcccgtgatccacaacgccatcaactttgtccaacttctctgcaacctgacctgtaaaagaaaaagacaagacagcgatcaaggtgactggagtcgaagatgtcgtcatggttgctacgctggattgaagatccccagttgttgaggaagggatggaagatcttccaaccatccatccacatacggcgtaccaagatcttggattggtgttgtgaagataacatcgagcacgtgatggccctccttggtaaccagtgggtggtcacccccaagtggaccagcagttccaaacgacggcctcctccaaaccttcattcatcatatcaccattaagaaaattgtgatgtgatcagcacagcacagcacagcccagcagcttctcaagttgtgactgaaattccaacaggcacacacacgcacctctgcgtctcctagaaacaaatcgtcgatctcttcagcagtgtctatccagttcccctgaaaatgacctgctcctctgaatatttatttgcatggaaagaaaacgatacgcgtacgcgctgaagcaaccatggggctgcttacactttta

SEQ ID NO: 5869 - DNA, 752 bp, Zea mays
gcatgcctgcagaatgagttactgggtagttataggtcccttgagctacaaacagtggagagttgggaagctttgatatttcttactgttgtactgggaaaatttcatgagtcctactcatttgttgatactgctaaactgaatatgcaacatcattgtcaagaaattgaaaaggaaattggttctgccaagagacatttagaagaacaatcttgcattattatccagtctctagctgaacagaaacagtcaagaaatttgaagaattttatggaacaactcaaagctcacactgcttctgaaatttcagaaaaaggcaaacatatgtccattgtgcaggatagagtttattatctgaatgtgtttgtgtactgatggcacacaggaataccccctccattctttctggaaaaaaacatgtggcgccattgtgtaactgtggttttgaaggatatacgtagcttcatacccagtgttgttattacccaggtatctcctagcaagcacttctgttccaaaaagggtctggtagtgacagtgttgttattacccagttctacacaaaattagatgagaaacataaagctttggaagcagagaaggacgaggctgaagccaggaaaaaggtaagaagaacttgcttctgaattctgatatctatcttagaagcaaccaactgtaggtcaggtcacttgagttttctatattcttctttttgacttctccttggcttctgaactttgccttattgt

SEQ ID NO: 5870 - DNA, 845 bp, Zea mays
tcttcggtacccgtctgttccgctagagccgacctgcagcggctgctgttctcccacttcccccggaaggcgtacgacgtggacacgggcatcaggttcgtccagtacgccagcctcgcgtggtccgtggttgacttggtgccggccatgttcgcccatctgaatctgtagccagctgcgtagaatttctgcttctttctcttttcgatgagctcccaatgcggcgtctcctgctcgtaagacatggatcagcttacgaggctgtaaatccgatggtctgtctggctggcttctccttctcgtatcgtatgtacctagctgttctcaccaggggtgttgtttctatgcaagtttgtgtgtgtagtaagtagcaaccagtagtattgattgatgatggatagctatgagacattcttgacgtcaaagggatgccttttcttgccttgtgtgtgtcctagcaccaacgtcgggtagatgatggatcatggatgcgagcgctcttcgcctcttgcatgcacagggtggcagaatatacgtcgtcataatggtggtattgggtgtgagaaaacgatgtgacgatggattcgtgaccatcccttttcgacgccgaagccagtagccatgaagcccggcattagctggtggtggcggcgacgtcgacgtcgacggcgacacgagaatagcgcccaagcccaacgaatccctgttgtcccgtgcgggctggtgcccgcctgttgttccgtgggcacgcagacagccacggcattcgagaagcctgatcctgtttttttttttttttcaaaaaggcaacagtaaaatactggcacagaccacaggctgtacag

SEQ ID NO: 5871 - DNA, 767 bp, Zea mays
aatcacaatacttaagattttaaatgctaagaatgtgcctgtatactatatttttatgcacttcagtcttcattatacttgcaacattcagaccaaaaacagaagcctaggcttacctctgcaagatgaatatctttggtatcttctccttctatttctctagctattctcgaagcatgcttttcaagctctctcatatgaggacctctctcaagctttgtggtataaatttcttcattgaatgtactctttaccccaaacaaggctgcattggtttcgaactgatcccagctcctgcaaatctatggattgttatatcatgcagccgtgtacaaccaaagcaaataatgtcagagatgtttcagcagtagttctatcgatgcaagcacttaggacatcaaactacaaacataaggtgcttacaatgatgaaatcgcatattgatgttcaacattaccatctagtctactgagttgcatgtaccgactactcgactagttcaacccaaaaaattaagctgatgggaagaggcatgcaattcacttatgttccaacactccctacgtggacgctcccggctccatcaagcctcagacatggaataagagcgagaaacaattattttatgtaattgtgctaatcaaaaaaatctcgacctgcgaggggtaagacagccccgggcattgtattaagaagaccttctcccgcaggtcgagaaaacccctgaacccctgcccaacccatatacagcggcaccgtagcccatg

SEQ ID NO: 5872 - DNA, 734 bp, Zea mays
gggatggactggaaatacgattccaggcgctgcgagtgctctgctccaagctgacgacccacaccaccggggccacggatcacaagtgggattttgaactggccgccggaagtgtaatgaagcatgccacagttatttgagatctggttgtaagcaaggagcaggaatcccatgttcatgccttcaacgacaggcctcagccctttcattcccgctccaactcccatgccagtaaacgagttctccgcaataggggtgtccagaactcgaaggtcaccaaacgtatcagccaaaccttttgtcaccttgtaagaaccaccgtaatggccaacatcttcaccaaacacacacactgttggatctaattccatctcttccatcaaggcctcacgaagagcttcaaacagcaagacctcatggctgaaaggaaattaaggttaggaatttgcaggcatacacaaaagaaatcgcgttactaaagaaatcaaggttaggcaaatattattcgaatagccagtgcttacatacttccagcatacttccagagtttcagtaaaaagaatagacagaataaaagaaaattgctccattagcagggaacagaggaaaggttagccaaagaactgttatggttttctaacatattgctaaccctgcaagctgtcaaggactgcgatttgtaactccatatatctcagagaacatgttactaatcagtttcatttcatgcaatg

SEQ ID NO: 5873 - DNA, 785 bp, Zea mays
tccaaagtgaactttacttatcaaagtagcggttcaaattgtgccactgaggatccttgcaacaatttccaaagcgaacaacttctgtagaaaacactttcaactcttccctgttggaccaaacaaaaacttcagtaaccaaaaaaggaagacccagcgttggaggattccacatgagccgggtctgggaaaggaataaatcgaggcaagccttcccccacaaatgtggagaggctgcttcgaacccgtaacctgatgacttagtgagacagctctcaccattgcatcaggtctgcccttctataaaaaacttcagtaactacaagcatataaaaacaagttggagtacatttttttctatataaccagattgaaacgacttaaaaaaaataaataaatacatagagcatcagagattatttgcgaaccttttgtcagcagcaacaatcttgagtaattcatccatatctttggatataagattctgaacaccttcagagtgcagaaccgtttcttttaagtactttatgctatcttttgaaagggcatgcattagattgcaacctttgactatggtattggcaacctcaaatgctaaaatatatattttgttgccctttgttgcagtgcctgatccaaaactacttatattcaaatctgtcatgctactgccaagtgtatcaagcacttccactgcttttccaaagccagcagtactagctctacccagaattgagcttactttccgaacctattttaacaaggaaaataaaacatcaaatgtg

SEQ ID NO: 5874 - DNA, 754 bp, Zea mays
aagacatgtattcaaatcaaggatgtaattaaattaaacaggggaaaagacggaacattgtaagccaagccacataagggcttgttcggttagctctcaatccatgtggattgagcgggattggatgggtttgaatcccaaacagctcaaacttcttcacaattttttccaatcccatccaatccatgtgtattgggaataaccgaacaagccctaacaggatctgccaccaatatagaatcgaactacttctacatgatgcacaaattagacaatataaattgataattgcaggtcactaaatatagcagtttaaccaacactgtcagtcagttttgatcacgcataataccaaaatggcaaaatgctatcaaacaacaacaacaacaaagccttttcagtcacaaatcgagctgaaacccaacatgaacctctagttacgaattacgattaaccaaaatgctaccagagaaatgcataatcttctgtgtggtgaacggtggtaaatctgaacaaaagtccataataaaagaagtggcaatatatactcacccaagagaatcttccctccctgaacctgttgtttgctcctgctagatgagagtccagtgggttgagcttcagcagccttggagcagcaatacggttccccattctaccactaaacccagtcttctcctttccatctttgtcgatgaagatggtgcatacaagaatcaggtacgcatctgttgtcccaagaatccactttcca

SEQ ID NO: 5875 - DNA, 709 bp, Zea mays
acaatataacaagttagcgacacaagttttgtacttcaagtcttttaactatatgttggtgcaataagattatgagtaatccatatgaaggtgttgcaagcgaatatgaaaggcaaagataaacggatgaacccattactagctttggctgtatcagaccaataacttgaaatgcacttgtgctagcatgcctaagtattagaaaaggtagcatgggagaatctatattattttggctaacttctttagttactattgattgatgagaaagcctaccattgcccatgccagccctaatgtcccggtgacatgattgagccagtactatgattaatttactctattgttctccttttttgagtgctgtataagatgtcctttttttgagccactcgagaagatgtttacttaactctagtgcgcaatgattggagctctcagtgcaacgcatgtgctctgtaatctactgtcaccactaccctgtagtgtgtgcttaaactctaaactattccacgtggctagtaattaccaatcatttacaacactgttacatgtgtagggctgcgatgcttcggtgctgttggacaacagcagcagcatagttagtgagaaagggtccaacccgaacaggaactccctcaaggggtgggaggcgatcgaccacataaaggctggtcttgaagctgactggccaggcacaagattctgt

SEQ ID NO: 5876 - DNA, 780 bp, Zea mays
ctgatgccctgcttcggcttgggcggcttcaggtacacaacggaggggacgatgttcacgtcgtcgttcagggtgaacacgtagctcggctcaccgaacccgtagtccacctcgttgaagcccacatggctccagtcagtcacgacgagggtgccatagtctagcgacacgttgtagtggttctccttggcgccgccgctcaaccagtcaaggaaccttgacgacagagcttccttggcttccctgatcacggtcacgatctccacaagcgaagcttccttcacctcctggctggtcttggtgagaccacctgggtacacacagttcccgtagtagccttcgaccgagggcagcacattgctcagcaggtggcgagtgctggctgcgaagcccaagcggacctcagcgtcgggcgcgaagtcgactgccaaggcgcggcatttgaagattatggcagtgaccacgtcgaaagtggaacacttctggttggtttcacttgcaacctgatccttcacgttcttgatgctgtccggagagatctcaagaaccgatttctcatagttgaatgcggcgaatgacggcggcggacctaggggtggcttacgtgggttggggatggcatcacgagcccagattgccttgatcgatggctcagggaggcccctaaccatcctacccacccgctttaagaaattgtgcagcaccctgcccatcgaaccaccaagtgactgaagcaaatgcccacagcaaatcccacacatgtgaactttgaaacctgac

SEQ ID NO: 5877 - DNA, 743 bp, Zea mays
acaggagagaccggccatggcgaaaagacggagcagaatgctgaggtgacaactgatgtgacgaccttttgtgtaatggggaccgacagactcgtcgtcgtcgtcgtagctgcctcgccgtctctgcttctctctcctctgtctaggccccacgaggctgatatctgcgccgcatgcgggacccccgagccttatcagtgtctccataccccatgttgcactgcaccttgtatcacctgtcacctctctccctctccctcctttcttctcagcttgctggccatgagaccgctctcctcaacccaccatatttatctgcctcctctcgccacatgctctcctcctctgccggctcagtcgtgggacgagttccgatcccgacccctagcttccgctcccgatccgtcgtctcatcctctcctacttgctggtacgctctctcgccatgcgatgcgcctccactgcccaaatccgtcgaccgtctttgtggtcttgcaatcttgcatgcaagtttctaaaagctttctgtgatctcgctcttcttgcttcctcctcttgcatatcgtacactgggtctgcatgcatccgtgtcaccaccatattctatgcccagcccacggcttgcactgtttgctagtctactcctgcgcataccatctactgttccttcagtcgatcgatcgatcgtgctttattcgtgcggtactcaaaacttcaaaagacagtcacgcacgcacacatag

SEQ ID NO: 5878 - DNA, 820 bp, Zea mays
tcttgcatgcctgcaggtccaccgtctactgtttcaaatggtgatgacgaaaacaaaggtacctgttagagtacgtgacaaacccacagcccttccctggtaatgccttcacatcaacaagctccccatatggactaaaggcttgcatcagatcttcagaagtcacactttggtcaagttgcccaacaaatagctgcgaccaattaatacatcctttatgttaaatgttcttccgtctggctgctttgattgaaaaaagtggggaaaaaagtacccacccttgaattgtttgcatcgtgataagactcagtccactgtttgctgcggaaagaatctgcatatcacatgaaaaaagaagaagattggattaaatagttgtattgggactgctactacaggctaatataatactagttactagctactctgaatattggatgcacaagtattttttctgattaactcaataatactcatggacaatgtaacgctaatgcatcctatcctacattctagatttccgactgatctgtattttgtattcacgtaccacaagccaagaagcaacagagtaatataaaaggtgtactgaaaacatctgcatgtactgtcttagtattaagcatatacttgcatggatgcccttgtgaccagataacttaagattgcacacactgtattttgttgcttttatgaaataaggaagagccaaaagaaacagaaacaaagcaatgtggtacacaaagagtcaaagacctctccttgaatgaaaaatctaagtagagtgaactgctccccttgcattctaataagcaagcag

SEQ ID NO: 5879 - DNA, 664 bp, Zea mays
agcaatagcatgtagcttgctagtatggtttcacctcccaatttttgatatcatgactctcaatttccgcttgttccctcaacatcttatgtttctgtgatgcagcttctttcccttgtcatcaaacggaacaagcagactggccaatcagagggctttggcttcctcaaattttctgaccataccgccgctgctcatattctcaagtcttacaatggtcagaagatgcctaacgctgttcaagatttcaagctcaactgggccacccaacaacctgctcccaagaaacttcctgatccagatttcaagctcgacctggccacacagcaggagaggcatgccgccatcgattcctcatctgatcattccatattcgttggggacttggcctacaatgttacaggatacatgctacaccatgtgttcaaggcccgctacccatcagtgaagagcgcaaaaatcatctttgacaagttcactggcctctcaaaatgctatggatttgttcagtttggagatgtcgatgagcagatacaagcactgacagaaatgaatggagcctactgttctaccaggcctatgcggattggacctgttcccaagaagaaaagtgcgtacgccaccgtatgactaagtaatctacggttcagctgctctgatagat

SEQ ID NO: 5880 - DNA, 754 bp, Zea mays
tgcagcagccgcggaacgcccagagcggccacacttgcatgattccatccctcctccaattagcagcagcaccgatataatttatcctcctcctcccctggcctcaagctcaccgccgtctcctaccgcagcaacacagcctccgccagtcaccgagctagctagacccacgcgccgcgccatgacgtggaacaggtccgcggccgacggcggcggcagcagcagcgccgggacgaccgccggcgacgacaccggcctggcgcgactgcgggagctcgggtacaagcaggagctgaagcgcgacctctcgtacgtcgtcctttctccagtcccgtcgccgaccgcctcctttcttcatccgttcgttcgctcggccggcggcgcccacactcacacctacttgtttcgttccttggatcgaccgcggcgacacgcgcgctccaccgcttgtctgtctgtctgtctgtctgtgacctgccagggtgctgtccaacttcgccttctccttctccatcatctcggtgctgacggggatcacgacgctctacaacacggggctcaacttcggcgggcccgccaccatgacgttcggctggttcgtcgccggcgccttcaccatggccgtcggcgcctccatggccgagatctgctcctccttccccacctccggcggcctctactactggagcgcgcgcctctccggcaagcgctgggcgcccttcgcctcctggatcaccggatggtacgctgctga

SEQ ID NO: 5881 - DNA, 680 bp, Zea mays
attacagtccgatggagcagttagattacgaattatttgatgcgctatttatacgtaccattttcagtcctttaggcttcaatttcgtaagataagatgtcctgtgggttaactgatatcatcatgtggtttgtactttgtaccaggactaatttagagctggatcaagtatggctgtatgggtccttgtgaatgcacgcttcttttattcatgcacaaaaaaaaattaggagtcataatgcccatgtgtctgtatcagttacgtggttgcaatcactgatgtttttctaatctcaaaagttacgtggttgcctttttactgtccagttccttggcctcaaacgtgattatagcatttggacatgtagcttcatatatattgaggttagataaatatatctctagaaatggcagtgtgatgttttagttctttttttccttaaagaaagtagctgtcaaccaatataatagatgaaaattgtgacacaaccatgaaattaagtgtttctatgattggagtagtccattgttgccagaaagtactgttactaactttgaaggtgtatttcttccccttgttttgtgtgagatactgaaatgtaccaccatatactacaattcatgattatcactttgtgagctgattaaatattctgtctactcacctctaaccgatgact

SEQ ID NO: 5882 - DNA, 1017 bp, Zea mays
aattggatggagcgccttgttgagaaaacagaagttataaagtaaaacaattctatattaggttgtttggtttgaggaatgagctagtctatcatcttctcatttctcacttttttgtttggtttgtggaatgaaatgagttgatccatcatcacctcattccttatagttagttagttagtactaatatgaggaataaggtcatcccaccaaatttgaagaatgtacccatgatgcaccaccacattttggatggagtgattcctcaaaccaaacaccccctatgtttctttgcgaaccttgacataaaaagaaaatctcgagaacatacaaaaacgtaaagaaaactgttatattccaccttcagtgtccttcatgcagatgattggcatgtgtgataattaaagcccgcaatacaattccattttttttctcagaaaggtgttgttcaactggtgcctaaaatgtaatgatagtatactaatcaatttttttataacattgaggtggcttctttctttctctttgaagataaatatgtagggacagtggcaacatatgtaaaagctggatccacagctcctgccaaatcacggttagtcccccttctcaaaatttccaattatatagctgattgcgtaatgcttgtgttaattgacttaaataaataagcttcgctctatatgttttgaatccgggacccaccgctgcgtaaggaaagcgtcgaaaaataatgtagagaaaggaacatgtgtggcttgaaactcttgtgtaagaaaaagaacatgtgggaatggctgagctctaaacaactagacatgttgactcctgaacaatcagttaggccatttagaacaataataagttgaattgtttttgtaaggataaacaatataatataacccattaattgatgtggaaaggatagagtgaccggtccaaataagcatgtccacacacgccttgcaaccatgccccacacaaaattgataggtgcaatcatgagaacaaaaacga

SEQ ID NO: 5883 - DNA, 746 bp, Zea mays
atgccaagattaagttactcgttcagagcacatgagctactgagctacatacattgttcacggccatatactgatactcactggtttgtcatgaattccgagctgtgaccacgttatcatctctaacagttcttccattgttccgtaccctcctgatgtccagagacccgtcatcgccatatcaaacgagatacatgtcgctgccatcatgtactggagaaaaagaagatgtagattgtgtaccaggaagagctatgaaggcatcagcttgccgtgccatctcagctttcctctcgtgcatgtcggagacaaccttaacttctccaacgctagcaccagatatctagtttgagaagaagaaaaaatttgtttgtagccgagttgatatagcacttctcaggtcatggatttgctttccatgggagcgaattttagattgtggttaaaaaatctcggatatcccacaccaaagcacaagtctatggcctggctccggtcgcgatcgtgttctcacatagcctacaatgccactatatatatagatggtgcagtggttcaaaggttttcttaacctgtcgtgagaatgtttcatttttaatattaatgtctggaagttgtcttaccccgcaggtagaagtttttctttttagacacagtactaaaagtaggtcatagtttcagatctcttgcagctccattcttcagatatatggctatagctttcacggcaggacatgtataaaatt

SEQ ID NO: 5884 - DNA, 482 bp, Zea mays
  unsure (1)..(482): unsure at all n locations
tgcctgcagttaaattttcaatttgacatgggaaaaattaatgttaactatcaaagccacccaggctggaccatagagatatcccactgatccccaaacataagaagtagagaaagacagcgaattaagatctatgttccacttgcacacactagtggcctgcacaatgaggaatgaaactcccaaaaagtccaagagattgttcctgaattctggatgcacatctctactatatttaagtgtcagttttcttcgtgcgtcatgactccagttcccgcgcagactccatccggctggctggcaattttgtgaaatgagcgacaaaaagagagagctgaagtgggttttgaacccacacccacttgattgaaggggtggttattaccgctacaacacgtgagtgcttgtggtggactaaaggtaagtattattaatatatatgtgcacacacatatacatactactaataagaaaatanaaaa

SEQ ID NO: 5885 - DNA, 738 bp, Zea mays
ataaaaagcacctgattattcaacagtacagcttgatagcctagtccttaaaagtccaatatattttcttcttgtgctgatgttattcactaaggccttaacgcttgtctaccattttcaattttgttttgggggaatgctggaagcaggcgaatgctgcaatcatattgcttttactatggtttttttcctttctgatcttggatgtgttggtttatgactcattcattcaaatcttgcagagcagaaatgggggatgcgtgtttctcaacacagctaattgatggagatggggtcttcaacgtctctggattggagaacttcatgaaggatgtcagattgggtgaatgcgggctctcctatgctgttgtatcaataatgggcccgcaaagtagtggtatggggtctctcttttccattgtttaattctgttcactgcatacttccttttgtatgattacaccgaggttcctcatttttttagggaaaagtacacttttgaatcatctttttggcaccaattttagggagatggacgccttcagaggaaggcatgtttctagttccttcttatttctcttccatttctcattacaaaccttcttggctatggtgcagcctgttcttctatatttagcatttttttggtaccatcaggtcacagactaccaaaggtatatggttagcgaaggcccagaatattgaaccgtgcacccttgtaatggatttggaaggaac

SEQ ID NO: 5886 - DNA, 555 bp, Zea mays
gatttttggtgactgcagaaactggaatgttctaaaccagtaattgttgctggggatctaaactgtgctcgtcaaagtattgacattcacaatcctcaagtaagtgtattcgctcacccttttcttagaaaattattgcccaaacgtttgcacatgttactgttctgttttcatggttctcaatgacaggataccataaaagaccagtggatttttttggggatctatcatatatgtatattgctaggtgccaattttgttaaggggaattgcagactttattttacattgttaggtgttaattttaaggggaattgcagactattttttttttcctttttgaggagacatgcctcctgtttttagtacattctttcacttaagagctgtatcttctctagagagcatggtagccaggtataccatggtttagttagaaacaagttttgtttaggatgttctactcgtctaagtattgttctctactaaaagagcattagatatgaaaaaaaacttggctgttaggggaaagaccgtcccacggtattatatgaa

SEQ ID NO: 5887 - DNA, 725 bp, Zea mays
attcatgctcgggtttatgtctctggttatgcagctgatatttcaatttggaacacgttggtaaacctgtatgcaagatgtggaagaagtgaagaagctttctctttgtttcgggaaattgaacacaaggatgagatcacatggaatggattgatatcaggttttggacaaagtcgtctttatgaacaagctctcatggtattcatgaagatgggtcaagcaggtgccaagtacaatgtgttcacatttatttccgctattagcgctttagctaaccttgcagatataaaacaaggaaaacaagtacatggtagagctgttaagacagggcacacctctgaaactgaagttgccaatgctttgatttcactatatggaaagtgtggcagtattgaagatgccaagatgatcttttctgaaatgtcactgaggaatgaggtttcatggaatactatcataacaagttgttcacagcatggacgtggactagaagctttggatttatttgatcagatgaagcaagaaggtctgaaaccaaatgatgtcaccttcataggtgttttagctgcttgcagtcatgtgggtttggtttgagaaggccttaattaccttcaatccctgtctaatgggtatgggcttaagtcaaataccccgaccattattgcccggtgttgtgggttattccttgggccgaagccagggccaacctttgcctgggccaagga

SEQ ID NO: 5888 - DNA, 581 bp, Zea mays
gacctgcagtctgacaaatatcttaatccatgtcatgattacagatgtctcatttaacgcggtgaatcttagacacttgactagttgactctgaatgaatggtgcctgaaacaagcaagtgttgcaggtaacaaagagttagtgacattcaggacaaaacaaattataatggttaaacaaatgagttgcgacaataatgacaaccacaaagataaaaatcctcaacttcatgcgacagatatgaatgactcttccaatttccaaagccctgtacatgtttatctagacatgctagatttgccatggcgaatccatttccagatacatacatgtcacaatagcagatataagtgtagaccccagacatcttaaaatgaaaaccattaggaatagcattggggggatttttctataaaaaaaagtgctgtaaacactttgcaacagcccaattcaccagtaatctccacatgaacagctgccactgttaaaatggtgaaatctgtacacatctcgtaatacaatttctcttcttgtgacttcagaggtacatttcatgcaactgtggcagtcatcacatacac

SEQ ID NO: 5889 - DNA, 753 bp, Zea mays
cctcgcaggggctcttggtctgctgagaatcctcatatacaaggtctgttgcgcgtttgttggtgccgtgctcacattgtggatgtgccctgctgaatctgtagctcattgagtcattgttcaggtttatgtggatggcacaacaaccatgtcgactcatgagaggaaatccagcatcaaagaattctatggtaggagggcatgatgttattacatctttgtctaactatgttattttttttttgtgctgcattgctgatcagaattactatatatttggcatgagcagctgtgatatttccttctttgctgcaactgcaaagggggatcactgatgtcgaggacaagaagcagaaggccgtatgcatggagaagtacagaaagaaagatgaggatggacgggacaccttatctgatattgatgttgagagggaagaggagtgtgggatttgcatggagatgaacagcaaagttgtgttgcccaactgcacccatgctatgtgtatcagatgttaccaggactggtatgtgcatgattcagtttctgcccatgtgttttctgtgactgcattgagtgttatattctcaaatctcaatcacccttcttttactgctgtgcaagtgcaaacttcttgcgtagacttatgttatcattatcgattaacaagctttttagctagatgactcatctatatcattcctccacatatctgtatcatagcaaggtatatatcctgctaaacattaatttgc

SEQ ID NO: 5890 - DNA, 792 bp, Zea mays
agtacacgcttttatatacatgggcgcactaccaaccacgcacacagaaaaggcgccagcgactgtttttttttttgcgccatatttatcgattgcatatttgcattgcatgtctgcatatctctattctatcagctgctctgcttgacgtgatcatcggcaaactacaaactcaaaactgacactgcttgacgggactatgtacagaacgcacacaaacaaaaatgttcgcatacatgaacgtacgaaaaggtggctaatcaagtcgcccaacaactttactgaagcttcttacaatttttctttactttttggttggggagccttttgacggcaacgtttcaccgggagaatacagggttgagggttttggtgaacccgtggagcgcgccgtagccgcgggagctgaagcccaggcagcccaggaggccctgccggtagggaaggaacgtgcgccgccgcatcccctcggcctgcgcacggttcggcgccgcgtagagcctctcgtgcgccgccgccaccgtagtggaacgtcgccggcggcccctgcgctgcccccgcggccgggcatcctcgccagcggcctcggtcgccggcggtgagcgagaggggcggagcctcgcggcgagcctgtccctggctacccaggaaggggagaacggccaggaggttcgttcgggcttgttagcgccagcggcgggcgcccccgagggcgtcacgcgagtgggcgctgctggcctggctcgctcttggtggcggtggaggagcatgtccctgatgaacacccaccgg

SEQ ID NO: 5891 - DNA, 782 bp, Zea mays
gcatgcctgcagtaaataattaaacagggccaacccgtccgtctgagagtggctgacccctcctcgtgcccccgatccggccacccccgattcgccgtcccatcgccacggccaagtccaaccttcgtccgttatcaccgctgcaccgcccccattccattcttctccatttatttaagggaaccctcctatctccaccgccactacacacgtcaacccggcacaaggaggcaaggagcacgaacagcccacggaggaagcgcagccgcagttgcccgcaggctatggacgatgacatcgacagctcctgctccaccccgttcgccagcgcgccgtccagtcccggacgtccccacgccatcggcggcggaggctacttcttcagcgcgccggccagccccatccaccacctcctcctctcgacctcgtgctcggcctccgcgactcccagcaccggtgggcgtgggtgcgtgggcgacgcggagttcgagttcggcgggcctggcgggcccatgatctccgccgacgagctcttccacaacggccagatccggcctctcaccctgcccccgctcccggatctcgaccccgggagcgatgacgacgaggactgctgccgtgcgccgacgcgcggggcagaacctcacgccccgaaacgcgtccgtgcacccgcgagcgcggtccatgttttcgctccccaacgcgttgccccggctcaagctgatgaatgcgcttctcccggcgccagatttcgggccagcccctacgcgaccggggagtct

SEQ ID NO: 5892 - DNA, 743 bp, Zea mays
aaattacagaggaaatctcgttgctgcaaatccattcccgttatagaagaaaggaatattgggttctgagattcctcctttacctggggactgtggaccggttagttcgttgttctctgtacttttttttggcaccgacacgtgggcccggcgtaccatgaggccgacatgtcaacgtcgagacaaggcgtggcgagactggctgctttggcatttctttcctctccctccagatggagatgggcacatgcgtttctgtcccatcaccatgcccacatgcggactcgcagtcctttcttgtacataccggaacatgccgcagacttgtttagcttttatatgatgcatgcatcatcttgcatacaggcagcctatactctagtagaaagaattgccacgctggcttttattttgccagtgcttctgtcagtaattagcatcatctagcgtatacttccatcaacaatcttgggagactcgtggtaacttagggatgtatgatgctagcgtatacttccatcaacaattttgggagactcacgataacttagggtaacttaggggtgtttgaatataactaatagttaacttctaaaattagctaagagatccaaacaatctagctaaatagtttagctattagctacttttagtaaattagctaatagttagctagctatttgttagctaattaattctactagcaatttttagccaactaactattagctatagtgcattta

SEQ ID NO: 5893 - DNA, 760 bp, Zea mays
gctgatgctcagaaagcacggctactcccttggccctctgtctctgacaatgctggatgtttcttcctgccctctccttacatcctattctgtgctggatcgctccatatccttgaaggtgaccgaccttttttttggaacatctgcaaggcgtactatgcgtgttgcactgtgtttgttgcaattgacacagatgtgattggcttgccaaaaaaaaaaaatcagatacagacgtctctgtaacactggccataaggcaactggccttttttatcagctgagctaatttaattccctttgtcagtaagtttaggaaacaggtagtcaatatgtgctcacttctaatataatccacaaggctagaacttagaagcataggtgtggtttccagcacaaatatatttatttccgatttggtgatctacattttgtttgctttggtgcgggttaatctgaatagtttgagagatggaactgacaatctgacatatcatttggaggtcattctgttttgtcaggcacttatcaactggaaaggaactcatgtgaatcctgaatttgttattagttgttattaggttaggtctgacttatgaatctgatctgatcatcaagagcatactgattggcgacatcaagtatgctgcttatgctatctcacatgacttggatttggggaatttcaataactctgttcctctaattgggcccctcaattatgctagtattatcacgaaacatgtcacataaagtgatgaat

SEQ ID NO: 5894 - DNA, 1450 bp, Zea mays
gacgacctgcagcgctgtccgccactgctctccgtgtcgtctaacactaacacacgcttttttgacgctggggtggggttcagatcggcatgaagtgcctggacggcatccagggcccggtgtacgtcggctccggctgctgcttcaacaggaaggcactgtacgggttcgatcccgcgtccactgaagacgacgacggggaggcgccggtgcagcggagcagccgagcaggtggtggttcgggaagttgaggaagcgagcattgaggaggaccatgtccaccgtgcctctgcttgactcggaggacaccgacgaactgacggaagcaggcgcgtcgaaggaacataacaattctcagtgctcgcctcgcctgcccgcaggccgcagtggtttgcaccgcgagagccctaaccgttggcattgcaggaaggaggcggaggttgcgttcctaccgcgccgcgttggagcggcacttcggcaactcaccggcgttcatcgcgtccgcgttcgcgagccaagagcgcggcggcgacacgtccgcggccgcagacgcttcttgtctcctcagggaggcgatccacgtcgtcagctgcgcgtacgaagcgcggacgaggtggggcaaagacgtcggctggatgtacggttctggcggcggcggcggcggcgtggtcacggggtttaggatgcacgcgcgcgggtggtcgtcagcgtactgcgcgccggcgcggaccgcgttccggagcttcgtgcgtgccagccccgctgacgtcctggcctcggcgtcgaagcgagcggtcgcggccatgggcatcctgctgagccgacactgccctgtctgggccggcgctggcgggaacctgcggttcatgcagcggctgggctacgtgagctgcgtcgcctacccgctggcgtccatcccgctcaccgtctactgcgcgctcccggcggcctgcctcctcaccggcaagtccatcttcccggacgacgtgggcttcaacgacgcggtcgtggtcatcttgctcctgtcctcggtggtggccacggtcgcgctggagcttcggtggagcggcgtgacgctgcgcgcgtggtggcgggaccagaagctctgggctgtcactggcacgtcggcgtgccttgcggccgtgttccagggcatcctccgctcgtgcgctgggatcgacgtttgtttctcttccacctacacggagacggcggcgaccaggacgtcgtcgtcgacctcggatgacgacagtggcgccgccggcgaggagccctacgacgcgcagaagtccgtgctgcggtggtcgaacctgctgatcccaccggcgagtctgctgctgggaaacctcgccggcgtcgtggtggccgtgtcgtacggggtggaccacgggtaccggtcgtggggaccggtcctcgtgaagctggctctcgccttgtgggtggtggcgca

SEQ ID NO: 5895 - DNA, 706 bp, Zea mays
tcgggtcatctcgtccacgaaacgtacggacttcgggcatcggccccaacgccagcggcaccgcacccgcaccaccaagctcgtcggcgacatgaatccgcccgcagcagccgcgtccaccggcgcaggaggccacgccgcggcgcctgcggcagccccggagtacgcgcactacccgaggctctcgccagaggaggtggccccgcccccgcccccgccttatcacgccgccaccgccgcgccgtccgcctacggaggcaacccctacatctactcccccgccggcggcgccgccacctccccgaagagtgcgttcccccgccccgctccttaaaaatctggccccgacagctgccgattcgtccggaatttggatcgttccttccttttctgatatgctctcgtgtggtgtggttttgcagatacgatggactccgtgaaggacgtgctcggcaagatggggaagaggtttggcgaggcggcccgcaagaccgagaccatcaccggcaatttctggcagcactgtgagcttttcgatttcgttgccgtattttcacgaaatcgggttccgaagttgtttctgtgtgtttttcatcaaatcgctacatcgtgctgtgcattttcatgtacattttgtattgtaatatgaaattaggttgtcgtcaagctgttacttagccacaaccacaatgaaattgaactagaa

SEQ ID NO: 5896 - DNA, 692 bp, Zea mays
attcttcaccgcactgtcatagtaaacgaagcccataaaccaaaactcatggttatcaacagaaaccacctgaatgtatttctctgctgcatttgttctgcttgttgatgaattaattgatcgcagttgagcaagggggatgaccacctatttcagatatagacaaacaaatcgtaagttgcatgttgaatatatgaatttcagaattaatgagtactaccagtaaataagatcgacaaaagttattatattggtgcactgatgaaaacatatgaaacaaattctgaaacttgatgttttcatacaaaacaatactccagagtaagatgtattgtttttttaagataattctgtaagcataattgtcataatgaataagattcagtatgaattgcatttccttgaacaaactttatatttactgaactaaagcaaaacacagcaatacacataattaccttgtagtaactccactcagttttgtctccaacctggtatgcaagtgggttatcactacaaaatgccagttttacattggacaggtaaagcacacccataacaggaccagccgaggttgacagataacatgcatatggcttcttgagcttttcaccaggggcgacctcaaaagtttgatggaaaaatttgtcataatcaccttttgcaatgactttggtgacctgtgaaatcca

SEQ ID NO: 5897 - DNA, 768 bp, Zea mays
cttgcatgcctgcagataaggtgatggttcgcatataattaatgactgacgagcttagaaagaaagggataccttttaaatgtataagcccaccattaatctttggacaacgctcgaggtctaagtttaccaaattaactaagtttgcaaaggcttttgctccttcagcagtaacagcagcacatttcttaatgctcagtgatgtcaagtttgaaaagcctacaaagttaggagattattgtggcagagtaacaaaaataagatctctaatactacactaagttgacacaacaatatcatacagctgacagcaaactcagctgttgtgctatcagcgtaacactgacctgataaagtcttaagtccatgttctgagatttgatcacaataatcacatgccaaactttgcatgcttgagcaatctttaagaagattgaatccactatcagtgacatccgagcaagagaggtcaacagatagcaaggactgcccttgagaagccactacttccatccaagcatcagtaactccagggtagtctcccagacaaatatcctgtgaagagatgtcccatgttaggtcctgctcagcgtagtgcaatagtgcatgacagtaatcttaagactaggctatttaagcccctacataacaagtgatatcaaggcttgctaagatgcctttagtcgttccctaatactcccaccattccagataatagaatgggttcgcttttaggttttaatacccttcacaatggattgctatgga

SEQ ID NO: 5898 - DNA, 625 bp, Zea mays
ctatggtcttctccgggcctaggccaaaattcctaagagttcagccttagatcccgtgccatcacacatcgagttagtctctagccacctttgtcggacgactagttgtgattaatcgttgactagttggattactaggtttgtagtcgacctgagcgtgtcggggagccttatcgagtccataggaccgataaagccaattaatagtgactagtcagatggcttgaaaacattgcagtaatcactttgttatgcttgtactgctcatctctcatcctgtcatttgcattttattgtggtaggttggactatttgccattcagatgttctagaacattttggttgatgacttcattagtgagttatcatgttcaaattgccaatcactcactctgttccagaatagtagacattttaggacctatcacagataccaatgctcaaggcaaaagaccttagtagttcactagtttgtacccttagaaatagagagatgtaacaggaaaagaaaaaaaggtgtattggggcgaagagaaaggcacattgagaaaagtaagaatggcaactatttttggacaaaatttgaatgctataaggtcaattattttgggacggaaagagtatg

SEQ ID NO: 5899 - DNA, 718 bp, Zea mays
atacaagagttgatatgaacatggcatcacatacctcagctccgattcacggggatagaagggttgatgcggatatagcaccaaatgcgccagccttagtccatggtgataccatgacatctaatacaactgccctgattcacagggacagaagagttgagataaaaatgccgatgactcaccttattcatggagagggaagacttgacatgaacatgacatctcctcacttgatgcagagggaaagaagagtggacatggacatgaacatggcatcacctcacctgatacaggggggcagaagaattgatatgaacttgtcatcaccccacttcatacacggtgacagaagagttgatatgaatctggcatctccgcatttgatacatggggacagaagggttgatatgaacataacatcccctcacctgatacagagcgatgccagagtggatatgaatatggtatcgacttctcagaatgggatgcacactttcgatttggtggatataaacctggagagtggctctatgccgatggccgcaacagattttatgcaaatgcacccacacccagcagtttaccatcccaaacagcttgttatgagagatcaggtgaatgatgccaattagaaaccaaatttggaatctgacacttattttatgggaagcagtatgcatgtggggtagtttgtctacttctgagatcctttatgttc

SEQ ID NO: 5900 - DNA, 737 bp, Zea mays
aaggagaaataataatgatgaacacagaaacatttagactcagtggaataaagaatgtcaacatgataacagtgtggaaagataattctgaaaattcatctcaatgatgaaattggcaaggaattcttgtcatcaaagctgacgatcaatactaccaattatacgaaccatcttaagttagcttaaccagtcatcatcaggacctacatccaacaggacctgctaaacaatactgcaaaagtgcaattgtacttataaactaggatgtgaactgtaacagaacaatttcaaaggagctagaaccttagatttaacaaaacagccaattgattcagcatcaatttcgtattgataacttttttaaaagtagatgcatctgtacaggagatcaaatcaggtaacttagcctggcataatcatgaagtgaataggccgatgcaatgaaagggcagaagtatagatacaaggtgggagggagacttacatatgatatgaatgaaaataatatagtacatgtttatttcttgcccaaccaaaaagattatgattcccaatgtgtgtgcttatttctgctccatgaccaatttgatttgactgctaaataagtatctagtctagcaaataaaattggttaattaaactgtagcccccattaaacaaactagtgtctgccacctgcatgaacccatattaacaccatgactaatcatgtctggaacatatacaaggataccccc

SEQ ID NO: 5901 - DNA, 776 bp, Zea mays
  unsure (1)..(776): unsure at all n locations
taaggatgatcaggaaaggaaaatggtagttcttttagcagtgaaaaatgatgttctgtctttcaatttatactgccagtaaatgaggcattgtttggatttcaaggaaattattataagttctttccttttgcaatgaatggcctctatattcaaataggttacgttccctgaatctgtttaattcaagaattcaaattcaccaaattggcaccagctgtactggacgatctgctacctatgaaggcctccctgtacatgctgcaaagctggcatatttgtttctttcatttataatgcaactaatttctcctgtcgggtgctataatatcgtgctattcttgtcctcacgaaagcacaaggatcaagcattcatccatccatccagcaaccgcgtgcatcccactatgcctattagaggcagaaatgcaggttgatcgcagatttacaatttacgtgacaaattctaacactgttgtgccaaatttgggccaaaatcagtgttctctgcatttgtgtcctctttcctcgatagtgccacgctcaaatgcccgatctgatttatgagacagaagcaggcaataacatgaggggcagagttgacgatcgaaacagagcgcgaccgatcgattgaggaaacacgagatcgacgaaaccaacagctagcctaacgtggaagtgacgcgtagggtgcataccttggaggcagtcgcagttctcggcctccttgcgcacgacgtcgangactgaatcgatgagctcggcgccctctgtgt

SEQ ID NO: 5902 - DNA, 751 bp, Zea mays
  unsure (1)..(751): unsure at all n locations
attctgcctgtgttgtgattccaacagtggtgttccagatctcaaagcaaccactgcatgagttccgtggtcactctggtgacgtactgagtctgtcatggtctaacaacaaggtcagtacaattattgaatgaattgcccccgctctgtaaggtttgattgcattttttttattattttgtcctttcctttctgatgattgaaattttctaccttgcagcatctactgtcagcatcaacagacaaaactgttcgcttgtgggaaattggatctgcaaactgcatcactgtttttccgcacagcaactttggtatgtctatagtctctttacttgctgctccaaaacttttcaactatgcttctgaatttgacctcaccatttcgctatgaaaatttacttttgcagtgacttgtgtccagttcaatccaaccaatgagaatcaattcatcagtggatccatagatggcaaaatccgtgtgtgggatattcccagatgcagtgtcattgattgggtggatattagagacataataacagcggtttgctatcgacctgacggaaaggtatcagcatgcattctgaagtggggtttttatggctaacttgttatttcagtggtttgagagaatagatttctctgtcttttatatcttagcaggagcagtggtcggaaccattnactgggannattgtcgatttttatgatgccatcaggtaccaaaaaaaaaaaggtggaaatcttctactaa

SEQ ID NO: 5903 - DNA, 1001 bp, Zea mays
agctctacagtcgacctgcagctagtaagtttcaggcgaagaaacaaggactagggctctttgttcttacagctgattagctgaaactgtgtggatgaactcagagcccactcgatgtacctcacctgaaactgaaagcaacaagcagtccggggaagagaatgtccccgaacccaatcatgtcgtacccattccacgaatcgaactccttcggcatcttcagtaccatggggaggctcggcccgtcatcgctgccacgagcaacctgtattttcagttcggctgtgatcagctcacgaccgacatgatgcgttcactagccatctgtagtctgattcggaactcactgtgatcatgacgcttttcttgaatatgaggggtgatatgaagacccagaaaatgtcgtagaaaaaggccgagacaaggagcgccgacgcaacctgagggaaacaattatctgaagctcgtcagagaaaaaacaatctctggtgaaggagttgattttattcgtctcaagctcgtacttttatatttggcatgtgcacccactctcagtactagattcattaatgcttttgccctttatccgcagaattatagatgcgcgttctgccattctgatccactttgggctgtcataatatctctcctcttcctcgctttgcctaatctctttatatcctagtgtggaccttgattagctataatatcacactaatctactttctgttcttaatggggactctcactctagttattcgctctcacattacatagctatgcgctggtctactttatcctatatatccactatattttctattatctcaactctacatatctactttgcttttttggactctctcccttaatgtctgttctcattcctccattttattttactctcctatactgctccttttactccctcttcttcgcgttcccccctcttctaacctctctatatatttatcctgtactgcctttcttttttctctcta

SEQ ID NO: 5904 - DNA, 717 bp, Zea mays
tcccgctcttgtgttagtgtcgtgttttattttttcttcaagagatgcgctctaagcgaccaacaaactgtcagaagatttaatggaaggaactaaactacaatcagtgcaatagaaatgagagataagaacgaagtatctatataaaccacgaaatccctaatttacactagtataaaactgatttgtagttcgaacttaaaacctctctagtgtcgattttccaaacagaattgtgaatctggtactaaaggctctggtttttagtgtcgattcagtcaatcgagacagaaaacctaggacatgcacctttagtccctgttagtgttaccaacaaggagtaaagaagaaatgggcatttgggatctgatgaaatagtgattattcttggaatgtaagccttagttccttttcacaacccttttgagggattcaaattttctattgttaacatatctgttatgtaacatggtcgtcggctaaaaataattagtaaaatttgtcgcattttctattgttcatgcaatacagaagtataataaaatcagactctttttatcactactaaatactggactactagtctactaagcagcagcatgagacatgaagcagcaggcacccaacgagaatcggcgccggaaccatggcttcctaagcgcatcagctgccgagagcctatggtcggggttgctttgcagcagccctttcaagacc

SEQ ID NO: 5905 - DNA, 578 bp, Zea mays
  unsure (1)..(578): unsure at all n locations
tccagctcggtaccctttggagctctatagtcgacctgcagttactaccttgaatggagcaagttcctcttcggatgccagtgtctcttttgtctgtaggagaggaaacatttcaagaagagaagccatgtttttctctgctctgtaaatctttccagacgccaaaaaaattgcagtcttattgctgaaacccattccacgaagcattaacccaacctaaagataacaagataagcatctcaagacaaattctgctgtaatcctaaatgaatttgttttaaactgaatatgtcaacaacagcagttgctctaccttctgttattagatactgacatacctccaaaggtgtaagaggacattttccattcattctgataactcctggccttattacccgtcctctcttagtaaatttccctctccaacctatttctctggctgcatccatttctttcttctcctcatcaccaccgtcataaacacaacatgagaaggcaatcatatcctgcaagataacaattagcagatgccacacttcagaacactggcagcatgttacgcacagactcanatatat

SEQ ID NO: 5906 - DNA, 412 bp, Zea mays
tgtagatccgtcttgaccggtgaggatctacgcaaggctgtacaaccgtctaggctggtgagaattcatggcaagctacaagtcactgatggggtcaacactgggccccacaagatggaaacgacatctcgcccaacgcaaaacgagcgatttctttgcagtttggagtgcaaactgacaccatttctcatatgagaaatggtttcttcttgcttttctctctttcttcattaaattggttgtcacatcagatttttcgcttatgtggcaaagtatttaatcaatgccatggaaactatcctaatttcagttttgagattgcccttagagcttcttgatttcagtagaagtagctatcttgtcctttccctttccttccaaaagcagattgtatcaatgcatgaagaaattt

SEQ ID NO: 5907 - DNA, 590 bp, Zea mays
ggtgtcagcatctccaactgtttcttttaaactcaatccctggatcctcatttagagagccattctaataaaaattactctatatatctcttcaccctccaacatttgttatgcatcgcgctcgacactaggaatagaggatggaagcatgcatctggagatccagataaaaaggcaatcgaagaccttcttcataaaaaaaaaatctctattcctatcaatacatataaagaagctataggaatttctctcagtttgttgaagtcgttgccaaaaaaaaggttgttgaatgaaataacaaaaaaaaaatgcagtatgatatgttgtatgtgtttctaatatataatattcaacagaaatggagagcgtcttggagaaaaagctacagcatcaaagttcgacaccaaaaaagttggacataaactatttaagatccatcacgaaaaatttctctgaagatcaaatacttggacatggtgggtgtggaatagtttacaaggtatgtatggatttcccaagctttatgccgtttaacgaacgactaaaaatatatatctatgttatgagagtgaaacagggtgagcgagaaa

SEQ ID NO: 5908 - DNA, 706 bp, Zea mays
ccggaaagagtgctttattaggctgtgcgcagcgttacaccctagcgatccccctcccggcgcgtagggggcaccctatggccgcagcggtgcccctacagcgccccctacgtgtcggtcctcttatctctccccccagatatagcgtgtcactgttcatcaccctaaacactgtgctgtgagtccacaagtaattgttagtagataaaaaattaatagttggtatagaaaatgatattttatagtggtagtgggatatagggggagtatttagggggaaccgctgcgggagatgaaaaaatagagggaaaaatttaggggtaacggttgcagatagccttattagctctgagcctagacggctggacgacgacgggcagatgggatggcatcggatgcccatgaaggcacggagctagtatagtctatttgaagctgtttttcagcgagtgagtgagagagagggttcgagctgtttttgaacgagccacaccctccactgaatcgacggttggatcgataaaaagaccgaccagagactataacgatcatggtcactttaaaaccactcatgccagtggaatagaacaaaaaactgtgaaccaaccagtctagtgggtgttcgaatgtctagagttaataccacacaaaactgttcaaaattgcggtccttacaccagtaattgggggctaatatacaaaaaaa

SEQ ID NO: 5909 - DNA, 678 bp, Zea mays
aagagttccctttcctcaacaagtcaccctcgcgtacagcgtactgagttggagcttgcgcaacaactcatcgacatcatggtccgtccccattctctctccgcttcgatgattcagccgtcattgttacgcccccaagctttcctctccaaatatccaggccgttccccgtttgcgtcagacagcgggaacggcaagcaaggaaaatgaatcccgcgctagggagcattcgagagtttgccatgccgcatgaccatggcggtgcactagattacctgcgggaaaaggaggttcactttgccctcgagcagtcgcttgagcccgaagtttgcgtcgatgacgccccgaataaagcgtaaaaccaatcatttgtttccacggatccccatctccaaatgagacgccatgttttgtcttgtcccctcgcgtcgcctgcacacgcggagcacggagcagttccccaactggcaggtcctccgtccgtcctcgtgcagtcggtggtgctgctgttccttccacgtcgtttcgtttcgtttcgtttcgggcggcggcgctgccagattcctcgtgcctagtagtccggagtgctgacactcgggcagagtaaaatactcctgcttggttcgcatctcatctcgtctgatctgttctgcttgctcgcacttttcaactcatctt

SEQ ID NO: 5910 - DNA, 747 bp, Zea mays
gacctgcagcctcaattcttcattctctttggccaaaccgatagcagtttcatgagcttctgcctcccgttgactcgcagaagctattgcatcaaccaaagtcttaagttccatctgagcgtcagacaagttatgtaaatctgcttctccttgctcctggagctgggcagccttgaactctttatatgtgttgttgtgtttctttgtaagctccaactctgtggtcaactcattgacatgcctgcacattatttcatatatcaggcaatgatatcagaacagtagtagatagcatggaaaccaaaaatccatacaggcacaagcatgattataatgcctcgagaaactgggagcaaacatgaggtggaattcatagggaacaattaacaatattgtcaatgtggagaagtgaaaccaaatgatttgataaatgatctactcatcgggatttttcaagcattatgaacactcgttcacattaccacacaagctttgaaccaaaagatagatgctatagccagtaatgtggcatatcagtgaatcaaaggtagcatagcagaaaggagacaacttgaaaataagagccacatgggtttcagaatttcaattgtcctgttttgtgtgacatacaaggactaaacacactattccccctcctagtgtttttaaagcgtaaggtgaggcgaagcgaggcgttggaccgccgcctggacacctaggcgagcaaggcgccttgaatttctgggt

SEQ ID NO: 5911 - DNA, 744 bp, Zea mays
agccaagtctgaactccccaaggccaggtccaatgtatgttgcagacttactctggcagtagttactaaccagatcaatttatcctcaaattagttgaattgattaatgtagctggtagatataggaaatagtaattaggggatcatttgttgattattcatacattgtgtactaaattgttgaatttaagacctatttatgttaattagtacgtgtacaccaaattacaggacaaattctcaattgtttgccaaattgctgaaaggatttttagcaaagtgcacgtgaaacttttagtgggggtgtggcacaccctattgcaaaatccagggtccacaacttgtctacggtgttcagctggagtagtgtagctccaagaagttgcttaagccagttagtttttttttttttgcatgtgttggggtgtgttctgagggtgagttgcgtctgacaagttgcttcgttcaatatacaatatagttttagatgaacctgtgtattcatgattgttacagcgcccgataaggtgtttctttttctagtcatgttaatgtgctgtgctcatgtgcaggagtgaaccagcatcacccacaagattgtaagggggaaagaaacagagaaataatttgcaatctaactgaaacttgtatgactagataatggactcagcccgtgcgtcttatgaacgctgtgactgttcatgaataatcatgcttcattcaccaccctacacccatgcatgg

SEQ ID NO: 5912 - DNA, 683 bp, Zea mays
tttgcatgcctgcagaggaattaaaaagtctggatgatgacgacaaaactgagcatagcagcatggtgtattggtgtagtgtagacatgctgaaatccaaccacgcagaaatctgacaaagaattggtcaaacgtgcaaaatgcaactgaacggggacagccaaagaatgtgaagtgcagagacgaactccaatgaccaaatgatacaaacagctcgagaacgggacatgagtacatgacaatgggcaatggtatggtatgaaccatgaagatgagtgcgtgcgtctgtcgaaccttggccttggggatgaccttgacggctacgtcctggcccttgtgctcgcccttcttggccttggcggagcacgtgtagccgaagtgaccgcggccgacctcctcgccgaggtcgtactttgcgaagaagtgcttggagaagccgaagctcttgtccaggccgagctccggctcgccgccctcggggatggacgcctcgttgggcttgaccgagccgtgccgccgcgcgaggagagcgcggatgtgcttggcgggcgatggcggtgggaaagggcgcttgaacccgccgcgcgccggcgtggacgcgacgctcgagttcgccggcgagcccttgtagctggacggcgggagcgggctcggcaggtagaacgggaacttgggctgcttct

SEQ ID NO: 5913 - DNA, 780 bp, Zea mays
tcatgctactctctattcccgttgctgtttgagaaccaagagtacctgataaaggtgctgttgctgctgacctacgctgccctcatgtgggtaggttttacggtccattttgctgcaaaatctgacctggaaggaaagaaaataaatcggtctggcagcacagtgaagaagaatggcatcattgggtggattggtttaagctatcttttgggaattgcaggcatagaattatggtctcaagtatttcaccatcatgtattcggcgataggctccccttcctacctcttataatggtgtcattctattgtggccttggaatgatgtactcctgggtgtggcagcttgtacatatagtccgacacacatgatttgattaccggtcatcagtggaagcattctcttgcctttcttgggttgaggctaatcgcgatgacaatgctgcctggaccgatgcagcggccaacacagtaatgactgggcacagcattttcttttagctgtcgaagtcattgtctgtgttgcaagaaattttagagatgtgtggccgtgttatgatgtaattaatgtcagtttatataagtaacagaaaatctgcttgtatcaacccgcgcttcatgcgtgccgctcttttccccatctcaataacatctggcttctgcatcgagtaactgagtgtatgatatatgaacgattctattttctaggaaggaaaagaccataaaatgtgatgtataatcctgccttgttatcttttctgccgtaccttgcctaatacgtct

SEQ ID NO: 5914 - DNA, 733 bp, Zea mays
atatgattttcgtttttcgttcctccttttttttgttaaagaaaattcagaagagatctttgtgattgggcgtgcgtgggtgtgaatggccccgacttgcgctcgttttcttccgtatattgcggtgccggcgctgaccggcctgcttgtcgatgccagtcgtcttctccgacacgacagaacagaactacggcgcggttacttggctccgcgtcagtacttattactcactgaccctttactactggagtcattctttcgaaacgagaagcggagaaaattctccatgaaactggacagaacgagcggccgccggctgggacagcagctgcggctacaacacaacacaggcagagcaacgcacgctgactgtttcaacgtgatggtgagaagatgccattccgagaggtaagcgacaaaaaagaagaagaaaaaaagttgatcctctgtagctgtagtgcgacttggagggagcgagcgatggtggcaggcaaggcaggttgctttggttgtcttcagttttctcgttttgctgggtgcggtaagaaacacaccgcacggccgtggcgtggaccgagagcgaccactgacagcgccgtgtgcaggccagggggcccagaacggtttttagctgggccgagcgttgggccttgtggcgatcaccatctgataagtggggttcgccgctgggcgcaccactcactggacccagtttatcccacatagtgcggct

SEQ ID NO: 5915 - DNA, 528 bp, Zea mays
gttttgtttccaatcagaaactagctagctagctagttgggattcgttctgaattcaacatctgagcccctccaaccaccaacaccccgaggagatcgtaccgccgaatgcagcagtcatcatcgtcaacttttacatgaacaacagcaagctatagcatatatgtagtacaatttatcggatcgtacgtgaattccgatgaacagaaataatccccggcccgtacctccatggaagaaattaacaaacaaccggcggcgtggttcttcttgtctggttgttgaggatgctatgggctattatttatagctatgctcgtcgtctcggccggccagcttttgatggatcgaaggacgggaagatggagaagacgaaggaggaggacaagaagaagaagaagaagggaatataagacgtgtgagcaggagcagctagccttcttatatcggcaagcaacaaccacgccacgccctagcgacgacgacaaaaggcgaaaagatcgagcagcagcaggggccaggggggcag

SEQ ID NO: 5916 - DNA, 765 bp, Zea mays
attaagttgtctctaacagaagactctatatgctcctctaccctaaatatagagaagatttctttctctatagcctccaatggtgtcatctaaaacctactctgaatatagagcactccatcccctctatatagagactctcttcttctctatccatttttatattttagacaacagattaagcaaaactaaaatatgtttatgacatttgagggtatgacaaatacatacgtaaaaaaactagagcaaaaatgtctctaatatgggtctttgatgactgatgtatagaggacaagatataaaggatgttggagaggaataaaatatagagcagataatcttttcgagaagtctataaaatatagatatagaggacaccactagagacaaccttaggctaaggctgacaggagggtgcatgctcctgttctgttacggttttctagcagttgtagtttcttgttaccaagggtactagtagttgtggtttcatgatcggcaccatagttatggttccttgttacaatgatctggatagttgtagttttgtaaattagttctatatcatatttatccaaatttacagtattatgacatgaattcaactttgctcagaaatttcacttttgttatgtttttgattgtgttgagcgacgtcaatgagaaattatagacttatagctgcataactcctaaaaattttgtttgtaagcaaaaccagcctggaagttccctgtttgccaaatataggcacgggttggtggt

SEQ ID NO: 5917 - DNA, 742 bp, Zea mays
gtggcggccaagcacaaggccgtggtggtgctgggcgccacgggcaccggcaagtcccgcctggcgatcgacctcgcgctgcgcttcggcggcgaggtcatcaactcggacaagatccaggcgcacgccggcctggacgtggccaccaacaaggtgggcctcgccgagcgcgggcgggtgccgcaccacctgctgggcgtggtgcacccggacgccgagttcacggcggccgacttccgccgcgaggcctcgcgcgccgcggaccgcgccgcggcgcggggccgggtgcccgtcatcgccggcggctccaactcgtacgtggaggagctcgtcgagggggaccggcgcgcgttccgggaccgctacgagtgctgcttcctctgggtggacgcgcagctccccgtgctgcacggcttcgtcgcccgccgcgtcgacgacatgtgccggcgcggcctcgtcgacgaggtggcggccgcgttcgacccccgccgcaccgactactccaggggcatctggcgcgccatcggcgtgccggagctcgacgcctacctccgggcgcgcggccgcggccacggccaccaccacgaccagatgctcgccgcggtcctccacgagatcaaggccaacacgtcccggcctcgccgtgcgcccagcgcggcaagatccagcggctcgagcgcatgtggcgcgttcgccgcgtcgacgccacggaggtgttcctgaagcgcgggcttggcggcga

SEQ ID NO: 5918 - DNA, 779 bp, Zea mays
ttgcatgcctgcagcggcggctcgccccgacggccagggcaaaggcggcgggccccaggctgtgggacgcgctggcgttcggtggcccggctcccgagcgcactaatggccgcctcgccatggtgggcttcgtgtccgcgctcgccgtcgagaccgacgccggctccggactagcctggttggcggccacgaccgtcgtgctctccatcgcgtcactcgtgtcgttgctcaatgcatggggacagcgacagcgccgaggtcaggagcggcgccgtcatgagcgccgatgccgagctctggaacggccgcttcgccatgcttggcctcgtcgcgctcgccttcactgctcaccggcgcccagctcatcaacgtctagactgattgatttatttaggtgtgagtaatcactccattcaaaatgaggtggtgtatcatgagtctattttataaatttagtgggatagttcaattcctcattttaatactaactaattaactattaaaaatgaaatgatgttggatcaactaaatctattacacaaataaatcaaacaaaaaatgaggagtggaaaaatattggactactaccttgtgtggagtgaaaaaatattacacaaaccaaacaaaaaaaccaacctctttgtggatttacgtgcacgccagtatttgttagttggagaaaattagataaatgatgttgaataggcatgataaatgatattttatggttgtagtgggagtttaggtggaactgttaggagagagagaaaagtcgagat

SEQ ID NO: 5919 - DNA, 744 bp, Zea mays
aagacgattgacaagtatggcaatgccaactcgccaaggaattaggaaaagaaaactaaacagccgggggtgttatgttactgttactgtcagtttcacagagcggcgagttggcagaggtaggcagcagacggacatgcaggcatggggaagaagagttgtgtgcggcgcgcggtggcggcactagcactagcactagtggtgcaggctgacacgcggggacagctgcaagcatctcgaccgaaccatccatctctctagaacacccggagaagaagaggacagccagtcaccgcttcagtgcgcgcggcgcgtccccttcccgcccttggctcccgccacgtcgtcgtcgagacctcgtcccccgtttgactgcaccactcactccccatcgcagaggccagcgcctcctataaatcccgttccgaatccaccacgccggaaacccaagtctcactcaccatccacatagaccggcgcgcatacacatccgagagcctctgccccggctcgatcagctggctccgccgatcatcgggccgggccagagtcatcagctcctgacagattagtttccgctgcaatggcgtcgtcctccatctctgctccagctccaccggcagctccggcgccgggcaggcccaagaagcagtcccagctcaaccccagcaccggcaagaccaggaccccggtccccgcgcggccaatgcgcgcgggttccgacgcccggcgcgccacgaggcg

SEQ ID NO: 5920 - DNA, 720 bp, Zea mays
gtatatgagtaccgaacatcgtcttaacttgttgctaaagcaactgtttgaaccatttgaagctttcgtttcaaggtgtcttggcctgtaaactattccgaattttcaagttccttgaggattgaaaaaaaccctagaaagcttcctcagtcagttctgggtgtatattgcaagtcgttttgactcttttagatactcgtgcaaaatagtatttgcatctacaaaagacaaaacggcttacacttaaattaggaacggagggagtagaggctatgcttctgctgcttccctggcagagcacctgcatagcctgcttaatcgatcgcatgtcatgtatgtggtgtggtacttgttagatctagatctggacatgggtcgcccgacccgactaacacaacgggttaaactcaacacttccgatagagagacatggccaacttgacgccgacactatacacacgtcaggtgcagactgtgctaaataactcacgaccaagaccaaactttgaccggatcttttgcatgacactgaactctaggtcaggtgtttggtcccctttattcgtgcatatgaaaagtcgaagcgcgggttcagctcagttatgttgggatcgtttaccacaagtttggtgccgtgtggtatcatccaacgcgcttgaacagttggctagtttctgtgacgctgattctcttgccggtcatgcagcgtgcccagagcgg

SEQ ID NO: 5921 - DNA, 566 bp, Zea mays
cttgcatgcctgcagctgtttatcagcatgagcaataacaggtaggtcactttatatcgttctattctaagtttctgtgggtcattttgatgacaaggcgggattgtttagtatggtttacttatgtaagaagccatgccacctggtttccatgggcacatgttgatccagtcctttaaaaacacagactgaaggatctattgctgttgttgaaggcttcaccttttgttgacatgaagagtataattgtctattgcaagtttcaggtggtttcctttctgttttctcaagatgtcacacatttatccagtacctaaatctttctgatacagttgcaaagatataacattttttcttggcagggagaaactgactatgtttcaaagtacttatgtgataacaacattactgctaaggttggtattcaccttgactgaaatttgttgcatttattgtttatttacatctgattctgttttgtagagctaccacagtggacttcttatgaagaacaggaatcgtgtacaggagcttttctgctctaacaaaataagagtggtaacggg

SEQ ID NO: 5922 - DNA, 768 bp, Zea mays
accggctgtactgttccggatcgagtgagtctcgtgtcctgctcacgccgcacccaactgcgcgcgcgcgcgacgcgtgcatgcttcttgcaccgtgccgtgcctccaccaaagttcgttcttcttcttcacatggactgccaaccagattatatatacttttgctcgatctccttcgctggcaccagagacaagattaaaagattattggcatttgtttcatcagccacttctatcctcctacagacgtacaccggagatcaaatttgtcaccgtttacttgtgttccaccatgaagcagcaaatctagctactagtcactttggcaggatttgcagtaactttactgtatatatatatagttacggcatgtttctgatctgcgatggtacctaactaactagattgcgtttaccgaaagaaagaaagaaaaaacaaggaacgagcgagacggcaaaacttgatgctttccttttgcctttcgtgtcacgcaacaaaccatgacgccatcgcttgttccagtgatctttccaccgcggtcgtcgatccgctacatcaggttcaggtctaccgagatttctgactgaaacttccaccggcactctgtagtttcagccgctcgatctcgatctgtgcattcagagaggtcttaggttactgagaagtaagtaactgagcacacgacgttttctgttcggacgacgcacacacagtattggccttttggggatggacagccgagaaacatgccatgttctgactaatata

SEQ ID NO: 5923 - DNA, 730 bp, Zea mays
tgcacaaatttttattgccagaaagcactaggaatgaaccaaacttactacacatattcaggacaatgaaaggaaaagagagcataaataagatgggagcaagcaaatcagaaccggaatttcagcgtcgaccacaatttgatcgaacttactactctattgatcacactcaaaagtaaaagaaggcataagacatgatctaatatgcatctgtcagcactatggcatgttcagtgctcatgttggagctggactcatcgaggtactgttgggagctggtatgatgggagataggattcaacattaattcggtatatacagatttctcattataatgtctacacataaatcatagcttctcatcaaatctaatattcgcaaatagcaatagaaaactttactccagctactagaagtttgaacatacctttctatgtttacccttcagctggccatctgaaccaaagacacagcatgtattgtataagttgttgccagaacgttcagctatggacccaccaacaagagtgatttgtaaactgcgagcaacctctgacagcattgaaaatgaaggggctgcatctccgccagcttcaatgtcctcggcgtactctggaaagctgtcatttgagtaagggccattccatatctcctacaggcataaaaaagctgcgggtcaatgtaagaagcaacataagcaaaagatagcatttctgaagcatggccttaa

SEQ ID NO: 5924 - DNA, 752 bp, Zea mays
ataacagtagtttccaaattccaagtactagtagtagttgctaactaacacgatttcacgcagcactgcgaagaagcgagacagatacaatgtctttggcaccaactagctagttcctcgctaaaggcaaggacgaccgagcaaatccaacagcagccctgacgccgcccgacccgatggcccccattcgcgcccgcacgcatggcaccggtacagcacagtacaagttcacaacagatgcgacgggcccgacacgaactgcatgaactcggtgtcgcggagcagcgccgccatggtgtccggggtcaggcacacctcgatgtccacgctgccgtccccagcgcgtcccgggaacgccgacatcttgccgtcgaacttgttggcgcggccgctccgcaccgcgaggggccgcccccacccgaagtcattgccctcgtacatcgggaaccggttggagcttcccatcgtgatcaccgcgccgtcggggttgcccagcgggaagcaccggggcgcggtctgccacgccgccgccgcgcgccggatcgcgccgtcgccgtacgccgcgaggctcgcgttcagcttgcccgcggcccaccgtagatcgctgcaagccagcagctccgtcaccgtcgccgtcgtcacagcgctctggatggcgttgccgaagtaatgcaggggagacggccggccgcagccgatgccggcagttcacggccatccggaacgtcgtcgtcgcgtcgggatccaggcgt

SEQ ID NO: 5925 - DNA, 699 bp, Zea mays
tgactgcagtgccctcttttctttgcttgatcctagtgtttatccccttgctactttgggcaagaattgcatgtccaagtacttaattgaactagtggaggtattaaaaccatatacttagactaatgattgtatcatttgttagacatagctagcatgataagcctgtcaaggtcaaatatatatatactcttgaagaggatttaaacaaacactacctgagacaatgtgcctccattgtactcaagtacaaaatgaaccatctgatggttccacttccacttacaatattctgttccccccttttccatgttctgttgttctttcaaatgttgtccactaacaaacgttcaaacgaatagccaattttagcctgtgtgcaaaatagtcctgaaaaaaaattgtaaagcatttcaccatttttttagataatggaaacaaaatgttccaaccttctgtagtgttctgcatacggccttacagatctaaaaataacagaacaccattaagaagcaaaagaaaacatcctaaaaaaggaactcatcaacgaatcaaatgccctgatctctatccatttattgcaaaaatctccatggccaccacctctaaagattgacatacggcaaccatggcagttgtaaaaattgttggccagatcaaaccgcagtaccatggcagttgtaaagcatggttttttaa

SEQ ID NO: 5926 - DNA, 734 bp, Zea mays
gccctgctcatggttggggttttgtctaagatccccaagttactagatccatcagtacaaggactgatcctttgatctttaccaatggtagatgaagtgcttctagagaggtgttcttgtaaagactgtgaccaattatgatgtgtagatgggggactatccagattcccatcgagcgagttggatctggaaattatggaaggtgtaatatctgcatgggatgaaaaggataaatttctaggactggtttgtgcctgaaccaaatgacacccaattctttcctattgaaacccaaagagccaacaatacaccatttagaattttagatcacaaaaaggaaactacgagctccaaacttcacaagtacaaacatagcaaacaagctccctatatgactataccagcttcacaaatacaaggaggctccacacaactactctggtggtaactataacaaaaatcaagttgtagtaatttattgttctatcctcacaacgcaatataaattccatagactttacctgatactgatgacttatctgaataaagttcactgttagaactctcgttgacctggagtatcttagaactgttgtcactttctgatccaagagaataaaccatggacaacccaccttttgaaatagcatacaccatacaaaagcttggaacacacttgcatattcgagagaacatcctagtgcccttgaacttcctaagccatttcaccaaat

SEQ ID NO: 5927 - DNA, 739 bp, Zea mays
gcagacactgcacttggattggatcacggctagcttttacgcgccattggacttgaaaatgctcgccgatacatgcagtcccgtccaagcattaaagcccgcggcaaaaatttgaagagaggaacttgtggtcgatcaccagctctaccaagaagaagggtgagaaaaggtagtagaagacgttcgcggttttcccacccagtagatcagaggtacgtacgtggcaatttgcaactgttcacatgctccaacaacttggcatgcagtagtcatgtagcatgcatgagcagcggcgggacagtacgcaacagcacacaagggcaggcaggggcaagcacgtcgccgtccccaggaggaccaccggcttgtggtcatcagtggcctccgcgcctctcaatatgttccaaagaagccaacctcccataaagaaaccctcgagccaatccagaggacgtactgaggagagcgatggatagatggcggagactgagctagcttgcatgccatttttaacaacaaaaaattgcttaacacattttctagctagcagaggatgagaggagactattaatagctatagctatatagctagcacacgcaccggcagagcgagagcaggccagccagggcacaaccacagcagctgcaacaactgccatgcatctgtacttggtggcgagaggcagggagctttaagcgagcctagagtcgtcgtcgtctcctctcccgatcggctggc

SEQ ID NO: 5928 - DNA, 782 bp, Zea mays
atggccgcgggctgcgacgacgtgcactcgccgtggaggaactgcatcatcttggacggggtcgtgggcggcgtgggcgtcgacgacgacgacgcctgctgcttgttgtcttgctgcggcgccgtgacgacgccgcgggagggcgtcgagcgcgccgaggcgggatgcccgtggccgccgtcgtcgatgccggtgcgcttgtacacgcggcagagggatatttcggtctgaagcaatgcgaattcggcatgaattatccagatggcatgcatcatgctaataataaagctgagcgacgaaagaacaagtgcgagagcatgaatgggtataactagctagctagttattagagggggatcagaattcagaagtaccttgctaggaacaaactgcctagcctggctcgaatcggaaagccagaaacggagatgctacgagatgatacaattttagtccagatctcagtgattacatctaggatcgtgggatctaggttcacaaactctcgtgcatctaggggagtgtataatcgacagatagcatctaggcgtgtgctgtgaggccaactatatgaacagctagcgtcattgctcatgggcgcatggaaggaagagagggaagatgaacaaaccctaatttatacctagtagtttctcagagaacgaaggcgcttgctccattcaagggaaaaacctagctaacagcaaaaactaactcacccaaagcaagtaagcccaaaccctagctcgttcctatagctaacgactcatcgatttggtggc

SEQ ID NO: 5929 - DNA, 773 bp, Zea mays
aacttcatcattggtgcaatgccttttggttagtggtaacaaagcctcctatcatggcatatagtacttcatgttctcttgtaaagcttcttcatggacctatactctaatgaaccaacttagctaatagtttgttttggcaggcacacctcaagatctcaattatgccaatgttacttcgattagaactactggattttctggtgaccctcttccaacagaccagaaacaacctgcctggaagccctacctgtacaaagggaggcaaaggattctgttttctagcttggagactataaatgctgcactgtatgaccgtgatgatgttccagatttcctttctgtttcaggacaggtgacctgtagggctgaactagaaggactacctgatatttctttgccattgactggtttaaaaactgctcatattgaggtttcatcattccatcactgtgttcaagcttcagagcccactgctaataagcaaaccctggtttttcagccaccattaggaaattttgtattgatgcattatcaagcaccatgcaacattgctcctcctgttaaagggttctatcagttgtccatggtttctgaaaatgaaggtgcttttctatttaagctgacattgatggagggttacaagtctcccttcattatggacttttgcatgattacaatgccattccctcgaagaagagttgcatcatatgacggaaatccatcaattgggacagtttcaatgacagagcattcaattgatggagaattgt

SEQ ID NO: 5930 - DNA, 984 bp, Zea mays
cttgcatgcctgcagtcaatgagaccaccctcggataactacctatttgatagtgacaactgagaacacaaacagcatgaacattcatcaaataacttaggaataggataaagcgtgatcaatgggcaacaatttcagctagaagtcctatctctgtagcaatgcctcccaaaactgcacatccagtaccagaacatgaaaagcctacgagggaagtaaatttttaaagaccattgacagcaaaagtttcgaacaacattgacagcaaaccaagggaatcctgaacagtttataacttattgctcatgcagaaccagaatctaactcaggctcctccgaccatacaatccagttgctgtacaagtagagaatcaccatcccaaatgtgtaaggaacaagaaatttaagagtaccaataaaatagaggtagagccaaatgatgttctccagatgcaataaacttcagtccagtcaaagcttcaatccacctccaaaatgtttaaatctacctccaaaacaccacctgatcctgctaataacatttttctaattaaggacgatcaagcttcaaattaatctcgtggcaatcttcacccaccattgatagacatcagaacagccatataacatatcaaaaacaacgaacatagtcaaacctccaaccttcagctgacctctccataaccagcaaggtacttttgcatctaggacgaactccgagtctcctaaaagtgcagatttactaacaaatggaagcctatgaggaaagcgaattttcaaagaagattgacaaagaggatggttagtgaacaaacaaggaactctgaacagttcagaacttctttgaaaattcactaaggaacttgtgtagcaattaactaaggaacttgtgtaaaaaacgaaagagttgtcatatttatatgagcaaacactagcttactttgaacccttaacaatcacacacttggaggttaatcatactca

SEQ ID NO: 5931 - DNA, 782 bp, Zea mays
ggttcccactctctcatctagtcatccaaccaaaacaagccgacgtgaccaccggaaccacccaccacaccacttgagtcagtgccctcgatcgatgagtgaggaatgtcggtctgattgatccctgctgggtctcgcatgcccagccggacacctgtagtctgtggagcgcgcgcggtcgaggtcgatctcaacagtgattaggacagagtggttgtgggcttgtagccatggccgttaagctagccgtcgcagcaacaagcaacctaggtggcagcccgcagacgatgacaggatcaaaccaccccacacccccctacgaccgcgacgcgaatgaatacagcagcacgcaccttgcggggcgatgcggccgacgcaaacgtacaccaccaccagtccaccaccatagcaagcaagatcggcggcgggcggccgcgcgccgttcgttctgacctcgccgatcgagctgtcccccgccggcgccgcgcgaggcaggaaggccgcccggccggctggcgcaaccaccggggattgagcgccgatcgttacggcacctaacctaacacggcacccgcccctagcgattcgggtgcgcgaggcaacgtcaacggatcgagtgtactgctggtcgtccctccgaatctttcgtactccgcagtaccagttatggaaagggactcggccgtggtggcagcgcgggtttgatcgaactgggatgggactatgggagtgagtgatgaagcaaaaaaaaaaaaaaacggacggaattggtgccgtgcgtc

SEQ ID NO: 5932 - DNA, 675 bp, Zea mays
gaaggcagccccatctgtcgctgaagtagcgaaggcaggctctgctagctgagaaaaggggcaaggccctcgcagacaacactcaccaagaagcctgcgaagacgacgcactcagcaagagacagcgcaatgatcaacctactcccgaaggcaccctccgcacctgcagctccggaggacaaccacaagaaccacccccaggcttcgctccaatagagggcgaggacgccacagaggacggcgaagtcatcggcgtttcagcagaagaacaactacagctgcgggccctgcgcatcaagaactgaagcctccagaagcagaaagaaatcctcgaggccaagcgccaacgtgtctctgcgcaagccaaggtgcgccagatgatacgagacgaggagcagagggctcaggaacttgagcaagagattgcgctcatgcagcgcgaaggccaacttgatctgcagcacggcccgcccctccagcagtgcgcaccagctggagacttattcattcatcagcgcggacccgccatcccgcatgccgcagctttccagggcatcaactaccttgatgagcgaagtcccctggcgccgcacctgcaagtgtcaccatggcccaccaacttcagggcagggacctaccctaagtacaacgacagcactgacccaacacaatacc

SEQ ID NO: 5933 - DNA, 749 bp, Zea mays
  unsure (1)..(749): unsure at all n locations
ccccggatcctatttagtcgacctgcagaatactctcctatgggtagcgctgaaggaacaccatggtatcacaactatcttgttagcataatgagacaagcttatcacaactaaacacaattttagaagcaatgaacaattgtatattacaattacaacacatatagttatcacgaaagacatgagcaattctttccaaacataattggttatttactaaagtagttaatactaacttgtttggaactgtgctggcacagactggaaaatccgtccaagtataacactcacaatagtcatcagggagagagcagccattgacccaagtaaaacctgcttataaaaattcacaatagatacaaaatgctgaaatactatatattgttatacgcaaaaagaaaataaggcaaatcatatagttaatatccctccatccacaaaaggatgcaattctcatttttttcagaaactcgaacgatttggagtttgaccaaagttatataaaaagtactaatatctatgatacaaaataagtatgattaaattaactacaaaatatattttagtagtaaaaaaattggagacataaatgctaataattttcgctataaacttggtcaaagttaaggtagattgacttgcacaagtcttgcattcttttgtgaatggagggagtagaagtgcataatcatgctaagaaaggcangcttggtgcaatggtgaaaggtgtctcgtggagtcaccaggtc

SEQ ID NO: 5934 - DNA, 1319 bp, Zea mays
gggtttggtaaccccccccttttattggaaaattttctgggggataaccctaaattgttcgagggggcacaggcgtcccttaaaaccagaacgctgggcacctcagatacctataaatacccccgctcagtgcccttgagaggcgagattaacagagcttttgccatctcgtgcgagaaccctgtttacgtcaactctcacccccgttggatccccttgcacctggtagcatgttccaacatttggcgcccaccgttcgtgcgacgaaaaaaccactcgcgatagcacccaagaaagttaactcgaaggctgacgaggctgcgaaggcagcactgctggccgcaaaaaagggcaaggccctcgccctcacccactccactcaccaagaggctactgaagacgacgttctccgcacctgcgaagacgacgctctccgcacctgcggccctgaaggacaatcgcaacctcccccaggcttcgccccaccggagggcgcggacctcaccgaggacggtgaagtcctcggcgtctcagcggaagaacagctacagctgcgcgccctgcgcctcaagaaccacaatctccagaggcagaaagagatactggaggccgagcgccagcgtgtttccgcattagccaaagtgcggcaaatgatacgcgacgaggagcagaaagcccaggacctcgagcgcgagatcgcgctgatgcagcgcgaaggccacctcggtttacagcaagagccacccctccaacaacgcgctcagccggaggacatgcgcgaaggctacctcggccggcagcatggccaacccctgcagcaccgggcgcagccggagaacccgcatttcccccagcatgactacgccccccagcacggcgcgccattccaaggggtcaactacctcgacgagcgaagtcccctggcgccacacctgcaagtgacgccttggccagccaactttcgagcgggggcataccccaagtacaacggcagcaccgatccggcgcaatacatcatgagttaccaagtcgccgttgcatcagccggaggggacgacgccacaatggcaaagtctttcatcatcgccctagagggcccagcactcacctggttcaccagattgcccccgctgtccattgattcgtggcgaagtctcagggacaagttcctcctcaactttcaagggtaccgtccagacaccgacgctttggccgagctctcgctttgcaaacagctggaaaaggagactctgcgggagtattaccgcaagttcttaacactcaagtcacagctgccctctgtcgacgatcagatcgct

SEQ ID NO: 5935 - DNA, 794 bp, Zea mays
atattctctgttgttattctttgttatgcttaatgtaacattacagttactgttcctgttaattttaggtttgatgtcaacagattatttcttcttcattctcaatcttgcttgtttcagcattaggaactaagcggttggcttcagaggacctggccaatgactgggataataaaaggctaaatccaggaaatgacaattatccactttcagtatgtatttgtagccctctttaactgatgtgactaattgaataaatgctttttggtattgattttcttgtttaatttgattgcagacaggagctgcaaataatttatttttgggtattgagcaaggagctggaagcagcaatggccagtctgcctttcccaaatttgacaatgggagctcaatggcattaccatctgggcagggaatgtctggtcttatgggaaaagggtacagcttcaacctaaatcgaagatactttagttgcaaattaaatatatttatgaattctaatcttgtgtcaacttcatcaaattgttgagaatgttatgatttaagggccaacagtcaagtgataccaagcacttgtgtttgatgttcatcatcacattagatgttcttataaattttattattttcaaagatagggatcagggtagaaaaagactgagaataaacgtaacattatacgtcatagactctgtatgggcggtgcaggggtctgggggttttcttgacctgcatgagatcttagcaaaaatgcatgggtgctgtcttagtcctcgcaatgtctagttttttta

SEQ ID NO: 5936 - DNA, 530 bp, Zea mays
gcctccggtatctggtcagtcacaatatacagttaagccgcaccctatggggttgctgtctgaaaaatcaggtactcatgtcacaataagtgctccaccagcaaaatctgatccacctaagttacatgctgctggggatgctgcgtcaagtctgaaaaaggataatgaagttgtttctgggatcactgttttaaataaaccaacccttgagagggagagtaacgatcctttagtcacagtgaagcattccactgtgataagcccgtccttgccaattcatggtgaaaaaccacaaactttggtgacatcgtcgcctgttgctaattcagtctcacctgtgactggagctgatgggaaaagcaaagaacccattcaaaggtctggatcatttaaagatagtaagaaaaatgtcactaaaaaggatgtcaggaattcatatgaaccaccaaatgtacgttgttgttggcatctttctgccatgctatgtttgcatttttcctactttagtatttacttttgttcatatattt

SEQ ID NO: 5937 - DNA, 844 bp, Zea mays
  unsure (1)..(844): unsure at all n locations
ttaacacgctcgaggtatttatcatcctcttcaggaagaaaatggcctaaaacatatagcatacaaataaatccatatatccatatctcgtatataaactactgaatggaataagaaagggaaaatcaacaccaatgcaaagagaaaagtttgcaatcttgcagaaactgtgagcattctgtcaatccaaaatgtttatgctagtgggatcatacacaggtaggcacagacatttatatcgatatcgctaaaatggatatgctattcttttctcttcagcatatgtgtttcagccttcagcatgcagaatgccagaatctgaataacatagctcagccttaaggtcagaaaaggattcaatgataagacatctatgtgacttttagtaaaagtccatcatggcaattgttgtttcactgtgtaagtcaactaggaaaataaagtttagtcagtagtcaccataatttttcccaccactacccaagctttcaaggctgagagagagtgaacaattaagtactaatatatttattaactgaatacaaaataatccaactattaattattttctaggtaatactaatacacctcatgcatgtacataacatattttgtaaagcagagaatgcaaataaagaaataagaaaataagaatatcttaccttggttcttcattttttgaactcttatagaccgaagcttctgaagtttctcgaccattanggcaagcttcaacttgaagtaccaaaattgaattggcaattgggaaaaataacttattcaggataatgaatattatgaggatctattaacctcaaaaccttccccgaataatagtggatta

SEQ ID NO: 5938 - DNA, 720 bp, Zea mays
atccagctaaaatggattggaaccacacgagaaacattcacaaacgtacaccttccactatatcctggaagcacaattttgttgtttttagtgaaacgcgaaacgtctaagaatcatgagttataagaagtctgtatctgccacaaaaaatgcaaccatttcgatacaagtatttcatcagaactgtttaggttggactttttgtagaaattggatgattcagaacacaatgttggttctttgtaataatctcaacagaagcaagtacactatcactatgcttctgttattttttttctgacaaacaatagtctatctttcatcgttagaaaccacaaaagagtagatgcttgtaaagtttcaatcactcaggaggcagtttgccattcaggaatgccgagaacaggctgagcgctctttggggttggtaggtaggaaccatatgtccagctccccggactgttgcaaatatcagacctttgtactcaacaacatagcctccaacctgccatctcataaagaaacaacttcagaatcttatatggcaataaattggtatactatatcggttagtttgtccatacctcaccatcatcagaataccatgcccgccatgatgaatttatcttcagccccaggatgtctaatgaatacagcgttgaagttactgggcaaacggcatcaatgtcaccactgaaagataaatatattatttttaat

SEQ ID NO: 5939 - DNA, 661 bp, Zea mays
ctgctgcctgcagaaaatataagtaaattgatcaaaaagggtaaacatttttttctacattaggcccaaaaatttagacccacgagaaagtcgacaacaaaacagaacagaatagtgtataccgaaaacatataataccaaaaaatacatacttctcttcaaattttggattcaattgcttaattggttcgggcttcttcttccgcattcggaggggctcccttgaagcatagtgttcatcacttctctttttgatcaagtcaatgacttcatggaaaatgtcttgtaacgatccaggcaactcagatctatccaaaatttcttgcagcaaagaggatattggaaggaagatttccgggaaagaagatagcccttcatgtataataacaaaacctcttaaacattctgccacagataaaagtacaccagccctgccagaaaatatactgactgtaagacaacaaaaaagaaacccctctgaacaatcatgaagccattacaaccatatacttacttaaagttatcagatgagaaataaggggcgtcaggatccatgccaactatttctaggatattcactggattcacctcatgcacatggtcatggatactgagccacagttttaaagtcttgagctccataaattgatcgttaatctat

SEQ ID NO: 5940 - DNA, 787 bp, Zea mays
  unsure (1)..(787): unsure at all n locations
tatttaaggaggactttggaactgaaggacgtggaggatattttgatcaatatgggtacgttggaagcggctacattcttgcatggttgtcctttgcataaaaaattgttgtaagcaccatatggtcaggttataaaacatcagttctatacttctatcattctatgtattatataattggtccaccattggccttaataggtcctctgatcatgtgcctttatagtttggggggaaaacacaaactgcacagtttatattgttttttcccttggaagacaagtcttttgtacttatttccaattgtttttttactaaatttaaattctatcctgcgtgcaccacctactatactatcaacagtgttgttccaatacttgtgtggttttgttttgaatttcgagagggcatgcaagcattatcgttattttttggggcatttgtatggttgcccggccctgttcacgactctaacttcattttacccctgttttttgaactttgcaccgttgcccctgttttttttnnnaatgnannncncncttgcctttttttcntttcatgcccattacantttttaatcancacttttntcatgtgccaagtcatgttttgagttaccaccgttatgtgcctaccaacggaattaggggccaaccaagaaggtttcccttttaaaaaaaaacagggggcaaaccgggcggccaaaatttcaaaaaaaaaccgggggggaaaaaaaatggaagtttacttatgcccgtggcaaaccacggcataaaaaaatggc

SEQ ID NO: 5941 - DNA, 704 bp, Zea mays
aaacagttgcatgctgggcatgggcagtggccagccgaaccggctggagagcctgaggatcgctttcaggaaggcaggggaggaggccaagggagctgctttggccagcgacgccttcttcccgttcggtaagagggaaaaaaaggggaacctggaagtttcagtgcttgcttagagatttgagtcaaagcattcattgatcttagtcgattcttagggcttgtttgatggagcagagctccatgattctctagacccgaaatagattttttgatagagtaattctaagtgattctttatcggaagtgaatctagttgacgaaaaccgtttggcaaataggctgcaaagtgatttatgaggggttaaagggtgtggagtaggttgagagtgatgggaagcaggtttttttgctcccacttcctaatacaaagtagagactaaatttacttaactcccaccatgaaatagttcagatttttttcgtcagcagtagttctatttcagagaatgaaaggagctctgtcagatgcccctaactttctcgtgaactgtacgtggaagcacgcccgtagttgctggctgtgtgaatctgattctggatgcaacgaagaatagtaaaaatgcagcgtctgttatttattagcgtgttgctgaactggactggaatgatgcagcttggaacgacgcggtggaggaggcctgc

SEQ ID NO: 5942 - DNA, 792 bp, Zea mays
tgcatgcctgcagctccccgcggctcatggagcacggctcgcccgcgccgcaccggtcagcggcgtgcgaccgcatccacgccttgacgctggtgcagccgaacctgaacccgcaggagccgccgccgccgccgccgccgccggagaacatctcctcggggatgggcacctccagcaccgtgtccagcgcgtcgtcgcgctggaggttcgggcagaccttcctcatcagatgagacgggcgggcggcgggtgcggaacagctcactgccttcctcttccccgttggtcttgtgccgcgctgcggttgtggcctgacgagcgcacaagtcctctggagcgcgcgtggtatgtatgtgcgtgcctcagacctcagtgcctgtcctggggtctcggtggacttgcaccggttttgtttttatgaatcgtgggggagcagctggtaggtggggcctgccattatttcgcgacagccgcacggacactgctacgtactgtatgcggtatgccttgttaaagatttcagaaaattactataatcttgctcgagatcttgtcgtttgtgtgctgtgtgcacatacgactacgggttgcccttttttgcgacgaccccaatatccctttcgggctttgtgtagtggtgctagtggtcgtctgttcccacatattccgtgcatgggatgggtgtctacttatgtggaccctctagcacgatcgtgggatgatggttggcgaaacaccaaatacgccttctttcgaatataaacaaacatgtcatggatgctttgcttggct

SEQ ID NO: 5943 - DNA, 756 bp, Zea mays
cttatttgctaccatttccccctagtttaattgtcagaacacagtaagtgcaactaaatagataggaaaactactatgaagtatggacatggatcacaattacatcaataaggaatacccctatgaagtatgaacatgtgcatcactcggtccaggtgccatgcaaaaaaaaaaaaaatcgagttcactccatattataggaatctgctctcatggctagcattaagtttgatatgaggaatttttgtataccaacttccttttaagaaaatttctaatagcagtttatacatccacaactagttggccaaccattgatcttcatgcatatgtcatagtgctaacttgaacaagattgtagattctatttatgttttgaatttgatgcttcttctgatttccttgttgaacataaaatgtatgttcatagtggtggtgattcttcttctgacttcattgtagattctatttggttcctttgattattatggatttattttgtatttggttttagagttaacttcatggttctagctagcctgctatagcgccgctaatctgctatagctatgctataacattttcgctggccctatcaccaccactacgatattgtcaattgtttcgctattacatctaacgatgctttagctccactgaacaacactatttgtcttacccgtgaaattcttttagcactgctaattctgatcgagtcaaaatattcattctttgctctagatgactataatctat

SEQ ID NO: 5944 - DNA, 762 bp, Zea mays
agtcgacctgcagctcacggcgatcctgggcatgtgcatgctcattggagacggcatcctcacgccggccatctcaatcctgtcagctgttgatggactaagagggcctttcccgtcggtcagcaaacgtacgtgagcggccgatcgatttgttgattcgtggagtaatcaatcaaattcgagtgttttgtttttgcagcgactgttgaggctctgtccgcagggattctgatcggtctgttcctgctgcaaaagtacggcacgtccaaggtgagcttcatgttctcgccgatcatggcggcgtggacgttcaccaccccgatcatcggcatctacagcatctggcgctactaccctggcatcttcaagagcgtgtcgccgtactacgtggtacacttcttcgtgaccaaccggaagaggggctggcagctgctcggcggcaccgtcctgtgcatcacgggcgccgaggccatgttcgccgacctcgggcacttcaacaagcggtccatccagatcgcgttcctctctagcatctacccgtcgctggtgctcacgtacgccggccagacggcctacctgatcaaccacgtgggcgacttcggcgacgggttctacaagttcgtgccgcgccccgtgtactggccaatgttcataatcgcgacgctggcggcgatcgtggcgagccagtcgctcatctccgccaccttcttcgtggtcaagcagtcggtggcgctggactacttcccgcgcgtccgggtggtg

SEQ ID NO: 5945 - DNA, 800 bp, Zea mays
ctagctcggattttgtggcctatccagtcgacctgcagcggatcgaggcttgttagctcagagctctcatgcttgtgcagacgtgcatgtgctgagcagccccggtccaatgattttgagggcacccgggcgggcgaactgatcgtggtgggccctctagactataaaaaaaattctatattatgcagcggagcatattaatactccgtaaataaatgatgatgtgtattgaaattattttttttaaaaatataagaagctagataatatacatcgatatagattagcacttcgtagtttgaaaaataagaacgacgatcgccaaataacctaaattctgattgctcgaccgtgcgtgtctggaggctagcgcagtggttcccagctccctggaatcctggagggttggatcggcgagatggcgaacgacgatcgcgtggagggtgtggtctcatagacgctcggggacgtgagcgtgacgactgggcagtgggcaacacgtgccacgtggtccgtatgcgccggacgtccgtgtgcccagccctcctaccttgttggctacctatactattttactactagcatataacccgtgctaacgctacgttcctgagaagaggagaggggtggacgatgacggtggtggcgcgaggagagggattgatggcggtggggacgcgaggaagggagggctaaaggatgatcaaataatattgttcattaaatttgagtgagcaaaagagatgattttattcaacgatctgaaccgttgattttgatgttattgtaaatatgggtgc

SEQ ID NO: 5946 - DNA, 740 bp, Zea mays
gtcgacctgcagttatggactttgacattaaatcttcaggttgctccattacattatcctcctgtacaacaacagatacttcccctgcctccatcttattgctttcttcctcactttttttggtatcaatattgccatcatgtaatttgacttcaagacgagtaactttgtctactgtatcgcaattctccagttggctactaagttcttttgggacatcgtattcttgagcaatcttgtcctcaacttcagttatattatctgaactagctagcatggattctgctggttgtgactgagaggcattcccatcagatgtgtcttcctttcctgtatcaatagattcacctgtttcggtgtcacctgatttatctattttgataggcgaagaaaatgcactaccatcaggtaagtctccagcagactctctaagctgatttggctctgcttcatcactaggacaagaatgtttactatattgatggtcctggttttcttcaactgttgaaggatgtcctggagattgtgatgtttctgatgcttcatcatcacccaccttagatgcaggtgcctcagtgcagccatcaagcttttcttctgctactgaaagatgtgctggagtttgtggtggcatggactgctcataaacatctgccttagaaacaggtgactcattggagatactatgagcttcttctgattttgaaggctgttctggaaatgttgttcctgatacttct

SEQ ID NO: 5947 - DNA, 794 bp, Zea mays
agtaaagtaagaaacatgttatgcgatgagtttcataaaagaaaatgttagctgaagatattacggaaataatgcacaaaatgtatcaaacacaaacctgaacttcttcctgaagaaaagtgtctctaaaatgacagtgcacgggatgattgccagcttagtcatctaaatttaaaggcatttcagcatcagttaggtggattgattattatctaaggaagaggaacaccaattattcaactgcaataaatactcatacaagaccttgaaaatctaataaaaaatctacaaaatgtgtctagcacaagaagagtgggtggtacattgtgttgagagaaaaaagtgcatcatacattgtgttaagaaaaaaaaaaggtggatggcatattgtgtcaaaagcaaagtgtgtatgatacatgacaatgacaagatacttttaccttgacctttacatgagtaactattgttgtatcaccacataatgaaaatcttatgcaataccggacaagtaataattgcaggaccagaatgaaatatctaataaattctgactggtggaagaactacattaagaacatagacaagctacgtacctggtaaaacccaacagagttgaagccaagactcaagttgaggagcccaatggagattccgttaagtactccaaatcccatgacagttcttgaatcaaaaggcttatgctcaaagaacttcatccataatgctacatgaagggagcagaatgtaaccagcagatgccagctcgtcaaggtagtggctgcaaaagacataca

SEQ ID NO: 5948 - DNA, 661 bp, Zea mays
agctgctgctgtttcacacctatgaaacactgtagcacatgctgtgcagccacaacagcagctgctgtaaagctcagccaatcagtaatttctaagcacttttatccctatttttgctttagttccatttctaaataagcgctccatctttctcagtgtataattgaaggacaacaaagtctttgagtcactttgttaatactaacagcttatatttatgacttgagggagtatgtgcactagccaaaacttaatcaagttctgtgactgcaacccagaatcgacaatcactcaacacgtcatgtaattggttatcaatgattctttcaggttttaggttttaggactccagatgatgttgatgcttggttgtttcaaaacccaatgcgttgccctggggctttacattttcaagatataaatgccactcagataaagtatggtattcagacaaactctactccggtagcacggagaggaacatatgaagaccctaccttcaagttccagataccactccaagttgcagctgagagggaaatggcaaggcttctgattggaggtattaattttccatgcttatttaagaaaaatggttgttatatgtattctcatccacggtgacaataattcctgctagtttgtactttttaaacactat

SEQ ID NO: 5949 - DNA, 770 bp, Zea mays
  unsure (1)..(770): unsure at all n locations
acagcaacccaagccaaccatccaacaagcagtagataaacaagaagcagaaacagatgcgtctcctgcaccttctaaaggagagctttcaaggcggctgagtgtgaaggacaggataaacatgtttgagagccagaaaaaggagcagactcctagttctggtaacagcaactctgccggtactggtagagtggttccagggaaaggtgagcaccgcagggttccttctggcgcctccatggagaagttagttagaaggtggagcagtgttagcgacatgagtattgacctcagcaacaatgagagtagtagcttaaatgacaaaaaggataatggaactcctgccgggactccaacatctactgatttggaggccgactctaaagtaagagctaatgaggactctaatggacagaaggattcaatcacgtcacactcttggccttgtcaaaaggataatgtaccaatggatctggccaccacagatttgtgcccaccctcaattttaagtaatacacttgctcctcataaagagagtatatatggtgatggtgcagaaaacgacatggttatgaactctagcattgaaagtgaagcatcctttgngaaagaaccggnggttattcaaggacacacaaggatgtcaaatcatgctacttcaaatgtttccactcaagaccgtctaaaatcttctgcaaagtcagttgaagaagccttgctgaaaaaataaagttattgtaactagtgcatcgtcagaggaacatgtctgt

SEQ ID NO: 5950 - DNA, 668 bp, Zea mays
gccgtgccatgccggcgtctccatggccaacccctcgctccgtgcggcaagcgtcccagctccacgccctccttaccacgtccggccgcattgctcaccgtccttccgccgagcacctcctcagctcgctcaccaacaccatctcggccccgcgccacctgcgctacgtgctcagcctgttcgaccgattgccgcactccaccactttcctcttcgacaccgccctccgcgcctgcctccaggcctccgccggcgcagaccatcccgtcctcctcctccgccgcatgcgcagcgggggcgtccgcgcgggcgccttcaccttccacttcgtcttcaggtgctgcgcggccggcgcccgcgcgcgcgccgggctctgcctgatgctgcacgccgcgtgcctccggacaatgctcccctccgccgcgccgctcgtagcgaaccccctcatccacatgtacgcctcgatggggctcacggacgacgcccgccgggcgttcgacgagatacccgtaaaggacgcggttgtgtgggccacggagatcggcgggctggtcaggtgggggctgctcgatgaaccgcggaggctcctcgtgcatgcaccggagaggaacgtggtctcatggactagtatgatcgccgggtactcgcgtgctggtcggactgctgac

SEQ ID NO: 5951 - DNA, 780 bp, Zea mays
aaatcaagaattatgaggcgttgtcaatgagatactcgtcaaactgatccatcaccagctgtccacatgttagtgtgtatatgaggacaaccttgtgaaaaaaatgtggtgttctgtaccatgtttgcaaggagtgtgcaccgtcaccagcttttacccatttctgaagcacattataaatctcatgtgagagcctgtggtagagtagtttagatacaaatagaaatctgcatgttatcgcgatcagttttgtttccattttcatttgtctgtaacagactggcctacaggcaattttgtatgcatctcatcaagatacatcatacatacacgaatgagttgttattgaatcatgcgtggaagtggaatattgcaagaaattgtttttggctactagcacttgtgttcctcagctacagttgtgtgagttttccattggtctcagcagcagcagcttgaggcctggtggtgtccagtttgtccaaagccgcccatagcttggggtcttcgtagtccctgatgacgagcgttgcgccgacggcgagaagcttgtcctctctgctttcctcggcgatggcaaccaccggcatccctgccgcaatgccggcctgcacgccagtggtggagtcctcgaacacgagcgcgtggtccggcgagacgccgagcaggtcgagcgccctgaggtacgggtcagggtagggcttggatcggccgcactttctcgcggtgacgacgaaggaaaaaaagtcggagagcccgaggatggagatcatgagctca

SEQ ID NO: 5952 - DNA, 771 bp, Zea mays
gtcgacctgcagctgctgctccctcgtcgcctgcttgctctactttgaatctgtctgttgatgcgtctcccgtcccgtcaccttttcttaccctgtgatgtgatgtgcatgctacatgagatgactagaccagctgcgtgttctctgaaccagatagaaaaattagaagaactcgggctgaataaaaagtagtaggaaaggggtgtgtgtgatttccaggctcatggatcagcaacggaactctgctctggtcgctaccgatgaacaaacgatccttgtttccgatttctgcggtcgtaggataaagtgtcatgctccatttgcatgtcggtattggaggacaccaaatcagctatagtattgaaataaaatgcaacttcaattctgttgtttggaggtcactatattggagtttggaattagatggtctaattccacacaatacagatgagtgaccctttgaattaggagagagagaatctagttatatttcaattccacggaattgattttctgattccaaatctcaatttcatgtgcaagcaaacgacagaatttcatctatatccaaacggggcattagatttttagaggaaaaaacaagcagatctcgcaggtgcctgcctcgtgcaatcaaatggctgcaacgaaaggtggtgacagaaatcgtcctggtcggttctggatgagaatgcatgttctatggtatcagttcacagatgcttaaaaaactaaattggttgtgtctgatctgatcatgtatcaatgacg

SEQ ID NO: 5953 - DNA, 743 bp, Zea mays
cccggacaaactatcaaagatagagcagtcagagcttgatgcagacaactcgtcatcattaacaagattgtccctgtagataaaatgaagcacagcctgcaacatggaatatttgcgtggatgaaaataaaatcccaagtttgtcaacagggaaatggatggatgacattgacaccaaaatataaagataccttgaacactacaggatccatgtcatcaataacgatctctttgatttcatcccccgtatcagttccattcttctcttcacccaattcatgatcgaaaaattcagatctaaaaaagggagatcgggcagccaataccaacttatgggcatgaaacttctctcctgctacactaaaaataacatctacaccttcctgagtgtccaaaagcgttccaaaatgaaagcctatgtcagactctggaacctctattgaatgtggcctagaataatccatagttgatactacaacacccacagtacagtttatcttcaagcaatcatctttaagaaaatctgattgctcaagagcagtacgccgaaagaaccttttgtagcccctgaaaatttaaatcaggacaatcaaatatgggtatttttcagaaacaaacttggtcaaatgcagggagtaaaagtctaagtaaaatcaaacaggcaggcacactctataatgaaaaactaaacaatctggaagagatatgtgtgtactatttatgaaattacttgggcatatatg

SEQ ID NO: 5954 - DNA, 568 bp, Zea mays
taaataggtagtcaatcaggttcttgtttgtaatccgaaatggcctaggacctgaaacacagaggaattttaattgcaaattctattgagattgttttaggtgttctgtagaaaaagtttctacctgttagctccttacgaagaccatcctccgcatcagtcttgctaacattgggattgatctctaaaccgcttctatatgcagctatgctttttaatgcaacaatttggttagaaactgtgagcaataagttaaggatatttctaaatcaaaaggaactaaataaaaataatccaattggtttgcaaagggtattggaaaatgtagaggatatgaattcagcttagctatgtagctttcagtgaatgagtccagtgtccaccttgatccactgaatgactcctgaaaatggtatttgtgcaagttgattaaaattactttttaaaaaagtactcgtagttaaaacatattattaaatacaaatagctgaactgatatttcagtataagaaatgtaatataagtcactgcttctgtaacgaatggccatgctatttgttaaagtaaa

SEQ ID NO: 5955 - DNA, 810 bp, Zea mays
tttggatctctttggtgatgcaaagtcaatcaggaaggcttcaactcggcatacaactcttttttcatgtaagagaagcattctgccatcaaagaaacggaaggctgatgatgctgttgtgtcagacagggacaagtttgctaaaactgggtctgttcagtcagccacaggaactgatccaaatgcttccaatcctcctgtttggcctgcgacttctgaaacatctggacatcaatggggagcttcttatgctcagcaggtcaaacattcatttaaatctgcatgttttagttacatgatttcttttgctgcactgatcaaagataagatacattttcgaaaagcaaagcgagtaagcgacattactgattgaatctctaattcctcccaaacagtggacagaagtttggtagttattctctcaatacctcgttattctagaatttgtagctgccatgcacgttcactaacctattgcaatgttaaagcatgttaattctgggaccttttttgctagttgttttattcttatgattctttcacaagttacgattgaattattacatccatagagcttctaattttttttataaaaatagtcactcttattatttgtttagctataaatttgtgttatagtgttttgactgtatagttttatgtatcaacttcaactttttttgcattgtaggctgcatatcctgcatatggaacttatgactacagccatcaaatgccacagcctgctcctcaaacagctgcctatggtgcttatcctccaacatactctgttcaggtattgtgtttgat

SEQ ID NO: 5956 - DNA, 565 bp, Zea mays
attgaaatttccactgaaagcggaattctgaagaacaatcttttcaagaagctcaatcagttcatgtggcaggtcagcagtcatgaaagccttaacagcagcagacacttgctcggggctcttgctctcaggtaatgcagtcgaaaccacttggtcaatgagttgccttctatattcattctcgggctgaagaactttatcccacagatcaccatccattctctcaaccacatacctgtcattttaaataaatgcaatatgaacatgtaagctatcagacaattgaagtggacatcttgaaacaggtgtcacaagtcacaacaataaaaattattacatacctagcttgcagcttgaataacgaattcttgttagtgacgttaataagttcatcgtcacactgcccacgtctgtaagcaacaacagcaagtgtaggatcccgcttttcacaatatttacccacaacacgagagtcgtaaaatgggttggtagtaaggaaatgctcaggattgttgttgttgtcaatgatgattttactaagagcattatggacatgcacatcttg

SEQ ID NO: 5957 - DNA, 779 bp, Zea mays
aatactactccgagcgatgccggaaccatccaccaccgaggggcggcgtatccagggagagctcaagaatctcttggaggatgccgcggtccgacgggccgaaagctctgcctcccgaaggcaggggtaccccctggagcgtcgcaccgcgacttcccgattcatgcgggaagcctcggtccacaccgggcgcacgcgggacacagcgcctgcggccccgggtcgcctcggcaacgagcaccaccgccgcgaccgtcgagcccacctcgacgaaagggtgcgccgaggctaccaccccaggcgtgggggacgctacgacagtgaggaggatcggagcccctcgcccgaaccacccggtccgcaagctttcagccgggccatatgacgggcgccgttcccgacccggttccgaaccccgactaccatcaccaagtactcgggggagacaaggccggaactatggcttgcggactaccggctggcctgccagctgggaggaacggacgatgacaacctcatcatccgcaacctccccatgttcctctccgacaccacccgggcctggctggagcatctgcctcctgcgcagatctccaactgggacgacctggtcaaggccttcgctggaaacttccagggcatgtacgtgcgccctgggaactcctgggatctccgaagctgccgctagcagccggggagaatctctccaggactacatccggcgattttcaaagcagtgcaccgagctgcccaacatcaccgactccgatgtcatcggc

SEQ ID NO: 5958 - DNA, 736 bp, Zea mays
tctcaagattcaaaggcttgcggtacttttttattcttttacacatgtatgcaacgaaaacattagaaggagaaaatgccaaccacttgcctccaagattactcctgtaatatcactagaagaaccttagaatagaaacaaggaatggaactaatgtttttttttaaaaaaaaaagtgcaataaaaccttgtattaagttaacccacaaagtgctcagtgaccttaaagcaagtatagttagcgtgatattttcacatgccttgatattagggtctaaacaagggcatactgtcaaagtatgcaaggagaatgttgatcggctcaattgctccaatatgtacatacaacgagtgcagggggtgtcgattcaagtgtactgctgagcaagtcccagtggatgcaaatgaccccatgaacagtgcttaccactacaagtgtgtttgccacaggtgatcttcaatgagtaggaggagctgctatgttatggtatgtcctggagaatagtagtattttttccccattcttggttctcccgtcttcctcttcggttccttctattctttggtttctctggtgaaaaggggttcttttttatttttattttacaagaggctagcttgtagaagactgggagcctaaagaacattttgtactttaaaatgcttgttcaggttatgaactagtaatttttgtaagtatatgggtattaatttttgatattctgaagtattgaat

SEQ ID NO: 5959 - DNA, 678 bp, Zea mays
gtttactccttttagtcagttttcaaatgcatcgtgcagtggagtagccacttgtggattgtgggatttaaaagtggttttggcctttgaagaacaggtttagttctaactgagaagtgtctgcacttatgtacgttgttctttatttcatcacttcatcagagtgaagatacatgaagttcagatttcagaatgaagatttcaagattgtatgctgcttcttacttctgtctactttctgcatttcattttgtagctgtgttcttgttttctaattacaaaatgaaaaatgcctgatactgggaataacagttgataatttgagactctgtaatatgtcttgtttgggttctttggcttcaaaacagagaagtgtctgctttctaaattgcctgtctgttgtaagcgtatagtcccgactagctgaccatcagcacgagtactttgacttggcatcctattttttttagtcaatctagcatgagtcagacatcgaaatggtctgtcctctttgctacttgtacagaagcatgctcaagcttagaaatttaatcttatatcttaacagagttaacaatgatgaacactaacaagctacataggtgcttgtggaccatgggttcagtgctgtagtaacgtcaaccttggtgcatgaggcctcaagtatggcttgatgta

SEQ ID NO: 5960 - DNA, 727 bp, Zea mays
ttgcatgcctgcagcctacaaccttccattgcaagcatatgcacttgtgcagtggtcagtggagacccaacaaataagcaacaacaatcattcaattaacagatcaacacttagtattacaataaggtggctgtcaacagccaacaatgatcattgaacgatctaatctaaatttcgaacaataatgacatataagtctccatatatgacaatataacgtaagtatatcatagattttcacaatgcaaatatatcccgcctaatttaaaatggaataaaaacaggattatcccggtcaaatacgagatactgcaaatatgcacgggcaacaacatcaacccttttcgctcccgctcccgatcaacccgtctcatattctatcccgttttcacacaaaaattatatgtataaaacaagaatatggtataggataggatttttccctttcgtttcatcctcactcgtgggactattttgtttcacgccacaggtcgtgccaaccagtatgtagtgtgtcagtgtacaattcgacggtgagaccagcgctgcttttgcaatgaaacaactagcgtatctacaaattttggtacgtttggatcggactagcatataagatgtgtgctatcgctacgatctcaagagaggaggggttaatggcagaggtgagttcgaaacgaatgaagtgcaatcgatggaggccgccaatgaggatggggaagatctggta

SEQ ID NO: 5961 - DNA, 745 bp, Zea mays
actggtgtaacctgttggcagtcagttctagacgacgatggccaatctcccgaaacatatgccaagttgaggaatcataattcctataatgagcttgtagcacaaaagctggtggacatgaagaacagccaggtcacagtaacggtcaatggcgatgaaattcatatggatcagttagggaatgttgatgaccgtaaaaaatctggggttcaggcattgcaaataagatcttgctcccagtgtgccattttggagtctggtgtgctaaggcagcctatgcggtcaaggggactgcttgctcgaccttatatccattcaatgcttgctatagcggcagtatgcgtatgcgtctgtgtattcatgcgagctttgctgcggatcaattctggaaaatccttcaagtgggagaggctggattacggtacaatataattgtggggacacacctgagccttgtggtattattaagttaacaagcagttgttatggagctattttggagccttgaagggtatggagattgtttcatgcttcctcgaaactcgcccatccgtatggctgagtggaataatgtaatatttttgctggacaattcctttacttcctgtgaaatagaagtgttaataggtgagcagcccgagatgttaggggggtggcaaaacttggtaccaaatgtggagcttgagcagagttggaacatgtgcaaggggccgtagcaactgcgctcccacaacatgatatgcat

SEQ ID NO: 5962 - DNA, 702 bp, Zea mays
ttagtgagacaaccctcaccactgcatcaggattgcccttcaaaaaccaagagctgaagggaactctaacaaagaatgtttctgtaattgttatttcaagatctactgtttattattgtacttactaccctaatattcatttgtgccttttgggatctctcagcatttgtcatggtacttcaaacaatctgctaagactatggagcaacaattccaaaaggagactaggttctacggctccttaataaggtagttacttctgttgaagttttgaatgtaaaagctgttaaaaagttgaagctgttgtcacaaagtgctcagattgcagcagaactggaaagtgaagcggcagcgggctgttgggagtccaggaagtgaaggcttcatgtttgatctagttgatagttctcagctagacacaacaacagtgcttcgattatcaccattatctttaattccgattgatcaagactcttcaggcactttgtctgtacaaattccacagaagtctttgcgttccttgagccttaaatttcatggagacatagtcaatattgcagaaagcagtgctatcaaaaagaaagaaggcacatctaccaacactactgctgaagccgaaaatgatgttttggcagatgatgatgtcaataagtctattagacatgcacattccatccttcgtgatatccacaagtccatatt

SEQ ID NO: 5963 - DNA, 739 bp, Zea mays
acaaccaatatatgcatcagattctatgggaagctaaacatctacagattggagctaatggtctcccacccacccatccgattacctgtagaagttccagtgccctcgtcggatgatttccagcgaagcgagcgagaaatccagcaggcgagactccaccataccaagccggagtttcatcacgctctcggcccaggctaggcgcagcacgaggttgagcatctgcgttgcgttgtggtgcaaaggcgttagcgctactgaactttcagtttagtagtaagtagcatcgtgggggaaagaagaagaaaaaaaataccatggaagcatagtagatcgacttgttcttgaggatgagctgatcccggagccaaaagttcttggattttgggttcaggaagccccagtccatgacgaaatcccagtagagctggtagatggtggcgccggtagatgatgcaatgaccatccacatccagaacggcgtaggcgtcgcggcgtacttgaacctaaccgcagctgccaccatcgctgatacgtacttgccggcgttagcaagctggttcatgtcgtggccttcttccaggtaccttctcagacactagcatgcagcagtagaccattttagtcagtctgatgagcagatagatctgctagattcgttcaatgtcagtctacctgcatcgctcggccagtagtatggcaggaaagagagcacgtatgccaggttcttggtattggg

SEQ ID NO: 5964 - DNA, 1127 bp, Zea mays
tcaggagactcttcattttcctcctcttctatagcacctacagcagttggttcagccttcttttttttctttgggaaagggtcaaaattcttgtgccggagctccaaaaatagatctgcccttttcctgttgttaactataatttcattatcaacaacacagcggataaacctaactttgttttcaagcttctttaagtccagcttgatattcttcaacaatgcttcctgcacaaataaattggttaatatggctttcagttaatattctaaaaatgacaaagttcatcacatgtacctttctcttacaatagaattcaagccttaattgaaagaattcctcaagtactgcaaaaatatcacactcagttattaaataacaagaaaacaggggtctgtaacaacacataatacgatacatcacttactttgctcgggagtgtcatatttccgaattttaccatctgaatcaaacaagtgcatatttgatgtcccaattgttgttgtcagcttaaacttcttcactagtccttcttccatagctatattcatatttttctcacttaatgtgaactgaatgtaaacatcttcattatcaccttgacatgtgacatcctgtaaaatagttgcaattgaggaatagcatctatgacggtggaaaatttatgaacacaattgtaagcgtttttgttttcaacgacctctatgaatggtactttgtccttgttcttagtatctggagccaaagtctcaagataatctttgtaatcctgagtccaacggcggattggcaattcagtgatcctcagtgtagtgttgtcaagaacctcgatgattccagtgacagtatatgtggaaccagctacctttgtattgactgtcttctctatagagccctgtaaatttgggcatagaaagtttgctttagtacaaccaatagtttatatagtactccctccattcttttttatttgccgtgggttagttcaaaaataaactagcgggcagcaaatattcgagaaccgaagaagtagtatttacaaaaccatgccttggtgcaactgcaaaagccaattcataatactaaccttaaatcccctgtaccatgggtgcattggtacagtagac

SEQ ID NO: 5965 - DNA, 775 bp, Zea mays
gcgtgcctgcagctgcctgggacatatggaagcaaaggaatggtttcatttttcaagatatctctccctcttttcaggattggaagagaggattccttgagactatgaagttacagacgatcagaatgactactgatttgaagacttcagtgaacttctggttgtctaccttatagtttccaccgaacctcacccttcacctgtattcagtcctctctgcttgtgtcatgcttgttgttgttcatgccctcttctttttcatttcatttctcttctctcatttggttagtggctcgtctaggtttatgaggtttggtcttcttcccctttctttctccctctatttgtacagcccttttattttctttaaatgtatatataaaatttgtgtcgctgtacgggcttcacctttttgtagtaaaaaaatattgcccttgctcttacttaggctgaagatgagcatcgtctgtggcaattggctggggccaaagggatctcctatctccttgttccgcttgagaatagcatgatgtggtagttttatagttttcttatagatagttttttgtatctctgattttggcctccatgcctggatctatttgggtccccctttgtttccctcttgttaatataatatgatgtgcagttctcctgcgcgttcaaaaaaaatactttctgactgctctaattatttgttttaaataaatcagtagcagatccaaagacttctagcatatataaagaatataaatacctgctaaggatgaaaaac

SEQ ID NO: 5966 - DNA, 751 bp, Zea mays
cgtacagttgatgggcaacatgacacactagtagtgagtagtagggactatagcttagttaatcaccagaaatggcaccacaaacttgcctctgataattgcattttctcttaaggaaccttgcttgtgatcaaacatgttcaaaaatatataaggagcatcactcttttacattatattcatgcaaatacatatgacagtcaggatcctctcttcaagttcaagccgatggctaataagatgatgccagtactggatagggaaatgacatatacattcttaaaaaaggtagaactttcattggacatgctgggggtagggtcacatcatgcagctaattttactaaaatattgaaccttacccttttctttcttgacaaatcaccatttcatactaaactatcactagagacttattttcttctttggtgtttgcaggctcacacgtcaaagtcattgcaggtactgctcctaatcaaacattccttcaattcaaaatggcaaaggatgtctattagccacaaattcttatctttctcgactatggctctaaacattttctcgaacccattaataacaccaaatggtgccttcttatccaaacagtatattgatttcctgttcactgcttgccagctacatcatcggtggccacaatagtggttcttttgttaatggtagccactggactctatctttcacttaagacaagatataatgaggagatacacttgaaggtcgaaatgtttct

SEQ ID NO: 5967 - DNA, 691 bp, Zea mays
aggatccttgacgatcttgctcctcctcatctgcttcctcacccgcacagcccttccatgccgtcccttggacgcgtacatgttcgacaagagcacgtggtccccggcctcgccaccgccgctgtccgccgccaccacgacgcgccgcatcacccgctcggctctctcgacgttgccgcgcgcgcggcaggccgcgaggagggaacctcggacgagcgcgtcgggtggcacgggcatcgccgcggcgagcgcctccgcctcgtccagcctccccgcgcggccgagcatgtcgatggcgcacccgtagtgctcgatgccaggcgccacgccgtaggcctccgccatggcgccgaggtgatggaggccctcgtcgacgagcccggcgtggcagcaagcggagaggacgccgaggagcgtcacgccgttcggccgcacgccggttcgccgcatggccgcgaatagcgctagggcctcctcggcgcggccgtgggtggccaaccccgcgatcatcgacccgtaggtgtacacgtcgcgcagcgccatgccgtcgaacactatcatggcctggtccaccgcgccacacttggcgtacatgtagagcagggcgttactaacaacgccgccggcgtcggcgtgacgctcccagctgccggcgcatgtacgcgtgcacccaccgttcggtgttcagagc

SEQ ID NO: 5968 - DNA, 676 bp, Zea mays
  unsure (1)..(676): unsure at all n locations
tccacgatcaggctgctccagcgcgtccacatcagcttcagagagaagctggaagcctccgtcacatggtggcgactggcgactggcgtcggcatgatccaggtgtggactagtctggcaaggttgcggttgatctctgacgcatcgccgaatcatgtggcctcaaaaactcgtcccttttttcccccctcattctatttattacgggcagaaagtttgcagagggcacacggtttcccttttggaaaacaatcgcggccggcaagaccagaagaaacaaacggcgaggcggtgacgttaccagaacgtcagaacgttctcgggatgtttcttgcagtggggaaatctcttcaagaaccaaaaagcgctctgcctttttctccgggacgttcttctggccggcgtttattccctcgcctacgcagcaagtcagcaccagttggtctctttggtggatcaaaaagcaaggcacgcatacgtcgaagatgacaattcatcatcagttctactattacaagtccattggcgaaatgatgtatcatccccgtttccaaatcatgggaacagtttacagcaagtagcacgcatattcggctnttttttaactgaacaaaatcaaataaataatttccaagcttgccaaggaattctatctgtaaacctatatctgcacagc

SEQ ID NO: 5969 - DNA, 797 bp, Zea mays
aagtaaagtatcatttcaacttggtaggagtagattattaaggcagctgtaatttatttttgtttggttgaataattattcttgtcgtatgaattctccacttactattcagtaatctattgaagcattagtgatctattgatctcgcacaagtttgaatgattgtcaaagatgggtggagccagtacaaattcacctttctttgtagattcttagtttgtggctgtgcaaaggtctcgaaataacaaaatgccctttgttgcaactgcctaaaacctttcaggttcaaaaggaagaaaattcatctgacaccagcactatcacagccactgaaagacctcaatgtccaaagatttggaaaaatgttcacctagtggcaccacacctacgacttcagtttcacctgtagagtcaaaaaagcatgagaagactgtaccaaattatctcagagctactagaggttcgtgccatgatttttgcaagtatggacataaaaacccttctgaagaggaggcgggtatttcaggaggaagaagaaagaaaattcctgctcatctgattaatttgacactacacagatcagctattttggatagatccaaggatataaaaaataggagtgtttcactaaccaagtcgagcatatctctgggtgaagctgaacggtttgcaccccagaaagcatcagcaagtcgaaaaggagttctatccagtgagcatatggttcccaggacagctacaccatctcaacataaatctctgaactctgatagaaaaaagatgcattcaattgttgc

SEQ ID NO: 5970 - DNA, 786 bp, Zea mays
tgctgcctgcagcctatctggaacacctcacttcctaatttcatttaatatagccaattgactatgatggttagagaggactcaggaccagataatgctacattatgtcaatatgtcatatcaacatagcaaatatcaatgcgtgaggttgcttcttgcctatatataacaagagcaccaaaaatttcaagtgttttgttcgcctaaaaaagaaggcagtagatttatgatattcatcagtaccaataatttgggataccccaagaaccataggggaaattgcagttcataatacttaattaaaactggaatttctgtgatgttctcaagtttgctaatagaacatgaaatgcaaattgtatcagctttgctaatccagacttcacggagaaatttaaacattgtctcacttgtatgcaagctcctttgtttgttcactccaccctccgagatgctgatccattaaaatgcgtgtacggtcacttatctgaaaaacatggggagaacccatcatcaactctagcatgacaactccaacgctccagatgtcatacctgtgcatagttaaacaagaaattcagtgaatcacagtgcagctgtatgtcaaacacagtggcacataccagaattcgtagaagagaaatgggaaaaagagacatacttaagccttgcacttcttgatccttgaaaccagtttgaattaaggagtgcctctggaggagtgtactcaaatgtctgttcagatctggagttgcagtacaattgaattagaatggaacaaaacaa

SEQ ID NO: 5971 - DNA, 774 bp, Zea mays
atgaaacaggccgcatggagatacacttcaaattttatcccaagaatgtcaggaataaattatcatatatgatgcacagctagtttcagctttaacctgaagcatagctgcatcaatgaaaggatgcacatcctttggctctggagatggtccagaacacaactgagttgacataagaactagcatcaagttcaggagttcatgatgtaggtagcataactccggacttaatacagtacaaatagcagttagatcaaatataaataaaccatacatggaaacaggaaacattaatatatacaagtgatgaataagataccttacatccacactaccaatatagtccagcacacctctcatcagaaaatactccaccgtgttttcttcaaggatcaagggaacatcaaagatcataagaattttggccaattcactcgtatagcaatatatatattacagtttacagaagaaacacgctttgcaatagaccagagacagagaatcttagtggatgtggataatcgattacctgctggaattttttccaaccccttctcactcctgtcaatgtcaaggcatagctcttgccaactgtcagtttttgcattttcaatgatgaacttgagaaatatggatgatatgtatgccgcgttgattgccctctgatatacgacagaagatacagaagttgttgaggtgcactcttgcaagcaacaaaccaaatggatcaaaatctttgcagatgctttgttttgtagttattctccgctgcaa

SEQ ID NO: 5972 - DNA, 761 bp, Zea mays
taggaccatgcagtgtcctaggtacacttacacacaggtgctctgtgccggccctcgggtctcgctcaaccaccaccttgcctctcatctaagagccattgggaacaactggccagtcggagagacactttgcactaggctagccacgccagcaatccagcatcgtccaagtcgaactgagcaacagctggagcactccacatgacgacgacgcacagaccctcctgtctacctaaaatcagggagactgaaccattggccagtgagggctagtttcgaaaatcaaaacctcttatgtctagtttgactactttagtatagacatcaattcacttgtattgaactggattggggtgtaacttaaactaatttacacctcaatcgaccttgtttggttcacgaaatataacgtaaatgacaacggtaattattcacacttgattaccagctgttaaggttacaaatatgtgaaccaaatagcatactgtttaaagaggattgatgtgaaagtgaactaatttctttcttaacccacttcaatataatctgtgggaagatctcgtttcctaaactagccctggtagataaacccagcgtgaataaacagagcctttcgaacttggatctctcggactgttgcaccgttacataaggtcatgctctcggaaggggaccggccggaattagaggggttgggaaaccatcaaaaaaaaaatgtgtctggagaaaaaggaaacgtccaaaaaatgtgtaaagaaaaa

SEQ ID NO: 5973 - DNA, 758 bp, Zea mays
ttgcatgcctgcagttttaaaatggtcttttttgtcagtatctagagataaaaccagtagatggacatacgagaacagtgagaggcaactcaactttcttcaatcttgatcatgtccttttccttgtggaatgactctactttacccagtgatggatcagtcatcctattgcttgcactctttgatgaacccagtggtgaggatctagtactatattcttgttgactagagctgtttctcacatcagagaaaggggagagtattgttccatttctcgattgcttacatgatatgattctgatagtctgcggaagacacctgaaactacctgactcacaagagctttctgtatcacttttggaatgtgctgctctataaactctgaaaaatgttcaaaggaggcattgggtcaaaagtcagtaaaacccagtggtaccaacaaaatcctaaccatatttgaacatcaaattgcttgagcgacattaaaaaaatactgaaggataagggacagtctgcatacttctagcttggacagagtttagtgacacattgtagataccaggttaagtttgatatctaaattaagtgcaaagtaattacaccatttttcttcaaggattttatagttggagtgtcttatcttctatacctagtctaggatagtatcatcacatgaatgaagacataagaaattgacttgagattttagcacccaatattaattgcaactacttagcacccaacattaaatgtgacta

SEQ ID NO: 5974 - DNA, 598 bp, Zea mays
tcggtaccctggagagctctacagtcgacctgcagctagtagtagatggtgcaagggtgggcaactgggcctgcgttaacttttgtcgtggtttgaatgatagtgttgttgataaattttgctctgatctggttacatggtgtcgtactagtggagtggtaatctacattttcgttgtgcctttgattgccttatcgtcaaataatattcttgcatgactcccactttaccatttcgctatggttccagagaatggatggcttgacacttccaatataccgtgctcaacctgaacaagttgaagatgagcttactcggttctatcagaacatgctagtaagagggcaaaagattgatcttttgcttgctatactcccagagaaaaacggcagcttatatggtaatatttcttacagcgaaaatcggcagcttataacatatatgccatgcctgactactctgaacaacaggtaatttcaaaaggatctgtgacacacagattggtgtcatgtcgcagtgttgcctggataaaaatattaggaatgcaaaacttccgtactttgctaatgttgctattaagatcaatgccaaggttaat

SEQ ID NO: 5975 - DNA, 792 bp, Zea mays
tctgtatttttattggctatgagagtgctccagtcatgcttcggatcagtctcatatgtccatccaaatccacgagactcttcaaactcgtgagagtacttggatgcgtacactagcaatttctttggaacacatccacgaagcacgcatctgtgatgcaaaaaaaaagcattgtgatatacataaaaagtcaacaaataaagcatatttcaaggctcaatatagaattgactgctaagtaccaagcagatttcatataaattagtttggtcgcaaacacaggatagacaggctaaaagatattcataaaaaaatgtcttaccataaatggttaacaacctaccaagaataggcagattagaaattagatagacaaaggaacattgtagtaatgtggtaaattctgcaactacattgtaccgcataagcattttgcatctcctcaacatttagtaatatgcatagggtcatcaaatcaaatgtgaggtccagttctgtccaaaattattaagctgcaaatgctgaaacttagtaaccaggttcccggatcgatgagctcgaggaatgggaacgtggtatgttgtactctactaaaactgggttctaacactacgggaacgagattgttcccagaacgaggaatgtggccaagttccacgttctcggtttctaagtggctgaaacaggctatattacagtggcacaggcaagacagaagggcttgcaatttctgaaagtgagcctattgtacatccaaaaaaaaataatcaattaacactctagtagaaacag

SEQ ID NO: 5976 - DNA, 788 bp, Zea mays
gcgaaagaatactctgagcagctaggggttgatgcttgcatcaaattatttgagcaattcaaatcttatgaggacctttactttttcttgggatcctatctgagctccaggtaatttctcctgatgtctgacatttgaatgtttttctcaaatattgcatgtctttctcaaaatgcaacactcctgaggtttctttacatgcaacagcgaggacccagatatccatttcaagtacatagaagcagcagcaaggactggacagatcaaagaagttgaacgtgtaaccagagagtcaaacttctacgatgctgagaagacaaagaactttttgatggaagcaaaactacctgatgcccgtccactgattaatgtttgtgaccgctttggttttgtgccagacctcactcactatctgtacacaaacaacatgcttcgatatatcgaaggctatgttcagaaggtagttgtgtgtttcgactctgttaattcgtgcgccgttcctcataacaggttgagtatgagaatgatcaattcttttctcttgtttccaggcgaatcccgggaatgctccattggtagtggggcaagtacttgatgatgaatgccctgaagattttatcaagggtatgatcctctctgctcgatctctcctccctgatgagccttttgttgatgaatgtgacaagaggtttgtttttcatatccctccagtttacttattcacatggcatgttccccctcctaccccctaccttcttctgtttgggtcatatgtttgatatgtgcat

SEQ ID NO: 5977 - DNA, 818 bp, Zea mays
gggcgttggatggctttgtcattgtagccaccaacctggttcatgcatatgcaggggtgttagagctttgttctgcccgtgccttgtttgatgggatgacgcataggaacacagtcacttggaatgtaatgctcaatggatatgtgaaggcaaagatgatagacatggctgcggaagtgttctggaggatcccagagcgagatgaggtatcttggttgacattgattgatggatatatctgtgcagatctgatatcagacgcaatgaaggcatatgttcaaatggtgggtgaagttggtgcaaacgactacgaggtattgcttgttgatttgatgaaggcgtgtgctcggtactctgctgttacagaaggccaacagctgcatacagttattctgaagaatggttttgatgcccatgcatttgtgcaagcgaccctggtccatttttatgggtgttgtggtcttattggccttgcacagatgacattcagattgtcagacaagtcccacacagcatcatggaacgctctcttggctgctctactgaggaatggcctaattcgtgaagcaagggagctgtttgatgatatgcctgaaagggacactgtttcttggagtacaatgatttctgggtatgtgcagacaggacgttcagacatggctttgaagctattctattcaatgttgaatacgagcattgaaccaaatgaggtcacgttggccagtgctctatctgcaattgctgattctggcacattggaccaaggtaaatggatcccttgctatataatgaacagaccagtcccgcttactgatacc

SEQ ID NO: 5978 - DNA, 754 bp, Zea mays
tgcatgcctgcagtgagtttgttcgatggttgtttgattacttgctttgctttcacgtgctcattgtgttgctatccctgcttgcttggttctctatgtatcctaattctcatgtttggtgtccaggtatccaactgatagtgacaagcagatgctggcgaaacagacagggttaacaaggaaccaggtaattaagttgcattgaatgtaaaagtaaaactaagaataccactagaattttaccaccaggaatgtttccaaatgtcaaatgaagacaaatctgctgtatcgaaacgccattctgtccctaatatgtaaaagctcgtgaattcaccgagcaggtgtccaattggttcatcaacgcaagagtgcgtctctggaagcccatggtggaagagatccacaacctggagatgcggcagctgcacaagaccacatcggtagaccagaatcaactcggcatgcagcagcagaaccaccactcgtcggacggcagcgggaggccttcctccgacccttcgaactcccagcggggccaaagcagcggcatgacaagaaacctcagctctcgggcaccacgccacatccaggacgacgagctctcccagatgccccacgacatggcaggacaggtgagctttgcgtacagtgggctcccccccgcgcaccacggtctggcgctgtcacaccaccaccacccccagcaagcgcaagctgaggcgggttggtgttggcggcgtggccgccagcagcg

SEQ ID NO: 5979 - DNA, 811 bp, Zea mays
  unsure (1)..(811): unsure at all n locations
atttttcaacatgttctgatggctttgatctagaaaatattatgtctttagagttagacaaagcctgtacagtggtatttagctcctgaattcgaaaatttggaccattcttatgtgtattatggttgtcaacactgctcggagtaagaatccctgaagaatgctgaaccagagcatatatagaagaacaagataagtgcaaagacaatgcaaactatatttgaagagtaagattaactgcatttcattctataaactttattactaataagtgaactttttccaccaacccacccttcatgcaacaatcaagaccctggaaacctatatttctaatttcccttatatgatcaagaccctggaaccctccgtgtgcccccccccctcccccaggcattatatgaataatatgatcctttacatttctagtttccttggaaacctgtttttctgtaaagagtgattttttctctcgaacacgcatgagagtttttttctcgaacatgcaggagagctgcgtatcatttcattaataagagaaagaaaaatacaaaaaagggcacccacaaacaacacaaacacacacaaaccaatagagcttcagcccgggtctatgagcaggctaaagcatttggctctggctaaattccaaaaacacaactcatattcagccttcttttgatgattggtggcaatctgctattaccttggtgcctaatacgatgaagaatggactgaactctcccatattntgggagcttgggactgtggaacataacattatcgaatgaatgactgttttaatgaaaaa

SEQ ID NO: 5980 - DNA, 751 bp, Zea mays
ggagagctgctggatcggaacctccccggcgccgccatggccgcagcggtcactgctgctgtcttcgttctcttcgccgccatgagtactacgcgagcgcctgcggcactcgtcgagcaaaccttcgttgtaagcagcttgcatatcttgtttgatttgactgacctgcacatctctgctacttcctgagaactctgaaaaccagcacacagccggccgttctgcatgcattcttagcaagccattgacgacgagagctagcctggtcttggtctgtataatgatggttcgtaggacctaccatgcatgcatgtatatgtgtaggtgagccagatgagcatgacacacctgtgcagggagaccatggtcaccgtggtgaacgggcagctgccggggccggtgatagaagccaccgaaggtgactccgtggcagttcacgtcgtgaaccagtcgccccacaacctgacaatacactggtagccgacccgttgtttcttcctcctctcgctcgctcgctcgatcgatctcaaacagaaaagattgtgcaggcacggggtgaagcagcagcggaactgctgggccgatggcgtgccaatggtcacccagtgccccatcctgccgggccacaacttcacctaccggttcgacgtggccgggcaggaagggacgctgtggtggcacgcgcacgttttcagccttccgcggcaccgtgcacggagccttcatcatccggccgagaaaacgcgccgac

SEQ ID NO: 5981 - DNA, 649 bp, Zea mays
acgtggccccgtcaccgcctccgcagcggaccgtcaccgcggcgcggccgccgaggctgacatcgagatggtccgggcacctcgacgaggccagcgtcgcgaccgcgacgtccgaggccagcgcggcggggcagtcgccgcggggcgggggaggtttcgccaaggacgcgccgatcagggagatcaagaagctctacggtctgatcaagtacaggagccgcaaggacgccggcgtcgtgccggtggatgacagcgcggcatcgccggacgggcgggacagcgacgttagccccgagaaggaccggtgattagttatctgtgttttctttttttttttcgttttcacttttgataatgggttctaaagtagtagtacaaattactgtttattcgaaacgtgggtggatgtacattctgcactgtaaatctttgtagcactagaggctttctcattactcgagaaaaaaacgtgttcatctgaaaggcatccattgtgcggcagtgaacaaagcttagacaaagttcaatggtaaccgcttcttcgcagtttggcacgcaaaatcgcggtcaatgagcccaattgacattctggtgacaccttatgcgaaatactcaggtgcaatagaatagcagattctaacaacgacta

SEQ ID NO: 5982 - DNA, 740 bp, Zea mays
ctacaaacatgctattagccaccttttctttaattgatgaccatgttatgctgtatgtagctaattagttgaatatacctgtgttatcaaaacaagaagctaccatgttgcctttataaggagtagatatgtctgacaaacattaggtatattattattgtacatgctacagttttttttgggcacgtttggttcccagagcaaccttgctttgcatagcttgcagacaccaaaaaacttgcctgccctggcgagctgatctagctcgcttgtgatatgaaggaaaaatgactaaagaaacttgccaacacaaactcccatgcacttagcaaaccatacaaacgtctactgtcacttgaggtcctcgccaggcaaggagaaacgagcctccctgacggaaccaagcatgcccttcattcctcagctttgcttagatgagtggtctggttcgctgaactttcacatttattttgtcatttaggtatcattgtttgagaaatcagtttcaaagatgaacttgaatgatcttatgaaagcaacagatgattttacaaaggacaatattattggaactggtcgatcaggaactatgtacagagcaacacttccagatggttcattccttgctatcaagaggttgcaggacactcagcattcaaaggaccaatttacatctgagatgtcaactctgggaagtgtaaagcaacgtaacttagtgccacttttgggatactgcattg

SEQ ID NO: 5983 - DNA, 794 bp, Zea mays
gcagttttagtggtagatctgggcttcggatcaggcccatacgaacagacccgtcggcttaagtgtaagccgggctgcgatgggctggtcgagtttcggtagcattatatctggcctctttagctcaatctgggccatacattgatacaactttctttccatgtcacgacgtcggctcttcccataactgggccattcccttggacgaccaaaaagagagagagagagaacagggcccattgcttttgaactacgtagttttgaactttgaagtcttaggtgtgctctgttgcgctagaaatccgtcgcgaatgatggatgcagagacaggcttgagggcgaagccacaccccacaggccggggaagacgaaggtcgtcacatccatgatccatgcacgcgtcaactcgccttgcgtggcccccggtcttttgggggcgccgagggaccgggcaaccgccggtccagcagcagccaatccgccggcggcacgggttctcctttgcctgcggcgggcatcattgatggaggctgccgctttacaacaaagatacgtcagaggataggatggggggacacatggctggaatggaatggaatgatcgccctcctgcacgccggtccgagccgacgcatcgaacaactgcaaggtgccaaggacggacggcctcgatcggtcctcctggggaaacagcgagagccttaaaatctcctcgtgtcctgctgctgtgtactccctccagtgcagtaaaggtagtcgtttaggacttgattgtgcataccaaggagtgatta

SEQ ID NO: 5984 - DNA, 693 bp, Zea mays
agaaggtctgagtgataaaccattctttggggcaatatctctagcaatggggtgcctctcggcagtagacggtctccttggcagagctaaagtggcatgctttggtgcaacgtctctaatggggcgcctatcagcagtagaacagctcagggtgacaacatcagcatgcttatgtgcaccctctccagtgatagggcgctgtttgacagcagatggcagatatgaggtagcaataccaacatacttcgatgtcatatctctgccactagtgtgcctttcaacagtagaaggtctatgtgggctagcaacattgaaatgctttggtgccgactctttggatatagggcgcctgtgagcagtagaaggtcgatgtggggcagcaatgttggatagctttggtgttagatctttggtggcagggcgcctgtcagcagtagaaggccggcgtggtgtagcaatgctgcattgccttgttgctgattctttggtgatagggcgtctgtgagcggtaacaggtcgacatggaatagcattgttttcatgctttagtgccgactctccggtcaccgtgcgtctttcagaagtagatggacggcatggggtggtaacttcagcatgcttccttgaagcatcttttgtgacaggtcgccgttctttggtagagggccgttgtaatgctgctgaaaggtcttc

SEQ ID NO: 5985 - DNA, 755 bp, Zea mays
ggtgcctgcagtgttacctgtagaagagttggtaactccagctctggagtagaagatggatgtcgagaaggaacatgaaagtagagcatctgtaaagttatcatagaaagctatattcatttttgctctggacacaagagagctatgtattttgtataaattcaagagagaaaagggagaagagtaaagccacaatcattttaagttgccatagagcagaatattaggtggtcacaaaatccaagtgaccatgcagcaacgatggaacagaacaaaactctgtaagagtaaaaattaagagtacacctgtgggatttaaatgataccgaaaccacactttttggaacttattttgtagaactaaacaaactttttttccttcaaaaaaaaagaactaaacaaacttcggccatactatctcaaagctacatgtttgcaaaaaccattaggttggacagcaactgaaaggggtttcaaagcatgtagttttgaactacgttaaagcaactaaactaaaagtacttcatttcatgatattgcaccatgttggttggaaggcaaaagtgcaaggtaacaatggtcgtagtaggtcctgcgtgttttcgagaaaaaacaatggtcgtagctgtagtgcggtagtgccttaggtaagggtgcaagcctgcaaggtacttcattagctagtagctacacccagtttaagccaggggccttatgttcagaaacaagatcagaggagaacgggtcgtatatac

SEQ ID NO: 5986 - DNA, 839 bp, Zea mays
tacacatctctatttattttctttttctatgtcaaatgtgccaattgtttcgactactttgtttggcttctaaagagattttgtatttattgtgcactgaagcgcttccattatgtacttgattgtgtttttgtgaacacatagctccgatgaaagaaattttcaagagaattcctaaagtactggttatcttttttttttcctttgcatttggcaccccaggatttttctgtcacgtgttagcatctgatgtggatgtaaaacgtcccatcacattgtgtttgtgtttttagctggtagattatactggtgcaatcttctttaaactgaagtttgtgttacctaatgattatgatcattccactgttgctgtgcttaccattttaccaggctaaaaaggagactgtggatcgggtttgtgatattgtcaagaagcagcttgcacttcctgagggcactgaggtctgtggctcctcgaagtttcaagacctcggtgctgattcgttggacactgtaagtgcttttaagtttgcaacaattgaatttatctatttaatttttgaatgattcttgggtagcagaacaacaattagctattttgttttgtacatgtaccaatcataaattgattacatttccagggaataacatctaggatcagtgctctggttctctactcaagtctgcaagttatctgttatgcctgtagataaattctggactgaaagtctattggcatttgtgctgtggtgaatataaacttggattacttcatctttcccaaaagaaactaaatctttcatggccctgtttttttaggctgggaattgttttggccc

SEQ ID NO: 5987 - DNA, 657 bp, Zea mays
gccgccggcgccgcctggccgtccccgtcgggccgcttcgcgttcggcttctacgccacggacgggggcctcgccgtgggcgtctggctcgccaccacccccaatgtcaccgtcacctggacggccaaccgcaacgtcacgccatccacgggcggcgcgctctgggttacctacgacggccgcctggtctggacgggccccgccgatggtcaggacaggcccctcgcggtgccgccgcggcctgccaccgccgccgccatgcgcgacgacggcagcttcgtgctctacggcgccgacggcgccatggtctggtccaccttcgccgccgcgcccaccgacaccctgctcccgggccaagacctcgttcccggcgcgcagctcttctccagcgtctcgcccaccaacagcgccacggggaggtaccgcctcacgaaccagatcaacgatggcaacctcgtcctgtatccggtccagacggagaacaccgcgaacgccgcgtactgggccaccggcacgttccagatcgggttcccgctcaccctgcgcatcgacaccaccggagtgctctacgtcaccgggcacgggggcatactacaccaagaaacctgacgctttccctgggccgcgcccgtcggccgggtgtaagcgggacgtttt

SEQ ID NO: 5988 - DNA, 1459 bp, Zea mays
agtggttagcagcccaaaagcaactgccagcttctcactatgttcagccagtgcacgttccttagattgctcatcaatgtcttgcaacactaaacctgtcattggcttatatccagcttgccttaagcgatccatcatctctcccaacattttgtagatctccttggaccttggatgcgatctatcaccagaaataaactcgtgaattgtattctgccattcaatcgagcttcttccaggaattctctggattctctccctcctaagcgtcctcctcatctctgcaacaccttcccaggaattcgcttgtgcatatatgtttgacagtaagacatagtgcccatcggcatgaggatccaatactcgcagtttcgccatagcttcctctgcaacttctacattcttgtagatgcgacaagcccctagaagtgccctccagatgactgcatctggctcgaatggcatgtccctgataagctgctttgcctcctcaatatgacctgatcgccccaaaagatcaaccatgcatccatagtgctgaaccttaggggttacaccatgcactacactcattgagctgaaatatttcttgccatcgctcacaagaccaagatgagtacatgatataagaaccccaatgaaggtaacctcatttggttgcagtccttctgatagcatccttgagaacaaggagagagcatcatggccgagcccatgattggccaacccgatgatcatcgagctccaagtcagcacatccttcactggcatagagtggaacactcttactgaattctcaatgtcaccgcacttggcatacatgtcgatcagagcggtcccaagcttgacatccaattcaaccccattgctctccacaaactgatgcacttcagcaccaacagcaagcgcccccatatcactgcacgccgagagcacgctcaccatggtggtgcagtccgggttgacacaggccgcgcgcatctcccgccacagctccagcgcatccttggacctccgccccttggtgtacgccgacatcatggagctccacgagaaggcatccctgtcgtccatgccgttgaacacctctctcgccaggtcgacctccccattcaccgcatacccatggatcatcgtgttccaagagaccatgtccctctcgcgcattccatcgaacactctcctcgcctccgcaacctcgccacgcgtaacgtatgccgcgagcatgacgttgcagaggaacacgtccctgcgcggcgcctcgtcgaaagcggcgcgcgcgaggtccgcgcgccccgccttggcgtaagcctcgacgagcgcggtgcgcacgaagaggtcggctgcggcgaagccggacttgagcgcgcgcgcgtggagggacgcagcgccgaggccgaggtcacgcatagccggaacggaggccgagagcgcggcggatgcctgcaggcatgcaaga

SEQ ID NO: 5989 - DNA, 1459 bp, Zea mays
gctgattccaggatcttcaagtggggaactatatgccttgaaaagaaaagtgcaataaaattcaaagataatacaatgagaccaggggacaatatttgcaccactggaataatttcgtgtatataaagcaacacctgaagataagcataccttggttgcccatgtcgtgaaccaaacaagccctagggatccaaatgaaaagaagactgatggccaaccgaacttatgtatcagcaagggggaaaatgcaagtcctgtaactgacccaaggtacattccactgtacacaagagacaatgatctgctcctctctgatacaggaacccatttcgaaagaatattgttcattgcaggcattgcaaccccctgaggcaagagtgtatatgttttatcagaaaggtgtatcgatgatgtcaataaaaaaacatgcaggtttaagcaactcaaagaagtttgccaattgtcatagctgggtaagggtaggatgacttctcaacggtgagagaacaggactattggagtgcatagctccttgtgaatctatttttttcaaagatctacaactactaatttaagcacaacaatcattctaaggaagcaagggtaattccttcaggcaaaaggaagaagcctaggggaaatcactctacattgaatctaccagcattcataccatcaacaagtttataaacttggatgatagaggagttggcaagtaaccgtaaatcagtaagaatcaatgcttacctcaccaattcccatgaaagcccgcacaacaagaagaaatggcaagccaagatgtgctgcaacaggagtaagagctgtagctatggaccaccaaaccacaccaaaaccaaggacagtctttcctccaacagtatctgcccatatccctccagctatctgcgatgaaaacggggatagaatcatacaataacatttgtgtttctattcctaatgcagagttctcgcgcgaagcaagaatttatgttaccaacctgagttaggaggtagccccagaagaaagatgactggatgagaccaacagtctgtgggttccaaccaaactctgcggacataggcagaatagcaatgctcatatttacctgcaaatgatggtaatataaatgcctcacaaacaaagtgacactacagttcatgcactccttggaaacaactgctacatgttttccagtttggtgttaccgtgttagtgataacaggtataggaatatgactagaagtattgtatatatggcagcaggggctggaatgggttggggacttgtagtcttgtagatgccacgaaagatgaacaagacaacgagttgtgcacactagctagttacaatgggtggttgattcaccaaggcacttggttatctgaagagtagaatcacctctcagcaaggacaccatccaagtctccaagagagaaaatctgcaggcatgcaagctg

SEQ ID NO: 5990 - DNA, 801 bp, Zea mays
catgcctgcagcggcgagggtcgtgcccatggcatcggcactggcgggacgcggaaggctggtggcgcgtgcagcagttacagttgcgtgacattgctcttctgatttttgtcagtcctttttttggtcgcaacacacattggctgtcctgaattattttctccttgtgtgttctcttgcgcaggcaaaggcggatgtgccatcgagcacgtccgacgggtaagaacgttttactccctgtctatggcatccatgtgacctgagcccgggacatacgcctgagatgctccacttttcatatctgagattttcatatgtttgctgattttttgtcttcaatcactagtgcacacacatgccccaaccacaaaaggaaaatatgagtggactaagcagcaaagtgtggttttgagcatggatttctaattcggctacaataataaatgaatactcactggttgtagatatctctaggttatgtaactatatgttgtaagattttattatggtacatgaggccgtcaccattgaattgattgcaagatgaaatttggcaccgaacttgctgttttgaatgggttaccaacctgaagtaattacagtagtctggaaaatgagtatttcatccttgtgcctttgcttgcttaaatgaatctagttggcaaaataaatctggagacataatattcagttttattgtagttggtacttggcagcgctggatcgggcaccagttctcatcatttattgtccaagaagtgaactcgttgataaaaataacagatcttaagagatttatat

SEQ ID NO: 5991 - DNA, 719 bp, Zea mays
aatacaatcagcatgtcagtgactgaatagatacatcacagcagaataagttcaattcatttatatgttattgtataatttattattttggccgtacaatatattaaattgatacattaatggaaaagatgctccattgaagtggccagagtacaattcgatcagtaggatgtgaactaatagtttcatgatgtccaataaagtgaattatctgctgcataattaccgtaaacgccagatcccttatctgctgtctaaacaattcttcttcactggaatcaacatcttcaggcaaagcaacacactcccaccatctgcaagcataagttttgctttcacaagtttgtactagataaaccggatttttgtgattttgtcacaacacaacaaatgtctgccatcaaggcacatgaaagccatccagaactagccttctagctggcaaattgtgaagaataaaggttcaagccatgccatgagaatgtcattgactattaaagaaagtttgcaggttatactatttcattgaattgttactacgcacacaaaaaactgaacaacaattatcatgctcaacaacagctgtcatgcaacactgtttcttagtgatgcactcaacaagtaatcactccaggttgtctggggaaaagtcacacaagctcattcttgttacctctttttgaagccattgaagtggtttcatgcctccaaacgagcga

SEQ ID NO: 5992 - DNA, 757 bp, Zea mays
tgttcctggaccccagcctccacaatgacttctacaacagcttctgcaagcgctacctgtggccgattctccagctccagtacctcctgccgttcacgcgctcctctgacagtggctgcctgagcttcaacgaggacctataccgcgcctacctcaccgccaacacgcagtacgccgaccgcgtgttcgagcatctcaactccgacgaggacctcgttctcatccacgactatcatctcttcgcgctccccaccatcctccgccgcaagtcgccgcgcgcccgcataggcttcttcctccactcgcccttccccacctccgagctcttccgtgccatcccggttcgcgaggagctcctccgcgccctcctcaacgccgacctcgtgggcttccaaaactacgattacggctgccacttcatttccgcctgctctacgctcctcggcatcaccagccgcgcccatggcgactacatttgcatcgactacttcggccgcgctgttgtcgtgaatatcctctccgtcggtgtcgacatggtccgcctacgtgaggtgttgtcgtcgcccgagacggcagcaaaggccaaggaggttgccacgaagttcgccggtcgccaggtgttgatcggagtagacgatgttgatttgttcaacaggattgacgtcaagctcttggctatggagaggctgctagagtcgcggcccgagctaattgggccagtggtgctagtgcaaatcaacaacccggcgcggagtcc

SEQ ID NO: 5993 - DNA, 758 bp, Zea mays
  unsure (1)..(758): unsure at all n locations
cgacctgcagctcaagaccgaggacgaccacggcggcggcgcgccagggctgttcggcgaccgcggcacgcagggcgaccacgagaacaatgacgagaacagtggaaacagcaacgggagcggcggcggcgagctggcgctggttcccccgtctggtggcggcgggcccgagggcggggatgccacccctcgccgcccgagaggccggccggcggggtcgaagaacaagccgaagccgcccatcatcatcacccgggacagcgccaacacgctgcggacgcacgtgatggaggtggccggcggctgcgacatctcggagagcgtgacggccttcgcgcggcgcaggcagcgcggggtgtgcgtgctgagcggcgcgggcaccgtgaccaacgtcaccctgcggcagccggcctcgcagggcgcggtggtggcgctgcacggccggttcgagatcctctccctctccggctccttcctcccgccgcccgcgccgcccgaggccacgggcctcaccgtctacctcgccggcggccagggccaggtggtcgggggcagcgtcgtcggcgcgctcacggcggctgggcccgtcgtggtaatggccgcctccttcgccaacgcggtgtacgagaggctgccgctggaggacgacgacttgctcgctgcccatcaagcgccgcatgcgcatgccgacagtgtcctcgcggncgcgcagctcgccgtcggctctgtggatccgaccctcttcagggactgccact

SEQ ID NO: 5994 - DNA, 656 bp, Zea mays
ttgcatgcctgcaggcaaaacaataagaatcaggtgtttcacaaaatggcatctaagcatagtaaggtactaaggtgcagttccatatatggaataatatggtaaaattagcatcttggtgtttgcataagtgctgccaagactatgactcttcatcaaactttccatgtatgttggaaggctgtccagttcatgttagtccttttcagtattcacatggcatgtttgttcagcagatatgcaatcaaaagcatgtatatgtatctttgaagaaaaatttagtggcatgtagtaatttttttacttttaggctagtacacttagatcttcgagattgagcacttgtttggttcacttttccatcagaaatcattctagcatatgttttagttcttgacagtgatggatatcacaacttctagtaaatgtataaaaaaagtcaggtaggtgcagaagtcaaaaggttgaacgattaaaggtaggaggtactaaatcccgaaagccaagtatggatacacaatctagtcctcataaatgccaacactcttgtattgtagtggtaagctcctcagttgagggagacaccaaccaggattcaaatcctggtggcagcaaaaaaaatcccctcactggcaagcccccaaaaatagtggcag

SEQ ID NO: 5995 - DNA, 781 bp, Zea mays
tgcagtgcaggcatccatgcatgtcagcagcagctcaacatccaaaaagtgcgtcgtgagttctttttctttacaccgaggtttcagctcttgtcagttgtcacaagcacaacctcgtcagctcgccgtcatcctcctctccgggcgccaccgtgcacggcgcctcgctctcggccgcgcaccgcttgtacggcacgaaccctctcccgctgaaggaagccgaactcgcgcacttggccagcagcgggatggcagcccgtagcgccgcgcagccgtcgccggtgttttcttgtccggggccgtggtgggactgcgcggtgtccgagttctgcgccgccgacgcggcgctggaggccatgttcgaacctgtcagggacctttccctctgcgcgcgtttgtgatccagaggctctgaagcttgctggtgctcctgagctgaagccaccgcctgcgggtagaacaccgcgcacggcacgctcccgctgtagccgaaccacggcgcgacgggctgcgccgcgaggccgtcgtgctggggaacgaagtacatgagctgctgcacctgcacgctgcccggccacggactccatgagctcgctcctgcggcaccgataggattccggtctctgcttgccttggcaacgctcgcagccgcaggtgaatagtccgttttcaggtctttcaccacaactttctttccgaacagcttcaagactggagcttccggtcctagatccgacacttcgtttgcttcaacgagcacctgaaattcacgttgaagcaa

SEQ ID NO: 5996 - DNA, 719 bp, Zea mays
cccgacctggtcctgggacagcaccgtcaggaagtcgctgtccgtgtggggcaccagcccgaaggtgttcgccgcgaacgggcacgccgggtaccgattcagccgcaggtagcaggtggtctcgccgcaccccgccgggaacgccgccgcctcgtcgtggcccagcaggctccccgccagcgccaccgccacggtcttggccacccgcgacatcgcgtccgccacctcctgcatcacgtccctgcatatatgggcaggcgggcagctctggtttttaggcgacacgacattggctgcttgtttttttaaaaaaattattattatttttaccacggtaaaaaatagtactacttaattactgagcacagtacactgctggccagttggattatatggcacctacacctacgtgtcattaggatatttcgctacttctccagcgtgttctgagggatactgatacatcgtgcgtgccggaaaggaatttaataatgtgcaagccggtgtctggttggtaggttggttggatggacacgacggcgttaaattaggttcgtgtactaaaagatcccatgtttcgtggtcgcgtacaccaccgcacacatgatatcaccaagcattgactcgtagcgccggaacataaaggtcgaaagccaagttcaggcaggcaggcaggcaggcggtgtacgtacatgtgttcgccggccgttgaactatca

SEQ ID NO: 5997 - DNA, 806 bp, Zea mays
cagggcagcagtgcattgcaggctttgttccttcgaagcgatcgtggacagatattgcttaatcagcaacttaatgaccggagatggagtaaaaccaacgcagtgcagactcacggcttgttcggttagctcttaattcatatgggttaggtgggtttaaatcctaaaaagttaaagtttttgtaaaatttttctaatcatatctaacctatatataatggaaataaccgaacaataacttagagaatttaaaattagcacggggcacagcacagtacgtatagctgttacgaaaggagtcgctgtcttttgcgttggacgaaacaaacgcaagagctgcgggaagacgacgacgtggttcccgtttgactccggcgatacatccattccattccattccattccaatccatccatccgtgggttactcgacctagctgccagcctgctttcaggtgggcaacctagctagcttacaattagaatcccaatcagggcctccctctctttcttttatggtttccttgtgttcttctctcctatgggtgccactatctggctggcttataaaaaaaatctaaaggggagggaaaaagaagaagaagaagatagagaaaaaaaatggtttggttttacaattaaacgccacttgtttgtagcgcagctgggtgatctgatgcttgcctactggagtactagtagcttagagtgagtagcacctaagcggctatgcctaattttgtgttttgggcttcctcttccggctttcttgggaatcccgcccttacttgctgggggaggaatttg

SEQ ID NO: 5998 - DNA, 728 bp, Zea mays
gcaggtgatttactctctagcgctctggtttgtgtccagatcttgcggaattgtgttgcgatgcgcccgtcgtccgtgtgtgcttgagttgtaggttggtgtctgtgtcctcggattatgattaatgcggttagacctctagttaattgtatcggtcacatgctaattttctcgagtaccctgatgtggttattttattacgtttgttttaatattctgcgtggttgattcagaactacttggctgtgtgcctacatgtttcacacttccacagcactgagttgaaatctaacataagcaagtcaaggtccagacacgtttaactattttctatgcatatattttgtactttaaagtcttcttttttactttttaagtcttcttttactgtctcttttcatgttaacttcagcctctctttctattactatctctttttatgatgctattatgatgtacccagagagatctccgctgcacatgtccaaaccatcttaactggtgttaacaaacctttttttttcaaccgtgctattactagcctatcatatatagtatcgttttgggttttcatctcttctttgatggccataaatctgaggcaacacaggcaaataattctgtaccattaacaacatgccagaatctaaattggttgttttttttttaaaattttggcccttttaagcctttctgggggggtaacccctttcgttcaacattaagaa

SEQ ID NO: 5999 - DNA, 814 bp, Zea mays
tgcacacatcgcatgaaccaatagatcaatacataaagaatatactgacccaaaaggaatttatctattcttctctgtgaacaagggtagtaactagccttataaaggcccaacaatagagcagccacaagttgattgcagaatgaggattgtatgtttctaacagattctgcaaactactatcttcagtcaagaatatttgaccacctttgacttggagtagtcttcaatacgtatatttgaccacctttttctatagattaaattcttcgaatttacgagattttgcaagtattttgatacaaatctacacataaaactttaagttcccaaataaataatgtaaccctaaacagttattattgattgtagtttccaaggtttagctaaatattttcaatggtgactggagggagtatagatgacacaaagtgtgcacaaaagcaatctaggctagatgaggagccataacactacctgtggccctgtttgtttgggcttttttcaacttccggccaccaaaatctgttgcggactgccaaacaccccagcttttcagtccgcttctataagaattgttttggtaaaaaccgtccaaaatcaacatgaacgcataatcggtcgagtcgtcacgatattagaaatacatcgctttctagatcattgaccctttggaccacttcatcttcctccgcgtgtaatccccacgatattcagattcttcccacagtcagaatttcttcacatccaaattcttaaaaaaaatagtagaaaaaagcctaactaaaacaagccttatatttgcctagttgcc

SEQ ID NO: 6000 - DNA, 777 bp, Zea mays
tgtccagaaaatcttgaggtacttgctctttaatcaaagtatcctgtgagatgaagtgaactagttgtgtcagtttatagtggtattttgttgtcttcattggtatactgcctttgtatgtttagatgacatgttcagtgactgaagatgggctcttggaaagtcttcaggagatgatttttcaggtatacctcccatcattactgctagaattttggtgtttaggctggatgccttcttttccatttctaatcgtattgttaactccaggtactgactgtttactgaactctggcgggactgatgaactgccagaagaatggctagttagttgatcacaagatatcgagcccggttttccggcagaagaaatgtacttgtttcattccattgttcataagagtttggattcctgagttgttgagttcactgtctttgaagatgagatattgctacttatggtgtcgaaaatcttcttagtaggaataaccctgctgctgcaacggaagaaactgccgatgtcttggcttggtacaaacctctcatgagatttcgttatccctgtttatagtggattgaaagttgctgatagatgaacaccatgcttatttcttggtgcaccagagctcttcgcctgtcgtagtccacgacaatcctgcatgctctagacctactttttttgaaaggtgcaggtgcgcccaactcttgtccacctttgcttaaagaaccctgggttttgtattctccctatcaagacagtttgatttggtatgtatt

SEQ ID NO: 6001 - DNA, 749 bp, Zea mays
attgttgagatgaaggtgatgaaggcgacgaactcggcgacgacggcccatggcacggtgaagtagttgcgctgcacgtccgcccacatcatgaagagcgggtgctggctccgctcccgcagcttgttcagcgtcacgcccaggtagctcttctccagctccgccgccgcctcgctcgccgcgcccacatgcttgaagaaccgcgcgatgtcctccttgctctcgctcccggcggactgcaccacctccgctgccaccagcacgcccgcgtcctccggcaactgcaccagcttcgccatgagccacacgtacgccgacacgtccccggcgcgctggtccgccgactgctcgaatgccatcaggttcagcagcagcggcgccgtccggaagtcgatccgtagctgcggcaggtgcagccggtcctcgtgcgccagcttcacggccagcggcacagggcccagcaccgacgcgatgccggccggggccttgcccgtgctgccgccgcgcgccttcttgaaccgcacccacattcgcttcaggtcgctcgctgacggcaggtcctcccgcccgtagctcgcgcgccaccggctatcctcgggcaggatcgggtacagcagcggcaccaggagcagcagcgggaggcgccgcagcagccgcgctgtctcctgcatcatctccagcgccgccgcgttctggtgccgctgccgcgggctccacctggtgcgcgccgcggtgaccatcgcgtggag

SEQ ID NO: 6002 - DNA, 802 bp, Zea mays
ccccctttgaagttgcaatctcgcctgcagcaaaaagcaaaagaaaagaaaagaaaagcaaaggaaaggaaatagctgttacgcgatgtaccgatcatcataaccattgtaccccgccacgccccgcccatttgaattccttttccgcctttcctcggtaggtgccgccgccgcagttcaaacttatctgtgcataaaaaaaaaaagtagtagcaacagaagcccgccctggtcgtttgaaacaggcctcatcaccctagtttctattttgtatatatttagcacccatccatataggatgttggtgacagtttatttattccttttaaatttttggaatgcgtcttggatttggatgtagcgcacgcagcttcacataaaaacctggaaacaaacttcatcccgctgcgctcagctctaaaggatttgtttggagacgacctgtgtctctgggcagtgcttcagatataagggcttctgagccgtgcatcacattcacagatgcatgcggtatgtgtttttgctctggataagataccatcttgggcttaatcatttgtcggttgtgctcacgagctgaagcccttcagacagttgtctggaaagctacatgccccccatccaacgatccagtggtgcttcaccggcatagcctctggtttcttccacgctatctccattacttcggtcgattggatccatggcgatgctgttcaatttgtttacgatgacaccgctcggagacgttacgaactgagatgagcagggaaagaaggtacgttacgtgttacgtccctctttg

SEQ ID NO: 6003 - DNA, 741 bp, Zea mays
  unsure (1)..(741): unsure at all n locations
tcggtaatttctccggtcgccagtatactgtagtattagtgatagataaactgctcggcccangcccaaactgcctgggatagttcaacgagtagaaggcccgtgcccatactgtacggctccatttcggccgcctgtctcgaataaaataatgcagaccttttggttcctggtacctggtaccacgttctttttttatatactaacaaagcataaaaataaaaagctctgctgtttcctgtttagccgtgctggcgtgctccatgccgtccacaaggcgattctcaaccgagtatttttttttttccccactgctccaaatgtgctgccccacccccacatacagctgccggttcgggcatcagtgtcggcgataatacacacactgctacgaatttggttctttgcaggtcaaggtaggatcgatacgatagtgccagcgacgtggtcaaactgacacgcaaatcgacaggaactgaaagttagctgacagaaattcgcaaggtctctgccagctgtcgtggctgggcctcaccggcaagatcactaaaaataaaaacaattgtagttctggcacgaaggcaacacgaagcacgacgtagaatgtaccaggcatgcgtttctgaagcgtacttggtttagaatagaatagcacaggtggtagggtcaaaaagaaacgtcaaagagggacgtaacacgtaacgtaccttccttccctgctcatctcaattcgtaacgtct

SEQ ID NO: 6004 - DNA, 794 bp, Zea mays
aggctggtgtcgctgtacctggccggcaacggcttcaccgggcctataccggcgtccctcggagacttacaggtgctgacgtacatcgacctgtccagcaacgccctcaccggcggcattccgacggagctccagaacctgaagctcgccctgctgaatgtctcgtacaaccagctctccggccgcgtgccgccatctctgatcaccgagcttcccgccgtgttcctccagggcaacccggggctgtgcggcccggggttgccgaaagactgcgacgccgacgcgccatcgcggaggcgtcagggactcgcggtggccgcagccgtggcgtcgtttctcaccggcgtggctctgctcgctgtcggggcattcgcggtctgcaagaggttacgcggcagcgagtcctcctcctcctcctccccgtggaagctcgtgctctttcaccctgtcagaatcaccggagaggagctgctcgctggattccacgacaagaatatcatcggcagaggtgcctttggaagagtttacctgatcgagctccaagacgggcaaaaggttgcggtgaagaggctggtgaactcgtcaggcaagctaacattcagagtagccaagaacgagatggaagcaatggcgaaaatccggcacaagaacatcgccaaggtgctgggattcttctactccgggtccgacggcgaggtcagcatcatatatgaccactcgcagtcgcaggtaggaaagcttgcaggatctcatctgcgcgccgaaactcacaatctgctgggaggacccggtga

SEQ ID NO: 6005 - DNA, 791 bp, Zea mays
gacctggttctggagcctcttgatgaggtcgatagcgtccgagagggtggactccttgctcatctgggccaccaaacgcacatcaggggcgcgtggccgacgaagaggaaccgtggccgtgagtgactgaccggtcaagtacagtacagtacagcaccttggtgatgttcggcaccacggccctgagcgcgaggatgttgcggttgagcttgccgcgccgcttccgctcggcctccaggttcttggacttgaactccgccgccggctggccgtccccgccggcctcctgcttctcctcttccccatcctcctcgccgccgaagttgagcaccgagtcgacgaagtcctccgccttgagctcctcgctgctgcgcgtcctctgccggcgcggcattccgcacggcaagaagagaagttgagtgcggcgcactgctgctgctatcccagcctcactgactcactcactcgcccaacgccctgctgcggttgcgtccggggttcgcggttgcggtggcttataaagggcggggcggctgaggaatctcgaacgcaactgggggtggcgatggtccttgttccccggggcgagttggttggaggcgcttggttagttacgctggctgtggactgatgacagtcactggtgcgggttcttggcccccccaaggccccagcttatggccgtctggtaatggtagtaaccgaaagatgcccaaggctcgagggcgtggttgggtcatgggaattcttcaatgggggtaaaaaagatcatgggagggtcatgaagatat

SEQ ID NO: 6006 - DNA, 714 bp, Zea mays
agggccgaacattagctatgttctgtacctgtgtatggctcagattgctacaatgtttacaagaatggtcgctggaaaggagaagcatacgcattcccagaagccagaaggtcctgtgatcctgttctatatctgctccgattctgagtggcagaaatgcagatcctacgctggtattagatgaagcaaatttataggaagtagtattctcaacaaatcctctggggcctgtctgaagtggtggctggctaggactgggaggcaactttgccttgctttgcttcaggggctggctgctctgatgattctcctctctgattgggatggtgcgcctgtacgcaaccgttcagggcccacgatactagatgtagctgctaaaatgtgcgtttttgccaacgatcataactaggggggggctgggcctgattctacgatcctagtcgatagattctacaacacagggatcttacgttaccaccagcacacatacatcatccctgaacggatccatggcttgggaccagctgatcaaaccagccatgtcggccagttgaccatgggatgttagaggccgatagacgatcgaagtgattgacctccaactccaaacaaagaggacgttcgtttgaatttaatccgaaactgcttttattattgcaaaaaaaaaatgcatttcagatgtaaacacacttatttgcggcctttcacatttac

SEQ ID NO: 6007 - DNA, 747 bp, Zea mays
  unsure (1)..(747): unsure at all n locations
actgcacttggagcttggagatggagaaaaccggtcatcttgggtcccattggtgattggccactccgaccatttccaccaacggtctggacgggtggactgaccacaagtcgccgactcgccatccgcgtcaacaccactgcaaccaccaccgccgtgtgggaggcccaaaccacgcgcctttccccactgcaccaggcaacccaccagcaggccgcagttcacgcttggctgacgaccgacccccattcgttctagccctccctccgacactccgatccattactcgctatggacgcggcgggcggcgaccagctaagcctggccgcggtgcgcgacgcgctggtgcggctggaggactccgtggtgttcgcgctcatcgagcgcgcccggcatccgcggaacgcgccagcctacgcgcccgccgccaccgctggagaacattcgctcgtggagttcttcgtccgggaagcagaggccctcaacgcaaaggcaagcctcttcctttttcgtgcttttcttgttcgtccctcagtttcctctgttattaagacttgtattgccttgcctggatgaggaactacgcggatggggccaaaccactgcgctctcaagttcttggtcgggcagaacctatcgtttgttattgtaaacgtggtcagcttacctatgattcaaggtggcaagatttttaaacgcctagacanccccgttggttgtgtttggactncagctgaaacgtagagg

SEQ ID NO: 6008 - DNA, 757 bp, Zea mays
  unsure (1)..(757): unsure at all n locations
ggtgcctgcagttaattagttgtcatctaatatgtgaaaaaccatgtctatttaattctttataatgaaacgggtgattagtaatgtccacatatattgatagtctatctaaaaatcctttgcaggatttaaaccaagctcataattccaaaaatgtctacaagttcctatagtgctaacacgatactactaaactagctacgtgaccttttgttaaataatgccattttttctcaaacactcatgagaacttcatatctttgtattaaaaaagaagaggaaggggtagaaccccgagtacagaattgatgttgctgttataaagtgaaatacagaattcatcttgctattgtcggtcctctcagtaaacattgttgtaatcaagatcaactaaaaggaaaactgtattagctgtcattttaacattttgattgcccctaataaatgtgaaaagagcaaactctaaggtcactatgaaccaaagtgttacaatggcactatcctcgctatttttagccctcttatctcagccattataggctagattagaggatattagaacattttaattcttttccctacatgcacactcacacttgtatacgaacagccatataacaatggggaaataattctgctcattctattagctttcacaaaggccatacttttaggtgcagatgaaattctttgccttcgttctaagctactgttcttggatattggtgcttatgactagaantgtacttttagtaaa

SEQ ID NO: 6009 - DNA, 750 bp, Zea mays
gggatcccaagcgccggcagcgcggagcggcaggtggtatgcaggaactcatagaagccgagcagcacgcggtcgaagaggcccgtgttcctgcccacgtggaacctcgtcttgcccatgacgtgcaccaccccggccgcgcgcgcctcctccagctccgccgcctcctcctcgacctccgccgtggaggacgccgccgcctcccgctcgatatgctggcgcaccgcccgcaccacctgcccggcgaggtcctcctcctcctcctcgtacagtgggccagcgtacccgtactggatcgtgcagccgtacaccccgcggggaccgaatcgccggaccgccatgcggctctcggcgtccaccttggccaccagttggtaccggagagtgacgaagatggtaaccccgtgcagcgaccgcatgttcttgatgtagtgcgccagcaccggggtgagccaccgccactcctgcatgttgctgtagaagaggcagagccccggggcgcggcgcacgtcgggcgcggccagcagctcgctcagccgctccagggtcaccttgttggccatctcgtactctgccttgcgctgccggccgtagtaccagctgaacatgacgagcgccagaacgagcgagatggcgaagggcaaccagccgcccttcatgatcttggtgcacaccgcgctcacgtaagtgcccttccagatgaggaaaggcaccagggtaaagcgccaccagcaccacgtgcgtgcccca

SEQ ID NO: 6010 - DNA, 717 bp, Zea mays
cttccataatctctatgagcaatagactggcatatcgattcagtaatcaactgtacatcagggatctctcctctttcaagtatcgagtcaagtgcatgctccagcaaatatggctgcacataaaatcataaagagaataaataatttatttaaaaaacaattcctattttggtcacttctaatataaaaaaggacagacccagtgttggcactcccacttaacttttgcagagagtttatatcgaactcgaccatttttaatatataataaaaaaaatccacaactacatctggcatgaagttgtagctatttagcatatgtcctttcaattgaagtacacaaagtgtaaacataaccaaaaagttttcagtgcacatctctactacttattgagacgatattgtagaccatatgcacatccatccaccctcgtcgtgttgttcgttcccggccgatgcgtgcagtgtcggcaatctcaccgtggccttgtcgcattgaattcgggtctgctgtagatatgcctagtcgacctgttttccttccctctactaagacgacatcggggagacgtggagaacagggcattcgtttggaattagatctatcgagttcctgtccctatttagggtggataggcatatgatacattctctttttctgcacatcttggtgcttttgttagaaggattcccagttttaggggcaattttgtaggg

SEQ ID NO: 6011 - DNA, 816 bp, Zea mays
agcatggcggcgctcgtcgtcgcggcgtacgggttctcgtcgaatccgcagggctcgtcctgctcgtggtcggagagcagcggcaccgccattggcggcacgtggctggccttcttgtagatccggcacagaacccagtcgtccagctgcaccatatatacgcgcagattgagatgatcaaataaaataggaagaggatatgtggagactaaaataatcaatgctacacagatcgggtgcagatggatcaacaatcgccaacacgtacgcatgcgcgcgcggatcaattgacttggcgcagccatatgcgccaagtatgcccaaagaacatttctttaagaaagaacgccgcgccacgcactaaagcgggccttgcgtctgttggcaagccacaaaaccgatgcgatcacgcgataaaggatattgacgtaatgacgtgcggggaacccgcgtcagaaacatcgccaaacaaaagatggatcggggtgcaagaggtgcatcgtcggtgattacatgcgcaagcagtgccacgaactgggacatgatactgacatgcactggtatatataactacatggcaagcaaaaggcaaaagctagctagtgtgagatctcatcattttgttctttgaattgatttagctcgttcttcatagattgtaagtttgcaaaaggtatggttagttcgagtacttaacaacgtatcgtacgtacccgcatggaggcgttgcgggacttcatggagcggtaagagtactgggcggcgtgtgccttggcggcggccaggccggattcgtgcatgatccaattggtcttg

SEQ ID NO: 6012 - DNA, 539 bp, Zea mays
catggcctgcagctccggtgagcatgtgcctccgtctgcccatgtgagctcacgcagccacccgttgcgtggccccaacctcacccatggccccacttgtctcctgccatgccggctctgctcacccacagcttcatccctggcagcgttggatccggtcatgccggctccgtctctaggagtgttggatccagctgcccacggctccgcccgctgctggccgtgctgtttctgcctggccaagttctgtatccaccagcattggatctgcccgcccttggctgcatcagctctctgctcatcccagtcatgcgtgcgtgcgcgagggagatgacactcacgccatccgagtggagcaagcacatttggcatcttgaaggaatattcctgtctgaggatggctccattcttgtgtccataaaccaaacactagagaaattgtgatggaatgactccattccaccaaccaaacaagtagtgggcatgtggatgtttagaaaaatgtttacttgctaacataatgactaacctttgaattc

SEQ ID NO: 6013 - DNA, 722 bp, Zea mays
agccccgtgcaagcctgcgctgccgtttgcttgtgcaagctcacgcatctgcccattgcgcgaccccaacctcgcccatggctccacctccattcgtctcccgtcgcgctagctccacaggccctcgactccatccctgacagtgttagatctggccgcgccgtctccgtctccaggagtgctggatctagccgcccacatctctgcctgccgctggctgtgctggatccacctgacctagctccatatccagcagcgctggatctgcctgtggctacatcagctggctcatcccagccatgcgcgtgcatgaggaagacgacgttcatgctatccgagtggagcgagtgctccggcatcttgaaggaatattccttgctggggatggctccgttcttgtgtccacgcacaaaccaaacactatagaaactgggatgggatggctgactccatcccaccaggcaaaaacacctttagtagtggttatttggatatttagaaaaaaaatgtttacttgctaacgtaataactaacatttgaatttagttcaaccttctaaattatgtgctagttgttggcgatctggtcaagatcaatgatactatgcctacccaagtaagaattaggatgtactgagactttttgaggttcatgttctagagggacaactcctatgctagtcactgggtctgttagatctgaaagtgactcttagaattaca

SEQ ID NO: 6014 - DNA, 775 bp, Zea mays
aagcaggacatatccagtgaaccaaaacaatcagtggttcgaacacgacatggtcacacgtaaatacaaacagcaaggaaaggatcactgaaacacaaacaaaattgacacaaatagtacaaacataatacacgggggataatattgttcctgcctttagttctatgctaatagcccggagttaacattacatttctgcacccaaaaacctcccctcactatcccaaaaactcaaaaggaaatgaaccattaaaccaacaccttattcctggaatcctgggacactaaatgacctctaatatacgaactcatctggtatattcacatctgatctgatactaatcagaaggaaccgagcagaacagacataaataagtaaagacttgcacccgattctctcacgccgaatactgtgatctcaaaggagcatatcggacctggcaggcagtcttctgtagaagttgaaaggcacggagggcatcctgctgcggaaccggggatgtcgaagcaggtaaagcatgcctatcaccatcagaacctggaacggcgtcacgtacagaacaacggcgaccaccagggacaagaaaacgaagatggcggtggcccgagggtccctccagctcagcaaagcatgggctctctcgccttgtgtcgccaggtccccaaccacggtctgcacacggccttcgatgctcctcagcctgtcgtagcgcatccttacgatttcagctggtctggaggaagggaatgtgtcgaactcctcgtcaagctcatc

SEQ ID NO: 6015 - DNA, 551 bp, Zea mays
aatattagaattttgtcaaacattgcagtgcatcaagtgactggaggggaaaaatcactagctttttagatagccatacaacatcaaaagttatggggataaaaaattaaaaataaagtacaacactaatgctttgcttttattttactggatagaaaatatccataaataaataaacaaagacaaatgaaaccaagaaaaagttgtgtgttttatcgttgattctgaacagagatatctaaagtactggaacccattgttagcaaattctacaaatactactgaagtaatacttgttggctgaccgcttacttccaggttccatagttgcggacagtaacatctaagcaattattttaactaagctttaagaagtgatgttgatgtagcatacctcttttgttgcacggaagccttcaagtttgtcactcacagacacctcagtaagtttggttgctctacagaacagaaaacacattcaaacattaaaacaactaaatttcaattcttctggcacacaatttagaaaatgtacattggagtcttataaa

SEQ ID NO: 6016 - DNA, 802 bp, Zea mays
ttccatcatctcctttgcacggatcagcttctcgatttgcctcacgatctgggaagaaaaattacacgagaatgtgcccagtgttaaaatcagttgtattcagaagttacaaggtgctgtgcctaattgtccaagataaagacatgtggtctgcaaagaaataaaatgtcactgacttacttcaaggaccatgtcctcaagcgtcaccaagtcaatgctactgtacccccgctgagaagccacatctgaaaggtgttgaggcatctcagaaaaagttcacccgattatattcaccatttactaaaggggtgtttgttcccctaactaaagtctgtgtcatattgaatgtttgaatgccaattacaagtattaaatatggtctaactataaaactaattccatagatgaagactaaacgacgagacaaattcattaagcctaatgactccatgattagcaaatgtttattgtagcatcacatggacgaataatagtctaatcaggcctaattgactcatcttaccgtttagtccttatctttagtctttatctgtgtaattaattttgtaattatactatatttaaaaattctaactagtattcaaacatttgatctaacgggactaaaatttagtcaggtggctccaaatgagcactaactataactcaacccaaatgagcactaactataactcaacgggaaggacaggcggtttgaggatctatctttactttgtactgaaacagtaatatcagaaaccccatagcgctctatcagttcatcataccgctgacggagctt

SEQ ID NO: 6017 - DNA, 547 bp, Zea mays
actgctccaggaacacgtctcttggaaccattgcactatcctctaccgcagctgacaaattatgcaggtcttcagggccaaaagatccaagtgcctttgagatattaattatgcagctaaaaacttcagaaaagcctgtgctgacagaggcttcttcctcaagaattgatctttcaagaactcggactgtgctaaactcatcctctaattgcttgatctgttcatttaattcactttggtcatcacgaagtgccatctcgtcttgtaactcatccaatttattctttaggttttcattctcttgtatgagttgattgatctgtgctgtctgttttgggaacttgagctccaagttgatgactttatcaacaagttcatcaacattctctgcgatctcctccgcagaggattcagacccactggaaaaaaacttgtcaagtttctcatatatgggctgcaactcaagtattgccttggtaactgggtaagatcttgccacaccgacgtgtctgtgctgcttgcctctcttgaacatctgtcagtgtcg

SEQ ID NO: 6018 - DNA, 658 bp, Zea mays
cagcttgcatgcctgccaggaaagacgagtagatggcgcagaagggcttgaggccctcgcaggccaggccggccgcgaacgtgacggcgtgctgctccgcgatcccgacgtcgaagcaccggctcgggaagcggcggaggaagtagttgagccccgtgccgccgcccatggccgcgtggatggccacgatcttgctgtcctgctccgcctcggcgatgagcgcctcggcgaagtagttggtgtaggacagcgtcttggcgggggacttgaactgcttcccggtcgccggatcaaacttggcgacacctgcacgcacgcacgcatcaaacaacagagccaagatgacgcacagattccggtcggggtacgatctgtgctgtgcaacaggcaaacagtggcacatatgctagctcatgtggtgcgttgtaccgtggtacttgtcggcggctcgctcggcgtaggggtagccgcggcccttctcggtgacgacgtggatgaggacggggccggtggtcttggtgctcttgacgtcgttgaggatggtgatgaggtcgtcgatgttgtggccgtcgacggggccgatgtagtagagaccgagctccttgaagagcggaggagccggggcccggctggatccatgcccgcggggccgttacct

SEQ ID NO: 6019 - DNA, 736 bp, Zea mays
acaactccaaacactatcagggccatacacagaactcttaaccaaggctgccacaagcatcagttacctgtagcatagatctgtgctccactcctgatgctctcctcccagcagtaccttgagctgttgtatccccgagattccttaaccagcgcgaaccaatatactgttgcgtgttctcctgcaaatgagatgttctgcacctatgtttgtaatgttgtatttctgggtttttaagctatccaacttggagatacaaccggtgaggaagcagcaacaataggtagttctacttctgagtgaggaaaaacaacttgcggctgagttaatgaagcttagtagctaccaccgttgtatgacagttgctcagagatgttatcttcattaagtgcttatattaccgctagttccctgtgaaatttgttaaaccattatatgtaagttttgtttgacaagactgcatctcctgaaactaagatcttagtttcctgctatttccctgtgaactgtgttaaattgtatgcaagttttctttgacgcatctcctgaaacgaaggtcttaatatatttctgctacccgccgtgtattgtattaaataatactccctgtgttttaaaatatagttctttctatcctattttttttcatccacattcatttaaatgataatatagatatagttgtaaattgcattcatatgttacttaatggatgtgtaattagacccaaaccaat

SEQ ID NO: 6020 - DNA, 754 bp, Zea mays
ttgcaggaaacaaaaaaataatactgtagtacttgttaattgaaattttcagcattggtgttggttgatcaattttacttgttatgttccaaacaacacctaatgatccttatgtttactatgtttgttagtgaattgctttcgacagaatggaaggatctattttgggattttattgacctctggaaggatctagagaaaggctctgaatgtttaacagcaaaatgctgtgcccagaagattgttgaggatgcccacatactactcaatgaaccgctctcttcaatttttgagttttctcttacccttcgatcagcatcaccaaaattagtgctttaccggcaacttgcaaaggagtcattatcttcgtttcctattgatgattcaccagagaacatttctggtcatggcactggaaaaacttttgatggggctgtggatcctggctcttctggaggaacttgctgctgggtagacactgggaatgttctattgttcaattcagccgatctgcatgaatggcttgggggattgggcaagctgtaagtccttcccttttcctttaaacttccccttttctcaagccgtaagatgacaactcagaagatttgttgaacagagctatggattctactgaacagcctgaactctttgaatttgaccatatatatcgtcgcacaaatattactgctccagttgctatattttatggggctgttgggacaaaatgcttcaaagagctgcattgtcaact

SEQ ID NO: 6021 - DNA, 809 bp, Zea mays
tggtgcctgcagaaatttcttatgtgttgcagaatatgcagaagtgattgccatttaatagaccaatatattaagaatatgccacaattaaaaaatatgtcaataacaaacctctgattcaagaggtttctctagaatatacacaagggagcttccatcaattatcagtgctaactcagtgccatcaaaatttgtcacgttctcactgtactctgacttgtcaccaccaataacaccggttagttcgaggctttgtgctccagtttcagacaggtgaccatttgagggcctcaatttagaaatatcaccatggtacatgtcttctgtaccttgcaaatcccgcccaaaatcagctgactttattccaaatttggctttagcctcagctagaagacgcctgcactcaacctcagaggaaccatttatgatgatcgaatgcatggtttgagtcaacaatcgacatgacaaaccaatagatatagcagtttcttgcttatctcctgtgagaacccacaccttgattccagcctgtctcagagagtcaatggcctcaggaacaccatcctgcaatttatcttcaattccagttgcaccaagaagggttagattgcattctaccagacctgctgcttgacggagctttgctgatctctcatgcatggaggtactagcttcttcgtacatttcctgccattcactaaattctgcatctgtcagattttttgaaccaatgactaaggtccgtaaaccctctgatgaaataagctgacaaatgattttttgtaccttctcttaatttaacatgcaac

SEQ ID NO: 6022 - DNA, 784 bp, Zea mays
ttcaatttagaaaactaagtgtagatcggttgtgaagccgagagccacccattccaactccatgcattattattttatttgttgtaactgataggcaaggatgaattttcctgttttcttaatcatattgtccatatctacaggctttcagaaattcgcttagatgtccgtagaagaatcttagggaaactaatgatggggttttgccagttgaggggctgttaattactttttactattataaagcattagtcttgacagttctacggtcgtccagcgtaatccttttacaaccatggttaggctcctaaagtttttattacggatctcactactctaacatgggaatcattcttcatttacatgcttaggcttgagccatttacatctctgcatctaaattttcaggttgtcactttgctcattatggaaatatttatcattgcttccttaaaattcaagcacatagctattattttcaaaacactattcacgaatttgtcaatacataatttctcttgtcgtatttcaccacagttcaaaataagggatcttgtcatattatttacatttatggctgtctgacacttgtgcagggtggcaagtttgaccatgcagatcgtttgttccaaagcattgagagcgcttacataaatagcttatcaaatacaagtgacgtcaaagagcttattccagaattcttttacatgcctgagtttcttgaaaattcaaattcatatcatcttggtgtcaagcaggatggggaacctataggcgatgttgc

SEQ ID NO: 6023 - DNA, 873 bp, Zea mays
gcgtaacaggctgggtgtcacagaagatgcaggccattctccgtcagttattaccattctctacacagctgcacttgcacgcaaatcacgctcagcaatctctccatcctcgtctatgataccttcatcatcatctcacgctcagcaatctctccatcctcgtctatgataccttcatcatcatctctgcctttgctgtggcgcaatggagatgcaggctcaggtttcccagaaggtttgacatatttggcatctgcctttggctgaacattagggctcatcgagtcactggctttgccattgtacgcaggactatatggagcagacttgtcatattgtgggctgggcgagcgatcaagatcaaccctttccatcttcccatctcccatgtggtcatccttttggtcagggtggttcacatggtcatccccagagtgagatcttggagggcttttgtgctctgcataccccaagttaggttgagtagatcctgaaataacagcagccttttcatgcctactgctagcaacagggctgtgactcttgctgcggctagcacgaaagtttctacagcttcggctcctgctcctgcttcggctacgcctagcttcatgatggtgtgacctcttggggcttgggctacgacttctactgcgacctctagcagacctacgagatcgcccatcagtttcaccagagtcatacctgttagcatcacaaaaaatcaatcagggtcagcatatggactgagtatcataaccttgaattagattcttctaaaaaaaacgaacttcagatatgctgatcttattactaatttgaaatcataacctccaatctgattcttctaaaaaatgaaacactgagcaaaac

SEQ ID NO: 6024 - DNA, 724 bp, Zea mays
ataaaattagcatcttgatttgagtagtagaattatgcaatttatgatcaagagtagtttagggtatcttacctggatttcgtaataagtcgaaggggtcattatttaagttttcccaagtcattttttgtcctattcatttaccccatcaatgccaatgttccactgtaaattacatcctttctgtatcaacttgagtggttttcttcctgacagacatgtttgatcctttcgtaatatgcttttgtactcaaatgattgagaattaaggccagctaaactaactgaaacagtatttgtctaacattttttaatctaacaacatgtgccagtgtataaaagaatgctttccttgccccgggttcgattcccctcggggacgaatttcgggcttggttaaaaaaatcccctcgctccactcccggtttacgccctgcgtgccaccctacggctgggccgttaaagagtgggcggtgacgtcccactagtgacggggtcagggtttaggggattttctcgaccaggaccatgtcttagtctcttcttaatataataccgggagggcagactttccctctccggccgagttttttacatttttctgatatgttttttcttcaagtgacgttagacatgggttgcatggcactactttgacttgttttgtccattctaattcaattgtactgcaactccagatctgaacagacatttggtacactcc

SEQ ID NO: 6025 - DNA, 704 bp, Zea mays
tgaaagacactttcttaggatcagctgttatagtaggaaggcgttttcccatatgtcatgtacatgagaacaattccatcgttgaggttcgtgcaactttttaccgattgtaaatttagcaccctctgcacaacacataactatagtcattagcttaatcttgccaaactgcacactttgttgttggcatttgctgaatcaaaattctgttttgcattggagtgggcaactaaaaaaactcggccggggagggaaagaccgtcctcccggtattattttaagaagagaccgaaacatggtcccggccgagaaaatctccgaaccctggccccctatcactagcgggccgtcaccgcccactctgcaacggccctgccggagggtgacacgcaggacgtaacccggaagccttaaccattacgctagaggccctttcgctggagtgggcaactagcaagatatatcttaattccttcttatttgcaggtgtcaagttttaatacttgtgcaaggggatcaagtggtagccagatttacaattcaaagagccaaaattgtagcaagaatgattttgttcgctggaagaactgccaaaggagggacttcacaattaatgggttagtacttctgtactttcaaatattatggataccatattgcagtttggaattttttcttgggagaattgcagggttaatggttaa

SEQ ID NO: 6026 - DNA, 1375 bp, Zea mays
aactgagttactgaacttttttatttcgttgtgcaagtgacgaaattcagtcttactgatgtggaaagaaagtagcactcaccttcagctgccagatttgcgacaactttcactgcatgaacgcggacatcaggttcttcagattcaagcaatgacaatatcttttgtaacccaactgaaatagagtgaagaaaattttaagcaccatatgttttgatatcaatagttgggatggtaaggctgaaacaagggacagggtgcttcataaaattctatcttaagtttatcatctgacaatttcacggtgccatcgtaaactcagtgaccttaccatccatcatataccatatttttatcaatagcgtggctatgcaaggatccaaatattacaaaaaggtagcacagtgggacaggtggtattttcgcttttgagaaaatttattcatcatattccatattgttataaacagtgcatctgcacgagtgtctttgcattcaaatatgatacaagtagcacagatggacaagtagtatatttttaaaaaaaactcagccggggagggaaagaccgccctcccggtattatattaagaagagaccgaaacatggttccggccgagaaaatctccgaaccctggcccccatcactagcaggtcgtcaccgcccactctgcaacggcccagccggagggtggcgcgcaggacgtaacccgggagcgggcgaggcacagcgaggggatttttttaaccaagccagaaattcgccctcgaggagaatcgaacccaggacctggaggtgctactcggaagccttaaccattacgctagaggccctttcgcacattactatgtaccagcatcccagatattgaaaaatggtaaattttaaagatatggaaagtgagcaataaactcagtccaaattattctcatgaaacaaatacactgtccaaacatgaaagccacacggagagattttattttgttagtaaagagaaattaggtatattatgctttggtcatattaaaccaagaaaaactaggaattttgctcaaatgtcaaaccaaaaaaagatcagtagcctttcataaggttcaagaaagagatgtacaacaatcggctcatacaaagggatggctgtagatccaaaagtttaatattctaaactcacatggatcttgttaggctagagggaagttatcccagttgccccaaaaaagcaaacattcaagtaacatgcatagtgaggaatagagtaaaaacatgatacagaatctgttgcattctcaatcgtttaatcaaaatttatcacaaaactaaaaatcataactcaagtaatatagcatgcaagggcaaattagttcaattgggtag

SEQ ID NO: 6027 - DNA, 711 bp, Zea mays
tccagatatcactgaagaagacgacgatgaccatgatgcaagagatgaagcacaagatcagatgcgtctaattctgaagtaggcgaaagggcctctagtgtaatgattaaggcttccgagtagcacctcctggtcctaggttcgtttaccctcggggacgaatttctggtttggttaaaaaaaaatctcctcactgtgccccgcccactcccgggttacgtcctgcacgccaccctccgactgggccgttgcgcagagtgggcggtgacggcccgctagtgatgggaggccagggttcggggattttctcgaccgggaccatgttttagttcttcttaatataataccggaagggcggtctttccctccccggccgagtttttttttttaattctgaagtagaaatggaggaggatgtacttttttggatctggattgagcatctaccgctgtaatgctactgtcacactattcttttacatctacttactcaagttatctgttattcctgcataaaatcagcaaacatatggaagctaggacaagaatatggagttctgatcttctggacacttcacaaatcacatctcacagatatgaaaccaactaaccagaaatagtctcaatgctctatttctactatataagtatatagtatatggtatatatagtagtgttattaaaactacgtttaaacgtcaaaactctaat

SEQ ID NO: 6028 - DNA, 752 bp, Zea mays
tacaattgtgagatatctaactggcactgcacattactctttcaggaggcagagaagcatctttcagacatggtgaactcaaaatctctgactgcgaagatcgacaggccgatgggagttgtgagcttccgggtagttcaggactgcaacggcacacttaactcgtgggctacaaacctcgagcagcttcttgaccttgtcgagaagagctgtcaccagatacacaaggagactatgatccacaaggcggtattgaaagcttgactgattggcgctggctgtttttgcttcgtaagtaagatactgtaccagcagaaggacggggatactatttgttgctgaactcttgctgcacattatttgaattcttagatctgcaatcagatacctactcctgaaaagctgatccggctcctcattcaaactcagttctccagtcttcattctgggaaagcaagaacgtcaattatttaaatattaattggtgctgccaagaaatctgtgcatgtcagtcgccgtataaccacatcctcaacattcaagttgggtctatgtgtctctaatctaatctattctacgagatctgtttctttgttttcgcattgtgcaatgttattagtggttttcgcccaattcgtcaaatcgcattagaaataatcctgtgcttttacggtgccccactgagggctagtttgggagaaaaattggagtgttaaaatctccttattttaagctagtttaaaaatctcata

SEQ ID NO: 6029 - DNA, 669 bp, Zea mays
caggatggccagcatcacgcggcggacggcgggcgtcggccggagcaggatctcgcgccgcacgctcgccgacgacggcgcgtcgccgccgccggagcccgcctgcttcgtggcctcctgcacggacgtcaagatctcctggagccggcggtccgcgtcccccaccgtgcgctccagcacgcggcgcgcctcgtcgcggtggccgtggaggacgagccagcgcggggtctccggcatggcaagcgcggccgcggccgctaggaatagaggagggacggcgccgatgccgatcatcaggcgccagttgagtggcgtcgggaggccggcgagcgcgaagtcggcgatgtagctcagcaggatgcccgagttgccggcgatctgacgtcacaaagcatgattataggtcacaagaaataataataactgtcaatcgtctcgatcgcatctaggccatttcctaaaagctgtcatcagctgtggcccccaaaagctggcgtccagtttgccactgatctagacctttttcctaaaaccatgcgcgcgcacgcaaaacctctcgtggaaaaaaaatgcaagtgaataaaagaatgcaagtggaagatgtgaaaaaaaaagcatcatggtgaataaaattaagcatgcaagttttgattggatgtcatctgttag

SEQ ID NO: 6030 - DNA, 723 bp, Zea mays
  unsure (1)..(723): unsure at all n locations
gtgccgacgcccagccacgcggggagcaccagccgcgtctgcgtccaggcgaacacccaggggatggcgcgcaggctcgagatgccgcccgcgggcttccgcttcgcgggccggctcccgatgttcaggtgccccagctccgcctggggcgtcgcctcatggaagtaggtgatgaactccgggtcctcgtacaccgtggaacggtagtgcgcgcagctcacgcgggagatctcctccatcacgttccgccagttggcgtcgcgcggcggatgcggcgggcgcagcgtcgctagcagcaccgccgtcgtgtagatctccagctgacgcacggccgtctgcggaaggccgaacttggcctgcaccatctcgccttgctccgtcgaacggagagtgccctgtgcatgccatgccaccatttctttttttgtcaagaagacacgtagaaaattttcgagtccttggacttgggtaactaaaaacgcagcaacagtcatcccactcaccatcactgagccgggaggctgtgactggatggccaggtacgtcggcccgccgcctcggccgatgctgccgccacggccatggaacagcgtcaccttgatcccgaactcgttgcacgcggcaacgacgtcttcctgagccttgtacagctcccatgccgncgtgaagcggccggcgtcctttgccggagtccgagtagcccaccattacctgcaacaggta

SEQ ID NO: 6031 - DNA, 597 bp, Zea mays
ggtctccaagccagaccggtaaccaagtcagcctagggtcgagtggaacatgtcttgttactcattcctggtcaccagtccatttttagatcagaaactaatccaggatacagaccacctagactagttccaggccgagaactgaaggaggagagttgaaattagataggattgtttccggcccagcttaaaacaaacaccgctaacatactggaccggattgtaactagactgatttattccacctgaaactagatccgaaataggccaaaccggccaaaccgaacgtagcctaaatttatataaattagtagtgaaacaatctggctagaaattaatccatgccaccaatccggaataaccgaatagagcctcaaggatctacctctcaagcctccaatcatttgacatgtacaaatgagcaagctataggattaaaataacttcttcctccggaactattccatcctcaagagggaacctcggtgacctattgtttggcaccaaaatgagcgtatggacggtccagccctgaggccggacagtccgcggtccggacagtccgcacctgtggtccggacagttcgcatctggggg

SEQ ID NO: 6032 - DNA, 714 bp, Zea mays
agtgtagatcataaagttcatgaagaagtctaggtaaggggttttctttgcgtataaaagttaaagctggggtacatgggtcaagaataaaatacatcaaatacaataacaaaaaattgcatcctctcatcaatgatattgaatttccccggagacgatcatagttcagtataatattcaggcacaaaagcacacaactaaatgattctgagcattgtcttttacatagatgcagacttaaaaaattaccttgatggtttctccataaaatcaaaacctatgatgtcatcaattccaagagccttgagttgcagaacaacatttgagaggttacaccgcttaatctcaggcacagtagaatccaccagcttatcaaactcactttcttggaacaatcggaagcacttccctggtccctcacgtccagcacgaccactgagggtagaatgaggatgatgttagaaaggcatgcgatgaaaagggacaaatattgatttatttggttgaacatctgcaaagtgcccatacgacttcttagcagaaccatatgcaacaggcaacagctataagaaataagatacagagcactcagtcatcacatggagatccattgatccattctaccactaacacactagtgtgatgacaaacgctccttaatagacttcttcaactctttgtgacctcgtatttaggaatgaaaaaaaagagata

SEQ ID NO: 6033 - DNA, 724 bp, Zea mays
agaacggcgatacgcggccgccgatcaaggaggtgttggacgccctcacaagcatccagggtgacgggctcgggaagaagactgacgcgctcatcgcgccgcgctcgcccgacaccgtgcacgctccgtgggatagcatgggtacagtacaaccccccgtactagccaatgagcaccttgacgagtgcacggtaccacagtataggataagatccgtgactgaaatatgtcatgactgatgcctcttgttgttgtggtgtaaatctctctttgtcccttcaaacagcctgtaaaggtatctagatcatccgtgttaaggtatcagactgttcacgatagggcgttggaccattcgtgatgcagatagctctcatccgataaacctagatctggcctttcgatagggacccgtcaaaagaagagatcgtaaagttgcttcagaattgattgacatggtgtgatcgtgtcttcctctctctgctcctggcttcgttttcttgtgctcattatgtcccagtagcttagcagatatggtaagaatctataaacagagcaccttatggatgctatttttaagaacctaaaactttttatggttagttgccttaagaaaattatattttaaggcttggttgaaaacttaattgccctctagaaattttggagaataaggggggaaatagctttaaaatcctttccggattcccttggaaaataagctaat

SEQ ID NO: 6034 - DNA, 756 bp, Zea mays
ctgcagcagcacgaccaccagctggtggctgtccccgtcagggtcaggaaggacggatgggcaagcgatgccatgctttatgtaagcgcgatctttcaactgcattgccggccatttgcagttttagtggcactgctttggattaggataataatagacgtggatggcaaatgtttgatggaaatgacatgtgtaactgatagaattgggtgtggttaactgttcaggtggacgtggagctcgtggatgcgaacacacgcccggacgtcgatagggcagtctcgttcagggagaagccgagaacgaacatggcgcctccgccgccgccgacaatgcgaggtagccgcaagagcttggaggcagcgacgtgccatgatgtccttgacctgaagcagctgcttgatctagctgagaaggaaggccgggtggccgtgtatggcaacagaaggagctccgacaccagcagcgtgagcagcactagcagcagcagcagcacgattagcgtcagcagtgctagcaccagcggcggcgcgagcccggaaccggcctcgacgtcgaagcgccggttcctgccatggacgaggaggagcagggacttcgacaagaggagcgccgccgagtcgctctcccaagaactgcctataaagtgcacggtgagcctcctcctggcacgtgatgggaatgaaatgctacgttcctcgtcatgtttacccgcgctgatcttgtcacggcgggcgacgaaccctgcgcaggacg

SEQ ID NO: 6035 - DNA, 852 bp, Zea mays
ttgcatgcctgcagaagttcagagcagcgagcaaatgtaaatcagcgtttactaatttgttagcttggactcagaaggatgtacaaattagacacgcaaggaactaactctataataatttacaagatatgaaaggatataattatagcatcctgttgatgaattcgttagaagtgctaaaccattgaagaccactaccaacaacagtatatataatgtactcttactgcttattataactcataattgacgcactactctttatgtaaaactacagtgcattagatccacaaaaagttaaaaacaaatcttctcttgaatgagcataagaaacagttgatttaggtgctatattaactaacatgtctcgggccctctttgcatcaaggggaacatatatgggctcgatgcaagtggtggaaattcaaagagcacaatcagatattgaaaacattccaagcaattaagagttacctctactagcccagcagcacgaaagagttctctcacagtatccaatgagaagaagtatgaaaaggtaccatctgatcgcatatattcccgaaatcctactctttgatgaggtaaaaaccgaagcattgtcatgtcataaagacctgatataaaaaaaaactatcagaaagcagttggttgtatgcagtgtgaaattataccgttgtatgtgatccagtaccgtaatccctaaacagaagaagaccgccgggtttcagaacagaaacacattgttctatggtagctggcattatgtcaaaaggtattggctgacagtgtgaaatatctgcccaatgataaaaaataaaaaacctttaacatctaataaactgggaaaaa

SEQ ID NO: 6036 - DNA, 754 bp, Zea mays
aaaaaggacgaacattgaccagatttaaccttgaagttgcagacatcagaatagactgacagcttctcgggatatgtgggatgagagctttcaagtcaacttcgcagcggtaggatagaagtaggtcagcctggcaactaaagattggtatattagtaacttcttcaaaaaggaacttgcgtgatgaacattgtaattaatacacaataggtgtggattctgatgtacatcacttcaaaaaatgttgtactccctccctcaaccttctaaggcatattttgatgcaaaaaaagttgtaattttgaccaactgttgtcaaattaaatgtatgttttgaagtcatattaatacattcataattttgaagtgttttgtagtaattgaaaatatactgtgaaaagaattcaaaggttcaaatatgattttgaaaactttacataccaaagtatactctacaataataaacagaaggctcatatggcaatgcagctttaaataaagtgtcaccagatatgtaaagtatgatctccaagtctttaaaatggtacaaatcaaattgttttcgagtcaagagtcaagtcatgcaactactgactagacgaccagtcgtggctagtcgaatataggtcgaagattatattttttataattttctatatatgctaatactaaaaacacgctaaaacactaaaaacaccttgtttagtatatcttcatccatttttattttctaccatatatcattaaattattg

SEQ ID NO: 6037 - DNA, 773 bp, Zea mays
aacaattccatgatgtacgccaacatcagcggcggcagcgctctgctcaatctcaccgccgacggcaagctcctgttcagcggctcgcagctcatcgcctccgaccaaggcaccaccaatcgggtgcggcggctcacgcttgacgacgacggcaacctgcgcctctacagcctggtgcccaagacccggaagtggctcgtggtgtggcaggtcgtgcaggagctctgcaccatccggggcacctgcgccaacggcagaatctgcgtccccgtcggcgttgacagcaccacttgcgtctgcccgccgggctaccgcaacgccaccccgacggacccctgcacacccaaggaaagatacagcggcaggggcgacgacgacacgttcgtgcggatggacttcgtctccttctccggggccgcctactcctcggcgtcggaccccgggccgctgatgaccaagcggacgccgcagaacctggcggtctgcgagaaactctgccggagtaactccacctgcgtggcgttcgggtacaagttcggcggcgaccggacgtgcctccagttcaccgggctggtggacgggtactggtccccggcgacggagatgtcgacgtatctacgggtggtggcgtcggacaatgacagcaacccgttcacggggatgacgaccatgatcgagacggtgtgccccgtgcagctggcactgccggtgccgccgaaagagtcgcagacgacgatccaaaacgtggccatcatcacggcgctgttcgtggt

SEQ ID NO: 6038 - DNA, 780 bp, Zea mays
gcatgcctgcaggtaccatcagattcgaatggcagagaaagcgctttgtgtactcctggaccgaggagatgaatgggagtcgagccagctctactagctggttcacacacacgatcgagccaaaacgcaggtggtagagttccttgaagcgttcccaagttagcatgccctcatcctgctccaacgtgcagtaccaagtttgggtgacaccggtgaggtggtacgacaagagccagacacacaaggacaaagtgtgctggcctcaaaagaattgctcatgcgattgagccaattcagggggtcctcggagccatcgaaggtggagaaatccaacttgtagaagtggagtgtccctaagcaaggcctcgtcccctgggactaccgcgtggcatgggttgtgcctatgaagggcaaccgagaggtgaaactcaaggatgggcacatgccaagatcgagggaaacaccatgccgagatcgagggaaacaccatgccatacgaaaatgccacgccagatgggaacaatgtgccccctccgaaggagcaacgcccaggccaacaaatatcgaaggccccaccaaggaaatggagggtagcagggacagtgagtgggggaactgaatttggtggatgggcaatggaatggacagcgatggttggtagcaagtggcatggtggtgatggtgatgcccaggacggagaaggttgtgatcccacagacgggcaacccatagagcatgtctagtggcatggtagtggccaacggcttgtgggcggtcgtg

SEQ ID NO: 6039 - DNA, 723 bp, Zea mays
tatatgccgttctctttcttctgctatacattcttgcggtaagttaaatggttttaaaacgagaaaattcaagttgcatagcaaataaatcatttctcttatgcagttgtattttgcaggacaccactttcatattttattacctaaagttatggagtgcttatctgcaaatttcttgctatttcaaaggcacgactgcttcttgaggacaggcaaggagctatacttttatgcacaacgatttttttttcttccaaaattcaaatttaaaagattcttctttgcacctcgtcataacaagggccaatagttgatcataatgtaagtttggctattgttgatctcttaaacttgcaaatatgaatgagcttatgttgtattcaactcaatccatatctttaagttaaaagccttagggaacacttacatgactttgttatggttggtgtcacctactaacgatgccaacacgcacgtggctaggcaatgggcccaaattatcctttgattggtttatttccaattaatttccattaaataggagatcaaatcctagattggtgtgtattaagaagggacacatattcctaaacggttgttgagaaaatcaagccaagcaacataattggtgctgggcttttcccatgcacctctctcactcgctctcacgctcacacggtgcttgctcgccgtgagggttcaagcccttacccatggtcacat

SEQ ID NO: 6040 - DNA, 785 bp, Zea mays
cacacccattagattaatcttgcggatcatcctcattacctttccgacgcgtcggattgtttcttcgtcctcggaggatgatgtgcatggttgattatcttcatcatcatcactttcttcttcttcctcttcttcacttgaggaacttggagtgggagccttctttttgtccttcctttcatcacatgcaaaagcatatggtcttgaggatgttggctcctctccccgacacatttttcgcgacatctcaaaagccacgattttcccaatcacaatggtcggggtcatgacactcaagtcctccatattgtgaaggatggtgatgatgctcccatatctttgttgtggtagcagggagataatcttcctcacaatgtccgcatcacctagcttatttatgccaatcgaattgagctcattgatgattagattcaaacgagaatacatgtctctaacaagctcatcatctttcatagcaaaagaattatactcatttaagactaggcaatgtttttgctcacggacattggatgtgccgtcatggagctcatgcaattttagccaaatctcattagcagtttttaaggtaaatacttgattaaaaatatccatgctaagagattcatacaagcaatttttggctctagcatttaaatgaatttctttttcctcactcgtggtgggtttctcgggattcttgaggggtttcatcccatcacgagtgactctccaaacacctagatcaacagcctctaggtaacaagccattctagcactataatatg

SEQ ID NO: 6041 - DNA, 710 bp, Zea mays
gacccgtttatcctttatagtcgacctgcagatggggcagtggctctccatggtctgcctcgtcaactccgccgtgccctacaccgcccggtccatggagcgcagcaccaccctgtccgtcttcaccgccacggtaagcacgcacgcagcggacaccggcggttgcgcgcagtaattaagcttaacgcgggacgacccggccgcttggcgtttgctactttgctctcgcaggagtacaacgcgacgatcgagttctactgggcgccgtacctggtggaggccaactccgaccgcaacatccggctgggggccgacggccgcgtgctccacgtcgacgccgtcgagctgcacgctaggcactggaagggcgtggacatcctcgtcttcgacagctacgtgtggtggatgaccggcagcaggatcaaatcagtgtgagtgatagatgaggcgcagccggccgggtcaatgtcatcactcaccgtttgcctccgccctctgatgtccgatgcaatgcgatgcgcgcctttcaggtgggggtcgttcggggacgacgggtacgaggagctggacgcctgggtcgcgttccggcttggactcaagacatgggccaactgggtggacgccaacatcgatcccaacgccacaagggtcttcttcatgtcgatctccaccacgcacatgaggtagcagcagtctagcaatgcacgcag

SEQ ID NO: 6042 - DNA, 956 bp, Zea mays
acgcccgcggccatcgagtgggtggagcagtggaaggcctccaacgacccctccggccgcttcatctcctcccacgactccgccgccaccgaccgcaccggagacaagctggcggtggtcaacggcgacgggcacggcgcggcgaacggcacggtcaacggcaacgacgtcgctgtcgccatcgcggtgtaacagtaatgaactggaggatagggacgaacgaacgactggtaggtgtggcgtacctgccgcgtgcccaccggccggccatatatatcgaatcccggcccggcgcggcagcacgtgctattgttacgttgtcaccagcgtacgtgtctgtgtagtgcctcgatcgtatctgtacgtctttaggaaaaggtgtgtccgtgtgtattgtatgtgtgtgagcaagcgtgcgtgacgcgctctgcctgtgtgacaaagcagagcagtacaagctcaggcattttctgtccgagcgatgatttgaactggatctatcatctctgaattgaactcggccggacgacgacctaccgtaactaaaattattcccagctggatttcggtacgtgtccccgttgttcgttctcgcggctgtgactgtgaccgaacctgctgctacaagtgcgcgtagaggatctggttccacgtgtccggcacgccgggcacgcaccagtggatgcagtccgtgtacgtctgcgggtcggccctctgcgcgtcggtgagcagctggccgccggtctcggagtacacggagacgtgggcgttgacgctgtgctccgtcagctgctgtgacgtagagcaacgtgacgggcaccccgcatacggcccaccacgtcggacatcacctccatcatacgacggtccgggccgctgccccagtaccccttccgctggactggcaacggcttggttgtaataaccggatgccggccttccggtcccagtaccta

SEQ ID NO: 6043 - DNA, 745 bp, Zea mays
cagctcgaaggaacgaaaccatataacgacctacaagccacaatagcccgacttaatcacaatccaaaaacctgagcccatagaacagaaatggcctggaaaggagaatgaaacaatctcagcccagcctactatcatccagccgcgacgccgtctccgcgccgcctatataaagaccccactccactagggtttctcgtcggtagccgtcggttcacttctccaggtaaggtaagccagccccgcgccgccgcccccgccgccgcgatctgaaacctactttctctccttgcgtatgccctcatcctcgcttctttgtttggcgcacaggaaagggttcgtactcatggcgccgccgcagccaaagtcgggccttttcgttggcatcaacaagggtcatgtcgtcaccaagcgcgagctgcctccccgcccgtgccaccgcaagggggtaagccaaccttcagccttttgctggtcatcattttgatatcgcgggtggtattgtttgtgtgattaagtgttagatgttgtggggtttaggatgcagacaagcagatatcttactagttgataaactgtgcggtgaaagtctttatacggttgtataggtttggttttaagtcttgtcctttgttcatttctacaacttaacaaaacacaattggacggatctgcaaatgatagtgtacgagttccactgtcctccatgctgatggaaggtctgtatgctgtaacatacggtaag

SEQ ID NO: 6044 - DNA, 569 bp, Zea mays
atcccaacagaaaattaagttatagatatactgacagttataccgtacaaagaaggatcttttctattaagtcaacataaaattcaaaaatattactaaatgtcaacataaaattcaaaaatattactaaatgtcaacataaaattcaaaatattaaaattcattactattagaagtataacaaatggtgcaaggatagtgtcaatttaaactaggcaaagtatataattgatcagatagtagaaattcaagacgtgtatacatatgcagatcagacaacattcggatagtataccacagtatgtacagtcaatatgcgctagtctctacacaaactcaagtggcagaatcaatatgcagaactttgattgatgtgcattaatgaaaaaatcatttggctaacaattaatcataattatgcaacaaattagcagaggcaatgaattaaccatgccaaagcatttgaaagacaagctaccgagcaatatttttgttttatcacaataaagttccacatttacaaacctcatcttcctgaggacgcccgccatctcctctctcttcttctt

SEQ ID NO: 6045 - DNA, 767 bp, Zea mays
  unsure (1)..(767): unsure at all n locations
attttgcctcgatttttccaactttttattttacaaaatactgatatagttccaaacttcagttataattggcacagaatgcacaaattcagtacttattaatctgggtttatgctgcttgatcttgttttctagattctatgtttaataaacacaatccatacactatttgtatgtttttgacgaacccaccattcaaattttttgattaggttcgtggtttccttctcaactttggcgtgtactatgctactagggctgcactaggtcttacattccaatggaggtaaatagtcactggaaatttctttggaactgtttctgcataaagggtatatttagctattccgtaatccatgtcccttacctagcagtagtaaagttgtgcttcatctactgacattcattcagagatgaacatcatatttaacctgtttggtatttttctatatgcagctcccctgttgctttcattacatgcttcgtgacactatttgctttggtcattgctataaccaaagatctccctgatgttgaaggagatcgcaagtgagtttgtaacttcacatagttcttttttttctcgaacacgcaggaaactgtgtatctttatattaagaagaaaaacttcttaatatggaattatggcagcatattttctctagtaaaaaatattagtatgatatgttgctttgattcggtgtatcactggtagttactcaaaaccttgcttgangatcccttagaaaagtgtagttggtttggac

SEQ ID NO: 6046 - DNA, 741 bp, Zea mays
tagttcttcctcctcacatcgtcgatcagctcctccctgctggcatcactccactgcgagtaacctgaaattaagcagcgaatacgtgtctcagaacatgtatatatacgcgactccggtacggtggaccaagaaacccctatagataggtccgtcgtcctatggcaaagccgcccaaaagctgtatgtagctcaccgttctcagtaatatacacaggcgtgcccttgtacctcccgttcacgtactggatagccagctctatggcctctgggacgtcgaagaaacctgccagcgcagtctgcgaggtccacatcagatcgatcgatcagagacgcacgcgccacaaatcttctagctcttattacgtatgtacgtacatctcccccgatcttgaccccgtcgtccctttccccggtcgccgagacgaaggcgttcccttcgtacgacccgaggttgcacggggagcgcaggcagtccctggcgtagatcgccgtgtagtggttcagcccgatgaagtccgccttgtaccgcagcagcagcgccttctccttcgcggtgaaggtcggcaggtccgatcccaggatctcccgcatcgctccggggtaatcgcccaagaatatcggctccagaaacctgtcatatatatatagtggtcgtgaagcctgacaacatatatagtggcgtacgacgtagttgcgcgcattttttgtggtggggagctgagctgactgggacatata

SEQ ID NO: 6047 - DNA, 717 bp, Zea mays
attccgcaaatgatatcatgcatggtaagtatactacagaaatttccggtgctgaagcaaaggtcaagtctgaagtgaactatgaggcctctgtgagtagagatgaggaattggttgatagtagtggaacatcaattgaaactgaacaaacaaaggttggtgctagtgaagaaaagcccaggacacaatcaacctttgagacagataaagtgaaagatggggggacgactaccaacacaggaacagcaacagatcaatgcagcaacttcggtactgaagaaaatctccccggtgaaataacttctgaggcacataaaatcactgacgtgaagatgactagcaatactggaacatctgtacagcaaagcaacattgatagtattgaagagaaggccagccagatcgatgcagtttctgatccacatgcacatataatccaagatatgggaatggacaccaacaatggaccaccagtagctgaaagcggcagtcctgttgctgaagaaaagccccccgaacaatcctcttcaattggtgatgtgtgtgtcaccgctaatgctggaattccaacagatcatacacatcatccaaatgggtcaactgaaaatgtagtcaggaaatctcccaacagagaactatatgaagagaaatcaggcacgctgtaatgtagtctcacccaaaggacaaaactctatgttttcatgaagatgaagcagt

SEQ ID NO: 6048 - DNA, 745 bp, Zea mays
tgttgcttagaaatctgaaaatgtatatgctcatacaaatgatatgtaaatgctgaaatatatgtaagttgttaaggaagccaaacctggctgaacccaggattgaattcagggtcaagggtcaacggtcaagcaaagcttgacattagagccttagctatgtgaaaaaaaaaactggtgacacgtcatcaacagcctaacagttgcaatgggcaaagcatggatgcaacaggcccatatttttctagaatggacaacccaaaaggtgatccggtaaaagtaaaataccatgatcaaaggcttcaagagctcttgagtaccatttttttcatggggaaaggaaagaaaaaggaactactaatcaaatttacagagatgattggaagacagaaagttcacaaatgcaacctgaacatcctcatgaatacaacatagttaagcagcatgacctctctttctaggcctgggaaaccaccccatatgaaattttggcgccatcctctttcgtaaagaaaagataccagtggagtcctgctcgaataatcatcagtaaggactaagaaataatctggtagaactaattaacaattgcagtctcatattcttggtccccagctcctcagaagaaacagtttggcaaacacttatactagtatgacatgcaacctttaaaaaactcagctagtgggggaaggctacccccacagtatttcaccaagaagagctcaaccgaagcccggctgac

SEQ ID NO: 6049 - DNA, 735 bp, Zea mays
atatcaaaactgagcacaagatttgaaccaaccctgtggatgggtccggccacccttccttcaaataatgagttgaagattacaagaacatagatgcgaacaaaacacctgcggatctctggctacactagggaatgaaactagggtattctaaacaaaaaccaaatgaacttagccaaaagagatggttgtccacaacaaccaacccatctatttaaagagaattatttcactagtctaaactacccctaaatacataatgcctatccacttagcctagggtgaaatggattatctcctgtggttttgatctgatggccacatgctccatacgaagttgcttcgcctcgagccctcgacgcattcttcgcgatgatgccacatgtcgcatttatttctcgtcgaaaccgcaccgccgagttttgagatccaaactcagcaaaaccagcagctgggtggttttgaggcccaaccattgaaatcgctgtgagtagcgtattgcatgcgcgtcccccacattctggacatgtgtcccgccagtccttgaccgcgctggtgacacgctccgccctatcacgtcctcgcgtctgtgcgtgtgccaggtgttagttaggtggtctgagtagtactcctcagtcatgggttcgacttccagtgggagcgaactggtatgggtgaaccgactaatggtggtcatgtgggttggggctcaaagcacgggtcaaagcccgaact

SEQ ID NO: 6050 - DNA, 803 bp, Zea mays
agctgaactttgtcataatttttagcaattttgagatacaaatgcctctcatcagtatcttatagtttgccctttcctttctgcctcacctagcagggggaggaattgcgcaagcacattggcgcaacttgttacatcgaatgtagctaaaaaactcagcaggtcaaattctttggttccattcctgtgcaacttttttgggtctctcgaggcttaagtaattatccctgttgtgctgtaatgggtgcatctattttttcgaaaagggaagcattatattaaaatcaagaacaatacatctgccttggctaagagacttctggcctctgctcgaacacacatagcccaaaaagatagagctcaagcacttttatctgtcaagggatgcaaacgattcagtgtaaaaccttatcatttgcttgttagttaaggaagaataatttggactgcatatatttcacaatgtacacatctcaaaaagggtgcctcttccatattattggtgtgattttttttatgaattggttgaaattctgaattcttgctgtttcatcttgatgtgcatcgatgtgctcattcagaattgtgtttatgtatccatgaactgaaaatcaaacatcgatattgaatgaacttggatgattttggcaaattgttttgtgatatattggtatgcgttcatgtgtgtcttaatgttatgtgatactgaattagtgatatcgaatttttggttttaatttcccagaattattaaagggccgggccagaaccttacttggttttaagggcttagaaaataatgg

SEQ ID NO: 6051 - DNA, 941 bp, Zea mays
atgtatggtctgtcactaagtacttgcaaaaatgttttttgtagtcattgtgctcctactggcactgtgcaatatacacttactagtcatgagcccgtgcatcgctacagtttctatattacatgtgtagtactttatatagagcaaagacgtcctgtgtcatttaaacgagaagcattcgccagtaggcccaccgcccacaggctaggtacaacgaccacctgctgcctattgactatatacatctatgtagtcgtcgatcgactttagatgtatttcaggttcgccctcgactccaaaccaacccttcatataaacacaaacaagcaagagctctagtggttagatgagaggaacctgtatctagacggccaggatttgatccttatatacgcatagcaccggttagtttgcctcaaaacactgccagctgacaacttaaggatactattattcatggaattgccacacacagacacatacgtctgattaagaaatggacaaatactattgtggccaactacatatcctatgtagcacagttttgctaccgaatagttgtgacaaaaaacggttacagcctgtcggatgcatacaactcgatcaaatatagaaacaggttagcctcccaattggctcagaagcacttactttttaattctagccaaaatttatccgaagtgctctttctcctgtcatagttttatacacatttatttataccggagactacagctaactgttagatgaataatatacgttagtaataatattgcgctagtggcacatgatatactttcatataactaataaatgttctttgaggacgctctataaaagtaatacctctatcaggtgtgcccaagatatcaaggttataagataatcgtctttcgtgaatatgttatcacgacactggacgacaaatatgtatctgcata

SEQ ID NO: 6052 - DNA, 798 bp, Zea mays
aaattcctcatcacttacatcaacttcaggttcctcatcagatgcagcactaacagaaacattaacttttggtatacctgtatcactcaaagcaacctgcatgtacatggaatgttagcaccctacaaatgtgctaattgcatcgtattgtgtccaactaatgcactgcccatcagtcatagcatggattttttgtgttttacataaaggaaaaaaaacactttatctcgaatagaatggtctgaggatatgccaagggttgtcatgtcacttgaccagactcttaaacaacaaagtgggattcacagaagaaatgaatcggtgaattttggggtagtaactcaatcatatacacagctcactgggtattgttaagctagcacaaactaaaagtagaaattttaggctccattcaaacagttgcaagaaaatacgaaatttaaaattgcaagtaacaagcaatacaagtcaaaaagtcacctttatcgcaacagctagcgcatctagcaaattaccatcagaactgaccacaagcccatcaatgtacagatcccagcagacctttccatcaacaacaattagggatgacagatcaattgcagcacctgaaatgagaatgtcgttacttgatgctgacagatgtgttatcaattcaatgcagcatagtcaattaaatggcaacaaaatattgttggtataagtttaaattgaaagaaaagtgtgtacacacaaacagttggataccaacatgagaatcaatttctcattaaaagattcttgactattagtcttgatcaa

SEQ ID NO: 6053 - DNA, 699 bp, Zea mays
aaatgtgcaatatgacttgcgaagataagactctttcttcagatcaatgccgtccctcctcgatacggaattctcctctatttcttttctactaaaataccatgaagcaccaagttgatcaccttctgcatgtctgtcatatggaattctgtacggactattttctacaattccattatgtgaaccattatgtgaagagtcactgctctgcatgataaccatgattatattcctcttctcaaaaacctgaagcaaagaagtgtggcatacagtgttactggttgcaaaatcaatagctaggtaaatgactgttcactgttatgcaatattaaaaaaaaaacagtgcatgtacatgtccaaagtctaaacaccagagtgcagcaatcacatttaggacttgtatgttattcaaggtacataaatgcttcaaaaaggtttacatatgggcaatggtaagtaacactaaacaaatgatgtcaccttaattatagagcacatgacaacaacctgcatgttcggattttctttctagaagttctttcctggttaaaccaaatggatataaagatcatgcaagttattggttggttgcacaatcagagttcaaaccacacagtcacatgaatcattcatatggctactaaacatacaaccagaactgtctaacttgcatgatctttatattcatttggttccacc

SEQ ID NO: 6054 - DNA, 734 bp, Zea mays
atggcggaggtgtggcgtgaagaacgcgtgcagatgaagcttgttgatgcaaaacttactctctacgcaaaatacacacagctgagcaaactgcaacaggatgttgaggcgtttattgctgcatgcagtactgctaatggagacgtcacggtagtagagcaagcagagagcataatacaggcaatcaagtcagtcagagcccaagatgctgagttcaggtatgagccaccggccgcatcagaagacatattttccatttttgaagagctgcgtccaagtgaggagcctgtcatcaaggagatcgagccatgttacaagaatagctctgccaaatgtgaaccagaaattcaagaggttagcccaatgaccgatatattcctcgaaaagaaagccaaggcaaactcgaacaaaagccctaaagatgaaagcgacactgaagatggcagcagctgggagacaataagccacgaagatgtccagggttcaagcggttcacctgatggaagcgagccttcggtcagcaacaaggtctgcgacggaagcattccttggaagagcagaaatggtttcgagcgtatggagagtgagaagctgaaggatgagtcagctgatgcctgcctgacaaacatgaaccagcccaagaagaaagaatcggccatttaaaagctctggaagttcgtcccgcccaaagagcatcgagatatgcaagaaagacgcacttgaaacggttaatg

SEQ ID NO: 6055 - DNA, 1362 bp, Zea mays
gctccatgttggactccagaagcagcccgaggaggtcgtcgtcgcccgccgcgctgccgcttctcagcgcgttctctctcttggcgatgatgcccttgaggagctcctcgacctctgaggcgatctgcttcatccgtcggttggttttcgtaggcaggtacctgcgcggaacgtgttatcttgattcttgaacaggccggggaagcaagaagccaagcaggagtgaagaggatccgggaagaagaagaagagcagctcacaagtggccagggatgtgaagcttgtgcatggcctggacgacgagctgcacctgctccccctggagctggaagatcctccggccttcgaggtagctgctgccgaacgcggcgcgggagatgacgtcccctgtcaggttctgcatctcaggccacacgtccacctcgcacggctgcccatctgcgaccaggccttcccacctctgcaccagctccgtgcagcacgcggcgaaagcgggtaacatcccctggcaacacaagacagaagatgatcagcgcgctctactctactacatgcatcctgcaaaataacagaaggtagaggaagaccttgagtttctcgaggtggaacgcggggttgatgatcctgcggtgcttggcccacttgtcgccctcgtggctgcccaggccgttgtgcagcatcctctggagcttgcgcaacttgagcttctcgtagtggccgaacttgttggacagcacctcgcgcaccagctcaggcttggtgatggtcaccctcggcaccggcccgaaccaggtgatcgacgtcttgcctgtcatcgtcaacagccatgcattttcatcagtcgtgcttctcagtgggatttttttttaatttctgctgggggacgacagctgttgcagattagaaaacaaaaaagtacgagcggaaacagccgacagcaaccagctgtggacgagcaggattggcaggactacacacgatggaggagcacattattgttggaattattagtagtagggaagtgtggtttggtgcgaggtccatgatccatctctcctgggtgcaggcatgtggttgttgacaatataatgaatctctacaatatcctacggtatactaacccacatggaaatttcttgtcttgtatatgactctattttcagaaaatgggaaaagtagtccaccagcagctatatatgtaaacatctttgtcccgtgtttgaaacacggcggggaacaagagtggagtgaaagaactggaaaagaaatgggaccgggtacctagtaagtccaactttttggacttcctcctccatacgatggtgtattggcaatgggaaaggacccaccaaagggtgtttc

SEQ ID NO: 6056 - DNA, 764 bp, Zea mays
  unsure (1)..(764): unsure at all n locations
aaatcaagaagaccttgtctctagcctttggctcctcgcatcttgcctgctaacaagaggtaggcgagcgacgaaattaacctctctgaaaggcacggtgtcctggctgttcatcgttatcgctttctggaacaccatgtaaacatcgttctgcgatcgcattgtgaagtgagctaagatcgtggatggaaattaaaaccgtaaaattgttcaagaaacggacctcgaattgctccagtgccgtgtacatgccatccctgttcttctgtctcagtgtcgcgaagtcaccgggcctgctcaccagctctgcataatcagtcacctgtagcagcatgtcgtcagtcttttcgcttgaaacaagaaacaggcgcatcaattaaaaaacagcctctccctctacgcgaatactccagatctaccatttcttacctggatgtcgtctggcattgcaaacagctcatgcctgtctctcctgaaagagacgaaaggacgcatcatcataataggaaaccacgcggtgcctgacggacaagccaaaagaagggagcctaataaagcttacatctccaactcgtcaaggatatactcgatgatctgtcctaccgaggtttggcttggtaagctatctgaaacaaaacaatgtgaaactcgcatgtctacgcatgcaatgcaacagtaaccgatggagataacaaagaagccaagtttccgcactggtgtttcctgcatacaanggctcctggcggcttgaaagaagctcttcc

SEQ ID NO: 6057 - DNA, 746 bp, Zea mays
tgctcgcctgcagcagtcaaagatcctgagccacatggcggttgttggctcaaagggcatgtggtccacgaaatcctctagctcaaccatgtatccatatgctttcccaacagctcgatcatgcattcatggtgttcgatccgtggaacgacgctgttgtactcatcagtcatcagagtgaagtaactccttcccaacccgacatgcccctcacagatacacgaaaccagagcaccaaggaaagtgacagagtctggtctaaccccctgcctccgcatctcatccaacagcccaagcgcatgcaaagatcatagaattccacaggatgacatcatcagatgaccctaactcaaagacccgggtggaataatcaaacagaaatatgttggctcaggctgcaaggccagagctgaaaaacgttgactggctaggttccgcctcggattgcatctcacgtagggcatgctgagagcgtcctcactcatggagtggcgttcgtaacctgagatgatcgagttccacgagtatctatctctctctgatcccatttcaaatataagaagacgttctggcatccacatttggaatacaacctcacaagtgcattcgtaaagaaggcgcaactgaacaaaccacacttgagagcgagtgcatggagctcctcacctttcccgaggtcaagcagccctgtacaggcattgagtacagaagcgagtgtaactacatcaagctccttcgtcttctct

SEQ ID NO: 6058 - DNA, 687 bp, Zea mays
tcatctcccgttcagctcacgcggcattgggcggccttctttcattacatccaccaccgattcaaagcggtgtccagatcgaatctagactccactaatggtatgggcacggaagaaccgcgtggagtagagtcccgtcagaacttttcgaacaggcataaggattcaaaaataacaacaacaaaaaaatagaggtgttctgttccggaaactatcgaccgatggctcacgcactagcagcagcagcagcccggaaccgaaatctaaatgaagcaccaacgctagcagcgcgcagcaactgtctgtctgtgtgtttttgaaacgttggcaaggaaacggcgaaatttacgagcaagcactaagaaagaagaagcggcggccacaccttgttccgctggtcctgctgcatccccgctggccggatctcccgcgcctaccgccggtgccaaacgcagccccgcacctctaaccttccgcggagctgagcacccgcctccgctgcggccttcggcgagggggggcggtagggctcctccgcccgatctcgccgcgcccccaaggagagaggaagaggaagggggaggaaagggaaaggcggagcgggggaggacgggaacgggagggagatttctttcgtgtcgctcgtggcttgttggccttggccgttatatgatgggggcccaggcc

SEQ ID NO: 6059 - DNA, 748 bp, Zea mays
tgaaggccgacctggccttctccaaggagcggtgcgcgcagctggaggaggagaaccggctgctccgggacggcaaccacgacgccgacgaggacctggtacgtgcccgatcgaccgaccggcctcgctctgcaaccagtggcgaatatgatggtgaggtgaggtcaagtacgcataccgtatgtcactcctgccgttgctcgtgttactatcagatacggcggcagctggagacgctgctcgcggagaagacgcggctggcgcacgagaacacggtgtacgcccgggagaaccggttcctgcgggagatcgtcgactactaccagctcaacatgcaggacgtcgtcaaccttgacgacgacgacgacgacatcgaggaagaagacgacgattacgacgtcgacgccgacgacgtggagttggaggctgaacagtaccaagatcgccgcaagtgcctgccgtcccggcttgtgctggaggaagaggagcaccaggcggccgatccaggcgccgaaccgcagtcgcccactgagcagacggagtcgccgcgaatgctgaacacgaacagcggcggcggcgtcacccctgaccacgaatcgccgcggatcctgaacacgaacagcggcggcggcggcacccctgaccgcgaatcgccacggatgctgaacacgaacagcggcgtcacctctgaccacgaatcgccgcggatgctgaacacaaacagcggcggcacccctgaccacgaaca

SEQ ID NO: 6060 - DNA, 707 bp, Zea mays
ggacccggggaatcctttaaagtcgacctgcagggtattgatcaacctcaaacttttctggatgttgacgaacctcgttcaaaagcacagaagtactgctcttttgtttcctgtacaattggaaccaagacttgtttgttttgctttgaaatatcaacagttcggagaataatatgtatctgacatctgtttaattgaacaaagccaaatactttgtcaattgtgtatgcacaattatttccgccaccggggcagatccatgaacaccgaaaaaaaaacacgtgtcacagttgttttggcttttgtttgatatatgttttgatctgtccatggtgggtccaaacggggtacatctggatgatataaggaattaaggatacccattctaattaaacaaggtgcaggttgctgatcctatttgtcctctaggaaatgccagtgaatcagacgttgtgctgaagagcactataggcgagaaaaccacaatgggactgaatcgcagcaatcagtcatctggaaaggaagaatatctggtcattgatcaggaatcttaacatctgaaataaaaatacctgatcaataatggttctttattttcacgctgatcaggtgaatcaagttttacattcaacaaaatccaaatggcaaatcagagatgaagaaccgtcaaccgtacctcgtcgtttttggcgaagaaccatcatgag

SEQ ID NO: 6061 - DNA, 559 bp, Zea mays
gttattgcttgcaagaccaggacgacggaacgagggatgtacagccagcacacgctccagatacagcggggtctgcatctcgataagccgtgatatctgcaaaacaagacaattaacgcaacaacgaaaagcgtaaaaaacccagtaaaagtggatgtctactgcatcttgtttgcagtcacaaaggctagaggaaaataagcatgtgaggccctggcttcatttcatttccataggtgctcatatgaatcatctgagtgaggcaagcaagcagcatcggtttcggacataaacactgattaacaaggtccggtacataccgccctgcggaacgcaaacatctcttcttgaccagacaatatcgccacaaggccggtagtagatggtcctgagccagcattgccttccgccaaaacatccctcctcagctttgtcccttcggactcggtttcaaactgaaaactgcatagcaggaccattcatgtgaaaaacaaaaaatcgctctcaattcatgtgcaattcaaattcagacttctacattccactgtagaggaccaga

SEQ ID NO: 6062 - DNA, 742 bp, Zea mays
agccgcgtcaccgccgccgccgccgcggcggcgcccgacgcgcacgcgccgcgcaccagggcgctgctggacggcgtctccggggaggcgagggagggcgagatcctggccgtcatgggcgccagcggctccggcaagtccacgctcatcgacgcgctcgccaaccgcatctcccgcgacgcgctcaagggcgccgtcacgctcaacggggagcccctcgtcggcgacatcatcaagtccatctccgcgtacgtcatgcaggacgacctgctgttccccatgctcaccgtcaccgagacgctctccttcgccgccgagttccgcctcccgcgggcgctgccgccggccaagaagcgcgcgcgcgtgcaggcgctcatcgaccagctcggcctccgcgcggcggccgacaccatcatcggggacgagggccaccgcggggtgtccgggggagagcgccgcagggtctccatcggcaccgacatcatccacgaccccatcctcctgttcctcgacgagcccacgtcggggctcgactccacctccgcgttcatggtggtcaaggtgctccgccgcatcgcggagagcggcagcatcgtcatcacatccatccaccagcccagccagcgcatcctcgccatcctcgaccgcctcatcctgctctccggcgggcagacggtcttcagcgggccaccttccgccctcccgtcctacttcgccgagttcggcttcccggtgcccgacg

SEQ ID NO: 6063 - DNA, 749 bp, Zea mays
  unsure (1)..(749): unsure at all n locations
tgagaagcacgtgggggcggagtcgaagaaccagaacggtaacatcctcctcatcaacgacaagttgctctacgacctgttccacgagctcagaaattggcccccttgtgcggaggagttttgggcgaccgccggggtactcatgactgtgcctgccaccgaagcctcatctgcgccgcaggggcagcaagcaggcgcgcccgctagctgggaacccaacggggttcaggttgacggcgtgacggtggatccccctttgcctggacggggagccatggtgatgctgaccgaggaggagaaagccagcttgtgtctgcttggtttgaagtgagtgattccactgatcgatttgttatggcaactatctatgcgatggtgtaatttcgtagcgaagtgttagaccttcagtgggactcggggacatgtgttcaatcataaactggcataatcagacaagtatttatgcaattatctatattagtactcgttgcatgttacttagttccttcagtttttaagcaggcaaagcagttccacggctgagttggacactatatgcggcattgaagggcctgctgcggaacagatcaaagatgaagcaggtggtgaccatgtgatgcacgatgctctagtgggagtgacagaaacagagtatcagctagacagtgaccttagagatgttagaggactgctgtccactggacttctttgaagtttcagggtgacctacatgaaggatgangtgtgtg

SEQ ID NO: 6064 - DNA, 796 bp, Zea mays
aacccctgtgaactagaggtggggtttcacagcaagatgaagttagcatgaggagcattatgatgatttaaatgtaagtgactgcaaattggcagtacacttcatcgaaatggtgaaaaggtttgctaaaatagttaagagatagaacaacaaattagcaaggatagggatgtcagttcaaagttaaaaatcaattctcactgaaaatgcatccaattagcccaagccatcacttgcaaggtttatgggcttacggagtatatacagaagctgaagccccaaaacaatagtaggtaaaactatggatgcatatatactatatagaatataggaacataaatagatcttaagataacatggcacagtatatatgtatttataaatctgaacttaagccctattgaaattttgcaatgcaacctacctctgagtcaaacaaccatctgaagccacagcatctaaataatcttttctcttctgaaatgaagctaaacgatcaacaagatggaagataggacaaggaaaaaattagcacattctgagcaacacacaaaaccaacagatccttaggtgctagctaaaatacctttccacttgttatactcatccaaattaggagggaaaccaatcttctcttcaatgaaatccccaagcatgttaagcttacaaggtttcagtgcttccaccaccctgaatagagaaatcccggtatccaagaagatgtgatcaatctggttgtcaaatgactgaccataatgctccctaaactcgcacgcattcataatctacaatttat

SEQ ID NO: 6065 - DNA, 744 bp, Zea mays
cttgcatgcctgcagccgcgtcagcaggttctcgtccttgttcacgaagctccaacgagcctggaccagaccaagctccgggttctcctgcaccgttggaagccgtaggttaggtttagtcagcgcgcggcccatgcatgcatggatcgggacgtttggagatttgtcaaagataagactattaatttgtctcagtaccatatcatcgagatctagattattaagatactgtattaggtcctacgatccaggccggtcattaaggtgtccattcttttgtcattaatatattgtgtgcaccaaccaatggcctaagtcaaccgagaatctgagatttggacgtacgtacaagctggtgtttcatgtcaccgtacctatttggtttttcctccactgagaaatgagctaaacctactgactagaatgagtagtgtcgttgctttaattagggtcataaaccgagttacagatcacaatgttttatggaatagtttacatgaatctcgatcaatctagctactagaagcagcgcacatcacaactatatgtttgcagtatatatatagccacgccgccgcaccatataaatatatatacttacttgcgccgacgacgttgagatgtggatgtgaatgtgatgactgatgagctataaagttctagtgtagtctgtagaatacgtctcaccttgaagtgtggcacggtgagcttgaggaagtccgggttgggctggaagtcggcgtc

SEQ ID NO: 6066 - DNA, 451 bp, Zea mays
taaggtaccttccaaaatctcagccaaattcaaaaactgcacccagaaagcataggaaaaagctccctgaacatcttgaacccaactcaaattagtcaaggcatccttcaccaatctacttttggtaaccctcctaggaatggaggcaaacacagccggggcaatctcttggatgcagtgcccatgcagccatttatcagtccaaaaaagcgtgtttaatccatttccaattacagtgaacacagcagaattgaaaaagcacaccacttcctttgtgaaatgaagcggaaacgcagcccacggcctccctggatctgatttctgcaaccaaagccacctgactctaagggcccaaccaaacagttttaaatcaaaaagaccaagaccacccaattctttaggacgagtgactttactccaagccaaggaacagtgccctcccttgatttct

SEQ ID NO: 6067 - DNA, 871 bp, Zea mays
tgctcggtacctggtgggcctcacgagtcgacctgcagcccgcctccgtgctcgtggaggtccaggcgtggcccgactacggctgcgcacggatctgctcgcccaatctgcaacaatcggccgcaatggtggcccaacatgtagaggcgctgctgcgggataaccctccacgccacaactaccaatcctccgcgccgtggccatcaatcttctgcaccacggacagccatccgctgcgtcgtcgcagctgtggtcgacgtcagccaccttggccaccgccgcggcgtggtcacctgagctacaacaccggagggtgccaccgaccttcgccaggcgcagggagccctctgcgccaccgcagccgcgtccgtcatcggtcgatttggccgccgacgcgtcctccttcgatagatccgaccactgacatggttcaattttttttctaggtgaataaaatactaagtcgagatgtaaaagacttagtattgagtcattaagtgctaatttagtatgggtcaattcttcttgactacagctcgcagacgagccgtttttaaggagagatggaatgttatgggccttaagcccattatctaggtcagtatagttaggttagccgcgaccactgttcacgtgcggtttgttatgttgcttagctattaagttagggttacctgaggggcagggtgttagttgagataagcaagaagaatagatctggtttactcctagaacctcctacgagagggccgagtaccgggactatcttgcgagtgcatcacagttcacaacagtgtgccagccagagcacacattgtgaccaacctggatccacatccatccggcaggtggactcaaaggatcaagggtc

SEQ ID NO: 6068 - DNA, 794 bp, Zea mays
attgaggagccggaggaatcaaagaacaatgcagcagcggttgtggcgttggccccagtcccttggctgcctgccgtggcggagcggtacgagcgccgcgagaatctgggcgaaggcatgttcggcgacgtgtacaaggcctgggaccgcgtgcacgaccgcatcgtcgccgtgaagaggctctcggggaggaccgacgaccgcttcgtgaagacctccatccccgacttggcgcgagaggtcatgtccctggcggcgtgtcgcgcccacccttccgtcgtccagctcctggcgacgcatgtcgacggcagccgcgccgacggcgactgctacctcgtcacggaacacgccgggcctatgaacctgcgccagtacatggccgtccgtcgccttaacggccagccattcggcgaggacgaggtgcgcgacgttatgaggcagctcctcgccggcgcagagcacacgcacaaggcgggcgtcctgcacagggacatcgtcccggagaacgtgatcgtctgcatggacggtgacagtgcgaccgggaggatggtgtacacgatatgcggcttcggtatgtccaagccggcggggcaaacagagaaggacgactccgggctgttggccgtcgcccagcccgtaccgcgcgccggagcttttcctcgggtgcaaggactacgacgggcgggtcgacacgtggtcgctcggctgcatcatggccgagctcgtcaccggcgcccgcgtgcctttcttttgcggcgcgctggacaaagaggtctttgacaagatgatgcacg

SEQ ID NO: 6069 - DNA, 727 bp, Zea mays
tcttgcatgcctgcagagcaaatccaatctacgacagtccttcccgcgctcctctcatcgcatcctcaacgacgacccgacatagttcacactgtccgtcggagagagagagaacgagcggaggactgacactgacctgcgatctgcacgtggacctcgtcctccctgttgccgcctccgctcccgccgctgccgtcgtcgccggccatgccgctccccgcgcgcgatccgatgcgagtgggctgtgctgcggaggacgcggcgagtgaggaggaggcgaagagaggcgcgagcggtcagcgactcagcgtgggagcgccgcacggggggggtggaaggttggaaaagctgcgcacctgcctggcttccttcgcgtaggaagtaggactacacgagggagaagtccagggcaccgctctttttggatggacgtggacccttgtagatgggagatggcaccgcgggcgcagcctttccgcgtcgctgtcgtgtctgaccaaggccggacgccctttctgattcgcccgctcgcggtcgcaacttatttttcctgcgtgcggccagcggtgcggggccttgacggtgacggattggtttgttttcggcagtatgccggagttgaccatccaaacccgactccggccttctccaaaaaaaaaacaccgaaaaaaggtgcttggcgatgatgtgttggaggagagctgctagcggttgtcacacgaatcta

SEQ ID NO: 6070 - DNA, 752 bp, Zea mays
gcatgcctgcagaaggttactaaattagatgatgatgcacaggattagattatctgttacctatccaacaaaaaaacaaaaaaaaatcacatatacatttctggatgtccaatcactttatgcataagttatgagagaatcatttctgtgatcacacaatcatagagcattcaactgactgacatagtaaactgcggacagcatgaatagacattgttataacagtttatgtggatcagtagatatgataagtttacagtacactacagttaagatattgaagactgcaaacgtatcgctgcaattcagtactttgttagaggctttcctttaagcacaaatgaccagattgaacaaaaacttgagtgaagaaaaatgtgtatcataatagatagataggttggtagaagcaaatgagataagtagatagataaacaacctggatttctcgcagcaaaataccatctgtcatgaacttgatggagcattcacttcctacctttctatcatgcctaacttgaaaaccaacttctcttcccagcttaagtcctaactcataggaaaccctcttagctgtggcatgaacagctacgcgccgtggttgtgtgataccaatcatcccttttctatcagctcggtcactagtgccgaagccagcttcgtataggaactgtacaacatagagagcataagtaacaatgacagatttgactacaattagccatttaacacaagcagacagcaccaaaagt

SEQ ID NO: 6071 - DNA, 718 bp, Zea mays
tgcatgcctgcagtgcagtccaattggcaatgggtccttctgcaagggaaagaaaaaaaactcagaaaaatgtctaaatattcaattcctcatctactccgaacttaaagctaaagaaaattgtactcaggacagtgttactaataacaagtatgcatacacattaaaacaagagcagcaaaagaaacagaggagccaatcaagagagagtatgctttaagcttatggcaaactcataagtacatttgacatatatgcagctgcttggagtgctagagagcttgaaaggaataacatcgaaccaagtcgcttctcagtgcgtgctccagtcatatacaagtggaaatgcccagcttgtgaatagaactgatgtgcagacactctcgcagtttactgcgcatttcataagcgatacaaatgaagacagaggttgcaactttgcagcatatgtacccttagaagagggcacaccattgcaggtaaaacaataaaaggaacctgagttcagtctggaacttgtctagttatgtacagcctaaaactatatactatctattaaatggttctctccagatggctgagtggatcaagtacctgggaactttcacaaattctgaaaacagggctaatgctgtctacgatgcagttaagaccactaaatgcatctttatttggattgatatgaataagtaataaagtatggttctacggcatctga

SEQ ID NO: 6072 - DNA, 673 bp, Zea mays
aagcatatgtctgatctatgaccacgtccactgtctgtaatattcgtgaaccaagcttagttaactgttactaagtgcagagtcatttgaaaaatgtgtcaagtaatagatcatttggtgttttgcaggcattgttcatttgatacaaccagtccagtttatttcaaatattaattatgtcagcattaatcccttttatggccaaaagaggatgtgtcttttgtacgtcacacactcacatgcaacagtgagctcgtcaactaacattacagttgtaatattacattctgagtgattgatactcacacacagaatagcatggaagttatccatatcctctggatctgaactattaaatctcttatccgtaatagttgcatcaacaatttctgctcctgcatctgtgacatactgttcataaaaaaaatgaacatcagtgatccatttttttttttgatttatttgagtgctactctttgagtcttcaatagaaagtgcgacgtgttacctgtaagatgtaactttctttaacaaatgtccacattccctacagcagtagatggagaaggcttaatgattactaagcatgcattttttaaaaaagttactttggatgaagaagttagcattttactggtttgcagctgcatacctgtttgaattcaatccacgc

SEQ ID NO: 6073 - DNA, 825 bp, Zea mays
atggcttctgctattgcttggaaaccaacctataaaaaaacacgtattgcacaaaggtctcaaggatcaaacagatcaaaaggaggtgtaaactgggcatggtttttgaggcgttgcggcgtcccatggcactgggggggtatgcctggacgcctacgtgatatggcataactaaaaccttgtggcatcctggggtatacctcaatgcctaggtgacacctcaaaagccatgaaactgtgaaggcattgactgcatcactcacacgtggccctaggccccatatatcatcctcaagttggatgctacttccaaaatttgcatatcgtaggactactgaacattttttcttacttaataacatgcacaaggataatcctgctgattagtcactaatactacaaatttgcatttcacctatgccatctgaaatatagaaatgcctattgctacaatcaaactctaagggtcctgaatagcaacaagaattccatgggaattttgatttaacatgagttttgaagtgcttgtagtcaataaaaacatactactattggtcttcaagactagtttctcgtgctacagtagactcataatctcagttggctatcaagcacataaactatgtgtaccaataagcaaaaggtcctagggcagacaaggaaaagagcataaagataaaatggttaccccttcttttgaaagattaggtgatatgagaggtattaatatcaacaggaccaccacagccaaatcctggggacaacacgagaaaatatattaaaaggcaagctagattaacattactaaaggattgaaggctcgca

SEQ ID NO: 6074 - DNA, 725 bp, Zea mays
tgttggtgtgatagctcatcgttttgctgtgctaccaggaccagcagcaattgttgttgggagtggcttggctctgtcatccacggctgttgtcttgcaagtacttccttgaaaccacacttgtttattaaagttaaactcttgtttctttgttactgatcgaacatatgggcagaaatatatacccctgataaatattctcagctaatatgacttgccatttagtatttaagaagctactagggaaatttgttttcttgtcacgcttcaaaatgccatgttcaggcatgaactaggtttcatttaagcgattgcaaaattctagtccctccgatcaaagacatttttacattttggacaaaagccaatgtccccaactctccattctgttgctttgatcactgtttactatttgtgatgcaatcaaattgatatattatgaaagttcttccaacccatgttttttctgtttccaattcaaatattcgattggaatcatgcctgattcattatgttctcatgactgggaattatatgtttatctgtactttccaagttttgtgatgatcatttgttgcttggcctttaagcatttactggtctgattttctaggtattgcaagagcgtggtgaaagtacgtcgcgttatggacgtgccacattttctgtgttattgttccaagtataatctcactgtgctcagatatgttccctggttttgaaaa

SEQ ID NO: 6075 - DNA, 768 bp, Zea mays
aatgcctccttttccaataaaggacatctaatagctgtttttactgggaagggatctgctgtcttggtcttcatgaatctgtgctttgttcctctctgcctgtgtcatccgctgcacttgacctcaccttgccaaatcccttgggcttctctctttaagtgaatcacaaggcgatggcagtcatgaatgcatataaatcagacatgggttgcatcacgcttccatacacaactattcaataagtatgttgcaatccatgtattgtgaggaagcatttatttaccttgttcactgctgtgagctgtccttgaatgaaagaaggtaattattttaaaacaggaaagttatattaatattttaggggccacgggataagaaattagttttttttttgttagtacctcctatatatctcaatggccaaagtggtcctctgatatttgtttttccatttttctctcatatgtaaattcttttgtttgctgctattcatgtacggaacacccccaaaaattaccataaacatgcagttgaaaacatacggtcaatgctgtttttttaatatgtatacatattggtttattatctagatatggaagaagtttgaacacgttggccaagaaatggctggtctggcaagcagtctcttactgatttcacaagcttctaatcaaaagcaggtaacatgattttctgttggtgcttcattggcataatttatggtgatagccacatattttgattcatggcattgtatttttgaaatcg

SEQ ID NO: 6076 - DNA, 799 bp, Zea mays
acttctcatacctctgcatcccgttcgccgacctccatgcactacacggcgtgcagaaccatttacctctcgggacagaactgcgcggtggatccatgcagtaagtgtggtaagcttcgtcacagccatcacacaacactattttctcgtcgtccttgttcttgaagcagcgtctgcacaggcaagatgggcagtaccagcattttagattcctctgcttctcgcttgcaatctggctttctttcaggcacagggcatgatagaacttgaaagaacagtagccatgcccgcataccacaaacttcttgttctcatcttcacacgtgccacaaagcttgcacaagtttgctagagcagttatcgagaggtctggttcactgtcttcgacaatgcttgacactgagctctcctgtgttttgacggccaattcaggttcttcggcaggttcttctggcttctccacctcaagccactcgcatacatcgcagccttcatgtgctctgccatggttgttgctctttaaaggtacgtccggttcgacgcaggtgggacagtaccattttgctggggcctcttcatcaatggcaagcttgagacatgaaacatggtacacggcttcacacctatcacagataattctttctttggttgtctgcctttctaccacaaatccttgcaaattcccattccgatcccaaaatgtcccaatttcggtctttgttatccgtagaaaatagcccagaaatccgcatgggggggagttggaactttccctttaggggctttggcggggtggact

SEQ ID NO: 6077 - DNA, 824 bp, Zea mays
atttgcattcgtaactcaattgaatcaggatcatattttggggactcattccacattcttttagcatggtgtttcaatcgaggtgagacctctcgttgagttaatagatgaaagatgttcctgatcaagccagaaaaggcagaagttaattttaccaaatgaacatatttgaaacaatacacctaccaatattaattaactgttttttctcaaacgtgcaagagaattgtgcatcatttcattaagagagtttgagagagaaaagggcaatagtgcaaagaaagaagaccccccccccctctcccaaagggaaacactagacagagcaactagccttccacaactaacaagatgacctgtggctgtgactgaggcacaaggccaaagaaaagtagtctagtacaggcaaagcgacaggcaccaacagaaacttaggaaaaatcaacccacaacaagctacccagtaccaactcctggagtccttttgcacccagagaaccataggatgtattcatttgtgattgccttcagcagtgttatcaagtcgtctggctacttgtgattaatcacgactagtcgtcctaatcggtagtccaaactcaactagggggtatgacttgattaaggcgactacttttctggtcgtcgaacgactaggtgctggatgaccagaacctgaattgaattactgggtagctgagacatgggctgtatctagaacttagtaaccaggttcccggatcgatggggtcgaggaacaggaacgtggtacggtacttaaataagatttaacactacggggaagagattgttcccatgttcct

SEQ ID NO: 6078 - DNA, 765 bp, Zea mays
tgcagatgatatcacaaccaaacaacatatttcaccagggcacaaacaaacaaaggagtagactagacagagaacgcaacgcaatcagtggaaactgcaatcacattaagtacaaactctatatgtgatagaaaggttagtcaaacatacttcaaggcccgaagtttaaactacaaagttgttgatgtgtttagttagtgatttataggaattttcaatatgattttcagcaaaaaaaatgcaggacagctattggcatgtgatatatcatctctatagtgtcaaacaattatgcctactgctttgacattgatttctcttaattcttataagttataaccaaaaactgacaaaacatgaaactagtccgcttagttcttataagggacagttagcgtgcgacgggtgacgggtcgtacgcttgtgaagcaaacccctcctgccaccgcctggcaccaccacccaccatccacctcgccctcgctaagccatcggctccgtcggcgagttgcctcccctgcccctgcgctccaactaccgcctccaccacagaccgtccgccactccaccattcaccgtcgggccagcctactgccagggatctatggttcaggagaggcagcaaaccctaactccagcgataaccggcgtcagcacacggagcgtggtcgtaggagtgcacgaagcatcactggttagattttgcgtcttataatcaaaattggcaaaacatgaaactagtgctcttaattcctactataaata

SEQ ID NO: 6079 - DNA, 721 bp, Zea mays
  unsure (1)..(721): unsure at all n locations
tcaccagcagcccctacacgggcgtagggcactgcatccgcaccgtgctgcgcgacgaggggcctagcgccttcttcgtttcctaccggacaaccgtggtcatgaacgcaccctacacggccgtccactttgccacctacgaggcggccaagcggatgctcggggacatggccgccgaggaggagtcccttgccgtacacgccactgctggggccgcagcaggggcacttgccgctgcggtcaccactcccctcgatgttgtgaagacgcagctacagtgccaggtgaagatctagtgtacttgatttgcgatctgactaaagttctggtttttaattctttgtaacaatattagagctgatttgagtgatttctgatggcttacccaccaaaaacgagggatctttgataggatctagttatcctattaatctccaagattattggaaacaattgtgcaatgaagttagttgccttttgtgttcctttgatctgctagtggtgactactgctctaaggatgcccggtggcactactgtggaagcctagtgacgtagtagaaaatctttttagttctgcacagtgagatgtaattctgagaacctatttggaatgcaggaatttcacaggaaaaacatagttttttggggaagggggttcttatttatactngggaataagaggactagtttggatggttggcaattttgattatagaccc

SEQ ID NO: 6080 - DNA, 773 bp, Zea mays
atatatgtagaaagcttctacccgctcgtcctggagcagtggagcacccctccatgagcgtcaactggccatgactggcaggtagcgtccagctcaggaatggagccagattattcagttccgagcactctggtaatcatgtcgctggaagtccacttccagtcgaatatcctatcccaatatccccaaataaagggcaagaagcttgcacagtgcttcttgtacagttaaagcgcacaatgcaacactaagtgcaagggccaatatatcggtgacttaaaatagtttgattttctcctgcgctttcgaaaaaaaaatagtttgattacaattcagttctacaagtctactattaaccttctttccgtaagttgtaactcaactgaagaaagcacaaaaatgcttagaaaatacaaataaatcaaatactcgacttgaatacatggaaacaatagaatgacccattcactatgctgcaaagtagcaatcaaactgtgaagatgcacatgtcacggtcatacacagtgacaaagctaatgctgaaagcaagaaggggccaaacggatcacaagaacttactgctgtgggcaagcatggcatcatgagctgccagatagctagcaagcttgcatgcagctggcatctagtcagttaaggtctaatgataagcaggaacagacaaaacagctatgcatgaagctatgcgagcagactgcatggaaatatgcatgcacttgtggcgatccttagaacttgacgcatgggcagggagg

SEQ ID NO: 6081 - DNA, 826 bp, Zea mays
  unsure (1)..(826): unsure at all n locations
agcttgcatgcctgcagctcagctagcctcactgtcgccctcgtcagtcttatatattttatgtgctctcttgttcccttgtgtgatgtctcctcttcctctccctatccttgctttctgtgcctctcaacaaagggcagtgttccttgctatgtcatctagctagatagcacagagcaagctgcctgggcaggcagctagaaaattaacaacaaaaaaaaaaggtcaggagcagtgggatttggtagcttgctgttgcttttggcttcgtctccgggcacatctcactgctgaaacctcatggggagggctccgtgctgcgacaagaacaatgtgaagaaagggccatggtctcctgaggaggacgccaagctcaaggagttcatcgagaagcacggcaccggtgggaattggattgctctcccacaaaaagcaggtagtatatatatgtgcatgatttatcaacctacatatacatagagtcatagatgtgatgtggcttttcatcagctggtttggggatttcatgatgttaacagttgagtttgagtccaaacagtctaggttcttggtgctgatgtctttctttttttttctttctaatttgtttgcccccttatttatgttttttctgcttggatctgtttgagatcgatgacctcaaattaggattgttctgagacaacttgtttataagaaaaaagagaaggaaaacatatacatggtttctctcatgattttactataagaacgctcatgaaactttgctccctcttnctcacccctctactccctctgtctacaacttgctaggtttctattgatc

SEQ ID NO: 6082 - DNA, 766 bp, Zea mays
acaaggaacaagacatcactggaagaagagtgtcaacaagtaaaccaatgcatagaagttgggctgaaatgcatggacaacgacccaaagagaaggcctagtataagagaagtagttcagattattaaaagaagtgaaaatatagattcatgttcagttaccactagagatgggtatgttctttgtccatattcctatcttttttgtctaaaaatgcagactgtactgttacctcttgtttgttttttacctcattattgagcactgacaaataacattcagcaaggaaaaaaaaagtagaaataacagcattccttaacttagatagaaaatgccgagcaaagactataattttcctccattagtttttgtaacagtgctatctgttttatgtgctttgatttcttattactagtttcatatgctttgatttctcaatgtggttatgttgcagaaaacatagggaggaatcggtatattcagaatggagcgaaaaaattaatatccttgtgttaggttcatctaagcaggtaatgctttcattcactcatgggctttggcgctttgcttcgcacattctattgatcagattctatcttctatagttggtagattgctttagtctagccactcgcagaaaaaaaaagagattgctttagtctggctgtatatatcgtaaatccatccccacgtttaataataaacattcatgattcatctgacatgtaccttatgtttatgcaatctattgaagcaatggaaacta

SEQ ID NO: 6083 - DNA, 1112 bp, Zea mays
tgcatgcctgcagacaagccatcgagcaaggtgctggaatcaaccagctttcaaaacttttaaatgcttcagaagtcagaacgttcaaatatagtgagaaaaaaatgtaacacaatgaagctatggcacaagtctaccatgccccccccccccacacacacacacactcaggtagtccagcacacctaagagcccatgtaacgtctgagtggcgcaggcaacccagctccaccctgattgtgagtaaaggaactagctgacaaaaaaaacgtttgatcaaagtagagagggcaaaatttgttgatgtcatcaaataaatatcctttagttcacgagaaaaatcccatgttttatatagcagtaagaaataattgataatcaggtgcatttgcgaaagagcctctagcctagttggttaggtggtctgagtagtactcctcaggtcctgggttcgactccccgtgggagcgaatttcaggctgtggttaaaaaaatcccctcgtctgtctcatgccaaagcacaggtctaaggctcagccccggtcgtggtcgttctcacatgggcttcgatgccgctgtgtatgggtggggcaggggttcgggggttttctcgacctgtgtgagaaggtcttcttcttaattcaatgcccgggggctgtcttacccctcgcaggtcgagtttttttttgatcttgcacactccatactaaaagatgaaatttcgcttgatgtgccaaaggagggaaccggcttgacagagagctacagatactttacgctaactaagcaggcaagaattgttgcatccaaatgtcctttcgaaaaggcacacactatttatgttagcaacagtgatgagactatatttggaagcacattgcagaatgcaagacatctgcgcagttttaccatggaatccatgtcaatggcagtaattcccattgtttttttccagggaaaccatttgaaatatcttgagattttcaagatgaaaagtgaaagcatttcccgcgagcccatttcaaaattttttggacccttacaaagcttttctacggtaaccattccaagccaattttcattagtttttgcctaaaacaacttttgggcaa

SEQ ID NO: 6084 - DNA, 758 bp, Zea mays
aggatcatggtctgacgatggcccagaggacgtcctagcattcaagtactggtggttcagccacaggatgcacggcacacacccagtgccgtcgtcgaccaggaagcggaggaacctctccctgcggtcacgcgagacgacgactccgacgagctccgcacgcgcaaccctacggccgcagcggaggaacgtcgtcggagaggtgtgccgtacggttaaggagagaaggtccgcggcgagaaccttgacgtgcacgagatggagaggttggtccatgctgccagtttcaggagagagatgttacagccttacacacaggagctccgatgctgtttacaaacaggatgaacacagaccgcctgcattgatgactgctcatccaaatcacagggaacaatatgcactgctgattcccatttcctatcgaatgccaaagtagatagctatcatcggcctgtgtcaatccacgcggtttcggtttgattcggtcggcccttccttcgaacagctaagtgcagttcaaaatttcccccgaaccaccatagcccccataaaacataaaataaactgccgacagagaagagtcaaggaaggatgaatccttactcagaattacacgagagaggcggaagcgatggagcgggaagggcttatcatcgacgccggaccgccgcgcgcacgagaggcgcggtggcgaccgggagcctggtgaagacgcagcacgcagcacgctgcacgctgacgcagtcacgccggcg

SEQ ID NO: 6085 - DNA, 725 bp, Zea mays
aacagaaccatgtcaggcagtttctagtgggagttgtcggacacatgaggatacggacataataagcgggatattttgagtagaatttagtacgtcagttccccggaaccttacccaggtcagcagtgagaagggcctcactttcgtagttgggacccgccaacactgttcccaatggtgagatgatgacactccctccagaacaaacaacggattccggggatggctcttcctctaggccacaaaatgtgtactcgggagggggagggtagttctttctacgacagaactggcacgctgacagcacaaagcatcccccttcaagggcgatatgtgtcatagaagacagccaagttggcatgcaatcaaccgtgggagcacaatatatctcaatacctgcattaacattaacataggaggattcagcatgaaagataaactcagtacatgagacattgtgcaatttagcattacaccatgagcttgttggaattcacctcattccatatgtgttgatgtgtatagggatgtgaattaattcgagttccactccaatccacactaacacatgtggattgaggtagatacaagagtatccaaacaaggccttattggttccaaagtatatcccaacactcctaatttaaaaatacaaatggccaggattagggataatatctttggcatacatggccgtcctgagaaagtgcaatctggtttcccaa

SEQ ID NO: 6086 - DNA, 739 bp, Zea mays
  unsure (1)..(739): unsure at all n locations
tacaagttggtgaaccatcaaagggaggtatatcatcacaagtcacaacgacagtaagctaccatagctacaaattaataatggtagacctccacatttaatattttattattttgaccataacatccagattccagttctgttgaaatagcaagcattacttgcatgtttctttcaggaaaaaatataaaggcaaattcatacctgaaaggttttctttcaacaatgtggtaaagcctaccaggtgcatagaggcgccttggatctctcaacatcacactttcaggtatacatgtgtctattaggcatcttccacatagaaggcatggtaagctgtacaaagaggactacatcaggtaccctgaaaacaatcagagatcataaatccctacaaacatgcattatcatgttggtgatacttaagcaaagctacattaccagaatagtgacttgaagatgtcttccaaaggaatgtctgtgcgaggcaaaaaatcatcctggttcaccagataggaatatcagaaaagatttaacagcatattccagctggattcttgatccaagtaatgataatggaaattgccaatgacactgtgttgccagtgctccatgaaagcaagttcattgtatagttttggaataagcaccattggttgtgaagaaatttgaaattgaatgaaaggggaacntatttaagctctgaagtggcaacagaataacctaattacaggtgattacc

SEQ ID NO: 6087 - DNA, 564 bp, Zea mays
aaaaatggcctgggaaacagaaaagaaaactaaaggaaaattacattgttctttcagcatcactcttattccatgcatacatcctagtagtatgagatataaccttaaatatgattcatacatttaataccaatgtggtgcagttttttttggacaagattcagtgaatactacctgaagattgtgtgtgcttagtaatcttgttttctgcattagttggtgccccataatagccttttccaggatgcacgaagcaacttgggagtcaaccgcgctaaggatgtcatcaaacaagtatacatcagaattgtggtacaaagccctgcaagtgtatgatcataatgttagctagcgagcttaagaaggatgaaagtccacaaagttgtcaaaaacatgaccttgccaatgctagacgagctctttgtccaccagataagttggtacctttctctccaatatgtgacatatctcctctggtcattgccgatatgtcaacatgaagcgcacatgcctctattacttcttcgtatctgcattaattttgtaatgcagaatgctaattaa

SEQ ID NO: 6088 - DNA, 769 bp, Zea mays
aacaggagctgccagccaaagtaaggggcagaatgggaggttgacagcagcactgtattcgtaataggacacctacatttgaccaacatggatcactgacagtgtcctaataaggtcctgtttcgatctgggacgttaattagctagcaggagcaagtcagctagtagttttttattagcagtgttattaacccacccatcagctaaccgtcgtttgatcctttttaaattagctattaagagcaactccaaatcattataagctattaagagcaactccaagagattaacaaaaaaattagctaaatttattgatttagctattctctaaaatagatttcacgacaaaggagtagactagtccaatagactttgtaaattcagaactctatatgatgagtgaagtaggctacccaaaaataaagagcagatgtgcagagatggagagttactaaatttgaagagtcactcatagagtctattggagacgccgagacgtttcttctagtaataactaaatctacctttacggtcttttataactgagacaatttggatctactgatgctagttttagctgctagcaacaattagcaggtaggacccaaacacctcccaagtttgtgggaggtcttaaacatggtccacactatttctctgtttgaggcttccattttgttggtcacttgcagcagacaatttcgcctttaccattaacactaacacagaacggaacatgtgaaactgccattcttcagatcttcattag

SEQ ID NO: 6089 - DNA, 772 bp, Zea mays
gtacaggtgcagattcagaaagaacaaacaagcccccattaaagcttctctggtgccttgctccggccgacgagaaaagaggaagaggtggtgcaagggcgggccagcgagcgtaccggccgttcgcgtctgaattctcatgaagcacatgagcgcactgtagctccttgtcgactacactgttggtccttgcagttttcactactgcaaagaaacgatctcaattatcagatgtggccacattcaaatacggactagctagttttgcgtcctaattgcagctctgataagaaattaattcaacgacttgctccttctgagctctgactgacgctgtgttttttgttctacgacagaccggcaggcccatggcaaatcgtctcagccctgtggcgaggcagctatcttccaagtccaaggagatcaagtgcggagacgacggacgcttcttgttcggcactgcgactagagacgaagcggccaggagacactcgccgtcgcggcggccagactccattgacccaaaggctgtggccgctgtctcttggtccagcgaaggaggcgcctgcgccctcccgccgccgctgtcgtcgaccggcttgagtgcgcgctcaaggccgtcagggcagttgcgtattcgccaggcagagagttaacctggacctttccctgtccatatgtggatcatagctagcttaatcacccgtgctgaattctgtacattcgatgttacatgatgccatgcatgctgacatgtgattccgttgatata

SEQ ID NO: 6090 - DNA, 801 bp, Zea mays
gaaaatggtggttgcaaggaagctcacgtagttctacgccatcttcatacgggcataggcagatacagcactcctgtattaaaaaagggatgatcaaaccgagtaactcaaatgtatgtaatactatgtatttactcggtttaagcaagtagcaaaaaataataataataaaaacaggagctcaacataataactttcccagaagataacaaaggtttgagccagcccaaaacattcagagtccaacatcagctccataaacactccacaaaaggtgaatggcacaatgcatgagggagtaattccaatttctcaactgatcagttcaatgctcacatacgggcaaaaacagaaacattgatcttgaagacactgagaaaactactgagcctatcattaattgagttcagctgcttgtcacatgtctataagatttatgacaccaaacccgattgcttgagttcagctgcttgtcccattgagtacaatttttggtatatttgtttcgaaaaaacatatagtagttcaggccacatgccacctagataagcttgcaccagaatattacaattttattaattccagatccccatattctatcatatatccattgaacattgcccaagaattcaaatgagactccctaatctgtagtataaagtgcaaacgtgcatggaaaaataaagtgtagttttggaactactggcatttttctttatctggacataccaatggaaatgaatggaccattacaattttgtccctaagggaaattaattaagcaagaaatttttaaaattt

SEQ ID NO: 6091 - DNA, 566 bp, Zea mays
atcctatagagccgacctgcagctccaccaaagctagaaaagaataggccaacactagcatgaaaaaaaaacgtgacggtgcattcagctaatgtcactactacaactactccacaaacgaaaacactcctcgcattgtacacacacacacacacacacagagagagagagagagagagcttcaagacagaagctgttggatggccgccttctggtcgcctgttaggctagtggggaacttgatctggaacttgatcctcaggctccccttcctagacggctccctcgtgatcggcatgccttcgcccggcacgacttcttcgtatgtagggctgacgaccgacttcaccggaacggtcagggtccgcccgtccagagtcgtcacttggactgtgcagcctgtcaatgcctccaccagagagatcttatgagtgtagatgaggtcgttcccgtctctcctgaacctggggtgcgcccgttcttctactatgaacaccagatccgatggcacaacgttgcgtgcctcgttgcctttctcgggaaaggttatctttgtgcccttcttc

SEQ ID NO: 6092 - DNA, 767 bp, Zea mays
  unsure (1)..(767): unsure at all n locations
aatgaaaaatcccttatgtggccattgacaaagcaggaaataaggagttaaatccagggggtaaggtgtagtgacagtttatacaatacttttattgtcaaaaccaagtaagactatctctagaaacatcctctatataccttctctatatctatcgtttatagtctcttttaaaagattctctcatctatatcttatttctcttcagaagcgtcttctatatctcgttctctacattaaatatctatattaaatatatgaaataattggatctataccattaaaagattgcaactttagatatataccattggctccacatgccattgcctcatatggaccccacatgtaaatgagatagcaataatatatatctaaagttgtaatcttttaatggtacgtatattttgctctatatttttgcatgtacgtatacatattttagttttgcttaatcttttgtttagagtattgaaatgaatagagaatctatatacaaagagaggacggaagaatgtcctctatatttaggcactgttccaaatctctagagcaaattattgtcagaagttgttagcttgttttagttaggttggagcagctaacaactaatagctataaggttttagaggtttggaacagggccttggagaacaaggctgctgctggagggtatanaaaaaaaaatcttcctatatttagcagaataaactcttttacagtgcgctgccaggaagcagtccaacatctggtgtcagaaactaaac

SEQ ID NO: 6093 - DNA, 761 bp, Zea mays
atccactcactacgggcttgttcggttagctctcaatccatgtggattgagtgggattggatgggtttgaatcccaaacaattcaaacttcttaagaattttttccaatcccatcaaatccatgtgtattgggaataaccaaacaagacctacaggggaaaaaatgaaacccacataccttggtcagtttaactaaacatttcacaactaaatctaaaattttcgcatttgtgacagcaaggagctccaatggcgtgtaggatggccgtcttgaagggtcaaagggaaataataaattaattagaattacaaaaatggacgtcctgtccacgttaccctgctcgaaaatgccaaaattaacatatgggcttccatcaaacaaacatatcatggatatattaagttcgcataccaagatgtgaagcatcaaatcatttaaagccttaagtagttctcgggcgtcgtccaattccgttttgagaaccgtctcactcgaaatccatattagaatttgtgtgatcagtttctctaaagtaccttccttcatagcttgagcaagatgtctgactttaaaaatctgcaacataaccgtctttttatttaaaaaaacttactctaataaaaagtaggggtaaaaaacagatagaacgcgtataacctgaaagagagtatttaaagcatgcttcaattgcatagaagatgccccagcaagggttaagttgaagcttttttcaacctgaagcaatggtcagcagagatga

SEQ ID NO: 6094 - DNA, 821 bp, Zea mays
gctcggtgcctgggagacctaacgagtcgacctgcagctagcgttatcccccccaccaccccggggctcggattaggtacgctgttcatgccgtctccacggccaaggaccggggaggagcttctttctctagctgggggatgagcaacaccaccaagtgatgttccatcatgtttgcttaaaaagacacgcactgcctctgcctgtgcctgcctgttcatggtcgtcctcatcctcacagagctggttaccgaaaaattggtatactttttcttggcgcaggatctgagctgaagctgccaggccaggcgatcgagccgatgtacggctcgccggtgtccaaggacctcaacctcccggcgcagccgccgccgatggcctcgtccgggctgctacgctacagatcggcgcccagcgcggtgctcggcggcctctgcgaggaccagctccagctccctgccgccgctccgagcgccgccgacaacgtcttctcaaggttcctgcccgacgaccaccacatccgggacgacaagccgtcgcctgcccacttcccgagtgcggccgacatggcctcccaccaccagcaggagcaaatgatgttccactcccagtcccagtcccagcaccagcaggagacgggtaggtccgggggcggcctctaccgcaccgtcagctctggcatggaagcgggcggcactggcgtcggcgccgccagcagcctgattcggcagagcagctcccccgccgggttcctggaccatttcggcatggacaacggttggtttgctcgtcactcgctctcgctctctctctctgcttaa

SEQ ID NO: 6095 - DNA, 1458 bp, Zea mays
cagcttgcatgcctgcagacttatgtattgttccgtaatcaacatttggacttgcggcatgtcatggtgtcctgaaatatgtgccttgtaaattatatttgacaattctcatcctggggtaaagatattatgtgttccttctgggtcagggatgtgctcgatacaaatttggctgactctattcgactcggaagaagcatttcatgccatctgcaatatcacattatttttaatccaagtgatggcatggattcatctaatctctctctcacacacagttaagaaacacatgggttgtgaatgggtaggaaagacttaagtgaaagaactcaaccccttgctattcatgttccttgccaattgaatttcagttgacacacttgaaatgttctattttcagatcacttaccacttcttccattggaagaaaggaaccccttttgctgctgatgaccaaggcatctacagcagattgacatggtgggagcaaattgacaatggtcagcagcttactcggaacaggaagtttttgactgtggtacctgtggtgctgtaagttccatctcatcctcttgcagttcacacatcaaattgctctttagattctggaaaggaaatttatactaatcagttcaggcagtatttgcttgtgcaatcatattccacttcattcttaatcaacaatttctggtgtaacatttgtaacaggatgtacttgcttgctcatcagactacctttctgaacttgggttgttcatgtctctgcctattaagaaagcacaaaacatgctagagcatacttatacacttgtactgatgctatggtttttggatagttaaaattatgttaaatgatgttaatgatgcattataaaaggagtttgtagacaagaacaaaataaaaaggtttgtaaaacctttcagctatctagccaacccttgatattaggaaatttctcttccagctattatccatctacactttgctgctgctgtgccgtcaaggactaatttgttgcttgtgatccaaaagttaaaacgagaactaggattttcatgagcagtgcagagttcggctgatgattaatcagttactatctgccagtgccacaagggcagttgaatctagacattttattacgctttctttcctaagcacagcatcttagcatttttgacaaatttaaaactatgatgcttggcttgaagttagtcattgttaaaaaaaattatgcagttaacaaagtcattgtatttttgaaaccaagttgatattgtcatattgagtggcatatattctaaagcgtgttcttccaggtatctgatcgcatcgcacttgactgactacaagcagccgatgtttttcctcaatacaatggcagtttttgtgctagttgtggcaaaattgccaaacatgcacaaggtccgcatatttggaatcaatggagacatctgagg

SEQ ID NO: 6096 - DNA, 765 bp, Zea mays
aaggtgggagataagtccatctattcgttagctaagttttgcagtaacctagagactcttgtcattggtggatgtcggaacattagcgatggctccatacaagcacttgctcttgcctgctccagtagcttaaggagcctgagaatggactggtgcttgaaaataacagacacatcattgcaaagcctgctgtctaactgtaaacttcttgtagccattgatgtcggatgttgtgaccagataaccgacaatgcattcatggacggggaaggatacgggtttcagtctgaactgagagttttgaagatcagcagctgtgttcggctcacagttgcaggggtcggcagagtgattgaatccttcaaggctcttgagtacttggatgttcggtcatgccctcaggttacaagggacagctgcgagcaagctggagtgcagtttcctgctggctgtaaggtgaatttcgatggcagtttgctggaatctgatccatctgctgagatgttcttctaaaatgtgatctcggttgaaatcagatttagtgtgaactgcaaaactaagatttgaagagttcggtcatggaggcgagtgcttgacattgctgctgatctttcaccgtcaaaatctatgcaagaacctgagaccacaacggatgcaagccatgatcatattcagtacccaattcaatatgcatgtgatttaatctggataaagtagcgcaaaagaccatgaaataagttgtctgaccaaagaacgtatttgcat

SEQ ID NO: 6097 - DNA, 761 bp, Zea mays
acccatcggagctcaggatgccgcgacacaaacagatgacagcgagagggatgttgctaaaacccatacttgcgtggttggagtgtccatggatacgacgttagatgctgagattcaggaatgtcatcaaaggagctcactgctgtcaccaaaggtacccaagattgttcaggaatcaccggccctgtgtttctctgatgcttcaccgggtgtcagagttgagaccttggagtccctaataagagcagaagcctgtaggagaagtagctttagaacactagaggaggaacacatgcttggcccaattggtgtgaaactgaagccagccaatttgctaatgcagcttatcacttgtggatctatatctgttaaagaacaccgaggctttgggttcatcccaacgtacaggcctcggtttacacaagttgagttcccttcgtcagtgttctccactcctgtggcattgcgacaccttgacaaaatcccctgcaatacaagaacaatcgggacgagagctccagagtctgaacgtttcagtgggagcttggttgagaccaagatgcaggacgagtcaaggagaggaatcagctcactcaaacgctcatcatcttatgacgaggataggtatagtatacgacacaaatgatagtgtagtggcccctaggggtgttgccacaccgttaattttttttccctgttgaggagggtggctagattgcttaataagaacgatgcatggtttcaaccaatttggggaaaat

SEQ ID NO: 6098 - DNA, 721 bp, Zea mays
gcatgcctgcagtgtggtgtggaacatgagaatgtgagagactaccaccaaccgcgccaactgaaccacggaatcctcaccaactctccctgcctcttcagtcttctccttataaaatgtgcaggcagcatcagcactcgagcagtgaccacaagaccaaaagaagcctcagttttggcatccagcagcaactggccatggaaaggtaaatcatccagagtattttctgcatgatttcactcagttctattcccccattcccagagagacagaaactgtcaagatttcgtttcaatccgaccaaaactgtcaagatttcatttcaatccgagcaagttctccgcaaccatggccgtcccagtttaaagttttatcttctttccctgtgtgtgtgtgtgtggttgctttgcagcagtgggatcggcagagtggccccactggaggccgtcctcttcgacatcgacggcaccatggccatctccgacccgttccaccaccgggccacctcggagatgctcctcaaggtgggctacaacaacggcgtgcccatcacgcccgagttcggcatggcgaacatggccggccggagcaacgagcagatcggccgcttcctgttcccggactgggaccagcgccgcctcgacgccttcttcgccgagaaggaggcgctcttcgccaggtacgccgcccaggggctccgggagatcgccggcctcacgcc

SEQ ID NO: 6099 - DNA, 762 bp, Zea mays
agcttgcatgcctgcagattgtttgcatgtgagttggtctccccacattatacactcctcacagccattggctcttgttttctgtacaatccaatatgccatattttttgtgtttgaaacaaaatggttgtttagctaacatattcagatggactaatccttatgaagagttatcgagtaatcaaaagtggcaaatatctgactgtctgtagtttgttgaaattatattgataggagataggacagcgttttctatccaagttggcaacactgaaggaaaccttgacattgctgaaactcgacggtcttgaagtctcggactctcttcttcaagccattggtgaaagctgtaacaaattggttgagattgggcttagcaaatgcagtggtgttactgatggaggaatctcatctcttgtagctcggtgtagtgacctaagaacaattgatctcacatgctgcaatctcattaccaacaatgcgcttgattcaatagctgacaactgtaagatgcttgaatgtttgcggttggaatcatgctctttgataaatgagaagggactagagcgaattgcaacttgttgccccaaccttaaggagatagacctcactgactgcggagtggatgatgcaagtttgtgatcactacatttgcgtatatgtttattttctaattaaagattatgttctttttaaaaatgagcatgatcactgtacattgcttgtttttccagcattgcaacacttggctaaatgctctga

SEQ ID NO: 6100 - DNA, 769 bp, Zea mays
cccggttttgctctagagtccacctgcagcacgagctagcgtatgccagagtttcgtatagacgaccattcttcgcatgcgcaagcgcaacggccaagccaagccaacacgggaaagggaagtgcccaagtcggccaagccctccaaccaaccatcagcgcggattgttgcaatacaatctatagaaacaaaatactgtataagtcatagccataattagattaaaaccacaacaattcgcagcgaatatggcgcatgcctcgttgaccgaacagcattgtagatagaaaaatagaggtggtggtaccacttgcaattgcaacgttcggtggttgagcgagcgagtacggatactcgtgtctgcgctgcgcaccgagctgagacacgtcgtattcaaagggagaggccgcaaggcaccgagtcgagccgctgctcgagcagacagggacgcaaacgcaaggagacgatgaggcctggatcgacccccggaccttcttcgcgccggtgcatccatggctccgccgccgcgctcccaacgctgctgctgctgcttcttcttcttctggctgcatcgtccgcgcaagctcagcaaacgtcaaggatgaagaccgatccagtcgaaggtgagtagtagtgtctctccagttcttcttccctgtaataaggctgcttccgaaccatgcagctcgcctgggccctgatccaaccattcgccgtccgccgcctacttgcttgcgccgtctccttaatctgcgtgattgctgctctg

SEQ ID NO: 6101 - DNA, 762 bp, Zea mays
atcagcaataagttcgcggtcgcctttctctcctctctgccccagggcgagagacctaagccagaacagcactaccaccaccgccggtatataaagaggctcccttcgtcacccgtaccggattaccaacccaaccgaacctgtaccgggcggcgggcgcaaaaccgcgtggagcaccagcgaggcatcggccgacagcgttgaagctctacctagcgggatgtatttcttcatgtctggtggtataacaagccactgaggagagcgggcacggagcttcgatcgagcagtggcgttgctgcacttgagcgagaaagtgagctgaggctgggagagggagggaggggtcatcacagttcatccatggttgtgcttgtccagaagccgtggctgcccatcgacctgcgtctgccggcggggccgcaggcgtcgctggggatcctggcgttcgaggcggcggcggccatgtccaggctgctgtcgctgcaccggtcattgtcggaccaggaggtctcccggctgcgctccgacgccatgcgctcgccggccgtggcgtacctcaactccaccgaccaggcgttgctcctcaggctggcctgcgccgagctggtcgtgtcgctggacgccgcggccgccgccgtcgcgcgcctcggcctgggggtgcggcctcgatttcggcggccgtgtacgcctgcctcaaggccggcgcccccgacgcgcgccttgatccgctcgtggccaaggggctcagggtcaaggcca

SEQ ID NO: 6102 - DNA, 770 bp, Zea mays
ttgttgaatatgttaaaaattcacaactgctcgaacttgtagagcgtgattatgctgcacgcgttgatttaacagctaaggtttatggtctacataaagcagaacagtatatcgagaaaattcctgcatctcataggagtgaggttgtgtatagaacacttttggcgaattgtgttgctgaaggcaatataaaaaaatcggagcaagtttttaataggatgaaggatcttggattcccagttacaacattttctttcaatcagcttctgctactctacaaaaggctggacaagaaaaagattgctgatgttctcacaatgatggaaaaggaggatgtgaaaccatctatctttacttacaaggtccttgtagacgccaagggaatggttggagatatagaagctatggagaaagtgattgaatcaatggtgaaagatagcattgagccagatctcacgtttaatgctacaattgccagacactacatatttaatggtcagcgtgataaagcagagacacttttggagtcaatggagggtgatgatatccagaaaaaccgtgctgcttgcaagtttctattacctttatatgcttttctgggcaatggtgatgctgtggaaagaatttggaaggtgtgtgaggataatactcgtatagatgagtgcttgtctgctatagatgccttcggtaagcttggtaatgttgaaaaggcagagaaagtttttgaggatatgtttgtgaaatggaaaaacctctcttccaaatactac

SEQ ID NO: 6103 - DNA, 717 bp, Zea mays
tgcatgcctgcagcaggttctaaatgaactattcacctcgtccacgcgcccaacctccagcgagcagactccgccaccactcgtctcgtagccctccagccgtattgtgcaggggtcaagagcctaccgtgcagggatgatgcggtgatgcccctaccagcagccgtcgagctgtaccttgcagccgtgtgcagccgtcgcgcttaactgtgcagcccttgaggaaggatgatgtgggcctcatgcggccgattgcgaacgaatgcgtagctgacgagaaggatatgctagaaaaaagcgcgttgcctcgtgcagagaagatggaagctgggtaaggatcccagctgggtatcctgattttaaggcctggttgttggagatcctaaataaatcaaaaggtcctaatacaaattttaaggctcaagtttagaactccttcttggagttgcttttaggccaatctagatcagaaaaaatagcttccaacagtaatccaacgaaatcacatcacgcccaggcaacaaaaaaaaaacgataatccgataagatctagacctgatcgtataaagcggacctgatgcgcatagcgtatttattggagatggaggatgcgaggagggtaagggaacctggggagggctgggaggaaggcgtggcggtatctaccaccctgaccggcatccctgatagccgctgagggtgaccgtcgccggcgac

SEQ ID NO: 6104 - DNA, 797 bp, Zea mays
aggccctcccttctcattcttgggttcgggatatacagggaacctatctcttgcgggcattatgcaatacttgcagctgtgggatgccctggaaaacaatgatacacatgtttggagattctctagtgatggggttttatctcaaagtctgcctatagaattttcttcagtggtgcaatctcctttgaaccttggaagaaaatttgtaaagcctgggcagcccccaaatgtaaaacatttatttggctagccattaataataaatgttggacggcagacagacttcagaaaataggtcttgattatccccagagttgtgttctttgtgaccaagagaaggaaacgatctagcatatcttaaccaattgtgtttttgcaaggcagttttggcatgctatcctttcttcacttagactcaataatgtggagtctaagagaggtgatagttgtttcgaagattggtggaggaaagcttctcatctatttcccaaaggcaaaagaaagagtttcaatagcattgtcatccttggagcatggagcatttggaagcatagaaacagttgtgttttttatggagcacgaccttgcctatcttccctagaggagagatttaaagaagagctgcatctatggtctttgggcaggcgccaagagcattcgaactctgttcgaccctggctaaaggaggagttttttgtactggtggtgtaagccggtggggtgtgtaagttgggctttgaggggtgtctttgtgtgcctgtgtgtggatgtgtgtttggttggtttggggttgatgc

SEQ ID NO: 6105 - DNA, 791 bp, Zea mays
atatcagcgttaaaacaagcaaagagggaagaagacatgctagaaaatgcgatggatgcagttggtcacttgatatcattctattttgcttcgctcattatacttttgagatgctttactcctttcaggggtggtatagcaaggaggaagctatgatttaagagcactagagcagacatctaggcaatttgacatcagcatttatacgtcgagtttttatatgagcctggtttgtggctagtcaaactgccctcagtggtttttttgaggcctgaattttcgcactttggacagggcaatgcggaccataattttttgtacatctgtacagtcaaatatcttgttttgttggccaggatgttgatggagggtgtaaagttgtaagctagaagtagggagataccaagctacaatacctttttgttacttaatacaaaagtgctgggttcagggttaatgtacaatggcagagcaaatggaccaaacaaatattgtatttggtacgggagtatgtatgcggtttgtcaaggggaccgcagtagttcatcattcaaaacaatattttgcattattttgtactgtagattttagtggagtttgaatatcgaaatgtagatgagtaaattgctggggatagtctgtgattttttaatatcctgaaacctaaggtccaatcgaaccaactagtctgacgccccgtttttaaaaccatcccatcatgcggaacgagtttgcagcccgattgtgtctaggcgtgttgattctatagctccgtttggtaggctccagct

SEQ ID NO: 6106 - DNA, 785 bp, Zea mays
aatcagaagagttttggagagaggtatccctttcttttctgaaaacagaatcaagaggattttttttgttaatgctaacggaaaatgttagcaggagtgtcactgtttattggagcaggattctgcaaggaagccacttacccattgataagctttattctgtgggttacactcttggttttagcgactattccagattcaaattctgtgagattgttttttgttggttgtgcatatatttctgtgatatgttgtccctggtacagctctcttggggaaaattttccaggccttgcagagctaaagatccaatgggtgctgaacatgccattcttggctttgcagttttcttgactggatttaagcctggacatactcggttattagtttgcgatacgtttgtgtggctgtgtttgatttgccttatacctgctgtgactgctacctgagttcattaccagaggttgaaaacacagtaaattccatgtttgcaattgaaagtgagtaatgccactggcctgcttgaatcgatggaaatggacggatggacagaagtggcatgttggccatgatttgtacttttttacatttccaaatatgcttatgtgctgcaaccaaatctaatatcgcttaatcgctagatgcgagttgctataactcttatgagcctaacatgtattatagcaactcccacggtaggtaaaatgtttagattcggtaaaaaaaagctggttcaaaacgtatccaacagattcactatctgcgtgattgttgggtggctgctg

SEQ ID NO: 6107 - DNA, 800 bp, Zea mays
tgcattaatgtcacctaagttataagtcaaattatcttctccaagcagtcatccaggttgggagttgccttatccatgacggacagaaagatgtaaggaaatgctaataccactagtcactgcttagtaagtgggacacaaaatgcattaattgaaaacatataatttcatgaaagaaaacatcccagcagattttaagactaaactaggaaatgctcttttacataaaaggccatgttaaaggtataatatatggaggatcttaattctgttgcaaataggtattgataactaatgcatccagctttcaagaatcatgagtatgtcatatatatttgtgaatgtaaatttgcaggaagacaaggtctagaaaaagtgaaaattagaacttttcagtggttcattggagaaagaaacggcatcaataatgcttacactgcactatcaagaattttctagagtaccgtatcaaataaatggcaactaaacagtcttcagctaacagttagtagacatatgatggctcctcctttgactataacctcagcctaaatacagttccattccagtctctccttcatttttatttatttgaaagtggcattgaaaggaaattgagtaagtatcaaaacttattagtattggtagatcaacaaagtttctgttagaaacaagtgagcagagcagaaaatatataccttgccatccattgccttgacagctttctctgcctctgcttgcgatgaatatttgacaaaaccaaatcccttgatgcttccagattggtggtctctcataag

SEQ ID NO: 6108 - DNA, 746 bp, Zea mays
agaccttcaacgcggcgccgggcacgctccgcctcttcttccacgactgcttcgtcagggtacgtaccccgtccgtcgtcgtgctccacgctcgcccgactcttgagagatggtcctgagtcacctgaccgatcgacctactcccctcccctcacagggctgcgacgcgtccgtgctgctgtcgggccccgacgacgagcacagcgcgggcgccgacaccacgctgtccccggacgcgctcgacctggtcacccgcgccaaggccgccgtggacgccgacccgcgctgcgccaacagggtgtcctgcgccgacatcctcgccctcgccgcccgcgacgtcgtctcccaggtactgtgctgtgctgtgtgtttcctaggctaggccggccaggcggcgtggcttattacgcttaaaccttacgccatcagcgcaccgtcgtgataataataatcacccatgcttgctactagtgctttggagtggtttacggggcatgtcaggcgaggcccggacgacagctatgatgaggctgcccatggctgtctgtcccctcccgcatgggcgaacgagtgccgcagctggagcgcccgatccacgctgccaggcgcagtcgctgaccctgaggcctgagctgggccgcaagtccgcaaccatgcatcctagtcccgtcatgtccagcaaccaaccaggcctctgaccgcaaaggaggggggagggaagggaaaaaccacgggattgggttttt

SEQ ID NO: 6109 - DNA, 977 bp, Zea mays
ccgaccgccacctcggccgcgccggcttccagatccccgccgcgtccttcaccgtcttcgccatgctcgcgcagacgctgtggatccccttctacgaccgcctcctgctgcccaagctccggaagataacgggcaaggaggaggggttcacgctgctccagcgccagggcatcggcatcgcgctctccactgtcgccatggtcatctcggccatcgtcgaggaccggcgccgtgccatcgcgctcagccagccgacgctcggcaccaccatcactggcggggcgatctcggccatgtccagcctgtggatggtgccacagctcatgatcctggggctgtcggaggccttcaacctcatcagccagatcgagttctactacaaggagatcccggagcacatgcgcagcgtggccggggcgctcgccttctgcaacctggcgctcggcaactacctcagcggcttcctggttaccatcgtgcaccggacgacggggtccgggcagaactggctggcgcaggacctcaacaagggccgcctcgacctattctactggaccatcgccggaatcggcgtctttaacttcatctacttcgtcatctgcgccaggtggtacaggttcaagggggccagcaactgatccgccgaggtaaccgtcgtctcacgatcacgacgagtgcgggcatgaatgggactcagctctatgcgggccctgatggcagtttgcttggtggcttgggtaattatgttatggccttggcagagcaacaggaaaaaaaaggggcccttaaaataaggcatgatgatttttttggatacaccaaaaaagagggttgattttgacccccaactcccctcttttttaaatatgacatgtgggtggggaataaacccaaaaattttgtgaccggcgcctttatttgaaaaatatcgattgggcaaaaagggcccccaaggaggggaataaaccaaacctttt

SEQ ID NO: 6110 - DNA, 814 bp, Zea mays
aactataggcagtgtaatggctaaaactctaccagttttatttcctgttgttcctataaatggaaataatcgattaataatttgatgaatgtcaaagaaataatatactcagtacatttcaacttataatttgtttgatttttttaccctaagtttgtctctattctaatttataattcgtttgatttttttaccctaagtttgtctggttcgtcttattaaaaaatccataattattattattttttactatgataatgtttagcatataatatattttaagtatgtctttgatttttttcatctttaaaaaaatcgaataagccgagccggtcaaatttagtaaaaaaaaagtcaaacaaattataaatcggacaaagagattaacatgatacatatacaacatcagggtacatatattctttttataagtttgtcaggcacctcacagaattaggacaaccttgtcacgtactcaatattggatacaagtttgcaaaataaaatggttcactgtattcaacggatcacacatgtatctgttagatctaaaaaatcattttttaatcaaaacgtttcttatttattctattttttttccaaaaataacaattaaataaatacaatatgtatcacatattatctctgtataagtaacatataatcctaaccatccgaactaaataaaaaaaacggctcacggttatttatagtgtcctagcaaagtccctatttcttacagctggctcctgagtcctgactagaccattcgagtcggtcaagatgttgaatcggttagaactcaggaaccgag

SEQ ID NO: 6111 - DNA, 831 bp, Zea mays
  unsure (1)..(831): unsure at all n locations
cttgcatgcctgcagatgatctccgtgtgcatgcgtgtgtgtatatatatatagacacccgcatcgacggtacatacttgaaccggcgccagcgagctagcgcacctccggttcgagcatcgatctgtttcattattccaaactaggcatcaggcgctacgggataattgcctgcaactgcaacgagctcagctagcgctcatggacatggacatggacatggcctcgtgtcgtcgtcgctggccgctgttgcttgctctcgcccagctgctggtcgtctgcggtggcctcggcgccaccgtggagcacaccttcgacgtacgtaactgattatatatccacgccctttcttaaggccgttttgttttgttttgttttgggttcccctctctgcatcatcatcagatcagtgtcaatgcaaattgattttcaggtgcgcaacgacctttccataagccagctttgccagccggcgagggccatcaccgccgtcaacggccggcttcccgggccgacgatccacgtccgcgagggcgacacggtggtggtgcacgtcatcaacaactcgccctacaacatcaccattcactggtgcgtacgtgtatcaatgaagccaacaagacatagacgacaagacccgtgtcaacgactaacttcatctgtacctgtactgtatgtaggcacggcctcttccagcgtgggacgcagtgggcggacggcccagagatggtgacgcagtgccccatccgccccagcagccgttacacctaccgctacaacgccacggngcaggagggcacgctgtggtggcacgcgcacagctccatgctc

SEQ ID NO: 6112 - DNA, 848 bp, Zea mays
atgatctaatcaatttgttccaaacatcatatatttaaaaaacagagtgttgttatttgtttattattagccggcccccaaagatactgtaactgctttggagaactcagtccatcgtcatggatgtacattttttttatctcgaaccacacagaagagccgtgtgtcatttcattaggaaggaaaaagcccacaaccacaggaggttcagtactaaggctgtctttggtggatcgtgtaaaatagcggatgcggaactgtagatgacactgtttgcagagtgatgtttgaaataggggatgagataaatgatgagatagggaagctgccggagacaacctaaggatgtacataagctatctataaaacgagtgaaactgaagatgaagaacagcaactgctaatcttattgaaatatctttgcttatttcctatgactatcaggtcctaactggcaaattagtgtcaccagtcaccccataatatctgcaactaaactctaaatttataccaaagatcttttctagaacatgtagtttaagtatacaagtgatctgaaataaaaccgacaccttattctattttactggagagagagagtacttatgccttcttgagcttgtttttgtcagtgtgattttcactcttgatccgttgttttaggtatttcctgactggaatttaagaatattacctctataagtgcaacagctaatcttggtatttgcatttgagtttgtgtatgagtaaatatttctattttccatccatgtaggcatatgaacgttacatggccccatgttcacgacgggagaaaaaccaaattcttgactggcaagtcttattca

SEQ ID NO: 6113 - DNA, 840 bp, Zea mays
cgacctgcagccaataatgtgacatgcaaataccctactatcaggcattcaggctctctagtaacactactaatgaatcatcaaatactttcaggaataaagtgtacatttgagtgtttgacaaattatttcatctcaccaagaaaatatacaaacaaggctatagtcgcagccattatttgatactctagcaatagccactcaagtttgagaacctgttggtgctcaaactaacaaggttgccaccttcccgacctgaggtccacatatgtttatacgcatttattctccaactcgatgaatgagagtttatttactaatggatagtatatagcatgtttatctaccaatgaactaggactgaatcatgtattaagtattaagtttactgcatattgtatcatccggagcgactcttcagctatcgagccactttgtgtgctcgacggtgagagacggatgcctcgtccttctttgatccttcgggtctcctagcccaagccggagcctggtcaggtccataacgataatcataaaagagttcctcgctagcctcaatatgctccttcgcatatataccaacccgatggtcgccagccaccagcatcacctggaaggtagaatgaatttaagatgggcaaggtaataaagaactaaatgttattcagtaattgcgattcttgcctttgcatagcaattggggttagatgagtgatttgcgaacttcaatttggtcccccttggcgataagcatccaacacatactgtgtaaaaaagatttggattaaagcttactgatttgaaattaaatattcccatccaattgaagaaagaaaagga

SEQ ID NO: 6114 - DNA, 831 bp, Zea mays
tgctgtcgccgctggtgccgatccgtgaggtggtgttccttcggttctgcaagcagcacgccgaggggctgtgggccgtggtcgacgtctcggtggacgccatcctccggcccgacggcggccaccaccacgcgcagaacggcggcggcgccgggtacatgggctgccgcctgctccccaccggctgcatcgtgcaagacatgaacaacggctactccaaggtacgtgcccccggctgttaccatgggtgttgtgttgtgctccaccgtcgtccgattcgactgccataaatccgcacggccgggccgggcgcagcggcatgtgcgcggctacagtgcgcgagttacgcccgcatttatagagcggccgcggcccagtattttatgctgccccgacgcgtgctcgtacgtgggcaggcgagtcggcggctacagctctgcctgcgcacgcaccaatcgatgctcccaggcgcggcaggtcaatgctctcgtagccagggcgccgagacgtgtgcgcgacgatcagttggtcaccgtgccaaccgcggaggctcacagacgcggtggccgccgtctgacccgcaggccgggagcttgacctgtatagcatgggcatctagcctagctagggtatcacatgattttcttagccaaacatttcgatgcttccgctaccgtacgtgcgccgaaatgctagctcgaggcggccgcttggtctcgtagatccagttttttagggcatatatcatcatgttgtttaatcgtcggggcagcttgtgagtgcggcctgtaataatgtataacgacgttgtggggtcgatatgatatccaa

SEQ ID NO: 6115 - DNA, 938 bp, Zea mays
  unsure (1)..(938): unsure at all n locations
ttcgacctgcaggtgtccgatcgaagccctatacattttcctgcctccaaattatcattattcatgaatcctccaaggagtgtgagatgcattaattcctggatgtattctgctgatactcacaggacattgcagttgtccccctgttggtcatactccctgtgctggagagtcaggtatgcaaaaggttagcacttagatatatcaaactacagaaggttcatctgcaaaatatgcacctcatatactttcctattatgctacaatgcaacctaaggactgtcacatcgtgttgaaggatatgtgtatttctaagaccgtttttgtagttgataatattttgcatgttaagttactaagtataaaaaaagttgtcattgcaaacatacatatagtcactaacatattactggatcctacttgtttagctactgcacacgttcctaagcatgagcatgtttgccttcacattacattgagtcatacaataacatttattggctttattacagaatattatagagcaaagtgtgtggccaattttactagctgagagcttaaaggcactgggcgggcttggcttactttcccttggtgggaaatacttcataagacgtgtctttgaggtatgttaccttctacattctgaaatacatgctcatattttgttcaataaacttttggtttggtatacaataaacattgaattatcattctcgcagtttgttgcagagtcaaggagttcagaggcatttgttgcgctctgtctttttacagtcgcaaggacatcacttatcacccaanagcctgggatttagtgatccagtatgttctatttgaaaatttcaggtatatccagaatgggctcttttaagtttttggaattatgaatgttacactcctgacataatttatgtagttgggtgcttttttggttg

SEQ ID NO: 6116 - DNA, 767 bp, Zea mays
atcttgcatgcctgcagactgaatcctcaggattgccattggtactggtgtccgggtgctgctggtctgtcactccgtccacaacacacactaccatccactagcctgcctcgcagcacctggtgcgccagcgccacagatgtagtagtagagggggggggggagcaagctgaacgtgaactgggtgtcaccaccatctgcaaacagacgcaccaggctcgtcgcactgcaccactcgcagtcgttcaactgcctcaaatttaaatggaagccatacatccagaagactctctgtacatcaattagcaagatttagtcactgttgtgtgctcagattgtcagagcttacacagccatctccaatgtagaaacggggtgccacccactgccacatggtccacatgctgaagcctcatcgttgaccatcccgctccgtctcttccctgtagtggacaatgacgcaggggcggcggcggaggatgccacaggaggttgccaagagtacaacgacatcaagattgaagggccaaagcaaagctaggttcaaattggagaaggccacttctgaagccagtgagatgggtatgcagattgcaggttggtttagccaagcagagggagtgagtggagcagcgataggttcgagtcgaccctgggttcaatgggcatgggccacaaacccaattgaacctttatcttgagagtcagtccgcataaatctgttgctagatttcaggaacagactgtattcctggacgcctcaaacc

SEQ ID NO: 6117 - DNA, 785 bp, Zea mays
gtaacagtatccattgaagcatcaaattgaggatttgtgaatatgctgattttgtttccatgatatttacatacagtcatccttttaatgtttgtatttgtctgaatgagcccagtcatgtaaatgcaggcagagctctttgttctcagactatctcgccaaagtggggttttagggcttgctggtacagcttttgtgtctcagttgtttgcatctaatgtaaaatatgatggggagagatttcgacgttatggcatacttcttgtgcggcctatgcttgagttttcaaaagatgacatgtataaggtgagttaagtcttcactgtatatatggacttattaatgggtgcctagttaacagaagtataagtaattttcttttttggcagacattttctcagaccttccaattattgagattggctagacatcttctctttatttaagtgcattcttacaacttcaaaatctctcaatcggaacaaaaatgatctttatgttgatttaatccccctttctggataagaaatttattatggacagattgaagtgtattgcccctgtttcttactgtcaatcagtttaggaatcatcttttcatattgcagtacctaatttgtcaatcttttgtcacagatatgtcaaggtagtaatcaaccctgggtggaagatccaacgaatactagtatgaagtatgctagaaaccgaattcgggcgtctttaagaaaattatccaccgaaggtcaagctgtacttaaaactgccatgcttgcttaattttatag

SEQ ID NO: 6118 - DNA, 736 bp, Zea mays
gacgcgccgtcgctgggtgacttcacgtactcggtggaggtggggacgcggcagcgcccgctgcccaagcccaagtggatgaaggagaccgtgcctggcggcgccaagtacgcggccatcaaggccaagctgcgggagctgaagctgcacacggtctgcgaggaggcccggtgccccaacctcggcgagtgctggtccggcggcgagactggcaccgccaccgccacaattatgatccttggggacacctgcacgcgcggatgcaggtaagagattcgtcatgctcatttttctgcttgcagtaccgtggacggatgcttagatgtttaggctgtgcggtctgaacctttattgcactatattcggattcaatgtattaggaattagaatgtgcttttcacttgcttctgcatggtagacatttggactaacatgctgcaatgtgctctctcttgattcatgagctgtttgaattcatatgatctaattctgcatccacatatgttaagagtttcttctggatttagtaactgctccagcagtttagctgttgggtcgcatgaatgttctcaatatctaaatatacaaactgtgtagttctatctagtgatggagtgataagaattgattttttttatgtatgaagcaattctatataaaatatgccttttctgtgtgtgtgatgtccattttcggggcacctgctggttttgttgtgtagccgcttcatcagtac

SEQ ID NO: 6119 - DNA, 1058 bp, Zea mays
ggtgcctgcagcggttcccttggctcgctccgcttcgatcatagccttgatgtagaattcacctgccttgtaggaagaccggaccattggcccagacgcaacgtagcggaacccctgcgccatttgcaacaaaagataaggcggttctgtcagcaacccccccccccagctaaatacgagcagatgtggggaaaacgactctgtgattgaagctcggtaacgatgagagattctaggaaccgagaagaatgatgacaagtaatgaagcctacaaacgaatcagcgctgcatcataggtgaaaaaacgaaggtttctaaagcctcgttttgctagcacaactatgtttggattactaagatagaatcacaaaaaggaatggaaatgctatttatggttcttccttttgcagcattctaagctgccaaacaatgatgtccaataatcatttcagagcggggttaaaaaaaaaaccttaatatactacccagagactgtcttacccgtcataggtcgaacaaagaggcatcaggattgataaaacattgatatacatgcgagaaagataggcataccatttcgacaccaagggcccgatacttctcaaaagcttcaggcgtaacatactcagaaacaggcatgtgacgttttgatggcctcatgtactggccaaatgttatgacatcaacatcagcagccctcactttttccatggtcctaataacctgatctggagtctccccgcatcccagcattatcgatgtctttgtaagggtaccgggaggagcatactctttcgccatttccagaacatctatagattgcttgaaatttgcacggtagtctctgacattcctttgaagctcttccacagtttcaatgttgtgcgcaaaaacatgcaatccagaagtcgcaaccttctctacgcagcttggatctccacggaaatcaagtactgcaaaattagtagcaagggtacagcatatggaatggttaatgtattaactgacagggccggtgaccaactcatactaacattcaagtagccaagcatacagtg

SEQ ID NO: 6120 - DNA, 861 bp, Zea mays
cgtgaaccatctccgaatagcacaggaaatcctgattttctagctgactgataggagagaacaaataagcttagttaaatgcatgaagacacatcaatccaccttttgtgagagaagggaagatgcattaatcattataccaaaatgctttcttatttccaacctttacaacaacaggattcagatcgaatgcaacatatggccatccttctgtgtctttctcaattccaaatgacaatggtgcagataaaaatttagcaagcacctgcacaaacatgaaaaattatggtatgcactcaaatgacgcaagaaaagaaatatcatgcaagacatagacacctgtcccatctctccaaaaccaagaattacaacaggttcagtggcaccataattcaccatctcagcaggcttctgcaaaaagagcatcttagagttcacaagaaaaaatatgctaatggtcaatgtgaatgtattaatgattgcagttacatacttctttttcttcagatctttcatcaatcatccctgctactcttcttccaacttcattgagtaagggagttaatgccatcgacagcacaacaacaattataagcagtttatttaactcaagtggtaggacaccgagcctgtttgccaaagaaaacaccacaaatccaaactcgcctccttgagaaagtagcagccctatccttacactttctttaagagttaacccgactctaggcccaattgcggtgattatcagtgtcttgattacaataagaccccccaacagtgacagaacattaggccactcccggatgagaagctacatatcatgcaaaaggtccagatggatcaatgagcatataaacaatc

SEQ ID NO: 6121 - DNA, 768 bp, Zea mays
tatctttttaatctagccaaatgcataacaaacagaattagaagtcactacatgacaataaaagaatcgttttctgattaagaggcacattgagtttcaagtcgaaataccttgataccatcaaagtttttgatcaatcttggagtatattcactgcacaagtaaagatagttaccaatttattatcttttaaacaatttaacaccatatagtacaaacatatccagaattgtcgggcctattttaccgtaagataagcagaagccttcaaattttcgaacttctatatctatgccattcagcattttacccaaaactcacattacaataccacataattgagcaaccttgttcagtttaaggaaagcacaaacaatacccatatatgccacactagttcatttgccacaagctttaactgtttgagatatttagagggcccattccctcttaaaatcatgcacatagctcccttgtgtacttaggcatgccagctagcagtagaaaaattttcatcctttatggttaagaattttcttatatcttctaaatagataacaatgaattgacatagagtacatacacaattaagttccaacatatgttttttagagaatatttttatgaaatatatattatcatacgttgaggtcagagaaaatcccaggatgctagattgacggccatgtccgagcctaccagaaccagcagctccccaactcaagacttcacctttctctgaaaaagtaaaatcataaggagaagatc

SEQ ID NO: 6122 - DNA, 844 bp, Zea mays
aagaaaaaatgtccaataaggtttcagtaacttggaagagcaatcaagaatattaagtaggaaatgatcaattggagttaagagtgaatatttaggacatgtgacagccaggagttcacatgattgtacctgtatacaagtatacagtagacatctacttgattgactaaatctactaagatttaacgaacaattatatacacaagtaatttcccttggataggagtacagggaaagcagctattcccgtgtccgaaccatgaacaggctttagatcccccaataatatcattatcgatgcttgtatatatttctctttctttaccctttttgctggtcgatcatattgggtttcaactctagcataccctaagtttcttgggactaaaaagatatattgttgttgctatataacaaacaatcacttatttgagaccacttaacattggacccatagttaatataaggctaaagaaataaactgaagaccagaccaatgtttgcagcaaaaaagtaattccaattatctactatataaaacaccaatttccagggtttccaccattgtcgtgctccccacatttaaatggtaaaaaaactataattatgtacaaatggagattcgaacaatggttgtttgcttcaaacccacatggccacattcacacccaccacccaacagaacacatgtctttatgttttatactctatacttataaatggaaaccgtagcaacgtgtgtgcactttggtagtttagttacaatgcagagttcaaagaatgaggaaggtaggttctgatgtgtcccatgaataaaatatatgaacgtttcatcacccatatt

SEQ ID NO: 6123 - DNA, 856 bp, Zea mays
actttgaatttgcttattagttaaagaataaatgtgcttgttcttgacttgctgtatagggtagttggtgctaccctttatatatatgcaccagttacatatgtgctttaccaattctattgcatggtaacaggcatgcagctgcttccattcgctaatgcattaagcagttaccaatagcatctctattgaaaccaaaaaggcatcttcatttaactaactagatgtttcctgtatttaattgtaaactacattgcttaaatgtcattttaagtctgaaggaactgaaatttcctggacatgcagttagtatgtattcaccatcatagtttataccatttatagttgacaatttttctttttttctttctgtagagaggtagccttgctgcgaagttctcaaaacaaattgtatctgctactacttgatatggtttttgatggacaaggtataactagttaatttcctgcatgttgtttattttcaccatctgaatcatgtttctagtttccttgtttttgtttgataacaatgacaggccatttacacaatcatttgcttgatagaagcttttattacccatatctctattttggacctttgttattgccgtaattttgaatctattgattaatggttaatttacagaaatcatgccaagaattttgggcagctatagtctgcaaagtctagaaaaagtttcaattgggctgggactacaggcgctgaggtgtgttagcatattaaccagtatccacagtggtggcttagtttaccctgaggctttacttttattttttcatgtacagagtacacatgtcagatgatacaacttatctattcatcacaaggact

SEQ ID NO: 6124 - DNA, 936 bp, Zea mays
cttcatttgatagtacaaaatgatgagcttccattcttgttcctttgcatgcagaacctgaagtcaaacttcacactttggaggctgggaacattaccaccaggccttatagcatttaaaggccatgttcacccaattgatccatcatggcatctgttaggtttggggtatcaggaaaagacagatatcagtagtgttgaacaagcagcagttatacattataacgggcaaagtaaaccatggctggagattggttttaaacatcttcagccattttggacaaaatatgtgaactactcaaatgaattcttaagaaactgccatataatggagccacagttgtagattgtcgtgacaaaataaataaaaagcatatatcaagtgaaattaaattcgttattttggaagtcaacatcagagagtttatgaagggtaactggggagctcagtaacccccctccatggtcatatgcgttgatggtgaatatccaatgaacagagcatctttcccctcataggaccccttcccttttaatttattccatttgtatcatagctcatgaaattatgatattgtttaggatggttcttttgtattcgatggagcaatatatgagttgaattgatggtagtcccatcattattgtaattgattaagagtatacacagttcatgtgaaaagcatggattttgattatgcaaagcaaaccttgtatacttgttacttatttttagattctctcaagtctgatcgcccccaacagaactaaccatctgtatgtgtgtgaattccatttgaatccacacttttacagaagaaaaacacgggatttacttatttcagccccccccccgttttgttcctggaattgaaatccctccttaaaattataattttggcccaagaacccttaaacttattttattttttgcaaa

SEQ ID NO: 6125 - DNA, 819 bp, Zea mays
aacagctaatgcctcactttcacagtttggagtgcagcaagaaggattactacgaccacttttcacacccaaatgtccatggataggctcaattgctttgcacataagcttcccagttgttagtgtgcctgtcttatcaaaagcaatagactgacaagacgaaagagcatccaagacatggccacctttcaacaaaattccctagaggagaacaaaagcataggttcatcaatccattatccactatagcacccagaaatggagcagctagtacgagaaaagagttattcaaaaagtgacaagattgctatggtgctatctccaattaaatacaagagaaacttcgtagctgctgtaattaccaatacattgaaaaagagagagaattcatatcaatatactataggttttacccatacttgtgagcaatgtgaagttatgaactaaatggttgatgctttcaagaaagcattgtatcacaccaaaataaagagctcggacaactgaaaatttcaaacagtaccttactagcaagagaactgattgcagttgcatatgccaatggagctacagccaatgcacagggagatgcagccaccataagtcctaatccacggtaaattgaacccctacagactaaagaaaatgtcagaatagagaaagttcaagtctggagttaagtgtatgaaaccgatagaattggcaaatcaaaatcatcagtatgaaatgtaccaatgcatattgggtgtactactatcaaaagtacctattatgttttatataagtatatggcaggaccaatacaatagtgagactttt

SEQ ID NO: 6126 - DNA, 810 bp, Zea mays
tggtccgcattgctgtcgctgaaaggttcgtaccacacgaaatccaggagaattccaatcttccccttctggtgaagctgttcgtttagtggaaaaggaatacggatcattttctggatgcctgaacactgacattttaattactgaactaaatctgcaccgtgcaattcacacttctggttctgggttcggaggcttgaaatatatagttagcaggtctgcattttatttttacctgatacttgtcgcggtatcgcctgacagcagctgcatgagaaaggatgagatggtgtgcgacaaggtacggttccgtggtggagttgcctccggcggggcacccggaacaccttcccggtgcgtgcaagccattgtcgtagcccagagcagcgacgcacctcggctcgttgaaggtaaaccagttcttcaccctgtctccgaacgcgtggaagcagaactcggcgtagtctgcaaacgcctcccttcgattgggcacggcgtgcagctgggtcagactgactgacacatggttgaatcaatttgaaatttggtttctagatgtcgtctagtttgcaattcttacacaatctttgggctaagccagcccaggtactgttcatggagtgccaatgggaggtcataatggtagagatttgcatacggggcgatacctaacttgtatgtatacatatatataaagggtaacccgggaatctgaatgtttcctgaaagaatatatctatatctatatacataataaccggcctaactggcatatggggggaaaggaaacctacccttgctggaacctgt

SEQ ID NO: 6127 - DNA, 521 bp, Zea mays
aggctagcaaccattctagctccgaattcggagcaggcgagggcgaactgaccgaggcgaggacgatcactgtccatgtccatggaggcggcggttggggcggagttcggacctcatctgcatcccgctctcgggttcaggcacagccagcgccgtgtctttttttgctgttggcgcctgcatccgccccggccggcctcgcttggcctctgcggtggcgggggagcccgtccccgcggcgctatccccgtcgcggatggcgaccagcggcggcggctgcgagagctcgaggcggaggcggaggcggaagctggatcgatcttgggtcctccgaggagcagcccccgcgaggtgggaaacctgctatccccggcccggccctcgctcgtcgtccctgccaatcccaggactcactcataggctcctggttgcccgtgcaggtgagggaggagatggcccggtgcttcgacctcgtccgccgcctcggtaggggcgccgtctacctcggctcctccagggtc

SEQ ID NO: 6128 - DNA, 856 bp, Zea mays
gcccgcgcagccagctactgcacctgtctagcacccgatcccgcccacgtagctaccaccagaccacacgtaccttagtgtttgtttagaaataaacaataattatataaaaaatagtgtagagcaagcactcaaacccacgcccactgctccagaaatttggggctaaccaccagaccacacataccttagtgtttagaaataagcaataattatatttaataaatatctcaatacctatttatatgatatataaaaactgtagcaaagcacgggcaactggctagtatattaataagccaggataaaagaaacatgtgataactaattttagcttaaactttgttacatggagtttatttcaactagaacatattcaattaataatattatgagacatatttgtaagttatgttgattctaaggcgggttttaaaaacccaggtttgcggtatgggtagtggaagaacaaacccatgcccacatacctgttgggttttcatttgaacccattaataaacccatgggtagagaaattagcccaaacccatgtcctaatagagcaaaaatccaccgggtttcgggtacccattgctatctctcgtggaggtgaatgctgcatttgccttttgtcacctgcacaaggccgcactagcatcaggtcctgaacctcaattctctgtgactgtgactaagatatttaggtggaattgcaatgtggaaccctgtggcatcatggtgttcaagctttgaaacacaaaagtggtggttgtaagtgaagggggccactcaattctaaccctcaaaggttgaagactttgaaggggtcaatgggttgaaattctatttttaagca

SEQ ID NO: 6129 - DNA, 956 bp, Zea mays
gcttgtctgcctgcagtccatcagcattcagcaagcacacacacagtgactgatcgactgactattcgacagctctgctagctggcttcctgtgatatatctcactgcacctatataggttccggcgtcaatcagctcgcaacacgtagacgtgtgccaacctgcctgatctcgacaagttcgacgatgggtccatgatcttgtccccttcctttttgttgccaccacgtccctggatccttaaacctcactttcaactgtaaagctggttccatgatactgctgggtctcactgctttaatgggccacatacgcgccaactttctcaaacatacactgatcgatatcgacgcacacatgtactccccccactctttgcatgcatatggctagctgaacgacttgcatctggatccgccaacgcgcggctgccaaaacgcgcgtgcatgccattattgccagccactctaggtaattaccaagaacgagacctctgaaaaaaagatggaactaaccgatcgagatcttatctcaacgaccatcattacgtttttattaaagatggcgcgatcgatccgatatcgtagtaacttactagctaatcagtgtctcacccaaaggcaaaggcaaaagtgatgatgttgggattgatagattagcaggtcaatcatggaatgatgttgctagtcaattacaagccaattaggaagggcatgagattaacatgatgaattcatggctagctcgctcctatcaacaatgccttgcgttgcgttgtgaataaaagtataaaacaaagcccgatagtcattgtctacgactttttttctcttacttccctcgacaccgttttggtttttagattgggtggtttgaattgccacttaaaagtttaattaggttaagccttggcttaaatttagccttaaaggaacattcacaaaatggggtcaaag

SEQ ID NO: 6130 - DNA, 893 bp, Zea mays
tgcatgcctgcagaagcaaaagcaggttaacatgtagtagaacaaatagaccttggacgacagacgtaggtagcatgtgcatgtcacggggatgtatgtactcctgtggaagcactaggcgtgcgtgagtagcgatgagctgatgacgaccaactacacggttttgggggggggggaggagaaaaacgaggttctctcgggctaggaagtcctaagatacatctgtaccgagcacagaacagatctttggggttgtgtcgcgatcataagatttgagatttcgttcggcccgtctaggcgctaggcgtctactactatcttctttctagtactactggatacggtaagcgcgtgccgcggacggggacgctttcatgccgatcggtcgccaggcccaggacgtaggaggttggaccatgcgtccgacgcagcgcaacgatctggttgcgtgcgccgccacaccagccgggaagcttcgctgctgttcggttggtgaggtacacgtcatccgtcagcagaccacgaatgctagctgctgcacacgtcctgtctcgtgggacctgatcgtttattagacggcttttatatcgattcggcgggcggcagcaccacgtcgtcgtttcatttgctctctatcgtccatgtgacgcaggtgcggcttttattcccgccggcgctgctccagaatcgcagcgtacgggccgggccggagaggcacggcacgccggccgcgggcaaaacgtgagacgcgtgtgtgccactgcacggaaagctgtgtttcggtttgggtgccgatgtgtggttggtgtggccctatgaagaaatttttaagcctgatgagggaggggttttaaaattttttttccgtggaggaggagggatccgaaaaaacc

SEQ ID NO: 6131 - DNA, 848 bp, Zea mays
cttgcatgcctgcagttgcagaactgcacggatgtgtacgagactgggctctctccacatcgtcgattaagttgtaaagcagtatatcttgctcgcttagtaattttagttgggttgaaagaattgtaaattaaaacaattttggtagttgattttaatgtcgtatttcttataccatcagcatgggaaattttgtgttcaaaaaaagaagagaaaaagcagcttggttatcttgtgtcgtgtgccttttctcgatgtgtacttattcttcgtatgtatggggatagtaacgcatttgcctagtgatatttaactttatagattaactgtctgaagaagaggaaagggaagtgtataagtgtaaaacggcaggttccagaaaattggctagtcatggcttttcaagtgaatgcaagagtagatgaattcactttgttctaaattatgttcattttaaatgaaatttatagaaagtgcgccagtgtatataaaatcatatcagttttattagttttttttttcatgtaatatgttttgacaggtcatttatcttaatttgtaaaaagttgagtttattttccccgaagtgaaccgcgacttgaaaaggaaattacttttgaagtatattttggcctttatttttataacatattatcaatagtttcgcaagtatattatgtatataggtctaatttagaactttgccgattcctggaaggggtagaaggtcgatgcaaaggttcgaactagcaatgctcggaactagattaggtttccacaagttgacaatccaaggcagaaccgatcgggacattgttacgaaatagaaccccccaacaggaaatccg

SEQ ID NO: 6132 - DNA, 756 bp, Zea mays
tggcagaggccgagagtagctcctgcttgctaaatttgcatcgtatccgatccattccatgaagaagtcgtcgatgatggcgcccatgacgatcatggcgagcgttgccgctgtgctcgtcctctcgtcggctgccatggcttccgccgcaggagcagctgggctggacatgaatttctacggcagcacgtgcccgcgcgtggaggccatcgtcaaggaggagatggtggcgatcctcaaggcggcgccgacgctggccggcccgctgctccgcctccatttccacgactgcttcgtcagggtatatatataactatatacatatattgttgctgcattgattagttgcattgcattgcacgttagctaactcatcccctgcattattattaattattaattgctgccagggctgcgacgcctccgtgctcctggactcgactcccaccagcacggcggagaaggacgccaccccgaacctcaccctccggggcttcggctccgtgcagcgcgtcaaggaccggctggaggaggcgtgcccgggcaccgtctcctgcgccgacgtcctggcgctcatggcgcgcgacgccgtcgtgctggccaacggcccctcctggcccgtcgcgctgggccgccgcgacggccgcgtctccctcgccaacgagaccaaccagctgcccccgcccaccggcaactttacccgccttgtcagcatgttcgccgccaaggccctctcccgcagggacctcgtcgtgc

SEQ ID NO: 6133 - DNA, 726 bp, Zea mays
aggagggtgtgcgactgcgagctagggttcggcgccgcagcggcgaggaagggaggagggggtggtgctgcggcggcggtatgggcgggcacggcggcggtgctcgaggggttcctcgtggatccgtggctgctgcggccggctggggccgtgaacgaggatgcggcgacggtgcaggtggaagtgccgcccctggagccggaccctgaggatggggaggacgaggcgcgccgggcggcagcgcagcgcggcgccgccgcggcagaggacctcgccaggcgcttcgagagcggtgcctacggatcgccggtcagcggatctctctcccttccgtcgctgttttgccgtgtgtcctggctagtgtgcttgctaccttgtgttcgtgggaaaatttcaagtgggttctgtgcctagcgtggcttatcttcgtgctggattgtgggatgcttgtagtcttttgctatgagttgcatggaattcttggctgggacaaaggaatctgatttatgcatgttgtagaagtttgcattcttttgtgttgaggtttataggattgcagtcgacgaaagactgttcctcttgggaattgtggggcagcctagtgctgggattgtattactggggttaattagcaccatcattcggtactggcacgcacaacctaatcactgaacattagtgggcacacgcagccatgacattggtaatggtttgcgggtggcagta

SEQ ID NO: 6134 - DNA, 767 bp, Zea mays
tttgcatgcctgcagctcaaagagttctcgccgccgtttctggacgcaaggcttccgaacagcgacgtcgcgacgggggtgaacttcgcttcggctgggtcaggattcaacgaccagacgtcgcggctgtccaacactctgccgatgtcgaaacaggtggacctcttcgaggactacctgctccggctcagaggcatcgttggggacaaggaggcttccaggatcgttgccagatctctgatctttatcagctcggggaccaacgatttctcacactactaccgttcgccaaagaagaggaagatggagattggtgactaccaggatattgttctccagatggtacaggtttatgtcaaggtaaaaataggcatttcctccttctgagttatcttatctctactgaattcttatactacacttcagaaactaggcataactttaccttcgattccctactgtaactctgaatgcaggaactgtatgaccttggggggcgacagttctgtttggcaggccttccgccgtttggctgcacacctatccaaatcacgttgagcggagaccctgacagggcatgtgtggatgagcaaaactgggatgctcatgtctacaactctaaacttcaaagacttcttgcaaagttgcaaggctcactccatggaagcagaattgtgtacgtggatgcatacagagctctcatggaaatcctggagaacccggccaaatatggtaatgctttctgttaattccatggcttatgcact

SEQ ID NO: 6135 - DNA, 728 bp, Zea mays
catcttgcatgcctgcaggtagtttcttaaacctgattctagctacaacttagtacaactaatggtagtttcttaaacctgattctagctacatgtttcatattgtggcacaagaacttttaagaacatatgctgatgcccactgtatttagttactacttcaagaccaactgtattttagttacaaatgtgttttcaagattgtagaaatttgtagctaaaattatccacatcatatttgtgaactgacatcatttctaagaatattactgattagaatctttcacttttataatgctttgcaggagtggcccctctggagttgaatatgcagctataaccaatttttaccccttttatcctagaagagttgccaagacacggtataagaccatgataatagactaagagaggatttggctctaattactatatgttttatttatgcagtcccatgagaactttgagtatttgcagattgctttattaatttattaaagttaaagattgtatgtgttgagtatgtatccactcttgttggaagtgtcttgcaattccaatccaaggatgtataaaagtctgcatgggctaagtatgtgtttttcatgtatttggagtatatatactttttgttgcttgagaacatgtatgtacacttgaagcttgtcaattgtgtgaacttgagttgatccctgtctaacctgagtatatctctactactctataag

SEQ ID NO: 6136 - DNA, 761 bp, Zea mays
gcttgcagtcaatgagaccaccctcggataactacctatttgatagtgacaactgagaacacaaacagcatgaacattcatcaaataacttaggaataggataaagcgtgatcaatgggcaacaatttcagctagaagtcctatctctgtagcaatgcctcccaaaactgcacatccagtaccagaacatgaaaagcctacgagggaagtaaatttttaaagaccattgacagcaaaagtttcgaacaacattgacagcaaaccaagggaatcctgaacagtttataacttattgctcatgcagaaccagaatctaactcaggctcctccgaccatacaatccagttgctgtacaagtagagaatcaccatcccaaatgtgtaaggaacaagaaatttaagagtaccaataaaatagaggtagagccaaatgatgttctccagatgcaataaacttcagtccagtcaaagcttcaatccacctccaaaatgtttaaatctacctccaaaacaccacctgatcctgctaataacatttttctaattaaggacgatcaagcttcaaattaatctcgtggcaatcttcacccaccattgatagacatcagaacagccatataacatatcaaaaacaacgaacatagtcaaacctccaaccttcagctgacctctccataaccagcaaggtacttttgcatctaggacgaactccgagtctcctaaaagtgcagatttactaacaaatggaagcctatgaggaaa

SEQ ID NO: 6137 - DNA, 818 bp, Zea mays
agatgcatggccctagctggaaaaaggccatccatccctctcagggcaaccaaccaaccaaccactaaccagcaccgccaacctctctgtctctctctcactctcactctctacataggattacacttaagcaatgttgctaacaacactgctaactaagggtggtagtaataaacgacataattaacaggcaggacacacacacatatatatatatatagcggcaaggcgacgtgacggcggtggagtccgtccgacatctgtgcatgcaggtccgttacgcgagcggcgccctatggggcgcgcccttccgcctgttgccgagcgagaggacgatctgagggaagaaccctcctccgcccccgccgctcttcttcttcctcgtcgggacgtcgacgtcgcgccgcgcgtggttcctggccgagccgccgttgctggatcctccgctggcgctggcgctgcccccgtgctcgacggggtcttcgaggatggagctgggcgtggcctgcccgtactgcccggggtcgtcgtcgaagcggaggttctcgaagcgcgggaagccgcagcccaggtccggcggcccgcccggcacgtacaggaggatgttggacaggtccccgccctgcatcatcacatggtccacctgcatgcgtgcgtgcgtgcagcccacagctgggtttagcgtacagtaaccacggaaacggggccgtatctaatctaagcgtgcatgggcgtgcgtgtgcatgcaaacgtactactgcgagtgaagcgacgtacggctgactaataacttactaacgtactacgtgccaggcgac

SEQ ID NO: 6138 - DNA, 812 bp, Zea mays
ttgttcaacataacaacatctagtaaacatactgaatgcagtagatctagtgcctaacaatgaacaatggggccacaaaacatggtggagaaacttgcaggtgctatacttcagcatggaatcagacataatttctattttctacaacaaaaagataccgagtcaaacggtcaagcggtgcaaacacaaacgagtcagttcagaggattaagtattcatgagttactagatcgttaaacctagtgattccaagagctttgcatgaatcagccatgctgagtgattatcggttacttacatttaaggttagagatcattatttgacaagatacatatttaagccattgtgtgcaatatagaatttaacacaaatctggaacacgctactgacctaatttcattgagtgcatgagctggacaatgcatgcacaatatcttatcagctgtgggattacgccataccatgcgctcattcatgcatgcatgcttcaccatccaattggataacataggcagataaaacaaaacaggaagttgccatacatgagaaggaagaacaattgactttgctttttggtactctctgacagcaagatcatattctccttttctaatgttcccacggattgcacttggtagggtaaatagtgttcggaatctttgaagcattccctgaacagatctgatcttttcagcttggggcctgtacccaaaaattaaaaaatttaatgcacctcaataagggaaaacttggagccaataacaaaataagtctaagagaacaagtttaatttataattccctggcctttt

SEQ ID NO: 6139 - DNA, 770 bp, Zea mays
atgatcgtcgccgccctcgccgcgctcgccgaggagaacggctccagccaggccgccatcgcgcgccgcatcgaggcggaggcccgcggcgacctgccggcctcgcacccggcgctcgtcgcagcccacctctcgcgcatgtccgccgccggggagctcgtcgccgttgcggggggaaagtacgcgctgccgccgccggtcccaccgccgccggagtcaccggctgacgacgaagaagacgactacgccgacgatgaggaggaggaggaggaggcggcgccggagccggagcctctgccgcagccgcccgctaagcgcgggcgcgggaggcccccgaagccgcggcccacgggcttccccgccggcgtgcccggagctgctggcccgggccccatcggcgtccccggagccgccgccgccgccgccgcgccgcgccggcgcggccgcccgcccaagcctcgggacccgcacgcgccgcccaagattccgcgcccgcgtggccggccgcgcaagaacccgctcccggaggggatgaccccgcggccgcgccccggcgcaccagcgtcggccaaggcggcgcgcccgcagttcgccgaggtcggcttcgtctgatgcggggaggtctcgccccgccgggccagcccggccagggggcggcggcgagctggcgcaagctaacatttttgcccctgtgttccagctcttggtctgttttgggagtgggttttcggtcctcaaattcggggtggtaccttggtcttaatcccccg

SEQ ID NO: 6140 - DNA, 922 bp, Zea mays
gaagcccggaagaggtttttcagatacagagagaaagaaagagaagggggtgggcacagcgcaggcaggatgaagtcgagaactgcgacattggcggtcggcatcctcctcctcgtcgcgcttgtggtggtggcggaagccgacaccgacgccggcgatggtattgcaagttttagcaggccacgcccacgccgccttcttggcttgtgttttagcagacaagttaatgcctgcgtgatcggtgctctgcttgttcttgcagtcgcggccttggggaatctctacagctcctggaacagcccggcgcagctcaccggctggtccgccagcggcggcgacccctgcggcgccgcgtgggcgggtgtctcctgctcgggctccgccgtcacctcaatgtaaagagattctcagtctggcacgccaaatctagacttttctagcgatgaaaacgacaagatgttctgtcggccacattgagctgtggttctaacatgcctacgggaacgccggtgtttactcttttcttcttccacttcactccggctccttgaaatgggcatggaaatcctctgatgaattacctgaacctcttttttttcttatgctgtttgctgaaaagtctgttagtggtgtttagcatttacaagtacatccatccattgctgctggtgctgctgccttgcttttccaccaaacaacatgcttgctatgatgagagtcgaacccaacattgtcgtcgttctgctcctgtaagatagtattaaatgtcgctcgacataaattttgtaactgaaaattttcatagcctttttaaccccaaacttgtcctttaacagtataattgacttatggtgttattaaagccatcccaatccttattttggcggtccaacataaagattggcaaagaaaaaatgtttcc

SEQ ID NO: 6141 - DNA, 824 bp, Zea mays
gtggagcgcgcgtccgcgctgctccgcccgcacggcgccgccgtggtggagtacaccagccaggcctacaccaagagcatccctggccactacgtcatctactgggagctcctggccaagggccccgcgggcggcgccgcggtgggcgaggggacgctggagaggtgctgcctggagatggaggaggcgctgaacacggtgtacaggcagagccgcgtggcggacgggtccatcgggccgctggagatccgggtggtccggccgggcaccttcgaggagctcatggactacgccatctcccgcggcgcgtccatcaaccagtacaaggtgccccggtgcgtgacgttcccgcccatcatcgagctcctggactcccgcgtcgtgtccagccacttcagccccgcgctgccgcactggacccccggccagcgctccgactccgactagacacgcgggccggcgtgcggcgaggcgtgtccggccgggtccggcgcgcttaattagactgggaattcgttccttgcgtatcgcagacgtagaatatgcccgtgaaattaaaatatttgttaattttggaattttgggtactgtcagttagcggctttgagggtaacctgacaacctgtgatgtgatgagagttggagtcactactgaaggctgagctggtcagctgaagcaacagtcgacgcctgaaaggtgttttccggcagtaatggcactgttgtccctatcactttagtagtacggaggacgcggctaacttaaacgttcttccaaatccaaatccaaatctgtacgagctatgcccctgtgcatgcagaaa

SEQ ID NO: 6142 - DNA, 767 bp, Zea mays
agtaaagaaagttcagaagtcggaacatactatgaggcattatgttattatttagacagagcatctcttaactaaaacagctatatataagtaacggaaagcatttcattaaggatatgtatggtacaaatacgaattgactggctatggtatcctggtaaggatacttcccacctcccaccactcatcccacaatacagtaataagattattggccctatgtagtatgaaacattttaggtgtaaactgtgcaaaccaatccaagaatggaggtgggaggacctttttaaaaatatcatattccaaatcaacccttacacctcgcactggatatttttaaaaagatcctcacatctccattcttgtgttggtttacaaggtttgcatcaatagattttttttgtacctgatatattctacatatagtaacccagtattgtaatacagaaaatctatttcctataagagaaatcacgaaaagtaaatgtttgtttttgtgaagtctcacatttaacaaaatctggggaagccgcccacccatataaatcattgccatagcccaaccaagaaagcttccaatttcacttccactgctctggctaagcgatgaatttccatgatcatcctatggcataaaaacaaatttattaaggtgttgttaatcaccattgaagttacagtaaaatttataccagataatttaattcatgtaaatgatctgtaaattatgttctgtgtcagcaactcagcgcacaggcctgaaaaa

SEQ ID NO: 6143 - DNA, 764 bp, Zea mays
gaaggaggcgcacccgcaccagcaccaccaccaccaccagtaccagccgcagcaggccctcgcccacgtcggcgccggcgggaccttgaacttgatgcacgcgccgagcccgctgctgttcgacgggccggcggcgccgctcatcggcgacgacttcttggtccacagccacatagggccggacttccgtcagctcatctagggacgccgtctggtcatttgctctctctagaattctagagtttgatcaatagcccaggaataataattcagcgcaaccaaaaactgatctttattttctaggagtttttccctccagtttttcctttgtattttcaccagactatcttttccgaaatcttcaatttttttttttgtttctctctcgatttctcgtgttttttttttgcttgaacctttcttctcggacctttgagtttctgacaccttagagaataattctagggagttgtttttcttagcctcccccaccccggctttctttcttagcatgtttttgagatttgtataatgcagagctcctagaggaagagtaaacaagcaggtctaaagttcagacttcaaagctagggtgagccttcatactgtactcctagttgtttcattgtttttttttgtgaaatcccaatcttgtctgcgtttcggcgagcaagacgacgattcgctctctgctgctgaaccgatcgctgtaatgataaaaggggactcacggctcacaaattaaagccccaggacccacgatc

SEQ ID NO: 6144 - DNA, 777 bp, Zea mays
tgcttcagtggaggtgctattccctcttggcttgtgattcgatggttttgagattaatcggttctatgttgcgcggcagcttgttgctctctacgtggatttcaagctcgacgagagctacacgcccagcaagatctccatccgggccggggatggcttccacaacctcaaggtatgcttgttctccatgagatattgttttgaaggatgttcaagaacttgtcgggtgtagtagatttaagcaagagtttacatgttgattcgtccgagttgagtacgacagagaatacgagtttcaaagcatgtgaaataatcattctgaggctaagcttgaactgattttataaactgtaactagattgttttttccggtatttcgtgccttcctagaagttagatacagttaatatgacctggcatttcctgagagaattgcttctgcattgcaagtactgctgcactgaactatttgtttgaaaatcgaaatgttgagcttactaagtggcaattttgccatcatttgaatatttcgataacatatctcatgattccaggagattaaaactgtggagcttgcaaagccagttggatgggttcatatatcattatccggggctgatccacggtatgcattgtaacttgaagatgaatggtagttcccaaaattatgagtatactctccctttatacatgtgggaggacaaaacaaatgtttgtggacaaagcaaatgtgcagacttaagctaacagccttggtttcttggtttggtttgagtc

SEQ ID NO: 6145 - DNA, 808 bp, Zea mays
acttttcaaacatcttatcggtgtattttagtccctgtttgtttccttccaggattatataatccagcttatggattatataaggagctattgacctgcttatagattatcataatctaagctatctagattacataatccaccgaataatctgtgttgtttatttacctatcaacttatttaagctggattatataatctagagggtaagcaaacatggccttggagtgcagaattttcccagcatcatcatgcaaatgattttatcttacatattgatactagtagtaaatatttttggagtcgactattctgtcgctaattctggtacttcacaactaaaccatatatatctctgtcttggatttcagaaaagtccacaagtatggaaagagcacaaccggcgagaggtgggacttggtagtcgacgaggagacatactacgagtaagactttttgttccggcgatcgattccctgaaacgtctcctcgacgctaaaatcgcttctgaatctcactgtcaccggactgcaaacatttgaaccagggcggagccccattacggatgggccgatgtcgtcggagactcgacgcagctgctgtccatacagcccgtggagaggccacccggcgtgttcccggccatcgacttcagctccgcgcccgcgccgaaggacgctccgccgggcatgcccccttcccctctggactgagtgaattaggcctgccagcacagacggatttttctgtctatataggctacggattttgcctgtaaggggaacagcattctttgtatgaagttgag

SEQ ID NO: 6146 - DNA, 1192 bp, Zea mays
cttgcatgcctgcaggtttccttttgcctcgtcctcctcccctatatgtgtacatgtaccggctctttttttttatcgaatacgcaggagggctgcgtatcattaaattaaagtagagggaaaaagggcctgaggcccgggacaaacagaacacacaacacaaacacacactctaaacacaaacacacacttacccttacaaagcacacaccacacagacacaaacgaccccaacactcccgtcttttagtaggctataaggctttcctttctctatccagggtcaaaaagagagcgcaagttcttggctccagcagaaacccacaatctcatctcatctttaaatccatcctctaaggtattaaggcagggtcgagctccttcaaaaacacacctgtttcgctgcttccaaatactccaagccccaaggattatcatatgtaccggctctcaatcaagtgttttctatttttcctccaaatcttcattgctttcaatcaggccaacaataaggggtggtaatgggctttagattttacactataaaatctaaggatcgaatcagtttaggaccgggctctatttctattaatttttgaactaaaattaattaaggtccctaacttattgtgaagaaacatttggatcgtgatccattaccacccctaccaacaattatgagatttaagagtacctttcatactagcgtgattagatgataaggatcggagagaatcttggtagaactatttgatgagagaatactatgcggaacactagctatggcgttggaaatgccttaatttgtggtcatggatttccaaatgtttcagcctatttttgtgggctatatcagtagggagcattgaatttggtcttgctttttcagtacaaattaatgaagtgattagaccttcgtaggctttatttaaatcccaagcatcctattctagaaaagtagcataaacgacttgttggaaagtagagcgaccaatccttttcttatggtcataaaaactccagttttttttttcgaaaacccctgatctggtgttaagacccagtctgtagcaatcagatgctaatgggaacattgacaggcatgtattggcacaaaagtgattgcaagcgaagccctgtctgccatcaagaaagggatgtcttatcaaaaatgctatgggtaaaatgacac

SEQ ID NO: 6147 - DNA, 809 bp, Zea mays
gaacgacacatttgcctacctccaggaaaccgtttatctccggcagctctcctatcacacctcatactttaaattttactttgtaaacagtgctgtctaccgtcccacctcatactttaaattgtactttataaacaattctgtctaccgtataaaattgtgtaaacctcttgttttgcatatgtacgatctgttggtcccagccttacaaggtatattcaactgtagaaacaagtctctgtagcatgcgttacaaggaattggactacatgatgcactttgacatatgaatttcctatatgtgcctggcaaaactctgtggcgacatgattgttttaccatcataacctgacacataaaaaaaaagcaaaaatagcgaacgaatgccaggttttcctgcttttgttctgggagtgatctgtgcttgactggttcctatggtgcagagcggacaggttgaaccatagtgaatgcctgttgtctcaaagctctcgtctgactatacttgtgagtggcgcacaggaagaggtctttaatttacggagacacaaaggttcatgagcactttcatagcacctccttttccagtctcaacacggccatgaatgcttcttgagggacatcaacccttcctattgccttcatccttttctttccttcagcctgttcgccgtattattatatcagatctcaaagggattttggtgaacagagctactagtcatttcttgtattctatgaaaacttaaagccagtatactgcttatgtattatacacaaaatggttttttctaagtctttttttttgg

SEQ ID NO: 6148 - DNA, 791 bp, Zea mays
aacaaaatgcgcaatccatccgaagcaatcccggtcttgcttaccagcaggagaagaaatcaatcggagtccggatggatcttcactccacgccagtctagggggaacgaggacgacgagagaagggcgaggagcacggttggggtggaaggacgcattgatctgcatggagggagagtgaggcgcgttcggcggggagggcggggagggcggggtggagaagcctaacgatagttggggaaggaacgagtggtctgcgggatcggttgaactcggtcgggactcgggacacaagcacaaggtgacaagggcaaactgccgtacggctcgagtgctctttgctcagtggagtcttggtgcttatgtaaataaaactctagtgttttgaaattttaatttcacttaaatgcatatgaattctttgagtttaaatttatttaaatgcataataattcttataaaaaaaaagaaaacgtctcattgcacgagccaaggtagactttttttgtcatagttatacgcagttgtatacagttctgacgaagcagaactacatgttaattattatagacaccgggcctctatctatgtaaaactttgactaataatagcatcactaacaaatgataaagtgcaatggtgtattgcattgcctgtcccggatctgccgcggtgatttagtatgatttagtatgtgtttgattctcggactagagttgaatccgagttttagatatcaacaattaagataattaaatatgcactaattataaaactaattgtatgatttg

SEQ ID NO: 6149 - DNA, 847 bp, Zea mays
atgctcctatagtataagatggacttacacttatcatgaattaagcctccaattttggttggacactcttgctagcctcctagcctactaaggaggtggtcgagcgaaaagggtgtctaagatcttttcttagtatgttctccatcttctttgagcatatatgctctaacttggggctaaggtcccaaaggtgaataaacatccatgatgacatcatagcactggcagaaaaacaacgacaatatgtcttgatgatttggagaccttccccgtatgatcttgaggtgaaatcaaattcatttaaaagtttattgaataaaaacaagtgctcattaatctcattcgaactccgtatggatgagctacgacctttctaatgaagcgatgtcgagctaccgacgatccgaatataggacttcgatgaggttacacttcaaaatcggtcgtgtgaatgttgtatccatgtcccatttgttgtagaggcaataagaagtatattttcaaagtgatattattaatcatcgttattgctaagcatattgaaagcataaacattatataataacatattcttatgtcactgagcaaatatatgaacgagctcacattttctttaacttttgtagacatattcaaaggtgtcatgctcttatctcactagagctaattttagatatctactaattagctcttgtatcaaatatgccttggattgcctcaacacacgcattgcccattttctttcaactaactatttttttatttttatgggtatggatttatcatatattgacaaatatcccatcaacaggtggtttccattaataacacatttttattgatacaa

SEQ ID NO: 6150 - DNA, 827 bp, Zea mays
gagaggaatgtgatcggaggtgttttgggcggcccactggttgctgcaggcaccgtgcaggtaccattccataacaacatcatcatcctcctcctccctctggttgtttacgtttacatacggtgccttgcatgcctggtttgtgcaggtggtactggggagttttcaccaaggagggtcgagatccaagtccaagaaaggcgggaagcagcagcaggcgccggcgccggcggccgccttcagttccgactcgctcaccggcggccaggaggcgtcgcccagctctgggcacaaccaaaatctaacgccgccgccgccgccgccctccgtgacgggagggtggcccacctccgggatgtttgacaccagcattgatatcaactcatctagaggatagctcatttcatttgtcgataattccagccctcgagaaattttctgttctcgcacaagaatgatcgaaaccatacttcgaaatagattattcggtttctcccttttcccttttgagcaagaaaaacggaatttctatagaatttataggcatcggtcagcatatccgattccgacatccccccttcgctctctctggcagtattgggtgtgttaggtttggttgtggagaaattttctatagaatttattggttgtccaattcttctggggaacagctagagacggtcttgttacaacctctgaatccgatctggagatggtcttgtcgcagccctgatcctaaccttaacaaccttatccgacacaccttttgttctcctcttggcatcaagggaccacgttacatatactccagggcagcaacatgtact

SEQ ID NO: 6151 - DNA, 858 bp, Zea mays
tcgacctgcagtagtccaaacactacaatgttttgtctctaaagattatagctgcagcagttcaaacaagcagtcgaacagttaggttgaagcgaacaaacaaaacaggacatgaccggttggtcacaggtgacaagtgcatttttttactgcccaaagggtactcccagaagatcaggcaactacagcaatcagcttcagtaaacacctacaactgagctacatgaatttagacaggtttcacatcgttctggcaaccgaagttcaacgtgccacactgtcgtggttcaccgttcacccgtagtgctaccaaagtgggggtgcgggacggcaccgccagcctcattgcatcctgcttgtcagttgcgcaaactcatcatctttcatgtacttctcctgcacttccgctgttgtatccacacgtcaaggaaagaaagacaatttgcaagatattggtgcacaggaccaagtgcaacagcatatattctaaggcataccacatacgtaacagagaaatattactccagatttcacaactcgacttagcaatagtaagctggtgataaaacaacatacttggctgcaatttcgcgtggtttggcttgcgatctattcaccacatgcttgctgcaaaatttaatggcatgcagatgcatcatctgcaaagaaagtctaatgcttactccatattgtcagtatattatacctgagaatgcaagtggtttgatagtgtgcatctgggacattgaagataacataaaaattacaggcggcaaaaagattcttcgcaaaaattattaaagaacaagtataggatatctgcagtagtcccaatcaaagaggcgccgttgcaatttt

SEQ ID NO: 6152 - DNA, 822 bp, Zea mays
aagacggatgcctcccgcccttgggctggcctccccctcgaagtacctcctcttgcgcaagccctgtttgacgttgctgttgttactgtggtgggcaatggtgaatcaactaaattctggacagatcgatggctgcaaggaaaatcagtttcgtactgggcccccagtttgtttcagttgatccccaacagggctaagagacataggacaatggcgcaagggttgcagaaccatagttggatttctgatataagaggcgccctatcagtacaggtgcttgtggagtatttacagctctggaacctctttgataacttggcgctccaacaggaagttccagatcagcacgtatggcggctaacaaatcatggggactacaccagtaaatcagcttacgaggcctttttcacggggacaattaagtttggcccctggaggcgtatttggaagtcttgggcacctttaaaatgcaagttcattgtttggttggctatcaagaaccggtgttggacggctgataggcttgccaaaagggggctgcctcatccatctgcctgccccctttgtgaccaagctgaggagactatccaacatgtcctgattggttgtgttctcgcgcgtgaggtttggacatctaccctcaatagcttggggctgaatgcccttgcacctcagcctggttgtcgccgttttgtgggctggtggtgtacagctactaaagcagtcccgaaagagatgaaaaaaagtgttaattccctcatcattctggtcgcctgggaaattggaagcatcgagatgcctgcgtgctccaaggaaaaaggc

SEQ ID NO: 6153 - DNA, 825 bp, Zea mays
cccgcgcgcgcggcgtagaggaaggacgcggcgtcggaggggtgcaccggcgggacggacgacgcgggggcgtcgcggctgtggcctcctccacctagagggaaccccgccatgtggccaaatccataggccgccgtgccgttcgccgttcccggcaaggtgaaggtgaagctgaagctgagagacaacggcctgacgccctggtctctccctcggtccctccccctctacagacggctgctcgtcgtagtctgcgctctgggcggcgtgctcatgcgctctgcgacggattaaaacccgcgtgctcgcagccgagcggtgtggtttgtggtgccggcgcgcggccggagttaagacggtgaggcgacagagaggacctgccacgccgccatcagcctgcgcgcaccaaaactgccatttattgcctgcctgcctgcctgccgctctctctctctcctcgcgtctccttcttctcactccctctctctctatctcctttccgcacagcgcgagacaggcaccacaccaacacggcagcgcggccgcggtgggctgtggctgtgggtgctgctgctgatgctgctgatagtagagtgaagtgcgttgcgagaggagagagtcggaaagagagcgaggagggtacagtcgcccaatagaatactgggggggcggcaacgtgatgggtggcctgcccctggccctgcgtgcggtagctggaacggaatgtgctggagtctggagtaccagcaaggattgccgcatgatgatggtggcgtgctccaaaattcagtccctgcgcgtctgggctgcatgcatggttgtatc

SEQ ID NO: 6154 - DNA, 810 bp, Zea mays
tacagcatagttcaacttcatgcttgtccatggcccttcttttgaagggctaatctgaatatatccagtcttgctttcaggactggctctgttcccttgttgtacactagctctaccagaaacaagtaccgcaaatcttatttttccactaggtttaacagtttcctgttcctgcaaagaattgtcaatataactttataaaatattgtaagtatatttcgcagaagcacactttgtgtggactctattttgcaaaagtgactcaatacatgattctccaaatgtcagagttctcaccactgtcttagttgacataaggtctcctaaagccaaatcaaatttgacagagtccggattagaggtaggagggagcttttgcacaacttgctccaatggagcagagtatataccaactggttgacctgttctcaacataaactataaactagagttgggaaaaaacaaaaaaaaaggcatttgttgtgaactaaaatcacgaacctttaccagcatcaagcacaagaagctctagagtatagctgtcctgaaacattgcagtgaaaatgaaatgttacttaaatgaaagcatgcctcttggaaaattcaccattaataacagtagagaacaatttccatggatatctaaaccaaagagagtaaaagtgttccagaatgttttgcgtttacataccacacgttcgactttgaaaaagaacatttcgttccagttcacctttctggtggtctgtgacaaagtgtttcttccaatagcagcacaagtaccggcactctgttgttgacagaaatgga

SEQ ID NO: 6155 - DNA, 871 bp, Zea mays
gcgaaccagccgattctgtagtatcgacctgcagtccagctaggcagctacaactatatatatattcatatatatattgatacacacacacatatggtcctgttataggtggacgactataggacgactaggactcaactaggctcgactaatcgagcaaatcgacgactaatcgtgattagtcaccttatcggtgctcaggcgactagagtcgactagctgactttaaaaccttgctcacacgataaccttttgtatcacatgcatataggatttacaattattgacttcacacaagcaacactacaatggttcccaactttatcataagcaactgaaacaacacaacataacaatcaaatgcaagaatgaactcacactgttagcaagatgcaatgggcagaacattttaacgcacggtggcggcttcgttttggtttggcacgagctcaatggtggaagcattctcctatcatacagcctagcaaatgcatcactgcatgaacatcatgtagcagagaagtgctagtcattagtcaggtataaaaacacaaaaggcttgttatctactgactgttgatgaccagaagctaggttacctcccaccgacaatgatttgatggggacaaacagagctaatgtcacaagacttcagtgccaatggatgtttgggtaaatcggctaaagacttctttgctccgcaccgtagatcaagctgccaaaaatgtgtagtgcagaaaataaaatcaaaaccacgtccataactagatcagctaatattattatctagcatttattttcattctacaagcagacttatccatgcaattcaaatagaatctagaagaagaaaaatgtactaatggtacaa

SEQ ID NO: 6156 - DNA, 905 bp, Zea mays
tgttcggaagcgccgcgggtaagatggataacctacctgcttattactcgcttgcttcgttgttttttcctggctagggaccgtttactagcagatctttatctccagatatgttcaatacttctgcggtacttctgtgttccttaaagagtttgtgctagagtaaggtttgtgtccgtagccacaatgctgcatcccacctgcttaccaactggccatgtgaaatatttctgcctgccatgctagaaattttttctgtcagagtcgttttgacaaatttttaacactagaaacgaaataattggtattttaccactcagtttgttaacttgtttatggttcgtgtgtccatctttgcctatgatttgtggtcttgatgtcaaaattgtgaagcctactgataataatggcaaaatagcaaatctctagtatcctgtccctgcctttcttttcatagacctacacattggcgtccatggtttcagagttaaattggctaattgaagctattcgttcttgccacaccacttaatttataacccttctctctccccccccccccccctcctgactgtaaaaataaaaatctatttacctttgttttttttgttgccgatgcagtccccacggttggtcctgctggttatataaattacactggaaacacccaccttcctgttatgaaccaagcaagtacttcaaacatcggcgcaaggaatgagaacttgctgaagctttaggtgccattgagcgactttcacccaacagagtgctggccggatagcacgtgttggcaattcgggtgctgtttcgactggctaaagctgtcttacgaggaccatgagccccaatcgtccatcaaatttggccgcgggagcaggccctcctggcctgccccgaattcc

SEQ ID NO: 6157 - DNA, 822 bp, Zea mays
tagcggcttctgagctgttcttccacctccaggaatggaggcattggtaggccaaggtcgttcagggtactcgcaacaagagccttcggaggtcctcggcccaggccaagcttgagggaaactgtacccgtacccgaaatgggattcgacgaggtgctatagagttcaggtcgcattcagatttcagaaccgaacctgttcagaatttcagagttactcacgcatggctttcctgtttgacaggttgtctgaggtttgctgctcaagaaggcacaccctgaagcccagcgttccctgatactgcaacaggggatgaccaagcagtccagatggccccgaaaggaaaggtagaggccgaggacgaagaggtcaaatggatcacaactgattctccagtgtatttgtagcagtgtgtaaacataagataggaccatgcatctgacatatccttttcattctccagacatcgtgctagagatcctgattccttgtacacttctgtttggtacacgcctctctgcataggatcttatcagatggccttcgaagccagggaaaacaatatgggtttctatgttttccttctgacgtaacagattagaggtattccaatacagaccatattatcaaacaaagtgctggcctacagtagtatacatcctgaaacaacttagacatgtgttcagcagagtatgtttcccagcctaaaaaggaaagagcttcgtagctacaaacttgcccaagtttttctgaaagtggtgcacatgggactggcaggcaactagcaattgatttttgggtgaaaagcaaccgtacccttta

SEQ ID NO: 6158 - DNA, 790 bp, Zea mays
aggacttcatgggtggtgctgaaattattgtttccccacccgtcgtctccttccgtgaaacggttcttgagaagtcctgccgtactgtcatgagcaagtctcccaacaagcacaaccgtctgtacatggaagcgcgccccttggaggagggtctcgctgaggccatcgatgacggccgtattggcccacgtgatgatccgaaggtgcgctcccagatcctctctcaggagtttgggtgggacaaggacctggccaagaagatttggtgttttggacctgagaccactggcccgaacatggttgtcgatatgtgtaagggagtgcagtatctcaatgaaatcaaggattctgttgtggccggtttccagtgggcatcaaaggagggtgcactggctgaggagaacatgcgtggaatttgctttgaggtatgtgatgtcgttcttcatgctgatgctatccacaggggtggtggacaggtcattcccactgccaggagggtcatctatgcttctcagctcacggccaagccaaggctgctggagccagtgtacctggtggagatccaggccccagaaaatgcactcggtggtatctacggtgttctgaaccagaagagaggtcatgtctttgaggagatgcagaggccgggcaccccgctctacaacatcaaggcttaccctccctgtcatcgagtcctttgggttctccagcccagctgaagggctgcaaccctctggtcaggggcgttcccccagctgtctttgacccattgggacatgatgggctctga

SEQ ID NO: 6159 - DNA, 811 bp, Zea mays
agcagcgtgagtgcagaaccatcgatggagacttgcggtgcgtctgtggcagagctgaagagtgagacagcgtcgtggacggatgggaggtggggtgagttggacaggaagcaggtgaagaccttgagcgcaaggcagtaaatcgacggggctagaatggcatgaggaggagctcagcggacaacgccatgggagagtgaggagacacgcttcatcatcgacagcttcgcctcgctgcctcactctcggccctggtgttctctgcccactaccgcctgagcctgaagcaccggttcctcacgacggagtaaggtatggcgacatagctcgccatatcgagcgctccgccactgctctccagtttttgcagcatcttagaccgtctccagcagatcgtgcatatggttgtgcaagatttttttgcactgtagattgtactgttcatatagtgaagtttgaaataggagataagatgggtaagctggtgaagacagccttagccttatgttgatttagaatgaacagttctcccccttgttaataaatgatttttgtccagacaccatccactgctttgaccctctgtttttctagttaagtgctatttaaaagtcgttcacaaaatatagtgttaacaacaattttgttgtgcaatgacggtcgaaatttgacaagtttgattgcttacatcctaaagagagacttgtgttctaactgtgggattacataatctaaatggttgttgtaagttcaaacattaatagttcaataacaaactccgcctatgttgtctcaacatagcaggtcccaa

SEQ ID NO: 6160 - DNA, 733 bp, Zea mays
agaagacaggattgagccaacaacaacttctccaaatccaacaacagcatccacatctcactgcccaacagctgattcagcagcaacaaattttgcagcagtttcagcagcagcaactgctacaatctccgcgtgtttcagcatctggttcacagaagtctgcgaaccttacaggctcgcagccgggtacaccattgtcaggtggaaccatgactggtggaagtgcaagtcagggagctgaaggaactagccaacttcttgggaaaagaaaaatacaagatctggttgcacaggtctagctcttttcttttctgtgcaactcaactttgctgtccctggtataattcatgttacttggtcatactaaactaactcaactctccattttgattggaaacaggtttcttatttttatagttgaatataatactttggtctgttcttaaacaatagtcttattacaggtagaccccctaggcaaggttgaccctgaagtggaggatttacttctagaaatcgctgatgacttcattgactcggtaatgttgttgctttgctgtttgtttagagagtataatttcctatcaaatttagaattttagcatcttcctcttctaagtttgaaatatgttatctgtggagatatcttgtgattcatctgacacgggtttgcgattaggtgactgcatttgcgtgtaccttggcaaagcacaggaaattcatcagttgtcgg

SEQ ID NO: 6161 - DNA, 804 bp, Zea mays
tgcatgcctgcagcctaacactgaggatagacacatttacagcttatcatcgaatggaactactctgcaaagtcagcttgtactgggtttttcttagggtctacctcctttgggaattataaaagggtttggagatcttgggctcctcaaaagtgctattttttcatttggctggtggcccataatagatgttggacagctgatcgcttagcaaaaaggggattgaatcaccctaccagatgtcctttatgtgaccagcaaggtgaaaccctgaaccacttgctcatgagctgtgtcttcttaagagttttctggtacaacttgctaagaaagtttgggctgcatagtttagccccacaaccagatacagtttcctttatggattggtgggagatggtttcagagacagtaagggtgcgtttggttgcaatgacaggacgggatgggacgggacgatccctcaaataaggttgtttggtttagggtcagggattaggacagacctatctcagtgttgtcctcaattatccctcaaaattggagagacgagagaggacggcaggggacacccctgtcctggctgtcccgcaaccaaacacaccctaaatggtctggtcaggaaagatcttgactccctcatcattttaggatcttggatgatttggaagcatcgcaatagagccattttttatggaggggtctcccaacctttctctgattctggagcaagcagatgaggaaaggaagaagaggaaatttttgggacccaaaggctctcctttttggctgcctgcctgcataggt

SEQ ID NO: 6162 - DNA, 826 bp, Zea mays
tggcttcagttagcagtgcatgcacgagtagggatacgtgtttggatatatgccttttgtcctctctctctctctctctcactctgttctctctctgacgtgtatgctctttgagaatttggcttggcgtcgtggcataggcagtgactacagtcctgtgtcctcgacagcgactctgcccctactacatctgctgttcgcgctgcacctagtacaccgtgtgtgtgtgagagagagagagtgcacccaggccggtgctgtcacctgtgctgtgcctgccgcgggcgggctgcgtctctggccggctcggcgccgctgcgcgtgctcgcctgtgtcactgtgcgtgcgtgcatgtattgtagtcctacgcacgtagtagaggaggctgccgatattgtgcgcgctggagaacgagaagcaaagcaacaggcgcaagagccaacaagcatcgacgagagttttgtatttctcccagtcccagcaggcggcgcccctctctattattctcggagagtgtgtgtgtgtgcctgtttatccatcgcgctactgcatgtttatccatcgcgctactgcatgtttgaaatagtgtagtgttatatatactctcgacatcaaccgctcagtgtttgccttctgcatcgtcccatagtgcatgaggggaagtgacgtaaaaaatgcatgggcatgcatgcatcaatgtatgtttgttaaaaaaacaaagtgacatgcatgtctacaagttagcaaggggtacgtagtaactcctatgttactatatactcgtcggttgtccgtgcgttgcgacggcttacaacaatacccacgt

SEQ ID NO: 6163 - DNA, 804 bp, Zea mays
gacacgggggcttcttttgatgatcccatcacaacattttcggatgtacagctaccggaagggagtatcaatggcggtacttgtgccttgcacactgaaagtgaaccttgaaggttgtacctcggcaaatgacaaccggagacaaaaccagctaatggttcggtgctatccataactgggccgacattaccatcaaagccaagcagctcctcaaagacagattccgaaaacagccctctatcttcaattgataattgttcactacttgcctgtcctgaaacagagttcatggtagtagcactcagatgtgaagtgtttcctgctagtagggcagtgtcaccccaccaatcattcatgactggatcaaatgctgtgctttcgagaaagccattattttcgttgacttcttttatgactggtttcgtttcccctgaggcaatttctgcccatatttcatttggcaattcatgtagcccacaagcacgagtagatccactagtaccaacctcttggatcacatcactctgaacaaatggagtggcattgtcaaacaaagtgcatttcagctcagcatctgtagaaactattgatgagtacgaatccaggaagcctgaggatttttcactttgaaggcaatgtcgtagtttgttaggtgtgcatgacagcccgcgctctattctttgaagattggtcaaatttgaaaaacatgtagctgcacttgcccaactagaatcaggttgtttggcggatttgaattgtgagcattctctgaaatatattgtaccgaaattgctgtcactttga

SEQ ID NO: 6164 - DNA, 757 bp, Zea mays
  unsure (1)..(757): unsure at all n locations
atcgaaatgaaacggtcaaggtatatgcacgagagctcgagatcatacgtgcatcagcgagcatcttggaagggtacccagtcgaagaactctcctcctccgaaaccgtgggcgccctcgcctcccaacgtttcatggccgccttcctcacggcgaagaaggcgatgaggcccacagccgagatgacgacaaggatcgccaccacaacgccggccacgaagcctgcctggcctgcgacgctcttcctctccttgccgggcactatccccacggccagggcctggttctggcagaacggcgacgggtgctgcgagccgtcgctgtcgtccaggcagttggtggacacgagcaccaccgtgtccggcttcctgtccggcgacctcaggcaggtcggcacgctccccatgaggaggttcagcgacaggtcgacgaaccggaggttgtcgccgcacggcgccttgtcggatagggtcccggtgaacctgttcccggcgatgttcaggtaccggatggacggcagggagagcagcgcgggcgcgaacggcccgacgaagcgggtccacgacacgtcgagccgctccagcaggtagaaggagctcagctccgcggggaggccggccgccgaaccggttcctggccaggaccacggtaaccaccttcctcccgagcttggggaacgccgggccgagcgagttgccgccgacgtcgagcacctggaggttggcctgccngctcatgtccagcaagttcccagaca

SEQ ID NO: 6165 - DNA, 851 bp, Zea mays
tgactccaaccatgctaaacaattcagtccagaacaagcttgtaaatacggtgtcacaatcactcacaatagagcatgggaggccatggagtttgacaatctcatcaaagaaagcttttgccaccgatgctgctaagggtgacccaaagcagtgaagtggttgtacttggagaaccgatctaccatcgtgagcaccactgatttgtcaccgacctttggaaacccttctatgaaatccatcaagatatcagcccacaccatagatggaatcagcaggggctagagcaggccggcaagatgaagatgttcagtcttgttgccttggcaagtggcacagctgcgcacaatctcccgtacacaacgaagggcctgaggactgtaaacgacgaagggcctgaggactgtaaaagacgaagggcctgaggactgtaaaaagaggtacaccaacggtgaactgtcttctacactccttcatggccagactcatgggcctgggaaaggaacaccggccataaagaaggtgtcaggaatgaaaaccttgccattgaacagtagcatgccatcagtttcaatccatcctggacgggcagttccagcggccaactgggtgcaccgtcatcaaaccaaacacattgagattgactttcacttcactttgagagcaagtggcagttggtgatcttcgtgtacttcatgtcccaacttcgtctcagtatgcagacatattcaccaaaggactaccattttcagtctgcactgaatttaaattccatctgaaagtgcgggagtggctgactataagaatgcgggggcatgttagattgggctgatcaggttggcatatgggttaa

SEQ ID NO: 6166 - DNA, 810 bp, Zea mays
tttactagattatattaacaacaccctcacatgtgggaacttaaaaaatcaagtggaaaaaagaactatggataagtagaaaggcttacagttgtcgttagattttgcatgttgaaaacgcctcgaggccacatgcatggttgttgagcaaatgaacacctatgttgctaaaataaatcactacacatccagtttgtctacattttctttgtttaatttgttgcagaaagtaagaagttcccttgttttaacaaaggacgattaccttcttgtagggttatacttggtggcaacatcagttcctaagtggaataaaggttttttgctctatttcttttatattttaagcataaacaatttggtctatacatacttgcagcagaaaccagttcatcacttaaaatattacaaactattgagtattgaccagctactgaaaagtatacatcttatacagactattgctgtagtacctatgccggcgtttggtgtggcacagttcggttccatgcaaaaggttagcattctagttttttggaagcaattttcacacgattctaacagaaaagactacccatgatcataagtgtcttcattttggttgttccaggaacaattttgtatgtgtttcccttaagatgctatctttagattcataacagatcttgagaaaatgcactacgaaatctggcatgaagaataattcgaaaatttatgagaatgcacattgtgagaaaaatctgtctttttctgcactatgaaatacttaagaaatttgtgcaatgctaatctatatattttgaaaaaaaa

SEQ ID NO: 6167 - DNA, 871 bp, Zea mays
ttgccgtcgacgagctcatcgacgtccttgtccggcagctgcgcatgcgtcgtcgtcaccttgctcttgccggtgagcacctggaacacgatgaccccgaacgcgtacacgtcgctcttctccgagaagcggcccacggtggtgtactccggcgccaggtaccccatggcggcgctggctttgagcgtcgagaagacgaggtcgtccacgaggagcttgtgcaggccgcacccggagatgaggggcctgtacgcgtagtccagcaggaccttgtccgctgagatgttttggtggacgagggccggcttgttcgtccttgtgctgtgcagatactcaattcctggaacacacacacacaccaaaaaaaaaagatgcacgatttagacggttgcgcaggagctaaaaattaccggtatctcacagcacactgatagaaacggttactctgatagaagtagcaccaaaaggtttttgagacatgtcatgcagagagcttttcagtgcatacagtgttcagacttcagaatgtgaatattgctgcgtccctgcctgctgcacagtcacagggtttcgcacacccatgtgagcgaccagcgcagcacggatgaatcgatgtactatccatccagtgattgagtgaatcaatgtgccaaatgcttgcatgcgcataccatgtgaacaagtatgcacagtacgtgtgaatccaggggaaaatgtgggcatcagcaaaccactagtgggggatcagtagtgacactcactgctaaccaactgatagcaagagagtgacaggatgtgctttttccactcggggtacctacctttgcgatgcccttgatgattgaggatcctcgtggacaactggaggaca

SEQ ID NO: 6168 - DNA, 1111 bp, Zea mays
tccctcacgtacttcaccgcgtccccaaggatggtcgccttgtccatctgcaagcaagcaaaagctcgatcacgatatgcaaatgttgcaccctttgttttcctcatgatcgagctcaataatatgtatgttcaatgcagatagatactgatccatgcatactgaattactgatacaaactcaacagtaattaccagtatgtgtaattattacaggttaatttgagcatgacatgcacacaaactactagaatttttcattcaaatgctctcttgtaattgcaaggctagcaaagcttagcaggctataggatctttcaaagggtgcggtgcacggtgcaaccttttaaacactgggttatttagtttttgttgctcaatctatatttttccagcatgatttggtatgttttctaatttattctagaaactagtactaatactgtcatgtcatgtatgattgaaaggctaaccgagaatatatgctgtgcttacactttggtaagcgaaaggacctaatttgcaaggaaatttttgctgaacgatgggctgtaaacttaatgactgctcaatagttaccatgattttgttgacatgattacatgcaatcttggtgggtttatataatcgcacatggtttacccaaggtccaaggataagaaagacccccttcttgatggtggctaaatacacgcatgaaattaaggattgaaaaaaaagaaagaaaaaggaggaggagaagtaaatcggtgatgaaaagaaagaatgaaagaatctgttctatggtgagctaatgataatacacttttgaagccgtgattacgtgggaagctcgataagcgctggtgatttttcctgcccgttttgggcaatatgtgggctgtacggccctggacaattccgacaaaaaaggatgggccggccgccccttcttccgaaacaataaacgttgttgccttgaaccccggggggtcgaaagtaagccaaagtttgattttagtgtatactaaattgtagaataacgagtggtaatgtttattccaattctctattaacctcggtttagtactatatattgtatagatcttttttcattcaatgattataaatta

SEQ ID NO: 6169 - DNA, 754 bp, Zea mays
atagaagctctttctacattacactatgtatattctaaattttagaaaaagctctagtgaatctctataggctcgagagcggtaggagggcttgagctccatctgtcccaccgctggctccatcactggcgaggatcgtcgtgaggtggagaaaagcaagaaagaaatggatggatcaccattggcttatggttgaaatcactatagttagagcatcttcaacaatgacttaaatcagtgttttatcttgaaatatatagcacttaactactaaaaacaactccaacaagtcctattttacacattttattaaaaaaattttagtgcacatcataaaattgttggactataatataagtgaatttgtccatgtctttctattagcttaagatttttgagttggattgattgatgcgtgcaacttaatatggtatcggatctagatgtctcgagttcgaatcctagttaccgcaattccacgtctgaggtctaagcggctcgatgtgaggaagagtgtttaaatataatataagcgaattgtccattactttttattagcttaagatttttggggtggattggtccataaatgcaacttaatagaagtgacccaaatgtactacaaaatgtactacacccccgattactgttccacccttattatacatcattctcaagctttaatttctaataatgtaaattatttcttaaaaaacagaattaaaagtttaactgttggagctcactttatttt

SEQ ID NO: 6170 - DNA, 815 bp, Zea mays
agtttctcaacaaaacagtgattggttttgttgcagcaaggcagcaaccgctcttgcaattcttttttgctgtctcgcaataaggaaattgttaaagcgaagttgcgtggtaaaagcgtgtctgggtctattttcgaatatttgtggtccgctagttcaattttaactaaaacacgacaaatagaaaagaacggagagagtacaaaataacaagacaaccattctcatcctccgttccaaagtacatcattctcatcctctgttccaaataacatgtctctttggtgaccgtatcatatcaactgtctaagatagttgctataatgcctattaatttcgatacaatcatcacttgtaaagagatatcttttgagagagagagagattttgaagatgtgtctatttaaatagccacatgtttcgcaacactctctcctaatcaggtgacggatataggcctagggccaaccagttcgtggtctgaggcatgatctttatatctctacttatgtttgttgtcttttaatcaaaatacattgatcacatcggatatttttttatgacttttcattcctcgaattttgttaccgcttatatattctgtttaagaggattaggccccgttcgttttattccgagattatataatctggcttgtagattatataattatatagtgacatatttatggcttatcgtagtctaggtatctatattatatagtccaactaataatatgtgttgtttgtttgtctcttaacttatttaatatgaattatataatctcgagtcaaaacaaatagggtcttagacag

SEQ ID NO: 6171 - DNA, 812 bp, Zea mays
cttgcatgcctgcaggggccagctgcggtgcgtgcgcaccagaaaacgcatggcccgccgcccgccggggccgctccgtggctccacagggtggagactggagaatcgagatcgagcagtggagcttatgtgtatgaatgttgagttgatctataagggcatgtataatctagagtttatgaaaaataaaaatcattcgaatctgaattcgaatcagtatccatatccaacttttatatttatcttttgaagaggaataggaccaatttgaagtcaatttttatgaatctaaaaataagaatatagatttgcatagcaggctttatatcttatttattcacaatcaagaaacgaagacaaaattttcatatctgaataaattattggatctataacttttttttgttttgttgaagacctagattctataagtctaatgctgacagaagagcagcagctggatagctagttggatagaactgcttttttctctctggggcgtctctatcggcgaaacgatcctcagctcagctgggaggatgagaaccaagaacggcatatcctgcgagatattatctcgattggtagcactaatgcactatgggacacatcgccaacttgtgcagatgagggaaaagcttttgccacactggatagcagatagctattctcgatatctggattcacgatctgaaccaggctcacggcgacaggtactcctgcctttttttttggcacacaggacgctcgatatgtacatgctgtttttagacaaaagtgttactaggatacagtgatcaggctgagagaag

SEQ ID NO: 6172 - DNA, 843 bp, Zea mays
ggcatcccgcatccggctgcccgacgcgcggcggcacggcatcaatcgtcgcaggcgaatctccctgcccagccctcgagcagagcagcctgccgcccaatcgccggactccgcatcccccgtcttgtcaccttccttccttccttatccatatatccactccacttgtgttatgtccatggcttggcttgctttgctgctgatactttcatccagtgggggattcaggagtgaatcaaagagataccaagataaggctaaatattttcagcctacacttaaatgatatagtcgatgtttaacatgacaaattaactggatatgattcaaatctttaagaaacatgtatgcaaacatatcccgcgtaatatagcatagcatgctattatttatccactctaccctcattttgtctcttctttcggtcttaaattctgatgatctttatagcagagaaagtcaagactagaggcagcggcagctcgcaggcaatcaactatggtgctggtggcctggtcgcgggtggatgatatcttagtggataatctggccgactagacattgcgacctgaaggcctaaaacctgagcacggacgagagtcgaccggcctggccgcgcccatggaggagatggagagcagccctcaaacagccgtcgacgactgacggggagagcgggcatgaaacatcggatgactatggctaggatgtagacaaggatgagtctcatgttgtggcgcacgtgtgtcggatgcgaacatggagggttacagaagaagacatttaagctagacatttattcccatatgccgggagaaatccttcataccctcataaagatgc

SEQ ID NO: 6173 - DNA, 736 bp, Zea mays
tctagccatattatttcttattcttggtctagaaagcgacaaagggacacaatctaacagtctgaaggtgatgtaacggatgaaatgaatgaggacaatgatgatgaatctggatctgctgaagttgctgatgcaggcttccatttagatgatgatttagtttagattattgtaggcttcaagcaagctgattgctgcatttttgttcttgctcaatgctcatatcttttgtgctatttatatatatacctatataagtataaccactagtctaaaaggtctaggacgaccaaggaccgactaggggtcgactagtcaccttggtcgtcgcctaatcgcgattagtcgcctggtcggtcccatggatcgaccaggcgacctgcaatcattggccagtgttgttagaggcggagaggctgtggaggtggtcgacattgtggtgaggaggaagattgtccatgagagaagaggtaggccgattggttggagaaaagccatgagacgtggagcagaggagtctccaagcggcatgcggagcggggaagaacgtgctgatggaggcggacaacgtggagagaccatgcggaaggcaaccgtgcgcgcacgtgaaggaaggatacgtggaataagatggacctacaacagaggaagtaggcgcacatgcgagatggttggccccatggtcatggatttggtagcacgggagaaaagaataggtagtggaaggagccggaag

SEQ ID NO: 6174 - DNA, 809 bp, Zea mays
cggcgcggcgggcgggaacgcatgcacgatggtgcagctagctagcggagacgagcggtgaggaagggagaagcgagcccagcagagcgtcggcttaaatacaaagggctggctagcagagcagtacgacgacgtgcgcgccgccgtgatgatgatgatgattgatggttgatgatgagctgcgatcaatgcgtggtctgcttgggcttttcgtctgctgccgtttccactcggacgccgctctgccaatattagtggatggatgtgcggatgggcaggcagagaagagaagagaagaggagcacgccggggcaacggaaaaggaggagcccgaacccagtggagtcctttgccggctcgcggtagatagagaaagagaaagagaaagagaaagagaaggcaggggggattcattagtacagtagcccccccaataaccataaatacacatgctctaataaataaataaaacagaaactctagctagcgctgatgatcctgccgtttcaggcttttgttttcctctccctgtccaactcagcaaacccctttgacttcttacacgatgatgaacgtacttactcatcatcagccatcactaatcccgcgtgctaactaaccacgaatgtgattcgctgctgccactccaactctcaaacgtactcctggtatcctattcgacagccgactgccgggcacctcgttgtaaaagattggagtggcagattagattgtggcataagctcttgtctcgctctgtcgcttgctctcccgtgctgacgagtgtcacggcgtaaggtttgaacccg

SEQ ID NO: 6175 - DNA, 838 bp, Zea mays
gcagttcgagctgtggctacagagcagccatacagaaggcactgattaaagaaaccaagcatcccaatagtggatggttttggccgacagcaatagtttgctggatgagtcaatgtccttcggctgtgtttcaagctgagactgagagtggtggtgagtcgcgggggtgggttattgtaaaaaatacttgaccaaagaagaggggagcgtatgggataatatgaaaaaaaaacaagaaccgttggatccaaaaggatggctcggatttgatgtgcacaacaccgtaagcccatgctcaccggatatgctccgaatcagaagagaagggaacatcggcagcatggacaccaaaaggacagtacgagttttctgctcatcactcagatcactatatttgatagcatttgatttgttcgggaaacaagcaagcatacgatcattatacacaaaacaacgctgggacagtcactgtgcagcggcgatgaggcgggacgagctgagctccgtggtgctgtagaaggactcgtcggggcagtacccggcgacgccacgctcgtcctcccaccggaggacctcccggacgtagcggaaggcctcgtcaacggtgggccggtcgcgggcgcgcgtctgccacacgaacagcttccgccccgtgctcgccgcgtacaggtccttgaacttgatggccacgtagtagaacgcctgctgcgccagcgactggctgttgtggtgccgtccgcagcgggcagaagtcgccgaaccactctcacgacgacagcgggggaccgcccgatcttcttctcgaacgcgtcgttcttgttcaacaaaagccggaacg

SEQ ID NO: 6176 - DNA, 822 bp, Zea mays
ctttggacaaaatgggtagttggttcaccagaattacaataacagggaaaggaagcagatcaccctccaaccatacactgaaacctaattgtaggtcttacatttagggcaacctttgaacacatctccaggagtgacactaatcaattagaatgatgctgcactgcatatcctgccaacagtactatgtttactctagatggtgtactggtgtgtcaaggatacaactactcctagtatatttagttgtataaccaaataaggtattataacatttagtttgcaacttttacaatccatgctaagacttagacgattctaaaaaaatagatacaaaatcattcgatcatatttcgtaattcggtgtatacatgtgaatatgtacatttccattgtgttgagctgaaaagatgcccaaggccattaaagaaagaagtaaaggaagcaacatatcgaaatggcagtcaacccattatgaccaagcctcaaatggcatcatgtgtatgtgtatccatatgcaggtaagcacttgttagaactgggtccctcttgttatggcccatttgaatagcatgtattgtatagaaatttcataggaattattcaaatttacagaaaaacaaaggaataaaaaaaaccatgttccaatctatatttatactaatctattaagaacctaatgtgagcacctggtactacaacgacttcaacctccgcgctgacactctgggtccgccccacacgctccaccttagggggccatgccctgtgggccccacgtccaatgcccacgttactgcgcctacccagcacccgacccca

SEQ ID NO: 6177 - DNA, 870 bp, Zea mays
ctcttcaaggtgggcaacagcaacatgcagcacgtgacgtcgctctccttcctgctcctcgtctactccaactacctcagccacgccgacgcccgcgtcccgtgctcctcctcctcctccgccgctgccgcctcgcccgtccagctccgccgcgtcgccaagcgacaggtggactacatcctgggggacaacccgctgcggatgtcctacatggtggggtacggcccgcggtacccgctgcggatccaccaccgggccagctcgctgccgtcggtctcggcccacccggcgcgcatcgggtgcaaggccggggcggcctactacgccagcccggcgccgaaccccaacctgctggtgggcgccgtggtgggcgggcccagcaacagcaccgacgcgttccccgacgcgcgggccgtgttccagcagtccgagcccaccacctacatcaacgcgccgctgctcggcctgctcgcctacttctcccagcaccccgacccagcgcagcactgatgaacgggcagctagctagtagagtagtagtaggtgttgtagtagtattcttccgttgctgctgctgctcgtgctatttgttttgcagtatttatgttttggtagcatatattgtgccgatccattcctgtaaaaaaaatggcaggaacgaggattggtcctactgcttgtactcgtactatgccccaagtaagctgctgtatggtggtaagatgcattctgaaatcgccttaatttcggagtttcagcgtcgtatatagaaaccactgctggacatattgctactagcctactaccgatactattattttctttttgttgggtgggggtcctccttccggccttgcgttgtccctggca

SEQ ID NO: 6178 - DNA, 759 bp, Zea mays
ttagcgtgaacaagctctccggcacggtgccgcctgagctcgcccggtgcagcaatctcactgacctcgagctcgacaacaaccagttcaccggcagcatacctgccgtgcttggcggcctcccgtcgctgcgcatgctctatctgtgggccaaccagctgacgggcatgatcccgccggagctcggccggtgcacgagcctcgaggcgctcgacctgtcgaacaacgcactgactggccccatcccgcggtccctctttgcgctgccacggctttccaagctactgctcatcaacaacaacttgtccggggagttgccgccggagattggcaactgcacgtcccttgtccggttccgagtgagcggcaaccacatcaccggcgcgataccgaccgagatcggaaggcttggtaacctcagcttcctggaccttggttcgaaccggttgtccggctctctgccagcagagatatctgggtgccggaatctcacgttcgtcgaccttcacgacaacgctatttccggcgaactgccaccggggctgttccaggacttgctctctctccagtacctcgacctctcctacaacgtcatcggaggcactctcccgtcggacatcggcatgctcacctcgctgacgaagctcatcctcagcggcaatcggctgtcaaggtcggtaccacccggatattggttcgtgctcccggctcagctctcgacctcgcgcactacttctgcagattcggagctagcagact

SEQ ID NO: 6179 - DNA, 774 bp, Zea mays
agtaaacaaaaataagattaatcttcgagagtattttagtgtgaggactgaggattgggaggcaggggtagatgggtttgacctgagcccggtcgggaggcgagccctgtgttttgttaacctgacaacactaacataatcagtaaggagtagaaagcaaactgggctagtgtttgttaaccaagtacaacagctcagcactttgggtagagaccaatatattctcctcgtgagcgcggtcgggtgtgggatgaccggtcacgtgcctccccctcccggcgccggccggtctccgctgtggcgctgtccagctccagcctctggccaccacgttccacgcctccttcgtgtgcgtgcgcccgcatcatcttgagctctggtacgggatcctatggtacttcgcctcccgccctaattattcagcgatgcaccccgcctgtctgtcacgctcctccctcgagtctttctgctttgaacttgtgatgggaaatcaaatagcagaattactagcagtagtcaggtagggtccaatccagtcgagccgacataatcatcggtgccaactatatctatcatagagtagaaaatgaacctgagttttactagaggatttacgaataggactacgactagtgggcggccactcgcgggcgagatacaagactctgtctctgtcctttcggccgtgccgtgtcgtggcacggtcgtccggcgcgcggtccggcttatccgcccgccggggttatgggcggcgcgccattgaatgggagtgga

SEQ ID NO: 6180 - DNA, 363 bp, Zea mays
ccccaggtgcagaaacaaactggatctatcatgtatcactgaagtcttaatagatgcatgtatcaataatgtaactcaggtccaactgtcacgtaaaaaattctgaacacctgtcacgatagagttctatatattttttccccatataaatttgacctgttacgttacaagacttcacgttaaacgttaggaaaaaaaaaactttcgatctccttaacatcgtcggacggtcgtcgttaacatgctcgcagtaaacacaagaaaaaaccgaaaagaaggctatcgcgtaaaaatgccctcctagacacatacacgtcatgtacggactgtccatgcatgttactccctccgtttctttttatt

SEQ ID NO: 6181 - DNA, 811 bp, Zea mays
aaaatcgcgcatcagttcgtcgatcacaggagaccacaggcagaagaccaacatgatgatggcgcagaaaaagggaaggagaagaggtccgcagggtttccgggatacgcacacgggaggtccgcggcgacggcgttggtgaggtcggtgtgccagacgttgcggtagctctgccgcagctccatcttctccagcatcgcctgcgactgcgaccccgccatctcggctcgcctttcggatttttgccgcgccggcgacctctcgctagtcgctagtcgctactcgctagcaagaagggagctctctgctctggcacgcacgctcagacgctaagtgacgggttgcttttaatgggtgcgcgtcggcgtcgcattacctcttgcgtgacgacccgggccggcgcagcgtgcattggaagatttgatggatccaacgtgcgcgacgacccagggtaggcggaggaggaacgggctggagacttttggcgccatgccgccctggagcagccacttctggattgaagagttgcttcggttgcagaagaagcttgcaggaaaagtccgcgcagttgcgcgtccgggagccggcttccaacgttgcaaatcctcaggactttgatctggtcgtagtggttgtcgcttcaagtgccggacactaataatactgcaataaacattaagcaagtagtactcttcttatccctcaataaacagatttttttactaagttcaaaacatattagtacgttatagaaaagattatattacatatattaaattgagagatagaaggagtgttataaatatgaggg

SEQ ID NO: 6182 - DNA, 805 bp, Zea mays
gcatgcctgcagtgtagttgtaaccacaagataggctttccacatgcctaccttccaatgcatctactaaagttggagtgctcctattaaggaagtcacctaaaccaagctgcccttccttgcctttaccccatgtaaacactttcccatttgtagtcaccactgctacatgggaagaacctgatgatatatgtctgacaaactcgctcttaagtagtccttcaacagcagaaacagttttaccatctgcatgggggttccctaattgcccatgcatcgaactgccactagtaaagaccacaccagtaacagagagagcaacagtgagtgccgtcccgcaggacacctgaataaaatcatagtctgtgagtgaatcaacacatgttggtataagcttcatctttttgtcagcatgacccagcttcccccgatctgcatcgccccatgtgaacagcttgcttcttggtgaattgctcttgaaatcactgatcacttccacaatggcagctgtgtgccatggcccacatgccacacatttcactcttgagcctttcaaagactctacttctttaggccgggtagttccttgtgtatctccatgaccaaaaacaccaaatgttccatccccatatgtgtataactgaccagacgacgttattattgctgtgtgccaaggaccacaagcaatcttcacaacagatatgccgtccagtggactaaacaatttatgtggaaaccattgattccctcgcatagctgtccaactggcccatataggggtccttcttcccattcaataaggtca

SEQ ID NO: 6183 - DNA, 897 bp, Zea mays
atcctctcaagtcgacctgcagcctgaagaatctgagtgggatgatgagtttggcaacgaattatatatttctgattcagttccttatcagcctgtttgccaggcggttgatgctattgaaaataaagttgacgaggatagtaaaataaaagcacttattgatacatctgcccttgactataggtgagtaacttactgtattagacccccctatccagaccccatactcgggtttgtgacaacgttcccaggttgagggtcgatgcctttgacccctttttctctgaccaggctggtctggcaactgagatccgttgctcttactatgccagagtattgctaatcttatattggttttctaataataatctagttggatggttgatgctttcagccaaatccctgatggttatggttctggaagaggctatggtagagggatgggtggaagaatgatggctggacgtggctttggtaattctctgtgtccttttgcaattaaagagttggcatttgatgtattatcaaaatgggtcaaaatatatctttgtgaggaaaatgctatgtccaccttggtaacatggatattcttttcattgtgtaaaaagttctttgatatatagtggtatgaaatacttgtacacacacacataaaataggttgtgaattttttctatttgtttctagaagaagaaaaaagtttcttaatatctctttggttggtattctgaaggacgtgggctagaacgcagaaacctcctccaggctatgtttgtcacagatgccaagtacctggtatgttggcggcttgtaaataaaatttaaagggcttggttgggaccctaattttcccaaggatttttatttttcccaaagaaataagtgattagttcattt

SEQ ID NO: 6184 - DNA, 879 bp, Zea mays
tagggatgcgatgtgattagaacttgcatcctattgcttaatctgttttttctgaataactaattcagactttcagagctgagatgatacgccaagtttcacggggtcgtcggagggtttggaagaaatcttttctcggctgtcagtttatctgaattcggaggaacacgttatggatggccatagatccggttaataccgtgtaccacttggatatgaatataaaaacaagtgcaaacactgattacataataacatagacggagatattgaattcaaggatatatatagctcacgcgccggcggttgcctgcctgcctgccgccatttggacaggacgcgtccaccatgtgtttgctgctgacgcaaccacactgccattgcaacgctacaggctggcaggtggaggcgcgtgcgggtccgtccacctgtcaccagcctcctcatggcggcatgccacgtaggcgagatgccaggcgagcatgaatgaccagaggcagaggcagagcacaacggcaggccggacggacggacgggaagcagcaccgcacgcgccacgcaacagcaatgcagttggcagagcgcggggagcaaaaaccccaccgccagccactataaaaccccctcctccctcccctgcaccgccagtccactccaccaccgttcatgcatgaccatggagagatctcaaccgcagcaccagcagtctcctccgtcgccgtcgtcctcctcgtcctgcgtctccgcggacaccgttcttgtcccttcgggaaagaagccgcgggaggcggcgacagccaaagccaataagagggccccgcagggacccctctgatcctcctccccgccgccgggaagaggagcttcctatacagaaga

SEQ ID NO: 6185 - DNA, 779 bp, Zea mays
tacctagtattccagaggtgatttctcttcattgacagagagcaaatctggttcgtgatccctagtaccagagagggacacggttttcctatcgatgtgttagagtcaagtactcaagcttttgtggttccaatggagtctaagcgtgtgagtgatcaggatgctttgatcgacctggagagtggcaatggcactacagtaagcaactacaccaatggtggggatgctagtttcacagtggggcaagcaagaacagcgcctaatggtgcgtggaatggttgtgtgtgtgccaacgggtgtccgagggacgacaggaatcagcacatggattgctcccctcctgcttcggatgctgttgctagaagtggagatgacaggaagtctgagggggaggagaagcttatggacagctcaggaggggagaagacgaagaagaagcggtccaagaagccaccgcggccgccaaggccgctgacacctacgccgttggatgtttctgaccagaagctcctcaacgaactgagtgagcttgcggtgttgaaacgggcaaggattgagcggatgaaggctttgaagaagatgaagaatgccaagcaagggtcctcgggtggcaatttgtgccccctgatcattaccattatcttctgcatcgtcatactgtggcaaggtatatagatctgttcactactattgatagtggtgccgtgtttgtatgcaacaatataagtttgcgccccatgaatagaacattgactcaaacgtcgaattgaaccttttct

SEQ ID NO: 6186 - DNA, 785 bp, Zea mays
aaacaaatcactcgctactcttgcctacaccctcacaatcatctacgaatactagtgactgctttcctctcctcagcatttttggcaagtgttgtgctggcgtgccgtgtgtggagtggaacgctatataaagcaacgtctaaaaaagaaaaaaaatactatatattagcatactagtatataaatataagagtaactccaatagttttctaaaagactctctaaattaataatttaagtaactaaactaaaagctcctctccaacggttctctaaatgaacttcataaatttagctactcctcatctaaccttattttctctctacatttagcaacaatttaccaacttcctaaacaaaaaaaaattgacagtaatttttgtatttcgctgcctttttcactttatagtaacgatatattaacatagcccatgcgtcgaacaacgacagtcagctagagattaaataattgccaatacaatagccgcacgtgcacatgtcggaaataaataaataaacaattgcaaccgtaaatcaaaagatcaacacaactcaccaagttgaatatgccatcgataatggtcccactcagatgagtgacatgttaaattttaacatatttagaaagtaatatatatataactgttggaggagatgcgtttttttcctatagtatttaagtacttgctaaatctaagatttagataaatctaagatttaggtagcataattatacataattattgaagttgctctaatatattcaggagactttttaatttatt

SEQ ID NO: 6187 - DNA, 798 bp, Zea mays
tagaggcatgtggccatagttcctagtgggagggagaaggtcatgtaattgcctgttggtttttctttcttgaccgcttatttcttggcggtttgtacgggtctttctgaacattttcttcttcttaatataattattaagttgcatgcaccaaccaattcaactcaaaagcttaagctaataggaggggtgggcaattcacttatattatattccaacactctccctcacatcgagcctctcttgggtctaagacgtggaataagagcgagcagcaattattttatttaattgcgctaaccagcattcgaaatcgagacctctggttttgataccatattcagttgcatgtaccaaccaattcaacccaaaagcttaagctgataggagggatgaacaatttacttatattatattccaacaataatgatgtgcagttctcctgcacgttcaagaaaaaaaacattctacaaaaacttaaacatacccctctgactgtttcaatattctgtagaccttgggcgaaaatattctaccatgtttgtccatttatggtatgaggatgtaattattgcaatatttctactttatacccctgattcaatgctctaatagtagagaaatggttgctatgtaagtattgtgcaaaagaaggaaacaacttccaaaataaaatctccgccaatgtccatgcaaactaaccgtttgcaaatatagggaatatcctactacaatttcaaatttgtgaaatgcaagctcagtctaggaaatggttaactattctacaaataatagatc

SEQ ID NO: 6188 - DNA, 746 bp, Zea mays
tggtcaagctttatcacatgatgctcctcagctttattggtatgtctgttgtaactttgatgtgtggataaggaaaaatctgagtgtttttttaagttcatcaatgctgttctctgtaatgactatcttctttttacaggctgacaattgtttttctggcatttgatgttttctttgtggtcttctgtattgctttggcttgtgtgattggaatcgctgtttgttgctgccttccgtgcattattggtatcttgtatgctgtaactgatcaggtatgatctgtgacgaccatggtcttctaaatacagtttcttcatttttttttctgtcaaatgcaatggttaatgccctgtttggatgatttgaacacttctgtttgctgccctttgctacattcataaacccatacccatgccacaaagatattagcgtgccctgtattgatgcaagtaattttaaccgaagctttgcctgggatcattgatgtcaccaatgctgatttgctgtgagctagtagccatcattgtgtgaacgttttcgctgtagctttatccctttacactactgcaactacttattctacttattgaccactattttttgaattatgcatgcttaagatggctgttgacatgatggaaacaaattttcttctctttgcctcttgacacaaccaatggaactctgtgttttgctgagactatctactcgttctaatttcaggaggagggagcatctgaagatga

SEQ ID NO: 6189 - DNA, 961 bp, Zea mays
tccaaagcgacaagcccctgtcttgagatgaaatggacaatgggccttatcctaaagaaataaaagaaacagaaaaaggtaaaatgtcaagtagagaacaagttgtattttatttctgttgtaacagaataaatatatagggcatttctgtcctaatagatagagaacaatggagcatgcctgttctgttccaaaattcggagtctcttgagcaactttgtcaagtacttcttgagcagacaaagaaggttctctcctatgagcagccaaagcaacagactgtggtgggagcggatttgatgtaggtctatcttcctacaagacatttagagtaacctttatcggcagtatgttcaaaaaaattgccccacaagcagccataaggaatagaaccaacagaaatttataacaaatagaatgtgacctcctgaatttgcagcttttccttggacccctttggtactttaacctttttcttcttcacaatgatctcatttcctttccatataatttctgctggtccatcttcaacatattcccattcactatcttcttctgactggtttccttggtcatctttaggctgcaagagggaagttaaatttgtaaccagatcactattttagaatgtttctacaacttatttttgaaaacatgaactagtgaatttaaagtgatggaataactctttggggtggtcattttgtggaggacagcatcttaaactagaggatatctaagacaacatcttaaactaatcgacatctaggacagcattttagacagcattttaacatatgcttgggcttcccaagcactattaatatgttaccccaaccccttaggtgggaatgcattgggagttgtgtggacagaaaaaatggccccaattctaatgtctattcttcaagagaagtagagttcccttctttcataaaaaatgacatgggcaaaatgtgac

SEQ ID NO: 6190 - DNA, 823 bp, Zea mays
atactatagtgacttcactcgttcttgcaacggaagcagcaaaggtctggcactagtttttagtatgatcattatgacatgtttttcacctgggtgtttctgatttccttttcatctgtataggttatttgtgcaatcattttattgattgcagacggtagtctgaaaaaacagttcagtaattggaccctcattggatcactgactgcgtctggactgcctgctgctatctatgcccttcagaatagtctgctgcaagtatcattcaagaatctggattccttgaccttttcaatccttaaccagactaagcttttgtggacatcatttttcacatttcttattttggggtatgtccctatttgcatttcaatttctaaaaaatactcaggttgaagaacatctgaagaagtaactaccaaaacatgcatgcaagcattatagttcgaacttccttagtattgaatacttgcagagtcatttgatcctgtcgatgtcgtgcctgagaccagaagatgttcacctaatgaaaagtggcagttcttaaaacttgtctggtgctctaaagtttaactgcaaaatgttgattatctggaagtccatatgcaaactatacatattaagtctctgtttgggatagctctagctcgaggaaatttggtgtagttggtggagcaagtcattagttgctctaaaaaaatcgtggagctggagttgtaagcctttaaaagacatttagataaaccattttgtttattatttaaattaaaatcatttttaaaactatttaaattgatattataactacagctccacactggag

SEQ ID NO: 6191 - DNA, 914 bp, Zea mays
aagtggcatcagagtgaagtcctgttttctctctctctcttttttcccaacagatccctatacaaacaatgtacgaagtgcaaaaacaatcgatgaactgaactaactagatagcccagctttgataaggaaaatgacaagatgaaatgcacgctggttcagaggcatgggagaaaaggagacagacaatcttttttttctttataacaatgatatgtttgtcattttcatttaggtgcaaaaaacatctcatcctatgctactaggatctcttatatttgaatcacaaattagctaacttctataatcttcacagtaccagctaaccgctataatcttcacagtagcagattaactaaaccacattgacaaccatttctacacacgcaacaatcagagtaacatatccacaagagattaacagtaccagatttataatgctgaagtagacgagcagcatgccaaccttttccatttgcctagtaaaatcaacatattatattattcattacataaaaaatattatacacagtaaactatgccagaaactgcacttcattataacaatacatgtaaatctaacctagaaaataatcatgagtcacctgtactcaatacattctagcacttaaatgcacaaatatctaaataaataataaaataaagaatttaaaattcatgagctacctgtgaaagagggaccatccaacctcttgctagagaccactcgagagtaggcctcagatcactacatttagctttataacatttttccttcacctatggtgaggtgcccgggcagcttttatctgtacagttttagtaacatgtggttataatattggctacgaaaccaagaaaaccatgggaacatgatgatcaaagggacaactagtttctttctactagatgaa

SEQ ID NO: 6192 - DNA, 779 bp, Zea mays
aggacactggcaaaagcttatgtcttccattggaagtttctttccacttctacgtgccaccattggatcggatgccataccaacaccagcaggaactcgttgattttgcagtgtaatttgaaccttcagaggtagaaacacaattaatctttttaataaagggctaactattgggctatgatgctcaaagtaagttgaatgttaagcaccaaaaactttaagaccaaataaaatgtgtattcttcaaatcatgaattcagaccagatgaacagaaaccattggacattgtggtggttgcaatgtttcatccagccctcaataaagtagctgaatgaagcaagcatccatacaaacaatgatgagcaagcatcacttagcatgtccagtaagccagcagctagcattcattcaatgttctaaaacagttgcctagcccccacataagtgctaggctacacagctcacccatgcagccatgctagtaccacataacagcttagggtctgtttggaattggaaggaaagtatttttatagtttctagtcaataccatggtttttagtaataccgtagtattttatgccataagttgtttggttgtattcctaaaaactatgttttcaaaaccatggtattctagataacatggtatttttggagtattgaaaactccactcgaacccaaagtttccatggcatggctagctttttcctaataccatggtttacagtgttgtatccaaacaatatttctcaaaacaatggtatttttggagct

SEQ ID NO: 6193 - DNA, 864 bp, Zea mays
  unsure (1)..(864): unsure at all n locations
tcttgcatgcctgcagtgcaattcaaaattcttctttacctctgaaacagtgataattggtatactggaatattgcagacattaaaatgggaacttgtggacatgggcagcttgaatggaactttcttgaactcccaggcagttcatcatccagatgctgagtctaggcattggggtgaacctgctgaacttgcacatggtgatattataactctagggacttcatctaaactatctgtaagttcaaaatattcctccaaatttggtaaaatattttatggatcttttagtagttcaactatacagtctattgaatttgcattgtatgtctcatagaagtctgaatcctttggaattgatcagagttgatatgtttctagaatcggttgcatatgctcataccaaatcctaagtcttgatccttatgcttgacatcttcacaagtcttgatctgaaacaacttatcttttgtaggtttacatggccattataatctcatacatttagtccaaactgaatataaaaaattagactgtgtcctactactcattataaattactgagctccatccaccagatgcgattgcatggaacatacaacaacaacaacaacaagagcaaaaccttttattttcaagcaacttgggatatgttagagatgaaatccaacatgaatctatttgagaagggaaaataaagagaagatgttataaaataaaaacagcatccaaatagtgatatcacgagggatctaaagcccatttcattaaaagcacaatttacaattnttcttttcatgctttctggggtgtgcctctttccacttttcatttcatattgattgtgccattaaaatcaacttaa

SEQ ID NO: 6194 - DNA, 774 bp, Zea mays
acctgctcgagaagagcaggaagaacaaagagaagtaaaaacgtagtcttttattcggttcttgggatctctctggtgatgcatttccagcgctgaacctgtgttttttgcaggaacgagaggatgatccaggacaagtactgtctgcggggcgccgagtggggcgtcggggactgctccacggagggcatgtcagaccaggagagggaggacttcatttcggagctcaagaagagagctggagcagagtagcgagctgaggacgtcattcagtttcaacagacgaagtatgggcacacttcgccactgtagcagtagtccagggaatggccattttactcgtcataccctgattaccaagggaaatacgcaaacaatgtagaccagcccataggccactgggagtgcgagaatgttcaccaacatcatgcgagctcagaatttgcaatacatatgtacccattgtaaaatgcatttagcacgagcaaattaccagctacactgattcttaagatccctaaattcctcttatttttttaacactgatgtaacctataaagctgccgctctctgcataactgaatgatcatagatgaaacagccctgaaaaccaacacgcgggcagagaaacatgcgaacatcccaacacacagcacacatggaaaggaaacgaggaagattgacatggataacttttttactcgtgccttaagagtaaattctggagtcatccctcccttcagcacgagaatccgtttcctaccaattacttga

SEQ ID NO: 6195 - DNA, 825 bp, Zea mays
ttggcgatcaggatgacctcgttcttgaactcctccatcccctgcactgagccccgggacagcctcttcaccgcaacctcttcgcccccgggaagtcttccctgtaaaaacaacgaaccgcatcatttaccatcctgatgttgtaacactgttggtacatttattctgacatataccagcagaaaacattgtgattgtagctcatgtgtgcagtgtagtgtagtgcattcgcgacgtgctcctgaaccgtaccttgtagacatggccgaagcctccctccccaagcttgttgtcggcactgaagtcgccggtggccgccgctaccgtctccaaggagaagataggcagctcgaacttcttgccgccctctgcttcctcttgatcagtctgcttcggccctgagaaatcctgccttgattccctcaaaggaagcagagacggctgttttgccttcgtctcctcactgccaacaacgatgccaagtttctctgcacgagaccaaccgcgcttgccatgagtagtgaactcaaggtgaatctatagctgagaagtgtcacactccgtccgtagcacaggcgcacagcagatttaagattggctcggatacggacagttgcctcacctttgatccttctcctgcattttccacaggagaaggccgcatcctgccaatacagccacggcgacgactacggcgacgacaactgtcgtgcatcgcctccttttggagcccgtctctgtgaaaggtgacacatgcaacatgaacagttctcagcaatctgctactgtcaggtactaagaaatatttttccccgcattaaacat

SEQ ID NO: 6196 - DNA, 808 bp, Zea mays
cgcgcgccaggagctcgcaccgcgcgctcctgggctccgtcctgcgcagcgaggcccgggccagggacgccatcttctactcgtacacccgctacatcaacggcttcgccgcgacgctggaggaggacgaggcggcggaggtctcgagtacgtgcgtgtgggctagctggctcatgtctccgatgtctcttctcttgccgtcgtctcccctagctagctatagctctgccgttctctctgctgttgactgtgactagctattctcccgcgttaatggatggcagggcatccgcgcgtcgtgtcggtgttcccgaaccgaggccacccgctgcacacaacgcgatcgtgggagttccttgggatggaggaggaaggtggccgggtgaggcccggctccatctgggccaaggcgaggttcggcgagggcgtcgtcatcggcaacctcgacaccggtaacaacgctcaccttcgtgctcgtggtctcttcttcagctttgtcacctgggtactggactactggcatactgccgcgattagagcctgagccactgagctaatatagaccactagatatattcgtgctagaacacttgcagacaatcatagcttcagctccacgcttagacagatgaatgtgttggtggaactgttggtaaagacccaaaaaccagtccaaatcatgcccgcgccggcgccagctcatcgacacaaggtcaggccagacccggtaacaagccggaagaggaagagcttgtgcagcagctgctgctggtgcgactgccaggctttctttgggtctggtggcttg

SEQ ID NO: 6197 - DNA, 807 bp, Zea mays
aaaccataagattacatctcacagtccatcaatatgcgcagcagcaacagtcaatgatgcagaaatgaacagagtatgcagaaagagcacctgccaccaagggctacagccatttggttctcaagatagctcctgctgtacaatccagattctagcctttcttcgcttggagcaaagaatgtgagtccaccagcctggccacgagggatgatggaaatcttggctactggatcatactctggcatgagggcgccgacaagggcatggccagcctctacaaattccaaagttcaacaacagattaggaacctgagccccgtaagcgggagtcaaacttatggttataatataaatttgacaacatttaccatggtaagcgacgagcctcttcttctcctcggaaacaacagcatttttcttctcagggccagcaatgattctctcaagagcatcagagatctcatccttgctaatttccttaagatcacggcgagcagcaaggatggcagcctcattcatgaggttttggaggtcagcaccagtgaaaccaggggtccttctagcaattttatcaaaatcaacatctttcgccaaagcctttcctcgggagtggacctatttgataaaaaaagacttgtaagctcatgtatacatacatttaaaatgaaatcaggatactgggaaaaatcaaacttcttttttaaataatattgtgcatgctagtatagcttgtacctacaaaggctagcatgagtagatggagacatattaagggcattgcggtttgaactcaccaagctagaaaac

SEQ ID NO: 6198 - DNA, 793 bp, Zea mays
cttgcatgcctgcaggctagctgcgccactatattgttcttttttttttctcttctaagttttgcatgttattcgacgatcgatatcgcaaaatgaagagcgaacagcacaagcgaactagctagtgtacggtatgttatgacttgcgctgtgtcactgtcaacaacaacaaactgctcaataatatcattcttattccccagttggatcaagaattaattggccagcagggggagagtcaatacagaaacccgataattaacgctttgcacactgaaatacaccagaaagaaacttcactttcattattgcatggacaaagttgaagccaaagtactagctagctgaaaggcaactactgcaaaagaacaatgcaccggaaaacttagctttattacagcaaatagcagagtagttcatgcgaaagtaggtgaaaggaaaacaataatatatagctactactagctgcgagagtgttccaagctcaagagggatagacggggacgagagagatggaaggatcgacaggcgcgagacgaggagaggtagtcgcaaggtgcaagagggtaattcgtaggagattatctctggacaaaaagtcttgcaaggtcaagaagacgttcgcttaactttttgtcacaagaagggttctggcagcggtggtgaataggttggaagtccaggaataagctcggcgaggatagcgccgtatcacataacagcatgagcacggaagcgctcccagcagccgctggtgctcgcacggcggtgcttgagccgcttcctcttcttc

SEQ ID NO: 6199 - DNA, 775 bp, Zea mays
accctttaaagtgcattgatgctatttttaccccaaagttccctatgaagcaaggatgcagctacactgtgcggtgatgaccatcaaattgaggaaaattgggctgaggtaaggatgcagctagatgaggaggataaaataaaattaaatatacatacaacatttgaggctatagaggacacgattataaatgggtcaggttgctacagtggtggcggtttgagtgcgacactatgcggtgacaggagttgtctatggatagcgtggcggggatgatggtcccataaaatattaggtagtgtttggttgaagagccaagtaggacgaaaccgttctttcccagttttattgctgtttggttacaaaggaactagaacggaatggctccaattagagaatattctcttcagatctggaaccattccgctccaaaaaaatcaaccggacggagccgctccgttcctatcccgctctcacagtcacgctccgctccgatcactctacaaccaaacaaaaaacagagtcgctccgttccagattaccaaacacagaacagagcggctccgttcctagaatcagggatggaacagctccgttctacttggctcctcaaccaaacacgacgggaacggtgattagcgtggcgggagataatgggcctgtagtataaatacaggaggagtaagcggagggaccaagaaaaattaacaaggagaaaaaaaaaccgtttgggtgccgttaatgttgatcggacagctggggttaaaattggcat

SEQ ID NO: 6200 - DNA, 831 bp, Zea mays
ttttccaccactgcatgacattttcttctccaatctgaggagtgaaacttcggaggttgacctgtccaagcagcataaaccagaagttccttgcaaagacaccctacaagaagatgatctatagtttcaggctcttggtcacaaagggggcatctctcaggatgactgatacctcttttttttgtagcctgtcagctgtccagcaccttttcaaggcagccagccaaagaaaaagtggccagttttctgcgctgactggtgtgtctaggtggcccaagagacttggattgtgggttacctctggttcctaggttcaaggatcatgcagacaagttggccgaaccatttctgtctgttgtccatagtatttgtccagagtgccatgctgacccctctctttctgaaccaacttttggtgtctcaactgcgcagtgccttgtttgatacagtaccttgtacaaaaaatgtcactttggtggtttggcatcctgccaagagtccatgcattcattatgccatccatgatttttgaatttctagtgttgctttgcagtttttggatttagattttgttgcatgctcaggcatggcgttgagattttcagtggttttgttaaaatgtgatgtagcttatgatcagtggttaaggagcttcttatatttggcgctttaaaataagaaaaaagaagatatgtattgcatggaagccataggaaggattactgctgaccattatgaatatgtgagagcgtgctctgagcatgccgaacattaaaaatgttatatttaaaacaatgttattagagcataatggatccaagtcgcagtgtt

SEQ ID NO: 6201 - DNA, 758 bp, Zea mays
acagcacctctcagcccgtcgtttggagttatctgctcatgcagataatggaaggaaaaaaaaaaaccgacggagtggagggaaactgaccacatgtttctgagctgcaagatagaagcagccgaatccggcacatcgcacacttcaggtgatgacaaagaaaccacgcttccaatgccttctgctatgggtcaaaagaaatgtaagctggacgagacagcgacaagtgaaagatatttttgcagatagcatcttttggacggtttcacgagataatgtatcttcttccttccaggtcaatttccatcggaagtgggtagaaggtttgcgagttctctctttttttttcccagtcagtaaatggtcaccacgttgtaaaaaaaaacaacaacagcgatttcatcagttatagcagactgtgtgtgtgtgtgtgaagtgacggtgagcatttcttttgaagaaatctaaatgcttaagcaacatttgagaccgggagtttcatgaatgaatttgaaagtgtcggcacttcgcactggagagtagcagaagatcctaccaagaatcaggcatcaagccagttgccagtctgaaaatcaatcgccttcaaccttcagctcctttcacaaatacttccaccgcttgcaggacagaacaaccgaacccgttggtgaagaggccgcgttatttgaggaacggaggccatgcatggtcgcgaccgcaagcagccgcggccaaatggtagtagaagtccccgaacg

SEQ ID NO: 6202 - DNA, 935 bp, Zea mays
gcgctccctgcagtaatgaggtcaccaaccaattgattaggtatcgtaatctaagtgtggtcttgctaagtccaagcatattcacatgatcaagatgtttgcagataatttcaggttctttcctgccatccagagcctcatcatagtcgctgtacgcgtcgtcgttgtcgttgtcgtctgccattccatacccagatgtttccccagcatctgcattacggcagagcttgctatcatccaaagtgaatgataccttgtgccccatacttggcactcgttccggttcttctactccgaagaatcttcctcctccgttgaaccttccgttgtgtgcttctctccttcccagcaggcggaagtcaccttcattttctcttctgatcgcgctctccttggtctccccttgagtttctgagcagatctcggatgtggagccgttctcgcgggcggtacaggtcccgaaaacggaggttgcattgccttcaccttcagcagggccattggcacaagaaaactttacgaacctcttgtttactttagcatctctgttgtcttcttcaatctcactgatatgaatgttcttgatgttaatatgtgaatggtcttcctctggaacaacttccacaggccctggctcttgtgataccgacctcacggctgcatcaaatgacataacatgcttgtcatgaacagggctccttgacagtttggatggcacctttggcgacgccttctttctgccagaaaaccaggacgctggcaacggagagcccaatttccccttgcttgattgctctgaatggtcggaaccaagtgggctctgtcccagatcaacccagaaggagttctccgatgactcatcttcactgaacacgggggctctttcatcaaccttttccacaagaaaacacacttcgctctttttaatattattg

SEQ ID NO: 6203 - DNA, 909 bp, Zea mays
  unsure (1)..(909): unsure at all n locations
ttgcatgcctgcaggtggtagctcatcgcacatttcgaacccagctgaataagtggtcatagcagtagaagatccactgtgcgaaggctctcgagaagctgcaccgaaccaaacttggtttgtagaaggaacgaagctaccattgtttggttccatgggcctgtcgaccttgggaagcatcagggaatcctgagcctgggcagttgtcatgatgggaaagaaatccgttcctccaagaatgttctgttgaaactgctgagtatcatagaatccaaaaggatggcctactgaggtgtctttgttagcatggctaccaagcttcttgcgctcgagcgtgtccttgagcatgctcaccactgaggtaacagtatcttgtgctgccatatgtggattatccagatgggatgttgatgaacttgaaggagatgcaaaatttggtgtctgaacaggtgtgttgctcataggtatgctgtttgtcgtggttgtaaaatcttgttttaactggttaattgcttcaatgcttcctatagttattggtgtcatattagtttgcattgcagcatacctcctcctgtaaatatgaccaagaaaattgaggcaagagccatatgtttgaaccggaaatgtaatagtgcacatgaaaacagagggtcctgccttaactctgacgaacgacttctagtcattggttgagtgctgtggaaccaggcctagaaatggataaaatgagaaaaagttcctttcttttactcacatatanaatctgtgaatatgataagcacctggattgtaaagatgactaaccttttgctaaaagtaaagtcacttggctggcatttccctttctttgcttggcatttctggtatgggcaaaaaaagcagaatcaattaaaacttataatacattcc

SEQ ID NO: 6204 - DNA, 791 bp, Zea mays
atcatgaaggcattgtttcttttatatggtggcaaataaatgcccctgaacgaacgaaatgtgctgccaaagagacgtcaggatataccttttcaggtttcttgacatcatcaagcagtcttggaatggtttccaccgcttccgggttcgagaacaggaatgatctgaaacatatacaaaagattacatgaaattgcagtggaaatcaacggacgagttcttttctgcctggtgggcatgatagggttgtgagaaaacatacattgtctggtcattcctaatgtccggtagatctctcatcaccgatgaatggaagaaaccggagcttgtatctttgtcgtcgacaggtgacaaccaccctccaagctcactatatatgtcgaacgaaattttggattcagtcttctaagttgctcaaaaataaaagagatgcctgcactgcatcaacgtagtgtcaaggttcagacttggtcgtacctggtagatggatctaaccaaagctttttcgatgaacagtcaaatgccttcgaaaatgctgaaccgtttggcacagtagtgtttgagttcctcatgaagatcttctcttgccgaactgcgttcctattgatctcatgcacctataaaacacaaagggtgtaaaatcacccgcgcgtgcaacatatactctataaaatagaaaatttgcagagaaggtacctaggcgatctcttttactgcaagtttgccctccaccgtcttggtagccgaaaccagcagcttttcatcaatgaatggcaacattgcaatacccc

SEQ ID NO: 6205 - DNA, 814 bp, Zea mays
acctgcagcagcaacaattgcagcaacagcaacaattgcagcaacagcaacaaaatcagcaacagctaaataagatggctgcacaaatgccaaatctggtatcacatcagccgcaactgtctgatcagcagcttcaactgcaactgttacaaaaactgcaacagcagcagcagtcgttgctatcacaaccagctgttactcttgcacaattacccctaatccaagagcagcaaaagttgattattgatatgcagcagcagttgtcaaattctcaaccactttcccagcaacaaacaatgccccaacaaagtattcaagttccatcacgggcaacaccaccaccaacaacaaccgtgcaacaagagtcacagcaaaagcttccacaaaagcatgttgggttcactgacacatcacataccaccattcctccgactacatcagtcaacaccatttcagttgtaggaagtcctctgatggcaactggtgccacacattctgtagttactgatgaaattccttcctgctcaacatcaccttcaacagctaatggcaaccatattgtgcaaccagtcctcggaaggaaccaactatgcagcatgatcaactatgagaaggtgcctcagtctactcctatgtcgatcccaagctccctggaagctgtcacagcaacgccaagatcaatcaaggaattgcctaagttgaattctaatgtcaagcaaagtgtaatggcttcaaagctaccaaatgcagggcatgtagctcaaaatttgactaacaatgcacccccgacggactattccgaaacagcttcatc

SEQ ID NO: 6206 - DNA, 797 bp, Zea mays
acctgatagattttcaacagcgcaaacggttgaaacttatgctacacatcctgatgagtaacaagatgaataataaataatatgtgagctaacaataccatctcggtttgtgcttcccacatccaatgactcagtaaatatattcgttgcagggttgctgacagatccaccatcttcagcattcaaaacaaaattatagttacggacctatgttggatacttttgatggttaatagacatgagagattttcatgtacatctataacctgcactggatgatgctttcgatgctactggctgatcacacgttgtaatgtcaactgtttcctgtgtctgcttgagaaggattcagcaaacaattagggtgaacagtcataaaatagatgaaacaactgatgaactgggtaaataaattagcaagcacacatatagcatgatatactgggtaaatagatgaacatactgatgaactatcatcacgcaatgactgcatcagatgcctcttgaatgactccagctgagaattgagaaaatatatatatcagtatgctgtcaaatttaaaaggttaggaaaaaagatggcggaattctttttttttttaaaaaaaagggctacaagagtcttgacataaattttaatataagatacaaagagaaaaacaaagactaacaacaacagatgacacgcaagctgcacagagctccacaaaaggaaataaggaagaaaagacaaacaagtgtgactgataatctgaaatgtcatctggcttgctccttagagagcataagaaaagttt

SEQ ID NO: 6207 - DNA, 771 bp, Zea mays
tgctgctcgtgccgcaggcgctggtggggaacacgctgttccctccggtgctgtccgcgtgcgtgtgggcggcggccgcggccacgcggcgagaggaggtcgtggagatcgccaggaagggcagggaggcgatggggtactaccacctgttccctgcgcgtcggtgctggatgctcgccgggactgtggtttgcttcctcgccgtgcaggttgcgctggtgtgcgcgatggagtggggcggcgcgctgcgcggcctgagcgcgggggagaaggtgtcgaacgcgctgttcctcgccgtgaactctcggcacaccggcgagtccaccctcgacctctccacactggcagcggccatcctcgtactcttcgtcctcatgatgtgagtattatctttctctcacctgatgacgtcgcctctgtctctgtgtgcatcgcagttcacgttatgatttggacttcggagcccacgaggtagcggtgctagtatcagttgcccttgccgataccttcgcgaatgcgtcatatgacgtatatagtgaattcattcgtagcacacttgcactttaaatcgtaagccattctaccatttctaaatcatttctcctcgtttcattttaggtgtataaatttttagatgattttttactaccaactagtataagtaaataattgttttttttacaatttatgatttatctttgtatcgataattgttaatcatttttgtgtcagcactgatcaagattttgtccgatttgtaatatgttacct

SEQ ID NO: 6208 - DNA, 1362 bp, Zea mays
gcagccggcagtagcctcgcaaagtgacaagatttatgtgcctgatgctgcccaggaactcgagctccttctccatggtcctgtcgcggctttggcggctgagatcaatcctcttgacggcgaacgacgtgccatcgtccatcaccattctgtacaccgtgccgaagcccccgcagccaaccacatcctcttcgtcaagcagctccagccttctaatgatctcactcgacgagtacggaaggttccactggtacgtcacaagcttcgcgcctaaattaaatgatgacaccaccatcatatatgaaaaaatagtatgactataatagtaggtatctgtttttttttatttatttgtatggaatggtgctaaattcattaccgtcaggaacagttttcttgtccatctttacgtagtttccaccgacgctcttcttcctggacagcaagcagatccacaggaatccgagcacagcgatcagggcaagagccaaggttgacatcgagccgatcacgacgccattcagaaagcgcgatgtcttcttgttgttgttactgattggagagacacctgtttggattagaaaacgaatcaactccaccagtcagtcagccacacaaacgttgcccccgctcaccaaagtaaaaacggaaggacttgccgccagctgaagagagcggatcggaatgtggcaacacagcaggaaagccgagggttccacggcaagctttctggatggacaggccacagagctccagatttccaacgaacctggcatcacgtgaacaatcataactaggaacactcgcaggtaaacgaggggcaaagggggcttacgagctgcttttgaaggttccgaggacaccagcatttgggatctctccggagaagaagttagtagacaggttcctgaaagatgcatgcatggtaagtgggtgccccccctctcatcagttgcaattcagcattgtgtgtttccaacatgaaaatggcacatacgaaaacttacagaaagcgcaggtgagtgaggcttccgatcgaggccggtattgtgcccctcagcagattgcttgacaggtccctgcgattcgaacatatatttttttagaatcacaagcaggcaatgggcgatggtaatgtgtaggaccatacaagatggtgaggtgcacgagctcgccaatctctgaagggatgcctccttgcaggtagttggctctcaggtaactgaacacacacacacagagttttaaaaaagaaattaaagaaacaaacacatttgaacattctgccgagttagctgaacaaatcgatgacaatgaactagccaagtatcttacattgccctgagctcggtgcagttcttg

SEQ ID NO: 6209 - DNA, 896 bp, Zea mays
agcttgcatgcctgcagctgcgaggagcgacaggttctgaacttctgactgacttgtgagactcgtcggcggcaggtgtgaatagtagtagtattacagatggcagagagctagggacggcaggcgcggccgtgaccaaggtttgctgtgttgaggtccttacctagttttaagaagtttttatcttttccataggagaagtccgcttcttggttaatctagtttttataaattgatatgtttggtctataaaacagttttttaaatactggatacacgtaaacagggggtttcatatatgaaacagatatcctttgacagtcttttggtagtgtatttttagcagcgtattcggttcctgtattcaaatggcaggcacctttttacctttcctctggtcattttgcaagctgcccccctgttttcgtgagcttatattaattatatgcagatatcaatatatgtcgtgaagaatcttgcggctccgacttgagagcagcctgatgtcttcggtcttcctacacgccatttttatactggaaactctggatcggaaatctggacgaggaagtgcatctgatctgaccttgcctttctgaattcggagggtaggaagttcctcgtctgacaatcttctcggtttttggataatacgcggcggttcgagtcccaacagaatctgcataaagtacttactcattttgtagaaagtaacacgcattcctgggcgatctttagacatcaaatacggttcttccttggcccgtaaaggcaagcccaaatttaccaagctttgctctggataaagcaagcgacaaaagttaagtgaactatactattctttgcccgattaatttcctgggagaaactttgcacccgcccaccccgattttttt

SEQ ID NO: 6210 - DNA, 853 bp, Zea mays
gcatgcctgcagttcaattttttttcaaatattagtgaagcagtataaaattgtagcatgagctagaactgttctcaatgcataataaacgcgcaggtacagctcaccatttcgaggaggagatttagaccctctattagcactaggttccctgtaagaataatagactcagaatcctttgtcaagggaacagtttgtggataatgtaataaaaacatggtgcaatactgcaatcagacaatggggcagaggacaagaatgtaacaaactacaaatagtttccccctaaaataaaataaggaactacaggagaacgggtttcaagcactgcaaacattgctgaaggaactattcaatacagatagggggacatgtttcaagcttctcatgaaagaaaaatgtatacccacccctgagttcttacgccatcgcaaaaaaaaaggtcccaagcgggtgttagatgcctatgcatgtccttgtaagtattcggtcccatatatagtccttgttgcacatggtctctatcttgtatcggtacatatattaaagcctagtgccctcatactgaatacaagtgctattcataacaacagggtcgtaggcatccccggggccgggagaaaggggggccaagccacagcaatatacccaccacaagcaattccatccggtgcccattgcaaacatccctctggtgtggcgatggcaatctagaatgggaccagctcaagcaacccgatcttgaaggagacggcagcagcaaacaccgagggggaatgcatatactataggaggggaaggcgtccaggcagacctagcactcgcctggatgcctagtcgccttttaaacact

SEQ ID NO: 6211 - DNA, 801 bp, Zea mays
gcttgcatgcctgcagtacagttattagagctttctgcacctctcactttttgcatgactatacagctatactagtcactcgaatgttcagtagaatagttttgttttttgtacctaacttaaggagagaaagacttgcatactcgacagggttactgactactattaagtattcactggaatataatgttaaggggttttgatctatggtctatgcagtgccagcaatgtctactatcaaatccttgtgccacccacgccttccagatgtggtaaccccacgagtgaaaagacccaagaccaacttactaaccaaaatgccaattgcaaaatattctgtctgccacatttagtgatgcacacacctttgtttctatatgatttccctcccaccacgtaaaatatgagttgtaaatgtatgagcatgaatttctgttgcacttgtaaattgaaaatccaaattaatattgtactctttcatgtccacaggctggtaattatgtaaaggatgatgtatggcatgctcttatagttctaatgagtaatgcatctgaacttcaaggatattcaatcaggtcattatataaggcattgcaagcatctggtgaacaggtgtggcgaaataataattttctttgtaatgtatactgttggattatatatctaatgtgcatatatctcttctatgttgatatgtttaggaaagtttagttagggtggccatttggtgcattggtgaatatggagaaatgctggtcaacaatcttagtatgttagacatggaggaaccgatcacgggga

SEQ ID NO: 6212 - DNA, 825 bp, Zea mays
cttgcatgcctgcaggtactaactatatttcttcaggtcatttggttcattgtttcttgttatttgcaacttaaatttgaaacatcatctacacgaaatcagagaacacttgagattgttcacatcacatcttataactgcatgcattacttttgtgactgtaggtctgatggatagactaagaaccattccaaccaggcaatctctcgagctgcgagcagaggtgagtacatgatttgcacatagaatatctttgcccttgtgtcaagtgccgattaaaatactgtttcgtttcgtttcgtccatcaggtggcttccatggcctccgatttgaagaaccagaggtgtgccttgcaggaaaggatcaacaaaatatctgaatatggtgtccgtgtctgaactgctgcaccgtctgtacatttcccctcatagagcctcttttggtcctcccgtacaataaactgtgaatccaccgtgagagtgcgcgttttggttagacaggttccgattctaaccatattttcttgtcagcattttgaatgctaggacagacatggtaactcatcacaaccataaattgttcctatcactttaacgttgagcattgctcgtttctgggaagcagatgggctgatggctactatcttatatatgcgattgcaaggaaaaactttgttccaccttgggtgctgtgcttcctgtatacaattctgctattccgtttcggaagaaaaaaaaaacaaatagttacagaatgcaggcgctgctacaggaggcgacagaagtgtgaagtcctgttgatattgttttcagtttttgcatctg

SEQ ID NO: 6213 - DNA, 841 bp, Zea mays
ctttttgcatgcctgcagaggctgagtacagggcaatagtgttgagcctatgtgagatgatgtagttaaaggtctcgctaggtgagttacgggtgttgaggaatgagactgatgtttcactgtgacaacattgcggcgatcaatattacaagcaatactgttcaattttatcacacaaagcatgtggagcttgataggttcttcattaaggagaagctagtagggtcttaaggctagagtacattaagtctcgtagccagctagctgactgcttcacaaaagatctaggtcctaaagagaagtcaagttgtaacaagatggacatgagaaatatttttggcctatcttgagagggagtgttggtataaatacaagagttctaaatgaccattatgtggaagtgaggaaataaagagtgtgtgtgtgctgggggatgcaacacaccaaaaaaacccaaacctcaataaatttgtagccgcaaacttcaagttcgtcaacctaaattgcttactaaaagaatttttacttccaggtgatgaagagatacacattctctaacttatcagatgattctcagcgttttacagctcgcttttttcaccttctttcttcactagcagaagctttcgtgtaagtcagagtacttcatcttgcatatgcaaataactgtagatgatgagttggctatgcttctattcaggttcatatacatgggatttgatattgcgatagaacgtcaaagctggtcacatattggattcatatttttctcaattgtatccttcctttggattgaactaccgaacctttactatgcactgtacataatgaaatatgtttc

SEQ ID NO: 6214 - DNA, 728 bp, Zea mays
agcaccgataccccgtgaaattgcaaattcaagatacacaactagtgtttgtgttggtagagagaggaagagaaagttgagttctagtttctcacatggattttatatcgacgtatttatattattattgcatatttatatcgtcaatataatattagtgttatggtgatattttatcacatggattttgcatattatattaatatttatcgtttcgtatatatgttttatactattttttttactctcatggcaatgcatggacacgaatctagtttattgtatatattttgactagacggaaaattagaattatgtaagtttctactactttaatgcaccagtttcaacagtttttgttttcgtacgtcgtctcacccattcggcacgctcgcatacaatcgtctgttttcgacgactgttgaagctactgcgtgagtttttacaaccacgctctgcgcctgtcgaaaccatgctcgccgccataaaaactgcccgtgtcgacgcggcaccatttcaaaatcacgcagtagcttcacgtctcttcctcgctctgctccaaaaccctaggtggcgcccgcaggccgcatcctgctcccagagcctttgctcgtgcccgtgtttcgtcctcgttgcctcctcgataaaccccacgggtagggatgaaaacggaaacggtaattttcggatactggaaatcgttttcgaaattttaccgaaatttaggt

SEQ ID NO: 6215 - DNA, 833 bp, Zea mays
atatagtaggcagagacaatcccagatgaaattattaccacatgcagatgcatcaaaagaatcaacaggtggctccctgatgtatataaataacctttccttataaggatcagaatcacatgaagatctctgcaaagcaaagtccataagcccttgaatctccgatcttttctgctcagatttaacaaatgaccatttctgcatgggggaagttcaaatttgagaggacttgtacagattaacaaaaacacatgatctatggctaaaatactgcaattagataagcattaccttattataaattagagcaataaaggaatctgcccagtcagctatttccatgaaatggtaccgccgcagggctagcagatgtgcacaaagatcaaaaccttcctcaagcaacttcattgtgaagctgctaacatatttataccttttaaagttaaggaacaaagcataaaatttgaagaaaacttcgatgaattttgagtgattaatgtttagaataaaaaactatagtatcatttatcaagaacttgatatataaagttctcactaacagaagcaatcggtcaatggtaaaacaaaaggaatatagactagttacctaataaatgaggactgggccaaattgaaacaaagagcaattaatgataataaatcaaaattttgtgttcaagaaaattgagaacctaatgttctgcattgctctttaaagtgcacacactaaccaaacttgaaactatccacgctacaaatgcctgaagaaaagaactgaagaaaaaaaaatcaggacttctgaaatactactgtataacaaatacaaatactga

SEQ ID NO: 6216 - DNA, 767 bp, Zea mays
atatagtaagtagagacaatcccagatgaaactattaccacatggagaggcatcaacagaatccacaggtgactccctcatgtatataaataatctttccttataaggatcagaatcgcatgaagatctctgcaatgccaagtccataagtccttggatctccgatcttttctgctcagatttaacaaatgaccatttctacatgggagaagttcaaaattgagaggacttgcaaagactgacaaaaacacatgacctatggctaaaatactatggttaaacaaacattaccttctgataaattgaagcaataaaggagtctgcccagtcagctatttccatgaaatggtaccgccgcagagccagtagatgtgcacaaagatcaaaaccctcctcaagcaacttcatcgtgaagctgctaacatatttataccttttacagttaaggaacaaagggtaaaattggcagaaaactttatgaattttgagtggttaatgtttaggacaaaaaaatcaccaacaatgttttcaaaaaatacaaataaaaactatagtatcattttatcgagagcttgatatctaaggttctcactaacagaaccagacagcaaatggtaaaacaaaaggtatatataccagttacctaataactgacaactggaccgaattagacaaaagaacaattagagataataaatcaaaacttagtgttcaagaaagttgagtatctgatgttttgcatcgctctttaaagctcaaacacttac

SEQ ID NO: 6217 - DNA, 791 bp, Zea mays
aaaagaggcatgaaccatccggctaggtgccctctttgtgatcaagaacctgaaagcattaatcacctgctggtttcctgtgtgttctcaagagttttctggtataggcttttgagaaagtttgggttacacagcttatcccctcagcaagtggagccttccttccttggttggtgggagaattcctcggctcaggtcctcaacatgagaaagaaaggattggactcccttgttgctttaggggcctggatgatctggaatcataggaacaaggtggtgttcgatggaaggaccccctctatctccttccttcttcaagctgctgaggatgaacaggagacgtggcggctggctggtgccaaggggctttcctttttggccagccaaactacctagctcctagggctgtagtgtttttgtccaattttatggatagctttgtgtatgcttgtttctggcctccataaggagtgctttgtacctgggtccttatggccctttattttccctctactttaatatatgggtgcgcagtcctcctgcgctctttcgagaaaaaaatgagcatgaaatagagcactattcgcattctcgtctttcagccagcaaatgcgagacctcaaccgaaccaaggatcgccatatggacgcaagagcaagactgtgctgctttaatctggtatgcaaccatattttttcaggagaaaggcttcttctgtactgggcaatgttaaactgatgtatcaacctctctggcaagatcaagctgcgatcttatttgaccaacttttt

SEQ ID NO: 6218 - DNA, 769 bp, Zea mays
acacatgagtaggaaagatcagtgttttgtgggtccagcggtgaaccaatcttctctggttccaaaatcattgctaaatgcaagcatgaaggaaaaatatcagaattccactttgttgtcttacaatgatcctagttctatgcctattcgccaaccctaccagacacctggcgcaaagtcatcttctggatctgtcatatccttttttgagtatggtgcggataattctttgtccagaagctcttctcctggtctgactctttctcttacaactggtttggctaatgagtctatttcagcaggcagagcagcttgtgcaggcagtcttacaaatgcagatggtaggaaagctgctagctttgtcgaaccaataggcaatagatcagtttatgcagataatgtttcacagcaacctgcaaagccaataagcaacagaacagtttatgcagcagataatgtttcacaacaacctgcaaagagacaacttgttacagatagaaaggattttatgtctatgggcccaaacattgtgaaccattcacctggttggtcacttagtgatgcagttggtcctcaggtgcttgattttagtaaaagaatgggaagagatgctgctcaaatgtcaaaaaatgaaagcgacaatccaagggccagttccgggtcaatttcgccttttgaaacatggtctaagcctggggtgggtttgcagggcttaatccaataccccgttgaaatccaggcaaaacctgattgatctttccaaacgctt

SEQ ID NO: 6219 - DNA, 853 bp, Zea mays
attctactaatttaagctattagatgcttattccttttgacaaaggggtcctctttatgattgttcactttcagttcacatgcaagttttctctgtactagatgtgattgcataaacattacgtccttcaatttttcacctaaatatgtattcttgtcattgagttccactttaagactagcacttttttggcagatcttattttggtattaaggccttgtgtgtcgtagctcattttattcagcaagtcatctgataaattgttttaacattattcttaacttgcagccccaacatatggtcaccagaaggaaatccagttttgagagaatatgcaataaatatcccaaaagatcattcttccatggaaaatgattctcctcgttcaagatgttgttcatgctcggcagggcactctcctgttagctctcccattgctcttcgatgcaggtcaacaagactaagcaatctattaagcaagaatgaagtactagatcgatacattgatagagggcatgaagatgcaatggtaaatgagaaacagaggcagtatccctccgccgcatctatggtttctactttgggaaggccacctcgaccccaatcaacagtaccatccataccaaaatcaatgaaagggaatacagagtgctacccagatgtagacataaaagaagactgcctttggcaagttgctcaagagggtacaagagataactgcaagattacaactatgtgcgatgcaggtagaaaccacgtaagcatgcccagatgcctttgagagagacagtgctacatctgttgtagatatttgggaagatttgcaagaagtgagaccctccaatgttatttg

SEQ ID NO: 6220 - DNA, 790 bp, Zea mays
gcacgcgcgcgtaccgcactgccctctgtctcctgtccgtgagagcaccctacaggaatctttcgcacactcactcactcactctctctctctctctctctctctctctctcttaccccgcctttacttacaaaacgggtttggtcaaccgcagcattgggagctaagagtttgctggacgaatggaatcgtggcttgcgagggcatgcactgtccctgtcacccagcgagacggcgccgagagcagagcgagagagatcctgatgggatccatccatccgcacagtgcactgaacattgcccaatgatcagtctggttggtctccgatctgatggaggatgcactgaacgtcggacgtcccgctttaaaaacccgacgaccctacctatataatatatatcatgcgaacagtatttttttttccctttttcactctctctttactttcaaatgcacaaaatatttgtattccattcgcattaagctagcagagttttttaaacagcagatatcacgttcgaaaggagcgtcctaaaaaaagtctggaaagagtaccgtcttcaaatttcccatgagtctataagggctgtgatgtgatcaggtttgaacccctcccggttttcggagcggcaaagtcagaaatttttgctggaacttccgacaaggtgttctctttctcttttgtagggcgtaactcttccatccggacttcgaattggacgttgagtatatgtttttgttgacccatatcaatgagaggaacacaacaaccaccaaaattatctattc

SEQ ID NO: 6221 - DNA, 768 bp, Zea mays
tgctgcctgcagtttactgtaacttcacaaaaatagcttactataatctacaacaaagaagtcctgagatctgctacgaactgtggagattgatacagctttggaagctgcacttgcctgataaaaaggttgatttggacccttagatagcttatccacgtttgctgtctccatccatgacttggattcacagcacaccgggtccatgccacatatcacgcctctatatccttcagcaagagtgcatgatggtgcaaaaatcaaacaggataaacaagagcattcaccaagtcaatatcgaaaccaaatactaaactatggatttaatctcaaaagcaaatgaggatgaataaagccacagataagcgtagagaatgggacctttttcattcgcttaatgaaatatttcccttttttctaaaaaatctacagataagcttaatcaacagattgaaaaagaacaaacacattatgcatcataattacataggggcagggcagaccaggagacctagtgcgggaggcacccacatgagtggggtctcgggaagggataaactggggcaagccatgtccccgcaaatgcggagaggctgcttcgaaccggcgacctggtgactcagtggacacattatggcattatgcagcctaattacatagcttatataaaaacaaagaagttattgcatcggttttggttcaatcggagctgatagtgtagagtatttttagtgaatctggttcaatcccaaactggaacagtgaaaa

SEQ ID NO: 6222 - DNA, 834 bp, Zea mays
ccctttatagtctacctgcagcgtccttatgcgcatgaaaacagcagtactcaaaaggagaccaatcagcaaaaagtgccagcagaccacacacacctgctcttcactaatcacccaaaagaaccctttgcctaaaaattacagcaccaggaatctgatcacaacaaccagcaattccaaccagaaacataacaccaattggtattagcattgaacatttaacaacaactcaaactgtgagagatacaacagccccccaggcattttgctaagaataccttgtcatgcaggttgaacccacaccactcatacacagtggcaatgtggaccataccagaacggacacgacctcgggccggaccttagacttgcgctttggcatgggacagacacgaaattttgtttaaaatccagcttgaaattcactcctacgagaagttaaaccgaagacttgaggagttactagagccacctaaccaactcaggtagagacccgttcacagcaaacatttactacactgtaagatgacttatagactgaaaactttacagggaaagtggagaacccatccatgcattaaaaaaaggcagacacagtgccaaggctcccacatgaatgagatctgggaaagggataaaccaaggcaaacctctccccgcaaatgcggagaggttgcttcgaacccacgacctagtgactcgatgagacagctctcacctggtgacccatccatgcattcaactaacaaaatctacatcaaaaaacaagtatcataaaaagctaacataacccagaggacatgtacatgtgggccatttgtccataccagcata

SEQ ID NO: 6223 - DNA, 766 bp, Zea mays
tcagttggtaaacttaagccatcgagaggttcttttcacagtttttacacatgtttcttgatgtctttgcaggagaagaggcaacaaattctgaatgagatgagaacattatgtgaagcatgttgttatcctggtttagttgaattccagggtgcattttacatgcctgattctggacaaataagtatcgctcttgaatacatggatggtggttccttggcagatgttataagggtcaagaagtctataccagaaccagttctttcacatatgctacagaaagtattgcttgtatggatcttccatgtcttttcaatccatatctgtagtttctagacattagtaaaagccatgatatggctttctgtatatttgacttggtacattcttctgtttataattcaaaagggtctgcgatacttgcatgaagtaaggcatctagtgcatagagatataaagccagcaaatttactggtaaatcttaagggcgaggcgaagattacagattttggtgtgagtgctggtttggacaatacaatggctatggtatgctacttcttggcgatagtcatcacaaatgttcttctagtgttgcttaatgtatgataattcttttctgaatactagtgaacatgaaataatatcgactgaatcagcaaaacattttccttttaaataaatatgttcagtgtgctacctttgtaggcacagtcacatatatgtcaccttgagagaattcgtaatgagaactattcttatgctgctg

SEQ ID NO: 6224 - DNA, 761 bp, Zea mays
acaggcggtgtttgtccgcaggacaggctgccggagttttgactggacatttgcatgggataacacatattgatagtcgtggagatggccgaagtttcatatccaatggaaaagatcaagcaatcaaactgtgggatatcaggaaaatgatgtccaatgctgataggtactttctgaatctaaatataagtccacctagtcatccactcttctaccaacataaattcatataccattttgccttctccttttggctttgctacttcttttccttgtaaatgtgctgacaatgatttatgggcaatgcaatcataataccacccacattactccatgtgtacgagtccaaatgaacttctatgtggaatgggagtgttaaggcaccaatgtcaaatgtgtctgatgtacacgaggattatgtgttgttaccctcaacagcggccagtttgctgactccatgttcttatcttaaaggagctgttcgaccttagattaagtggtcatcttacagtataaaattagtttattcttctatgcagttgtgcagatggagccccagcctgggactacagatattcaaggtatccgcatcaacataaacagttaaagcatccgcatgatcagtcaatagcgacgtaccgtggacatacagtcctccggacattgatccgttgctacttttctccttcgtataggtaaccctttttacctccattccggtatgattttgttgacagtttcactattgatgtcccctaatg

SEQ ID NO: 6225 - DNA, 768 bp, Zea mays
gcatcaaggttgatagtttggtttctctgcacttcacttccaattagattcatatagaaatcccagaaaacctcagccttcccatcatgggaggtgaacagctgatctccatcccgaattgcagtaataaagttcttcctcttgcgaaatcttgagcaagcatgaaataacttggtgttggcatcgccgtccttgagccaagacagccgagatctggtcctagccaccgtcctgagcagggaagcaaggaacaagcaatgtttctttaattgctgtagcagccagcgttcgagatcagagagaggtctaccatcccttgctgattctagctgcaacatcacttctctagctaactcgagctgtaacttgaagttgcccacttttttgtcactccatcgttgtagccccttggttgtagccttgaacttgagggagagagatttaagagggcaagcattattctgtacagagtgccaagcattagaaactgcatcatgaaagccctcaaatcttgtccagaaggactcaaagtggaatctcctcttgccccgaagattatccttcaatccaagaaggagaggacaatgatcagagccctcggaagcggaacattggagtaagaaatctgggaatttctgctcccactccacggaacagaagactctgtctagtcgtaccaacacatcatgtgcccctgaccaggtgaatttcctttccatgtagatcgatgtctttgattcctaaaatcctgaatacatactcctgaat

SEQ ID NO: 6226 - DNA, 805 bp, Zea mays
atgcataccatttaggtatagagctaacaatgatgaaatctctggtgacaaaactaagaaagtcgtggaagttctcatgataaattcccaaagcggacctggtcttttgtttccaaaggtactgtactgtaaacatctccatctgaaatacacatgcaacaattagaaagtggacatagccttttgtttccaaaggtattactgttaacatcttcatctgaaatccattgctagttgtttacatggatgacaacttttattgcatacttattctgtttctgtgttttcacataactacatcggaaccattatataccctatagcagtgcatattattatttcagttagttcctaagtgccagtgtgtcttaagtcagcaatccaggaaatccagatgaagtaactggaatgtctgagttgccgatctggattccttgggctgtttatgggcttgtttgcaagcttagttattttcataaacctgttgtaaatgtcactgggatgccatgtagagatttttttttatgtttgttttcttgttgcagggaggatgggaaaatgatgaaactgttgaagaggcagcagctcgagaagctatagaagaagccggagttcgaggtgatatagtggtaagatgcctataaagatagtgcttttctaaactacttttcatcttgccctttttttgtttaatttttttcagtagttaatgtatgccatgtgctgacatgttttcctgtgcttctatctcgacttattcatgaaactgatattcttggatgatacagaaactcgtgttcactgt

SEQ ID NO: 6227 - DNA, 785 bp, Zea mays
agaaagttggaaagatcagaaaacggcatgttttccttaaatctgagactgtaccctggtagatatgaggtaatcatctgcccttttacacccaatcatttatatgcttacatcgtctgatagtttctgactgtgctccagattaagtttattgttgatggtgtttggaagaatgatccgctgcgacccactgtgcacaacaatgggcatgaaaacaaccttctgcttgtcacttgatttgaagttttcaccctggtagcatttttgtagatcattgcctagctccttctcggtatggttgatggcaactgattagatcggtccctccgtgtaactaatcagctttcttttcagtttttttctgtcttttctagatagatgtgtacaacataaacagtgtagggtgttattgaaatgcgtcgccctgttgagatagagaagaaagtagtgtgttcttttcttcccgtcgttctcccctgtgttggctcttcttcatgattctgtttaacaatgttgtaatgtctatatgctgtgaaggtggtctatcatcgaaattatccaaaagttatttgcaggagttgcattattgacgtgctatgtttatctgcaactaaccccacatagaaatatagaatgcagctagccagctaggaatcgccgcagaggttttgtttgcggtggcaagagtatttcttccagccaaggtaaaaacttcctagggtcaattttatctttgttgcctctgcgtactaagctatatgtaattgaagtgctgaagctggaca

SEQ ID NO: 6228 - DNA, 915 bp, Zea mays
gctctgatgatggaggtggccaaacagagcactatgtcaaaagcaaggagtccactcatgtgaatggccttctacagatgggtagaagagatctttctaatcagctttgcttcagttcattccaagagcaatcatgttcatctaaccattatgagaacgaaactaaccatcacacaaatgggttcgacatgaagcatgatgtaaagattgccaagtacaaagcacggaaaatggcacagttaaagagggctatccatccatctcttgacttcgacaatgcaaatggagtaaataggatgaagccttcactgaacaagctgcaatctttccatattggaaagaaccacagtttccgggtaccgaccggtgaccgaagcccgggtaaagtaagtacggattaccattctgatttgaacagccaattatcgcatagcaggcaccccgatccaggagcccaaagggcctggcattgtgaggtcaatgcagctgggagctctgattgtatgtttacagcaaggcgctactatgccggagctcagttgccaccaaatctcccgcgaacaaaatctgtacccctacatgctgtagacgtctgaaatgctcttgccctgtaaagtttatagtgtacatctgttttggttctctctgtacccattatgaaacgtagttgctgagagcaggagactgaatgtgacgaggttgcatgtggattacggctgagctgtttgtaaatttccatcttgtgaattcagagaggttagattgttcgagtccaatccacatcatttgccctcactggggcaacccaggttttatccctttttactatagggaagtaccccattttccaagaagccaaaatctgcttgttaatttaagggaaaaaaacaagggtgttggggacctctatttctt

SEQ ID NO: 6229 - DNA, 792 bp, Zea mays
ccctccaaagcagactctctaaagatgtatttatagaggcggttccatcaacatatgtctccataaatatatctttaggacatctacattggtgtttaatatagaggttcttaaagtgtttaaaggggtatttacaaaaaaaattgtggagtcatttcttcgtgaagaatcgtctaacagacgccttcacttcccttgtacgaatacgtcttctattacatcgatctgatgttctacatgtacattcacttctgcatttattaatagactacatttatatactatctattgtataatagagttttttagttgtcttttatgtttgaagagtcattttggtgtctctctactatacatgctcttataggcggttgttgtggtatctcaacacttgacgctagtgtccaaggatatttttacccagacgcatgggtgacagtttagcgttagaatcgactgtcattagtgcttgaggtctattatatggtttttcctttttatgttgtgtgtatcctgatatgcaaaggccgaaagtgttttcaagactaaatcatctctatgtatggacttgaacattaaaaaaagcttcatttatcgaaaaaggcatcatgggttatccaaacgtcttttttaagttccagtggttgattagtatgttctctcttttctatggtgtttgaggcattataggtggatttaatttacgttaaagccccgttcggttgtctaggaatgaacccggaattcgtttcagctcatcaaaatttatataaattagaaaaataatctaac

SEQ ID NO: 6230 - DNA, 810 bp, Zea mays
taattttgacaaaccttgtgtacgagagacagaataagctaaggataatgatgaagatgcatggccttggagatataccgtattgggctatatcctattgctattttctactgttgtcgctactctatgtgctgtccttcatgctgtttggttctgcccttggtacgatacgctgcttcgcacgttagttcatttttgaactagataaaaaagaaacagagggagtactttataataattaaatgaccatgagggaattggcgcaagtatttatatgaaattatttctatgttcaggtttaacattcttccgccagaacaactacggcatgcagtttatattctattttgcttacatgaacttgcaaatttcatttgcatttcttatgacaacatacttctctagtgtgaggacagctactggtacgcttctgtcaatgtgtgcgttatatccattctatcagatcgataatgtggagtaccgagtatatgtagttctgtaccgaactactgactatgtggcatctcttcatgcagtgacaggatatctgtacatatttgtgtctggccttctgtcacaattcatgttcagaccctatgttgaagatagtaacatctcaagtatgcacgaagttccactagctatatcttaatgttagtcatcttcttttttatgtaagttttcccccgttatttctaataattttcttggaaaatcttggtttcttatccccaagaatcttgatcacgctatggaacttctacctgcattttccttatcccgattgtctacgaattttacgattggaca

SEQ ID NO: 6231 - DNA, 752 bp, Zea mays
cttcttgcatgcctgcagaattaggtgcatgtattcatgtgtaggggagtatatatatgatcgtagaggtgggcggctagggaaaccctatgcgccaatgagctagacccaacctcacacacgagattggtcgggcccaatatatataaaccctaatacacatataggcaacaattagtattctaacacccccgcagtcaaaaatctagtcacaagagatgttgagctagatcgaagctccgaaaacatcgttgaggggaggccattcgtgaaaatattggcaaattgtgatgatgttgacaacaccctcctaacgcacaacgcacaaatccaacatgcccatcattgcttcattggcgagcatgacaacatgctaggctgcatgccagcgtctgcctcctccggatgttggtttgtgcgacgacgaccgactttcccagtttccctaccctattctcggtgcggcaacagagactaagcgaccaacttgagttatgatctagtttactaattgtattatgtgtatgttcaattatatgctatgaaactacttctataggacatcgattcgctcgatgatgctatatggtgctgaatgttggtcgacaaaaaggcgacatgtccaacaactgagtgtagcagagatgtgcatgttacattggtttggtcggcacacaagaagggatagagtccgaaacgtagatattcaagatagccccataggggtcgtgggggcaccaattgaggagaaa

SEQ ID NO: 6232 - DNA, 782 bp, Zea mays
atcttgcatgcctgcaggaaaatcgactgcatttgttgttcttgggtacacaatgaaagatgggaaggcatattttcccccacatgacagtatctatacatattgcagttgaaatggaaataattgaaatacaaggtatgtgcaggtgcagtctattatattggagttaagagagcgctagcttgcagtcacactcgatgaagttctatagggctagattttaaaagtaagatccagtacaaggttacttcaattgcaattagcgattagccaaaactttcatcttcggtctcactaggcctcactaggcctttcatcttcaaaagaatttataaagatattatttttcagtctatctctacatccctctctccatcttgttatgcaattatgagttcattagatgtcattgatctaaattaatttctatccattatgaacttatttttaatgaaccatgctccttcttcgttgctcacaacagggtccatgtacttggcacatgatatacatatacgagatggacttaaaaactaacaaaggtcttcttttggtggcagataattttggttttcttatgattctctttatgaagtgggtgtggtacctctaaacaaatagatgatctgttgacttatggcagtcaggcattacattttttttgcatgaaatcgacatctgagaagtgataattttgttttgatcgcttctctattgcaagatttagatggctactatcctttgcaattgatcaagaatggtgagctattctaaggaagctt

SEQ ID NO: 6233 - DNA, 949 bp, Zea mays
  unsure (1)..(949): unsure at all n locations
tagacgatggccgtgacggcgaccgtgaaggccacgccgatggacgcgtagtaggcgttgaagtaggattgcaggatgctggcccggcgctgcctggggtgcctggagaactggtccgcgccgaacgccatggagcacggccggacgccgccggcgccgagggacaggaacgcgaagccggcgagcagccacgcgaggtgcctcgtccccggcggcgcgcactggtcgccgctgcacggaggcggccgcgctccagggaccgtggcgctcagccataggaagaccatcccctgtatgtgaatgatgaataagcgatcgtgttccatggcgtgtcgtcgcgttaatttaattacccttgtggtaggtagtaggtataagctgattgaaaagagagacagacggcggcgccgccggcgcacttacaatcaggcacgccacggagcctagcgcgacggccatgaaccggccgaggtacatgtcggcgaggacggcgccggggatgggcgtgaagttggagatcgcgctccacacgaacagcatcgtctgggagctgacggtgctgaggtggtacttgtcggtcaggtacgtgatcatgttggtgttgagcccgaatccagcaactttctccagcatctcatttgctaggcatccaaaaaacaccgaatgagttagttattaccccattaaaagtcgaagggaagcgaggtggttgagaattctttgggcattaagtccagtgagaattcatagtaagatggagggcggaactcacagaaaatgaaggggagggctctgaacccgccctttgttgccgttgaagcacttcctcttgtgngcgattcagttcgtcccgggtaagcaagaagagcggctccattgtcgaatcgccggcggcggtggccagccccgaaccaaaacgcaaaatgcttggcccggcggggaaggatcg

SEQ ID NO: 6234 - DNA, 751 bp, Zea mays
tggccactggcattcgtgggaaagcttattcctattcctaaacgtccattaggagaattctttgcgtgctgctgtaactgtaaggggagcaaacaaggtatccattgcgctgcaaaaccttcattgcttgtcgattcatgtagagtgagtggggagtgatcaaatctgcaaaagcatcttttgcctctttcacagtttttattgcacatccctgacagttctgtttgtgcaggccctgatgacgcaacctctaatggtaaggaagacaacaagcttgagccatgagatatcgcaaggtttggtggctggcaacgatggccttctgctgtttcttgccagggtttgacgtgttggatttgtaattgcccctgattgcgattgtgtatatatacacacacacgggttgttcctaggatctgttatacgggcaacatcaatttcataatcatagagattttcctcttagtcttcatttaccgagttcattgcgaatatgattaaacttgtcttgtctgaatctgaatctataacgagagttgggctatggtacccttctggagctgaccatgagtaggatgtcctgagatcttggacatcctgtgatgaaagtctgggaagattttagggcccgttttaggttgggcttcaaagcttgagctgacctcaattgtctattaaggagagtagcatttacgagtctagtgatgaaattatttggtctatgaaccgggtagaagacatccgtaattcc

SEQ ID NO: 6235 - DNA, 844 bp, Zea mays
ttgcttacgaagattgaatttggtatgtgcttctgaagttcttcaattagatattttggaagtgcacatcttgggagggctttagaaggacctgcatatttgttatcaagtaaaaaaaacatataaagcgatctcattgcagctgtccggggagacaactagcaatatgtccgaagaagctcatttatagtcctactgctattagtatcacagaaaatgttctaaatagcatggtaaactaggatataaaagaatggaccaagttaatagccataacaagctccatattaaatagaaaatagattacaaatctggatataggagtgcatcgagcttgtggatgtgaacagctatcagctcagtgtgtcactaagttttggagtacctgcatcatcaggtccaggaatgaataagaaacgactatgttcctttaatctagatcgagctgcaatcatctcgccaagctttccgaactgaaatctgtgtggaggtacatagctaagggttatctcatactggaatagcaagaacaaaaagacatacaattctctggcatctctaatgaaacagaaagccgcacctgagttcttcaaatgaattgaacgctagattgcaaggccgggagcagaaattgcccattaaaacaaagagggaaggcacaacttccacactatcatacccggcaagaacaacagccaacttctccatagtcttctctacgagataacacaaagggaaccgccctgagaatagggacctcaataaatgaccaaaacacaaaaatgagagaacttaattttggaccataaaccgataccttttccttctatcttgaaatggaaaa

SEQ ID NO: 6236 - DNA, 608 bp, Zea mays
cttgcatgcctgcagacagttttcatgcttttgaaaagtaagtcagaacaggaacgtcgtttgctcacagctcttgttaacaaagtgagttatgcaactctatcatatatctcttccttttttaattcaatatatgaagaactgttatgatctagattgaaaacaaacgagaaataagaatacattatattatctatgagcaacattgcctaaagccttactatgagttgcatttttgctcatattttgttaaaaaatatctattgcagcttggtgatcctgaaaggagagcagcatcaagtgctgcatatctgttaacatgtctcttggctgctcaccctaatatgaaggtaaatgctgtgagattctggtatgacacagagtgtttgttttaatctaattatttaatattttgcatgcaaaattgcacataaattcatatcccttgagctcattaaatgtttcaatttgcagatggtggtgatagatgaggtggattcttttctcttcagaccacatgttggacttagggccaagtaccaggctgtatgtaattattaataacactttctatgctagtattgttttagaaatttcgtagatagcat

SEQ ID NO: 6237 - DNA, 758 bp, Zea mays
gtctctggcctcatgtatacaggaaaccaaacattgtccgtcacttggtcaacgcatgcggagagcgtggatgaacgcgagcggacaaccaatcatgccttataagaactcccaaatgagatgcggacaataaacagtaacaaaaactcatattgtttaaatctcataacatgtcacaggctcacacacagctttctacctggaaatgaacatccttgctgctcatttccctagctaaagtaaagataatgtatttttttatgatgtaacacttgcatgggattacttgttcaaattttctctttattcaaagccacttggatacaagggaaacctttatcttaatgatagcagaggtcaccacctatcttggtcaaagttttgtgtttcttgggccagtcttagtggaggtttcataagtttcatgagcattgaataagctacaaaactaccaaatatctggacatggcacaatatcaatgaagagagagatgataaaagtttcatagggtaaaatgagttccatagagatgaaactagtctacattgtttccaacatatatgggtattggaaactgggacatgccttctcacagtgccttctcccggaagggagcgtaatgtaaggtaaaaaagggattcaccctcggtaaatcttgtcgtgtgtcagtgccctttcccataagtcttctggcatatcttcgagattacctggggagggcgacaaaagtctgagtgccatcattactggatcgtgt

SEQ ID NO: 6238 - DNA, 784 bp, Zea mays
acagattggggattgtttgcttgtacaatgctgtggatcggaggctggtcatgtttgatgcggctgatggcatgtggacagtgctgccacgattgtccgcgttggatgcatgcgagagcttcaggtggtttgggcatgtcttggagccaggagttgaaatcttgatgggactacgttggtgaggctttgctcttaacttgtagtatttcagttgagtcctggcagattcagctttatgctccttgagtcttaatgtgagtgtctctttaaacaagaataagtaggctagctaacgtttagtctctgtatgtgtatattgatataactttttgtcatttgccgtttataattctctgctgtaaaagctgatttccataacatgtggaattttgtagacatcccgatgaagatttcatgctaacatcattaaattcataaagctagagttactagaagagctgtatgcaaatccctggcaagtaccaatgcattagagctcatgaaggttctttttactcagcttatcatctttttcagaagcgcaagctgcattaatagccacctttcagatttattcacggagtgaaattcttattgtcctttcctttgagagagaagaattttcatggttagaatgtgtaacttatctatcaattgtcatatctctcttttatttttttaactacgatgtacccaactttgatctgtagtagctcctctgttgggacatagataaaaatcaaattttttgataaaaccatgttaaatttattgtcctacatgc

SEQ ID NO: 6239 - DNA, 778 bp, Zea mays
agtcttgcatgcctgcagatgtcgtagcggcacccgaggggtcatcagaggtaatgtctgcttccaaaaaaatctctcaaaggcttgtggggcagggcaggaatcgagggggtgggagtggaatcaattgccaccaccagagcagcaacagccgatgggggcgagaactcaggcgccaccagctcaacatatgaggcgatcggaggagctagggcatcaactggtccgccattagccggagaaacgattgcttccaataaatctcccaaaggcccccaaacttctggtgccttaaaagcgtggggcagggcgggaaacgaggcggtgagagtggaatcaattaccacaaccggagcagcatcagccgagggggcgagaacccaggggccaccagctcaacatctgaggcgatcggaggagccaaggcatcaactggtccgccattagacgtagatacatgggtcctgggcccaagctgcgcatgcaccagtgcccaaacaaagaaagatggacaagtgaaccaatgcctacaccgccagttaggatcccactcaaggtcctcatcggagttgttcaacgacggtgacataggcgggcccaacatcggcgaatccaccgcgagaaacggtcactgagatgggataaactaacgtctgaagagatgaggaggcatcaacaacagcgaccggcggttcttccacatgaagaccaatagaagcaggaatatcatctagcttggcacaccatgcagtcaatttgagcacggacaggtcgacag

SEQ ID NO: 6240 - DNA, 1088 bp, Zea mays
tgcatgcctgcagcatacagcatattacaccataataatgttttactgatatctggataagtataacagaaaagaagtgtgattaccattttttttctcgaaagcgcaggggaactgcgccttaaaatatattaagaagaggaaaaaagtctaaaatagaccatggctacaacattaagctccttacggaggccagtacctcacataagtgaaagagtccaatgaatccagactcgaaaaactactaaaatggaaacaatagggttcagccatttgtcaaagaagctgccaaaaaagagagacccttggctccagctaattcccacagtcttctctcatcatcagcctgcacatatgtcaaagaagtgtgataaccatctcttctatttatttataaaattgatttgtgctgcacatatgtgcattataagtttataacaattgtattatcaattgttagagtggacacactaaccaatcaaacacaaaagcttaagctgttaggaaaaagtaggcaatctacttatacacttcaatactctcactcacgtgcaaccagagagaaaggtgcaaacatgtaaataaaggggcagagacacaaataaagcctctaccaggatttgaactcaagacctctggctttgatactatgttagagtgagatgcactaaccagttcaacccaaagctcaccatatcaaagtggacacactaatcagtcaaacccaatagcttaagctgttagaagaaggtaggcaatccacttatatatttcaacaccaatctccactaaatttttgtatttttactttcttgaacagcggatggtaagctctttgtttggggcagaaactcaggtggccagcttggccttggtaaaggtaacagtgtcatccccattctttacttccttaatgccgcctattcatgtcatatccataattgaatgttctggtatctatactctgtctgagactatcaacaacaacttattgacactgatgagtgtttgattccacaaaaaataataaaatctctgtaggtattagtacttgatcactgtttgaaactaccatacatgccttatgc

SEQ ID NO: 6241 - DNA, 743 bp, Zea mays
aggtaactaaagaatccaagtgcgagtcatgggcagtctttcgaccggctggtcctatagaaatgcaatcatgtagcagaggattgaaaaatatattcagaatgaaaatttgtagaagatagatgtctgggtacccaaagcaaagctgtaggaagagaaatattaggaaatacacaatcccattcgttttctcctctcctggacctaatgttggagatgacctaatggcagtgctgcggtcatcgccaacaccaattactcaaggtattatcaattaatcatataaatacatcccttactagtatatggacatatggttcttgcatatagatatacattccttactagtatatggtcctatggacatatggtttttgcatataaataaattctaagtcattttttgcacacaagatagatctgatagattatatcctatcacaattttgtttatatgattgcttgtttctaagatagtacatgtgtgaaaattttgaagaaagatagattaatgtgtgaactacaatgtggactgtatgaacagctcgtttttgttaggataatcattgcataatgtgtgaaaattttgaagaaagatagatcgagttatatattgaagggcatggtttaattcaaaccgttgtgaataaagttttacatgtgtcgagatgatctccacatcacttgatacttgacggaaatttacttaggcctcttttggaatgcgaatttttttttccatt

SEQ ID NO: 6242 - DNA, 1269 bp, Zea mays
agaggagggcgagctgcttggacgcaatccccacctgcgacaagatatgcgataagaaactgccatgtggggtgcataggtgcaaggtcaattgccatgagggagaatgcccaccttgtttggtgctcgttgagcagaagtgtcgttgtggctcatcaggtcagatggtggagtgtcacaagttctcaatggaagagttccgctgcaagaagccttgtggtctcaagaagaaatgtgggaggcatcggtgcagtgagatctgttgtccactgtctaggaaagttgcacaccttgaaggtggcaactgggatcctcatctctgccagataccatgtggcaagaagctccggtgtgggcagcatgcatgccagctactctgccacagtggtcattgcccaccctgcttggagactatattcactgatctcacgtgtgcctgtggcagaacttctctcccaccacctctgccttgtggaacaccaacaccatcttgtccacatcagtgctcagttccccagccttgtggacatcttgcctcacattcatgccattttggggactgttcgccttgtatcgtgccagtaatgagagaatgcattgggggacatgtgatgctgaggaatatcccttgcggatcgaaggatatcaggtgcacccaaccatgtgggaagaatcgccaatgtggaatccatgcttgcaacaggccttgccatcctcccccttgtgatcagacacctgcaaatggcgatgctagctcaagctctggtggcaaggcttcttgtggacaggtatgtggcgccgtgaggagagaatgcaagcatacatgcactgcctcatgccacccatcgtccccatgcccagatttgagatgtgaattttctgtgcctattacctgttcttgtggccgaatcactgcaactgttccctgtggtgctggtggatcctccatgggtgataatatgtttgaagtctccatcatacagaagctgccgatgcctcttcagtcagtggaatcaaatgggagggtacctcttgggcagaggaagctttcttgtgatgaggagtgtgcaaagatggagaaaaagagggttcttgctgaagcatttgacatcactccacccaatttggatgcattacattttggtgagaattcaagttcatcggatttggtttctgacttgaagaaacataaaccaaagtgggtgctggccatagaagacaggtgtaagttccttggacttggcaaggtcaaaggcagatcgaggagcg

SEQ ID NO: 6243 - DNA, 833 bp, Zea mays
ccctggagccgcccccagttgatcttcccatgtgctaatgctgagcagaagcaactgtgttgaggaatcgaaagcatgttcacgcttccagcttgttttgaagttttcccctgtaaatctatgtaattttcaatgacattcagcatattattagagaataaattatttctttttgtgtatgatcaattactgaaacaaccaatctgagatgtgcaacagcaaatttaaacactgttctttaagacaaattcaagactgatgaacgcaagcatgatgcacaagaaaattcagaaccattattcaatacctatgaaggacaatctttgatggagggattgcaactaatataacccattgctagcaaaaagtggatctgacaatgttattcctcactacttggttttatatcctcttcatactgagccgacagaggattcgttttgcatttggagccgagcctataatatttgtgttcaaccattgcatctctgttttgcgttaacttcacttgtaaaaatgcatacctgccatcctgggggaggctgcgttatttacccactgctgttattaattccattgttcagtaattcaataacacatcaatacatcatgcatagcatgatagattgatagatgacatacgataagctcttgtatactggactttaaaaagtatgaaggcaaaaacaattacctgtgtgcattaatacaagaagaaaaccttatttgggtatttgattaactaaaaactgtggaaataacaatcgttgactatgtaatcatttactaacatgtaaacccctctgttgggtgcacaggattcgtaaaataca

SEQ ID NO: 6244 - DNA, 829 bp, Zea mays
ttgcatgcctgcagtactatctccagaattagaactccgatgggaccctgatgctgagaaacctgtttcctgcaaagaaaagggggcacataattagcatggtcacataatactctgatagagcatgacatgtaaccaaaatatttcccttgctgatggtggaattgcagtccatacagaaaactatatgcaaatgcgaggagcttccaagtgttcccatgccaaaaaaatatatcttaactatctaaaaagcttttccttgtggtgataatgacagtaggttcaccagcttccacattgggagtatcttgtggatttaagcatacatgcaggtcatgtgtaagagagaaacctttgtgaaggatgagatcatttgtgtataattgtactctgtggtttacggtatgacttttgcggcatgctgattagtagtgaagtttacatgtgatttttagatttatgaataggtcatcgagtcggggggtagagcttgtcatagattttatgcaagatagtagaccccacaataactgaaaaattaaagacttctgcttgacaagtaaagacaaaggattttctatcagcttgcagaaaaatatccatcgccaggttctttcaatcccttccagggtctaacattgaaatatctacaaagttgaattcacagcatcggtaactaagttctatgctattattatgcaatcaagacatcatagacagtccaacaacaaatcaagatggaacgggaaatgtttgggacagagtaaattgttttaaacagtaacataccatgtttccagattcatcttgataagttccacccagatga

SEQ ID NO: 6245 - DNA, 733 bp, Zea mays
tatcttattccatgtgctacatgacatgtatcccctccattttcgtgtctcatggattggtttcattttttacaggtccccgccatttcagacaggctcttcctttccatagtctccgtagacaatggaaaaacaattgcaaagtccactaaagtagcttctcgtagtggaatatgccagtggcccgacaccatcttggaacccatatggttctccaaggaccaagtctccaaagaatttcaagagtgccagtacaggattattgtttccctggtatgtaccatgatgcatattttcctaccttacctgttcttggatgtctagttcctgcttcaatctcgatgcctattaccttaggctatttactctgtcttattcctgtcgcatggctatgcaatttttgggtcactaacaactgctctcatgtaatgttccagggatcggcaaaatctggcattcttggggagattcttctaaatctctctaattttctgaatttggccgatccaaccgctatctctttgccactgaagagatgcaactctggaacagttttgcaggtgcgtttcgctacacctccttgtttccaatggccacttgggcattgcttacatgatttggtagccaaaaatatgctggtattacattccaatcatagctgccaacagttatgtaggagcctatttcatgcttgtactgtttggtagcgagcctgatggggcacccctactgc

SEQ ID NO: 6246 - DNA, 822 bp, Zea mays
actatcagcaccaacatcggtcttactgggtggctgccagcctcaatagtgaatctctcgacgaccatgcaaggcctcatgttggctgacacagggatcgtaggaagcatccccttagaaattggcaatcttttcaacctccagttcttcagcgtgtcaaatacttccgtgtctggtgcggtcccagatagcattggcaagctggtaaacttggttgaattaaacctgtacaataccaatctttcagggcttataccttcatctattggaaatctttcagagttagctgcgcttgctgcattcaatagcaatctggagggaccaattcccaaaagcatagggaggctgaagaacctctatgcccttgatatgtcaagtaaccgcctaaacggttcaattcccatcgagattttccagctaccactcctttctagatacttaggcttatcacataattcattatcaggtaccctacccgctgaggttggtagcttgacaaaccttaacatcctggcgctatctggaaaccaactgtctggtgagatacctggtagcattggggactgcaccgtgttgcaggaacttgggctggatgacaacttatttgaaggagccatacctcaatctctgagcaatataaagggcctaactggactcaacttgtccatgaataagttgtctggcgtcattcctgaagccattggtagcatgcgcaaccttcaacagttgtatctggcacacaacaatatgtcatggacaatcccaattatattgcataacttgacattggcagaataagatctatacttgaacaaactgcaa

SEQ ID NO: 6247 - DNA, 769 bp, Zea mays
agttgtccactccacattccaccataggcgatctgctaatatggaggtacgaatctctgatagcattcatttcagtggctgcatcatgtatgagtgttctttccctaggctgtttctttgagcatgatattccaagagcaaatactgaagccaagcacttttcaattctatatcttgtggtgctgtcaaatgcacctgtgtgaatccacatcgttgtatcggctatctcccatattctctctggtagagcatcccctgaaaacctgtgtagatctaaagaaccactaaacatatcatctgttgggctccttcccgtaaacatctcaagcagtaatatcccaaggctataaacatcaccaatagttgacacagaagaaccttcaccatactctgtttgtgccaaaaaaagtatttgttattatgccatataatgtctataaattagtaataacaaagacatacacaacatattttcatttacctggggcaacataaccaatggagcctcttattccaattgtgctatttgaattctgtagggctttacttgcactttctggaagtattcttgatatgctaaagtctccgactcgggcactcatgtcttctgcaagaagaatgttgcttggcttcagatcacaatggacgattggtggctgacagtgattatgaaggtagtccagggcatcaatgatatcgacagcaatgtttagcctttgttccaggcttagactatttctcataggggggctggcagattttgaatgaa

SEQ ID NO: 6248 - DNA, 748 bp, Zea mays
caactgcacgatagcgcaaactggaactgagagctcagcagtcagtaatgcatcttgacgcggtcactgaacttgcagatgtgcacctcttctgttccctgcggcaaggctttccacgctcatcttggtcggccgtcatcagatcagaagccagcggcaacgcggtggcgtcgccaggcacggtcatcaagcgtagcaaggaggagctcatcaccttcttcagagacatacagacatccattgccgagtgctcgcgtaaagcttccaagaggacgaggaagcagccgcctgatccgttccaagaggtccgcaggagggaggagcagtcacacggtatgtccaagtcgaacgatgctcgctggagttgaattcttttcttaaatggacgtattgcagctcactagtcctcctgcaagcatgcatgccatttgtcggttgaagcacaagctgtctgttttccaactctagatcatatgttacatgtttttgttatcatgttgtggtcatgtgtggtgtgaactgatcatcacaatcacaaggcacaggtggaggagatagcggcaccgacgacgtttcagagggaccgaggaaagtgaagagtcttgaggacatgaacgtggctggattgagagagttggcgagggccaaaaggatgaggggttactccaagcttaagaagggcgagctcattgatcggttgagaggggctactacgtaataaactaccatgatgcagagcagcttcgca

SEQ ID NO: 6249 - DNA, 577 bp, Zea mays
agtccgccgctgggctcactattccacttttgagtcttgacttaacaccattaaatccaaactaacaaaaggatatataagcaactaaagataggttggtaaagcatcagcaacaactcataaacaaagttatattttaaaatatatgattctaacacacaaaaaaactgctctaacatgtgtccatttttaaaaaaaatattaaataattatatgttggagccataaccttgttttgtacactattcctaacattttatttcctaaataataataatctattttccaataacatgatatatgacttaattgttggagctgcaagtatttttatgaccctaaacacttcaaattagatcctattttaattttaggagtcaaatatatgacttattgttgtagatgctctaagttaaaaaacaatggggtaaaaaaattgtaagttgatccttttgggggtcaaagaaataaaaaaaattgttgagaaacctacaaggggttttatgggccaataccgaaaatgtccttgagggggtttagagcttatatatgtacccataccttttataatgaagtg

SEQ ID NO: 6250 - DNA, 833 bp, Zea mays
gtcgcccgccgccggaccccgcgcccgctcccgccggcggcgtccgcggcggacggttcttcttgtccaggagcagcgcggcgcagtgggacagcggcttccacagtttcagatgcatggccgcccgcccgcccgcctgcccgcgcagaaatccggaacctttcctacaacatccgattccccaccgccgccgatggccccctcgcgaattctcgggatcaaatcagcccgcgatcgaattcgacgcggacaagggtctctcctagggcttcgggggatcgacggagacggacgatcgggctgggtgccctcaccgctgcggaatctggatcaaggaacagagcagagagagaaggggacaggcggaggagtgaaaggaagaggaagcaaaggccgaaggggagagagagagaggacagacgaggaggaggaggaggaagcggaagggagttattggagcacaccaactcgtctgcacggaattaaaagcaggggggtcccaatccaagcatttaatggcgactccacaaaattgtttggctgtattttggattttgcttcatcggtagatagatttcgatctcatctacgggaaaataaaactaatgtacagatatcccagatttgcctttcgctcgaaaatgcaatctgtactgaatcaaacaatctttggagataaatgagctgtggcagatttgcattgctggtgaactcattaattactgcttgcactagagtccttaagacacctcctttgtcccgtggcggtgagccggtgacaacttttaaataaaataaatctcgccttcggaaatttataataactaaatcta

SEQ ID NO: 6251 - DNA, 718 bp, Zea mays
gctctgcagcacaataatgtaactggggtgaataatcagcaaagcagtgagcgcacatgtgtgtagtagtggtgaactggtggggcgtggagcactaattagactgcttgagtttggatcatacatatccaaatccagtaacaacacgtagtggcctttcttctgtccattcagtcatctttagcaaatcttccatagtatgtatgttctcaaaaatgccttccttaggtacctggtcgcacaagttgactgcttcagatataaacttcaatttgaaataacaagactagtacctatgaatcctcctggataccaacataccgcaagggacaaacgacaatgtccaaactcaagagcatcatgaacgaccactaaatcctcattgccctgacacaaaaaatttaagcacatcggtcagataaaggcttcttcaaagcagaatagagcagacccagtgtcagaggctctggggaagggataaaccgatgcaagcctttccccacgaatgtggagaggctgcttcgaacctgcgacctggtgacttagtgagaaagctagcaccactgcaccaggcctaaaatttcacataaaagaatattgcggactcgattggcagatattcatgttttataatatataggtccagaaccaaatgtgcgcacaaaccaggaaggcattagtctaagcacatgataaaccagaaataacaaaatgcata

SEQ ID NO: 6252 - DNA, 858 bp, Zea mays
atcttgcatgcctgcaggtcctccctctgcatctcgatctccttctccttgccgacgacgctctccgggatgtcgtccaccgagacgtagtcgacctgcggacacgctaccacctgcatcgcgaggtcgttcaccagctccctgaacttgtcgttgcgggccacgaagtcggtctcggagttgacctcgatcatgcacccgatgcggctgtcgtggatgtaggagccgaccagtccttcggcggctagccgagaggatttcttgtctgcggatgagaggcccttcttcctcaggaactcctgagccttctgaaggtcgccgtcagactcggccagagctttcttgcagtccatcatgccagcgccggtttcgtctcggagttgcttcaccaacgaggctgaaactgcaacagccggcttcctggaaacacgtgtgccaaatgtgagtggtgttgtcactaagaggagtataacagtatagttcggttattagaaatgcttaaacacgtaaacacagcatgaggagggagattacttctcggcggattctgttgtttcagcaggcttgtcctccttgggaggagcagatggtggcggcttcgctgctgtctgggctgcaacttcagcagcaaaatcctggcttttcttctccagcccttcacctaggttgtaccgggcaaatctcctgaccttcatattctctccagttgtagctatagtttgcttcagccactcacttattgtgaccttgacgttcttgatgaatggctgttcgaacaacgcgaattcttcaagcctcttctttacacgcccttagacaatctttagcccgatctgctcaggcttgacaaaaagtcct

SEQ ID NO: 6253 - DNA, 719 bp, Zea mays
tgctattgccactgtcagccggccaagtcccaggcacaactcccaagtcccaacccaatcatggcgtcgtccgtccaccaactggaggagcacgacgaggcgggagaggagcacgatcgccatggcatccagctgatcacctctccgctgcgtaatgctcccctttcccagctctccgtttcctcgttgcggtggcaagtggaccgcactaccgctccgtttgctttattcccgttccttgtcatgcagtgcaaccgtcgtcgcggcgcccgcatggctcggcggaggaaaaggaggctgaagcgggggacgacaacggctctccgatcgagcaggtggcgctgacggtgccggcgtgggacgacccggcgacgccggcgctgacgttccggacgtgggtgctgggcacggcgtcctgcgccgcgctctccttcctcaacgccttcttcgggtaccgcaaggagccgctcactgtcaccgccgtgtcggcgcaggtcgccgtgctccccgtcggccgcctcatggccgcggcgctgccggagcgcgccttcttccgcggccgcccgtgcgagttcaccctcaacccggggcccttcagcgtgaaggagcatgtcctcatcaccatcttcgccaacgccggcgccggcaccgtgttcgccaagaatcttgtgacctctgtccgcgtcttctacggccagcacatgtctttctcatcggcc

SEQ ID NO: 6254 - DNA, 829 bp, Zea mays
cttgcatgcctgcagaatgtgttcagatatcacttggccattgttctttgctggaagctcgtggtctgtctgtttcatctgtcctcctcaaacaattcaagcccagtctagagcaagcgttagatgctaacttgaggagaattgaggagagtactgctgcactagcagcagctgataactggatactcacatatcccccaactggtattcgtccattaactagattgtctgctgctaatttggcacttcagcctaagctctctagcagcggacaccgtttcaattcaatggttcaggtaatggttacctcttttggttatattgcaagaatgaatctatctttttgttgtgtccagacagatgataataatcttttttaaaaccttgtacccacaaagctgtagtatattaatggcatcgcgtagcaacgtgtctatgacctaatatttcttttgccactacatcaggcgtctgtctcaactccatctctgtttcctgttcttgcattgtctgttgaactcatattctcatcaaagatgccagattcagcaaatgttgcattaatttctcagaatagtgtgttgaattgatacaataggtgtgccatcactagaatgacatgatgcccgcagagctgtcttgagtcactagctgaaccacgaaacttttgcttagactcagatttcttgtccttatttttgcattcaagaaatatttggctatacgctacttccattgtgctcagctctttggaagtgatgattagcttgtatattggttctatatttaaaagaatcgatcatcttggctctatattaagcctgtcttg

SEQ ID NO: 6255 - DNA, 780 bp, Zea mays
ttcgcacttcgtggcctcgtccctcactatcaaccaggtttcctcaagtttccgtttgtacagccgaactttcaggctcctgtgccggcattcttctgctagcgtggttacctgcttagacaagtgcaagatcaccatctgtctcagcaaattaatgatttgaaacacagaatgaaaaaaaaaaacaagatagttcctggaaggtccctagaaaaacaataagttatggaaattacctgtgcttgaagctgtttcacctcctccagcagtatcttttctatcaaatcttgttctttcctcctatcactagtagtttgtgttaaaggggcagcagtcttttgtgagactggatcagccattctcctcataggataatcatcaattgtctgcttctttggtgtcaaacgatgtgggatgttgtctcttgcgcatttgaatcgatcggggcattctacctgtccccacctttctttttgcatttgattcggagtggcgggttcctgatttctctggccgggactttgtgcggaggaacccattttctccatgatgaaatttgcttccttcagcatccgtgataactttggtgtgtatgtccttgtttctgctaaataagacggttctttttggatctttgatccacagctcattttaccgtgctcggctgttttattcagctcgttgaaacaggcatcacagacgcggcatcttttgctcttgtctggtgcaagggcagccctttgaaccttgttgctgctgcaagaattgcagaccatggat

SEQ ID NO: 6256 - DNA, 796 bp, Zea mays
atcttgcatgcctgcagatattgccaaagtttcagggagacaagcattgagtcaaactggtcctgaaactcctaaggaaagttttcagcctgctttcaaacgatcctttgggaggtctgattcaacagccagtgtagattctcctaaggagcggattggtgagtcaattggctccttgtaggaccttagtttctgtatctgtacgcttcatgagtgactatctgttaacctttttttttatttgtgttgtagtaccaccttccgagaaacctcccacaacttctttgagaattgaccgatttgtacgcccatttaccctgaaagctgtgcaggagtttcttggtaaaactggatctgtacaagacttctggatggaccatatcaagactcattgctatgttacagtatgttttctttgctaaaccaagatttttgctatcttaactttgttgtttatcacatcatcttgaaatgaaaaaccaaagctgccatttcacctcattcatggtgcaaattcaggctgcatgggatgaacaacagtaagtaataaaccatgctaactgattacaccgccaactgattgcatctactattgtttgtttcgcgtacgatggaattggataatgcgaaatagatacaggctcgggcattcagcagagtggttacgcccgatcgtgtcgggtgacaagcgcttgcgcttgcatcctgtaaacacagcatgaaaaataacctgtcttctagttgctaccccctggaaccaaccaaagaaagtaatcaatgattcactttccgttgt

SEQ ID NO: 6257 - DNA, 780 bp, Zea mays
acctgactgcctggcgtggcgtggcgtgcagatgcagtcgaacggcgtaacaggttagtcaacaagattatttttctgtcaaccagtgtaaagtgtaaaccagcaagcacaaacttgcccatgtcgagattcacggtcagcaaccaaggcgaagactaaaataagagacggtgtaacagtattctccatagactcaaaactagaaccagtatctttcagttttacagtacctggcagcataaattaaactaagtacctcaacacttcatgtagatcaaataacttcagcacacactctactcggagacccaatcaaaactaacaatctcattaggaaatacaagctgctgctcctacactagtgtcctttttccacagaacagccctacaaggctacaactctttcgccacagcagtagcacgtgtcagctgctgtgaccaccgcacgccatgttcctgaaagagggcagattcgtatccattaattatttggacaaaaaaggactagtaaagcacatttcaacagaacttaagcataccgcaacaaactccaaggctagccgaaaatggaagctaacacctcctatcccttttttcctttgccctgtgcggcgagcttggctgccacctcctcttctgataaaggaagataatagatcctcggagaggactgtgtcttcttaaagagatcgtcaagtgtcacgacaggaggctccggcttttttggaatgggtggaagcctctctctttctaaagcgtcaggtcagccctagggggctt

SEQ ID NO: 6258 - DNA, 721 bp, Zea mays
gaattacatcctattattaagccttggccgttcagaggatggggattagactttattggaaaaattcatccttcatcatcaaaggggcatcggtttgtgttagttgccactgactacttcaccaaatggactgaagccgttgctctaaagaacatgacacacaaggaggtaattgagtttataactgagcatattattcatagattcggcattccccagaccttaactacagatcaaggtacttcttttatgtcaaaggaggtacgtgaatttgctgaattatacaaaattaagctgcttaattcatctccatattatgctcaggccaatggtcaggccgagtctagcaataggacattgattaatttgataaaaaagaaaatatctgataatcctaaacattggcataagattttgtctgaagctttatgggctcatagaatatctaaacatagggctactaaagtatctccttttgagcttgtctatgggcaggaagcagtgttgcctgtggaaataagtttgaatgctgtcaggttcgccagacaaaatgatctaactgctactgattattatgattcaatgattgataatattgatgaggtgactgacaaaaggatgatagctttgggagcaatagaaaaagacaaaatcatggtagccagagcctacaacaaggaagtcaaagcaaaatcatttcaagtaggggacctggtgtgga

SEQ ID NO: 6259 - DNA, 798 bp, Zea mays
tgaacgtcctcctggactggagggagtccctgccccaccccgacgagcgcgtggagtacgagctctggacgaacagcaacgacgagtgcggcgccaagtgcgacatgcagatgagcttcgtgaggagcttcaggggcatcgcgcaggccctcgagaagagggggtacacccagttcaccccgcactacatcacgtggtactgccccgaagccttcgtcctcagcaagcagtgcaggtcgcagtgcatcaaccacgggaggtactgcgcgccggacccggagcaggatttcagcaccggttacgacggcagggatgtcgtgctccagaacctggtccagatctgcgtgttcagggtcgccaatgggactcgcaggccgtggatgtggtgggactacgtgcacgacttcgctgtgaggtgcccgatgaaggagaagaagtacacgcgtgagtgtgcgaatggtgttatcaattcacttggtaggtactattgaaaagtttcatccacgcgacttgattatatacggggaaaaaaattgaagatatctttgctgaaaatgtactcttctgctgtttctacaggactggacatcgagaaaatcaacaagtgtgttggagatccagaagctgataaagaaaatccagtccttaaggcagagcaggacgctcaggtaagataaaacattaattataaactgtcgtcatgggttcctttcatgtgtttttcagtttgctctttggctggatgatctttatgcttcctatataatatatccttaattagattgggcatggttctcc

SEQ ID NO: 6260 - DNA, 856 bp, Zea mays
cttgcatgcctgcagcatcaaggttagacaaacaactcactgatgcaagtgtcatgctctctgatgtacagcgagttgccgccgccgcagctgcactcgtagcttccccacgtgttctcgcaagcgcagtccttgcactggcagaaaagcttctccttgcactcatccacatctgcataagccaatcagcaggacattgcattgcattgcatcaattatgttaaggtgtagtggcaaattagcgtataattatgccaaaagctttaacaccggtaccttcgcagctgttggctccgtcgcccttgaaacctgctgggcacttgcagcctttagcttcttggttctgtacagtttctagagtaagtttgttgctccaaacagcagccacaggcgaaactgaaaactagaaaagaggttatcttactgagcaggcagacacactcttcccgttcctagtctcattccagcagcccccattgttgatctggcacctaccaaggccagaagctgccaaaggcaaacccccattagcatgattggtgaaaatccagattcaagctcttagaccttctgacaaaaaaaaaagatggtacaggtgaaagtattaccttcacagtggttgtacccatcaccgataaacttcacaccattcacaatagggcattcgcagacacgaccacggaaggtatcctacaatataaatctcagaaatatggtactcagtcatgaacaatcatgaataaagtcacccccctgccccccctgcccgattaaaagaaaagaaaaattgcccctgcacgcagaaccatgggagccttgtctaccagcaccaccatggttttcaacattaattggt

SEQ ID NO: 6261 - DNA, 922 bp, Zea mays
ttgcatgcctgcaggatggtgtacccgaagcaattgagaaactgagggaagcagggattaaggtttgggtgctaacaggtgacaagcaagaaactgccatctccatcggctattcctgcaagcttttgacaagggacatgacacagattgtaattaacagtcgctcaagagaatcatgcaggaagagtctagaagatgcaatcgccatggttaacaaataccaatcgttctcgacagacccccaacttagggtgccccttgctttgattattgatggtaacagccttgtctacattttcgatacggattgggaggagaaggtatactatcatactaaaatcttaccaagtgagtaaattctattgtcagcaactcatgaaattttcaatttttcagctttttgaaatcgctatagcctgcgatgtcgtcttatgctgtcgggtagctccccttcagaaggctggtattgttgatctcattaagaagcgaacaagtgacatgactttagctattggagatggtacgctttctttgattatattctactcccttcactccaaattctaagtcactctaactttcttagagtgttacgtcatcttaaatttgatcaaaattatagaaaataatctacaaaaatatagctgataaaaactaatgatatttatttagtaccatgaatgctattattttattacataaatttggtcaaacctgggaaagtctgactatctaaaaaaggtggaattattccaacttaaaaatgtatgacaaaaggaagtagcttcaaaacttcattatatggtttgggctttcaccgagtcaaaaaatatggaaaaaccttaccacgcttttttccaggggcaaaaatggaggttatccccttgtatttcaaaatggggcttgacgattggccattctg

SEQ ID NO: 6262 - DNA, 796 bp, Zea mays
tccagagttgattcgtggttgggcgaagatggcaacgcgagcgcgagggcggcacggcagcaaccccatgcgtccaagcctttgtgttttgtttatatctattttatccacgtgcccatctttgcacgaaagctgctgctctctgctgggagcctgggagggaagggaggtttaccagctggttgatttggtgacaacgagattacaagaggattagaggattaaagggtagtttatttctttttaatccctcgatcctctcgtaatctctggtcactaaatttcgtccttagacttatccggcgtcccggtctcggtctaccacctccgttgggacgtacggacacggagagcctcctcctgctccgaaagatttcccggtcacggcaccgaagcaggctcggtagttgatcaggtgtccactgctttcttttctttctttttttccttctaaaagatggggcggcaagcatctagttttgtccgccagatattttaattctcgaatacagatttcatccggacttgaattattcccgccattcagcgaaagcagaggtctagtcagagttccatcttctctggtgttctgccgttcagtttgaacaacgtagccagtttattcctgtgtgctgtctccttcactctgacagtgacaacaaaatacatactgctagctagtccagttaacaacgttctgtccaaaggggctgggccttgaggaaacacccgtcgtgggtggccttaattgaacccgattttcggtggaagacccgtccgaccactggttcgtttc

SEQ ID NO: 6263 - DNA, 771 bp, Zea mays
tatgatgccgtgtgttactgtttaatttgggcttgcaaatttttaaacaagggacaatcacaccttgttttttttctaactaaatattccaataataaatataatgatgtacaatggcccattgggatctctctcggtctttcccacatattctctttactactctgtattcttgtttgtcgtgtttccaatttctcaattttttcgtcaactttgcatattttgttagtattgtgaattctgaattctgatactgtattgtatatcaacattcaccagataatggttgccaaatacttggaaaatggtatgttatttagcttagaagggcaagcctggtgcaatggtagagctgtctcattgaatcaccatgtcgcggtttgaagcagcctctcctcatttgtgggggaaggcttgcttctgtttattccttcctcagaccccactcatatgggagcctccggcactgggtctaccccttttttatttagcctgctatcttgcacctttgcatttccatactaatgctaaaattgcctagtgacttcctcctttttatttagcctgctatcttgcacatttgcattttcatactaatgctaaaaatgcctagtgactgccttcctttgctccactcaagcttgctcgtagggttcgagaaatgcgtgaagcaaaggtggctcctaacattcaagaacttgatcagaaagcagcagcagcagctgctgctgctcgaaaggccctcacgtctgtacagactttaccaaaaga

SEQ ID NO: 6264 - DNA, 880 bp, Zea mays
agcacgcacgcctgggatgccccccctccgtcaccggccttgggaccctttccggagctccccctgcggccctcgctgttgcgcagcacgccgccgcctcctacgactacgtggccccttgcagtggaccttatgcggacatgaccccttatggcacgccgctactcctcaccccctcaccgggcagctccgtcgtgtcttcctcgttgcaccgcgcaaccctccctctcgtcggtgtggtgacctcatgcgccgctacgcagccacattccctgctcggcacagccccctcgggatggggccctttcacctcgcacccgcccgcgatggggtcctttcccctcgccagagcgtcgcttgtgttggcccctagtggcccggcctccccacctgcgagccttgttgcacccacggtcacggctctgcatacggtacctcctcccagcaccgagaggtctgcctttgccttggccgtcggtgccacctctctttgatgtggcaggccaagacttcgtctatttggtgcctttcttcatcagagcaatggatgggggcgacagagcttttatagaggttagtgtgcagacctaaaacatcaccaaacaagtttaagatggattttacagccagcaagtcactccgggaaggcctcagaaagatcgctgcatcatcctcaaaaggaaatccgatgtatggcgtgctgaacagccagaggttgcagcagttggttactagtggcacaattcaccaatgcattctttttgtaagcgagaatgacatagaattgatgaactggattgagcctcagaggcggtaagcaatgtggtactatttctatttactcgaggatcatcctaatacctgtagtcgcatggcccat

SEQ ID NO: 6265 - DNA, 723 bp, Zea mays
acgccgggaacgccaccgtgggttccgacgccaaacccaccagtaacagtaaccgaacaagagaagatggaccccaagtagaaaccgcgatgcggatgcagcagtggcaaaaggcagacggagccagtcgcgcttcccacgacgccgccgtcgtcgtcggtgatggcggtcagcgagcggcgaacactacggacatcgccaccggcaactccacatacacagggacttcgagcagagaagaaacagacaaagacagcgccgttggctacgtccagaacctgccacggcgagtggctttgccatcacgaccggagcggaaggcggaaagacacaggcgcaggagagccgtgaggcacaggcacccgaggcgacggaaggagaccctggtctcggcgcaagatctcgctgccgagcgcagcgacgacgagatggctggcgtcaaaaccagcttggccgtcgggccagggaacgacatggccgcaggtgcgaacgccagcatgggcgctgtcggggccggcaacaaccgtgtcgtgtggacgtccggcgtgcaagacctggtttccttcgccaagtgcgacgtgttcagcggccggtgggtgagggacgagagctacgggttctacccgcccaagtcgtgcaaactcatcgacgacgacttcaactgccacaagaacggccggtcggacagtgactttcctcaggtggcggtggcagcctcacggc

SEQ ID NO: 6266 - DNA, 783 bp, Zea mays
cacactcatggctgccgttttcttgtactggatgaagtcgaccagcttctgtcttttaattaccgtgaagatatgcatagaattttggagcatgttggaaggagacctggaggcacatctagggatattcttggcccacttgcgagacgatctgagcgtcagactatcctggtttctgcaacaataccattttcagttatacgagcagcaaggagttggggtcatgatccagttctcattagagctaaaagtgtagttccacttgattcaatcactgtgccaagacctgcgttatctcaaagtgacgctaaccccagttcgtcatcgcagtcagtgaaccaagctgctgttggcagcttgccgccatctttggaacactactattgtacggccaaggcgcagcacaaggttgacacattacggaggtgcatccatgctctggaagcacagacagtgattgcatttatgaacaacaccaagccactgaaggatgttgtgtttaagttggaggcccgtggtatcaaagccactgagctacatggagaccttggaaagcttgcaaggtcgacagttttgaaaaagttcaaggatggtgaattcagagttctcgttacaaatgagctgtctgccagaggactggacgtgccagaatgtgaccttgtggttaatctggaccttccaactgactccacacattatgctcacagagctggaagaactggacgtcttgggcggaaagggatcgtggtcacaatatgcgaagaaagcgagggatttgttgtt

SEQ ID NO: 6267 - DNA, 738 bp, Zea mays
acctccggcgccatgtagcccagcgtgcccgtctgccccgtcacctcgcagctctgcgcctccacgcgcgccacgccgaagtcggcgatcttcagcgtccgcttacggtccagcagcatgttctccgccttcacgtcgcggtgcatgatcttcttcgagtgcaggtagttcagcctgcaattgcatgcatatgcatgatcccgtcgcgaccccgcgcgcgccatgccgccatcagcgaccatatatatactagcgcgtgcagcgctactacatacatgatacatcaactcattcatgacgtactcactcaccctctggcgagatctagcgcgagccggacgaccttcctgtaggaaagcttcttgtcccggtggttgtacagcagcgtcttcagcgtaccgccgtgctggaactcgaccacgacgacgcagcgctcgttcggcgcagtgcgaccgccgcaagaggaggaggaggaggaggtcgacgtcgaccctgcctgcttcttggggatcttcagctgggacgtccccatcgacgcgcccacgaactgcatgcgcgcatgccggcgtcaagtttctgggattcgtcagatgtgagtgaactcaaactctcgacgatgatggccgtgaatgaattttgcttacgtaaccttagtgacgttggggtggtcaagcttctgccagacggcgacctccttctcgaaggcctcgcggtgcttcgccgccgtgtcctgcccat

SEQ ID NO: 6268 - DNA, 809 bp, Zea mays
gaggtcccaaaccttgaggatgtcagacaaaacattaacagtgatagctcctctaatgtcatgtacccagttccttgaattgagggcatcatggacattcctcattttagctctagaagagaccagcttgaccaaatgaggggccagctgacttagactctggccatcgatccatttatctgtccaaaacaaggtgtttttaccgttgcccaccaccgaagagaccgctgctgagaagaaggccttaaccgtaggatgatcatttattttaaaggatgcccaaggcctgccagtatcagtttttttttcagccagagccaacgtaatctaagagcccaactcatcaaatacaggtttaagatacccaatcctccaaattcttttggtctagtaaccttgttccaagctaccaagcaatgtcctcccatagcttctttcctccctctccacaggaaatttcttctgattttgtcaattgctttgaaaacccaagaaggaaggtccatggccatcattaagtaaatagtcattgaagacaagacagtctggacaataatcaatcttccagctctagtcaacagatcggctttccagcagggaaggcgatgcgcaattttatcaatgaatggttgtaggtgccgtttgccaagcttctttaaggatagaggcacccccaaatatttgcaggggaaattgtcaacagcgcatggcagcagattacgaatggtatcaaggtggtcaacagcacagtggatggggaaaacgctgctctttgccatatttgtttgagcccaattcccttacaaaaa

SEQ ID NO: 6269 - DNA, 854 bp, Zea mays
cctacgtcgacctgcagcagcagagttctgggctgatccttgtgcttgtgcttgcgttgcaggagctaacctcgtcgcaggcggagttgctggagaggatccagaagctgaaacatgtgcgtatggatttcccagcacttggttcgatttgaggatttagttgtttccctgatcagatgctgatgagatgtgaatggctgacctctgcttcaggaggtgcagaactggcgctccaatgtagagacgcaggtcaagacatgccagaatgtgagttctctgctctgccctttttccctcaccttggaaattcaaggctgctgctgcttgtagtaacgaacaccccataccaccggtgaattgaattgtgttgcttacaggaactccaggatctcaagaaaggacttgactctgaagtggaacagctgaaatcggtgcgccctcccattctgtcgacttctattcctttttacctttggtctggtctctagcaggagcagcacaccatcctgtcattttgctcgtaggaaatgaaggcggttaggtctgcggtacaggaagagaaaggcaatctacctgcacaaaataccgactttagagacggttagttttgtgtggaaaaaaaaaagatctatgtgattacgctctactgagccatgctgtcgtgcaagaaactgcaacgattttcttgttttgtagaacaataaaaatgcaggacaagcttggcagacaccaggccaagcacagtattgaagagcaaacagcaacacagccgtgaattggtgcttccttgcagaggtgaagggctgttctgctggatattcagatcctttcaatggatcaaaaagggggaaagc

SEQ ID NO: 6270 - DNA, 791 bp, Zea mays
atttaatgtttcccaaaccatgtaaggatcaattttaaaagtcctttttaacttatatatttctcggtcatttaactaaggtaaagtgtaatatttatttttattatcaatactagatatagacaatatattctcatagatattaactttatttattatgaatattgtttttgagaaggtccaccataatgatttattagaccctcgtgtatcgctcaactattgcattgccgataaagtctgaatcatgattatgtgccggtgtatgtatgcattggactagtgttaataatgtggcggacggaagtggtcagccacgtaggcaaaatggcaaaagtgtagtatcttttaaactataatggcaaaactgttaagaaaaccgtaaacatgaattttggagagatagttcattatccccgtgactgtccttcccgcggctcacgccgttgaaaccagcctcatccagtcatccttcccgccttctccgtctgaaacccacctgctagacaagcagcctagccctgtgccatgactttttcgtctgtgccagacaagagacaagcagcctagccctgtgctatgccgacgctgtcaccgacgacacggcacgacctttgcctttcgcatctcccgaggccacgccgttttcaccgtcaagactcaagaccgtccgtgactggcccaacacccaccgcaagtttacgcccgcgcactcggcatgacggcactgcaactcgagagctggcccgtgccccgtgccgtagcagtggccaccagtcaagcaagcggtc

SEQ ID NO: 6271 - DNA, 781 bp, Zea mays
aacagagttctgcgcttgcactgccacaaggttttggctggttatactcagtgccatgctgagctgcttgttctggtccttcagctgatttacctgtttcagtccgcaataatacaccgctcagatatatgaattcaatcctagcttgtttctgctatgtttagacaattttagtgaaaaagaaataattaacgatcagagcagatactgatggtagacttatttatttattagcactgttcagtgaattagctaggaagaaattggtggtttgtgggagcaccgttattgcgcttgtttgggtagatttttcaagttggactttgttgtcatatattttgctttttcacctgcatatgagtgcaagccttcatgaataaagaagtgaactaagaggaaagactgaactgaacaaactaaatttgatttaaacttgcatcatgaattataatagagttacgggtggttgatttttagggactaatttttcgtccatccattttagtcatttttagtccataaattatcaaacaaagagattaagatagagataatcctttttttagtctatgtgtttgacaatttagaagctaaaaaggactaaaaattatttccttaaaaaccaaacatcgccttattatatgataggacataaataacacacatatatacctgtgaggtgaggtcgtcaaggtgttcttgcttccgttgcctagacctccgagctgactcccgattcgactccttcctccgctttctcctcctctccatctgggcctga

SEQ ID NO: 6272 - DNA, 740 bp, Zea mays
agaaaaaattagtaatttattgtaaataaaaactagttcatacatttagcgtatcaatgggctcacataatcaatgttcggacaacagaactgcttgtcatagtcttcgtcgatgacagcacggtctccacaatcgcatcgaggcggtgagtccatccgtctttctgttgctacctccttctccgcatccgtcattggtggaggattcgggggaggaggtacccaacgcttaaaacgctcatgactggtccttccactcaaccaattaacgaaaagaagatatcgagggtcaaatttatcaggaccatcgatccactggaaaaagaaacacctctgatgtccctaaaataatggaaaggaagcactattacatatctacaaaataatgaatgcgaacaaagttaagtgacaagtcataagctacgtacgtccaaagtgccacaaaggtagtagcagcgagcagccgtgtctggatgttgtgattgatgtacccaagccagtctgccacagtcacagttaggcacgaggagttcaggaggaacaggagcatccttactagatacgtccggatataactcccgaggacgacctctcttttgccacaatgcctctcggtacatgtctttcatctaataaacgattataattatcacttgtacctaatatgctttataataagtttacacaaactaataatcgaaatgataatataataggtttatacaaactattaaactata

SEQ ID NO: 6273 - DNA, 924 bp, Zea mays
agaagccatttatgcaatctccacagcaatttcagcagctccagtttctgaccccacagcagcagcagcagcttttgctgcacgctcagcaaaatctgtcgtcctcgatgtcaagcgatgttgataccaggagattaaggatgcttcttaacaacaggaatgtggtccttggacaggatgggcagacaaatagcggcggtgatgttatcccaaatattggttcgccagggcaaagtggtggatcgcgtaatgatatagatatactaataaaggtatccctacagatctctacctctaagtcactcatttttcaaagttcatacaagatatattattttctttgtgaagtaatcatatctagtttgttaaaggtcatatcaaataccatgccattagcttagtatacagagttgcatgccccattttggtgagatgatgagtagggtggatggaggaacatcgagacaaagtcgtacttctgccttaatctgattttattgttatatattcaccatttgtttactttcctcaagactctcttaatctttggaactttgtgatagtttctaaatttaggcatagtttgtgcctgtacttgtttccataattgtattctagctacttctgtcatggtgctcactgcttacctaattgaataatgagttaaatgcatcagtggcccttgaagttgtcaagagatgccacttaggtccacgaactttgaaaatatatttatgggttcctaattaacttgttaagtggtgcactgcacatccctaaactcgcaggtccatttctggacatcatccataacgaccattcctaaactcggtaaagggcactggccattccataatgacaaggtttggggcccactcgggccatttagcttcttggaatgaataaacccgggctttaaacttt

SEQ ID NO: 6274 - DNA, 917 bp, Zea mays
ttgaggttcgaagaacattctattgtgtatagttgcaagtatctcaactctgcagataaaagatatggagattctggtcaaaataaaagggaaaaggatactaacggccctgttattggaaaagagatttgatttgctttgtgagcacattcctaccacatggagcttcaactacaaaactccgattctgggtgcatggtttaggaacctcaaagttcagctacacaacatacgaaaatggaagatgacgatttctgttagctctggtagcaaaaaactatccattcataccattatttaatatgactaaatcaagggaagaatgcaaatcataatacaacagcattgtgagagattgcacctttggcatcttctttatccagcacagtaacatcgtgactgaagcaagtttaaccagaagcctccccaaagagaggggatggcacctccagaaagcagagaacagagacatcaaaatgttacagcatcagctaagcagttttccaggtcatgcctagaggaattaatggtggagaatatacttgattagtcatggtttgaaaatacatgtttcgaaaccataactaaaaaatgcagagttagtagtaccttacataactctcaaacagaaataatctgaggctagcaccaaaaattgttatagagccaaatcatcgagcacgtggtgtgcatcatccatgagtgagacattcttgagtagatggaattggagagagataaccaccatggtgtacaatgttcggccttagcagtgactttgctagggcgtagcctatgcactcagactcgccccatgctgagacttgctgtcttcgtcgtcgtccccattggaggcgcttgcccgggtgcgaccacgccgtgacgagagaggagagcaaagccagcccgaagcaaca

SEQ ID NO: 6275 - DNA, 799 bp, Zea mays
ttctcaaatgcagcaaggttgacgctgagggcgttagtaccagagagtctccaattggaattcatagtcccagaatgtgaccggctatcaatgtatatgtcacgggaggtacttgcctcttcattgatctgcttccgcttcttgcactcaacaactatgatgacaattccaactatacagaacagcgagaacaagagtcccatagcaacactacccgcgagtgaagcctgggtccggtgggatcggtggtcacctgaagaacttgagccagcattgtgcccacatggcaacagtgggaagccacaaagaccagagttattctcatatgaaatcttcgggaatgtgaacagcgaaccgagctctggaattgaaccattcagctgattatttgaaaggttgatctccgacaaggacaacgtcgagaaagagttgggaataggcccttgtaactggttgtgtgacaggtcgagtacagcaagcttcttggcaccagctagttctggtgggatgacgccagacagcaagttgtgcccaagattcatgatcatgaggtagtacatgttcccaagctcctttgggatctctgagtcaagctgattaaatgacaaatccagaaatatcatggagccattcttattgaaggtatactctgtgctccccatgtacacccgagtgaagttgcacagcttcttgctcggcatccgactgagctcttcaggccgaatgctggtgaaactctagcaagctccccttgccatggcactcgctgcttaactcgtcattgcgaagaacacatatg

SEQ ID NO: 6276 - DNA, 772 bp, Zea mays
cctctccgagcaccgcgccgtctccgccttcgctcaccgcggccgcattcaggtctaggccaaaacccccggccgtcaaacgtcaatcttttacttggtccaacgctttcattttcttcttctccttccatcgtctccgaaaccgaacattttcttcttgcttctgaacgatatcgatgcaaagaacgcctttttattgtggagaattagctgagattattgtcttgtagagcatttcatggaattgagcgctattgtttttccagtcttttctacgaggtcgatccttgcgtagcggaaggtctatgaatgatgagaggccgatctcaggacagcttaggcagagtcatcctgtctctacagtgaggtaacagacagtatgatgtcctgatcttggatactattatttttgccatttgattgctgacaacatattgttcttgcctagggaagaagttcgctctggagcagaaagaagcatcactagtagccatcagtcagctttggtggtggcattgtctactccaaccaatcctaccgataatgagtatgacgacgccagtgcaacacctcagcagttcgcaatcagtgaggatgagaacgcaaccgttgggtatgaaatcctgacacaagaatccgtgcaacaagatgaaagttcacgtaccgaagacaacgtggctgatagatctcacgactttgctcaagaacagacaggtcgatattcagggcccttctcggaacaagacagtcaccatttttctagtagctaggc

SEQ ID NO: 6277 - DNA, 791 bp, Zea mays
gaatctagtgaagaggaagcggttaccttctcacagctggtgggatcatcatcgtatttcctttgtttttgtttcttctgaagttctgatccattcctctgccttgccaatataaatgattcaagatataatacacatgcatttcattcacactaggctaatttctcgctatctgttcctgttctttatcattatagttggctgtagatatatgatacatctgtatttcatttacacttggcatcatatattgtttcgtctgcatttctattgtgttcacgtggtctataaatcggtttcttaattttcttgctcatttgcagaacctcatcgatctggcaggttcagagagttcaagggctgaaactacaggagtacgccggaaggaaggatcttatatcaataaaagcttgctaactcttggaacggtgggcctcattcgctaatcactctcagattatacatccctgtaatatcaccattaatgcactatggtagatgctgtgttcatgcaatcatgcttttgagattatgtgttgctgcctatgcattatttgtgcatacaagagcttaattgttttcatttttatatttcatatttgaaccataaatgtgatcaatagaaatcttgaattggatagatatatgtaactatccaaaagtcctgaaacacaggtcacaccaatatatgcagcatttctttttccactgaccaggtacatttataagcattgagacaacaattgggacttgtgagaaaagatttcataagtatttctacttcatgcgat

SEQ ID NO: 6278 - DNA, 750 bp, Zea mays
agaatatcatcaatttgttagggcaaagtgaagccagaaaaaggttaccttcctccatagagaacaaacccgagggctgcaaatagtgatacacctgaaaaacatagcacactatcagctgaaaaggtcaagctgaaacaagtcaatcatagctttaatgtggtgtggtcttcaagtcattccctgctaataaagcaataacaggtaccacaaacaatgtttcacaacggcggtttctaaaatttaatttgacaaaatttctaccaataaaaatttccatgagtcctcaatatatagttctactacataagaagaaaattaatcacacttcatcaatgccaagatgcacatgcccatgattttccgcagtcaaagtgatatagggatagattgatggagaaggaaaaaattaaacatggattacctgcaaagaacatctttgacaagatgaccataattcgaactggtttccaccacaaaaccaaccataggattatctgaaattcattggtgtcaaatgagtccagaaaccagaatgttcctattttacgtgtatcaaataaaaatgcattcacaacaagcccagtgtgacatatttcatgcttttaatcttggttgggaatgtcctcaacaggctgatcatgcatgcctcaacaagtaacaaaaaagcttgtggcaggttgcaagcccttgtctttccagaagatgcacaatcggttttccctttaatcaaaagaatcaatggtggtt

SEQ ID NO: 6279 - DNA, 751 bp, Zea mays
ttgcatgcctgcagcatctaaccctgacgatgatgaaaacagtatagccatggagtttctggcttctttagatggtgaagaaaatgatttcttcaaggagcgaaaagctaagaaattggaaaagaataagacatgtgaagtagcagatgctaccagcaagacatcaagtcaaggtagctcaaagaatccagttgttcccaatcataaggaggaaactgaattgcttgctacggaggagctagaagaatttgatgatcgggaaaacaagtcctccatgatgttacaggaagaaactgatgagtcatgcaatagtcaattatcaggtataggaaacaagtcttcaaccggtggatggtttgtttcagagggagaagctgtacttcttgctcatggagatggcacatgctcctattatgacattgcaaaccacgaggtatttggttgtttgctagctacatttgctctgttttgattttaattgacatttaatcagataccctgaatgctcactggtttcaactgaactgatgcagttcaaatctgagtacaagcctcccagcatggtatcaaataacatgtggggcgattgctggttgattcgtgccccaggcgttgatggatgttctggtagatatgttgttgccgcgtcagctggcaatgcattggatcctgggttttgcagctgggattactataccagagaagtaaaatcatttcatgtcgaggaggaagcttctcaagcctctgctcc

SEQ ID NO: 6280 - DNA, 725 bp, Zea mays
atttccttcatggccctttcggctcactgcacgtgagatacagacctttgcaggtagatccagggagacagcgtgcacatctgcgcgcaatgtgcctcccagcttcacaaaatcagcacgctgctcacgttccaagttgcagcggtcgacaagaacactcttgccctccttcaaagcatctgatgcagccttcaggcactgtatttttgtcccagctttgccgttccctattgtatcctggataacagtaagcaccaaaacagagttctgtcaagctgtgccaaactgttgtggcagttaatgaacagccgttgtgaaactttaaaacaccatgaataaaattgtctagacaaagtgcaatccaagttgattggtaatgaagacattatttgggattctctgcttccttgtgtgcgatgcccttattctaaaatactaaattgttattacagtattgatcaaataaacagtgaacagtgaagtaaacaatgaagtctacatatgagagcatagatggactcgcaaagacgaaatttcgaccaaatttcaactattcaaaaagtgtgtttcccaattaagtagcgattgtcttgaaacaccacatatgtggatgcacgggataactagcaaaggtcagcacaattgtaggcattgagagctgagaccaagagcgacggagaacccacctggcagacgcgaacccagtggcggccggcggtggagcc

SEQ ID NO: 6281 - DNA, 790 bp, Zea mays
tttccagaagctcccacccgagctcctccggctaagctacccggcgaggaataataagcatgcaagaaccagctggcggcgggccacggacaacgaccaagcggcgccggccgcggcacaaggaactaccagcacccctcctctcccaggctctcccgttccgagcgccgagagatccccggtgacgcccggcaacggccagccgcagcagccggtcgccgacgccaacggcagcgcgccgagcgagccgccgaagcgggcgccgctgacggcgcgggagcggctgcgggcggcgcgcgtgctggggaagtacgcagagccgtcggtgaaagggtcttcgtcgaaaccggccaaaccggagttcgggagcggtgtgctggacgcgctgcgcgaggcggacgcgaagaaggccgggggcgggggcgggggcgggcggcgtgggtcgcgcctacccgaggcgccgggcaacctgttcgacgacagcaagcgcgggatgcccaaggacgggtggacgttcgagctgccgttcggggtggacgtcttcctcgtcctcgtctccttcacgctcatcaccaccatcatgttcggcaccgccttcctcgtgtggaagctcggcgctatacacttcaacgagtactagcctttagactgtctctacttgattgggggataaagggcgattatgcagtgattcttgcagtgctagacgagagaactgtgtgcattcgtaatgtactgtattgaccacagacactggtctgccggagattttcgagagaacgtagaaatt

SEQ ID NO: 6282 - DNA, 816 bp, Zea mays
tgttcgcgctgctgctccggcccgacaagaagaacaggtacaggctgtactggaacatctaccaccactccgtcggctactccgtcatcgtcctcggcgccgtcaacatcttcaaggggctcgacatcctcaagccggacagcggctacaagaccgcctacattgtcgtcctggccacgctcggcggcgtcgcgctctgcctcgaggccatcacgtggcccatcgccatccggaagcgcaggcgtaacgccgccgacaaggcgtccaacggcaacggcaacggctggcagcagggtgcgtagggggccaggtcgatcgccgggctttgtgcgcgtgcgtgtgttgtgctatagttttgatgcgagagagaggtctgatatcgatgtgctgatgccgttgttcagagagagagagatcgttgctgatgtgtttcttttctgttactactgcctctgtagtctgtactcctacctagaagagtagctcctttgattttttttcttctgttttgttgttgaattttattagggttctatagtgccatttgtacacattttttcccttcttattgatgtacgtacgactgctttgattactgtatggtttcagtcagatgacacggctttccttactgctcaagttaaaaactgacagattgtcgttgagtcttgtggatgcatttctgtcccggcggcaaagatgacaccgaaccgagaacactcgttttcgttctgccaacttctccaatcagcttgcagccgttgggaggtttgatttggtttggtcagatgctcaccagaagaagtggaaacacac

SEQ ID NO: 6283 - DNA, 771 bp, Zea mays
cagcacgctccccagtttcgacttgcagaaataaattaatttcttagggaaatgaaatggattacgatatttggatggatatgcttttttttgtttgcatttgtgtctgctcagaataacgggggagaatgtgctgcttttatttttctttacaaggtagagtttttttaacaaaatttttagaaatcttaacataaggtaaaacaatattacatcagagataatattaggcttattacgcaccatcaatagatttcattatgaaacgaagaaaatatacatagctactgttgtaaggatgcatgcatcaaagtttattgatgctaagtaaaatggatgcattgctaaatacagagaactcgtaacatgcagatgatttggatctgtatgaatcagtaagtgctaactttaatcatactaatatacaatatttttacattaaatactactaccagttaatggacccacatcaatgatatggataagcatggtgataaggcagatgttatcggtcccaattcagttctacagaaaatgaaataaataatttagtttgaacttctaattcaaccaaaccttatacagttatactattcatttaggtggtacctagaagcaaaataacctccagatttctagaagcagcaattccataacctatatttctttattctaaaatataatagcagaagctttgccctttgtttagagcatttctaaccaggtgtcctattaaaatggactataaatttaaaatgatgaatttttaaa

SEQ ID NO: 6284 - DNA, 788 bp, Zea mays
tactactagtagagatctctgcaaggttttcgtcacatatatctctctgatttgggaaagcaggtatatatattcttcatcttatgttacttttcatgttagatttgcatatagattttagcagatccggaacactagatcgacattcctatccgaatatgtatatatatgtgatgtttttgtttgaatctctgactacttgatcgcagaagaaaaagctatatatagcaggaagtgtgtgttcttgcactaattctctgtctctaaattcaacatcgaattacagataatctttactgcttcaaaataatctacatacacacggcactgctgcaatgattttgtcccctcgaaataatttcaaaaaggacagatcagcttgcacgattaatcacttaaactaccatgggtggcagtagaacttgcaagtgcaaacagcatacagagtatttttgttttggttctactactatgccatgtttcaaaatgaaaccatttatctaccattgtttacttggatcgatcgtagtcgtctaattcagagtttttttattatttattttggagaaaaaaaaacatatcttttatatgacgtgagtctgatcgtttaatcaagaaaagtgaatatgaaagaatccgtacgtgtgcctcatttagtttgacaatatatatggctgtgtggcacacacatgcattttgtttttcaaccttttttccaagatccagtttttgtttcacacctctctctctctctcttctttctctgggggacataaaaatagctagga

SEQ ID NO: 6285 - DNA, 774 bp, Zea mays
caatgcaagatcggtttcgtcttcggttcattatagaggaggcgattcaggctaggagagtacgctactgagtggataattattccacgcgagaaaagagggccgaatattagtattgctcgggattatgatcactttcgtgccattttgtggatgaaggaaaaaaaagaaaagatcatccatccggagtttccggagcgcgcgcatcgctcggcgactcggcgtaccgctccacgccttcaccctcgtggcttcccttctccctcgtggcctcccttctctctctctccctcggactctcttttctggcggccacacgtcagggcgagcggcgccgcccgtggccagctaggccttcgtcggagcgcctcgtcggcgacgagcatccaccccaggtacatatatatgcccgcacattcccttcccccgcttcctgccgcgcgaatccaaaccctaatgcatgcattgcattcttctattcggatcgatctgaccatgcatgcatttcacttcacctagccgtttcgatctattaggaccgatctgatcatgtatttcattctcacctagctagctttgtttacacagccatgtcccacgccggggcctccatcggcggcggcggcggcgctgctcgcggccgcagccgcagcctcgggagcagcagcagagccggcaacggcaacggcgccggggcgttcgtgagggccggtggcccgacggcaaacgagatgtacgtgccggccggacaaagatcgaaccttcaagaaccct

SEQ ID NO: 6286 - DNA, 726 bp, Zea mays
gctcaacacaggactcaagcggtaccgacttggtaggacaccgaataaaagtttggtggcctttggataagcggtatgttgtctagtaaatgttattgttatctgtacttatgttattgcaattaggttattcctgaaggtggggttgcttttaagtttattttgttcattagattttatgaaggtactgttcaatcatacgattcatccaagaaaaaacatacggtaagctcccgcaaatgatgcattaataatctattctttgtattttgtttcatccatctttactgctgtgaagtacaaccgtaaagaacagtttactttgtgtttggacactttatttgttggtgaatgcagctgagtatttgtgaatgtaatgacttctttgttcggccttggattcttgttaaatgagtagggtaggtactaggtactactgttgttccaaaaaaaactttagtgacacataatattagtttatacttatattttaaataacgattattgcaatgacctgtcgcatctaaagctgttgtaaacatctgggttctttatagtgtctgctgtgtagtgcctttgttgtttattgcctatgtaacacttttctacgtttcaatctatctcagttaaaatgttatttccatagaatttttaaatggaatttcttagataaatagtttgatattttgaagtttacaaataaatatttcgactaagtatgtttaa

SEQ ID NO: 6287 - DNA, 847 bp, Zea mays
tcggtacccggcttatccgctagagccgacctgcagcaggccaccagaagagcgcgccgtcatcagctagctgcctcctcctcgtcgtcgtctcggccaccggcggtggatgggcggcgtgctcggcgcgctgctgcaccggcggtccgggggcaggccgccaccggcgcgggccacgaggcgccgggcgctcacccgccagccgtcggcctatgacgccggcggcgggcaccggagggcgatgctgtccaagaagtactcgtacataccggacacctacacgtcgcttgacgaggtgggtgccggtgccgaccgatgcattgcttgcaagttgcagaccgataaagcaagcaagctagctagcagggcagctcgatgactgtcggcgcggcgtggtgtctgcatgcatgcaggtggcggcggcgctgcgcgagcaggggctggagtcgtcgaacctcatcctgggcatagacttcaccaagagcaacgagtggacagggaggcagtcgttcggcgggcagagcctgcacagggtcggcgacacgcccaacccctacgagcaggccatcagcatcatcggcaagacgctggctcccttcgacgaggacaacctcatcccctgcttcggcttcggagacggtgactgacgactgacgacggccttcctctcctcctgttgatgcatccatccatcttctcgtgtgtccttctccttaatctaacctctcttcttgcattggttgcgtcgactcgcgcctgcactgcgcagccaccacccatgactacaacgtgttcagcttccacccggacaattcgccggccacggcttcaggaggtcctcgctgct

SEQ ID NO: 6288 - DNA, 565 bp, Zea mays
aaggaatggaagccagaggacattagattttgttgatgtcaagcacaatatcaggttaattctttcttctttgtgtccatatattttctttattgaataaatgttaacatatcattgctaggttctatttgcatggagtagttgggaaaagttgtttctctctctaaaaaaagtctgacatttatctgatttaactttcacaacaagtctgttcaacaaaaaatgttggttgggatatatgtgcttttttgttattactataaaatttgatttgcaacagtttattcttgtaacatgtcatgtcgctgtccaagaatgttccatttcaactttgtacatctccttttttccttctttctctttttttatcccccatcctgccaaaagggcacttggtataaatttcctcacatgctgagttataaaaacgcctttttcataaaagctgtagtttctcattatttcagtcataggttgaagcaagagatttgttagttttttaagtgagatatattcaggtattgtaggttatggtccaagtccaagcatataccctgcacaatgc

SEQ ID NO: 6289 - DNA, 955 bp, Zea mays
atttcccattctccgcgaaccaccgtggctttccgaatgaactctgagggagctgggcagctggcaccaagggcagaaataatactcttgaggactgtgttacttgacgtacacatgaaacaaaaatacatcacagtaccagttaatcggaatcaggcataattgttatcctctgttctgtattattttccgaggatacgcaggagatctatgtatctttacccctcgtatggaaagaacatggtaccttatttattcatcatatatccatagtaggaaatttgggaaattgtagagttattttattctaagctaaggaaatttgggaaattgcagactgccttaacacaaactagcgaacataccatttggcacttgtttgcagtgatgtcttcaatgtccagctgctgaaggagcagcagcgagttcagcagtgaggatgaaggttgacatgccagcttccctgaggtgacgaatgtcgccattcatgagcctcagaaggtttctagaaacaaggaggctcaagccctcctccgactgttctctattgtcctccccatacatctgtgacagtatttctgctgggactcctgctccttggtgcttgatcctgaaagaccataaagccatcaacacaggagtaatttaagccttcataccttgtgatttcctatccagaaatgagtgcatgcgtgcaaattagcatgcacggtgtacctaagttcgaagtctatgagatgaaaggtttccccaaaagttgttctttgtcaatttgggaaaagatttcaaccagaacccaccaagaaggagaagaatttcaaccgaggacaatattaaaaatgtcgaaaaggaacctgcttggaacccgattaccattccccgtaaaaccttttggtttaaaggatctcttcgggagggttgcaagcaactttgataccctttccctgggaaacct

SEQ ID NO: 6290 - DNA, 780 bp, Zea mays
attttaatttcctaccggggaacattttgacacgaaaggaaaaatgaccttccattttttttcaggaaaactgtagggaatgatgcttcacgtaggtttctaatgctacttatggcatggaaaggtttaaggactaaagcagtgatgacacagcctaccaggaattgtttcactagtcaaatgcttatcaagcatgccaacataacagaaaatgtcaaacagcaaacacagataatgttaaacatggctttagcagtgataaacaccagagatcattagaaagggaaaaacaaatctcattgggtattttagtgattttcaaacaaaaatttgcggcgtgtcctaaggacctcaacaatcaattaacttcacatctactgccaatgctcatttagggcctgttttcccctcctccaaactttagagctctaaaagctttagagcactttagcacacttttgagctctaatatgaggtgggtctaaagtttagagaggtaacttcagaccacttgtttaaagttttatctctaaagtttagagctataaagcttagaggagaaaatccaaacatgcccttagatattgagagtttaattctgcatatgggcattctcaaaaccaacaattaatgtccagtttcatttacaaaatatcaagccaggagcacatataatttatacaaggattcagctgctgaccatggttcaggttttgttttgcaaggcatcctgtagagtcctcattataggttacacaatcacaataaaacttgttaaca

SEQ ID NO: 6291 - DNA, 786 bp, Zea mays
tgcgacgaatacgaggatggggaagtaagcgacgaggaggaggtggttgtgaagcacagcggcgacggcgaggagatgcggtgggagtccatgttccaggatctcaagcccaactagccgagacgcgcgcgctcgcgtgccaaatgcgccctgcactgcacctgtgacctgccggccggtgcgtacagcgagcgaagacaacgtgcccgattgccagtggagtggtcagtactcactagctacctacctctctacctgctgcctgttactgtaattgcaatttgcaaccgtgtaaatgagtgtgaaaaataatgcccatgtgtcattctctgaaattttgagctgggagccgatccaggttcgtgatgataaaaaaaaatacctgcgacattttcgttcctgctgtgaaatattttaagggcgcgtctgtcgttagtgtagatccctgacaaagggatggaatagatagagggccgtgtccattacgagccgaggtatccagatctgaactgacagtcgccgcttcactcaacgattcaaaactgtggggtcacggcgtctggatgtagatctgtcggcttcagcaaagtttagctggccaaccctggtcagatctcaaccactgcatgattaaaaaatttcaatgctgcactggccttgaagaggacctgacctgttaacctgccgaccactgccctagttctaggccatgagtaaaccaaattttaagacgacatgatcaagacctgatacgcagtttctttcacgttttaggagggaaaaaaa

SEQ ID NO: 6292 - DNA, 800 bp, Zea mays
gcttgcttgcatgcctgcagcttgttgagtgggttaaaaaatcacagctattcgaatttgtagagcgtgattatgctgcacatcttgatttaacagctaaggtctatggtcttcataaagcagaacagactattgagaaaattcctgcatcttgtaggggtgagattgtttatagaacacttttggccaattgtgtttctgcatccaatataaaaaaatcggagcaagtttttaataggatgaaggatcttggatttccggttacacaattttctttcaatcagcttctgttactctacaaaaggctggacaggaagaagattgctgatgttcttgcaatgatggaaaaggaggatgtgaaaccatctctctttacttacaagattcttgtagatgccaagggttcagttggagatatagaagctatggagaaagtgattgaatcaatggagaaagatagcattgagccagatctcacgtttaatgctacaattgccagacactacatattttatggccagcgtgagaaagcagaggcacttctgaaggcaatggagggtgatgatatccagaaaaatcgtgctgcttgcaagactttattacctttacatgcttttctgggcaatagtgatgctgtggaaagaatttggaaggcgtgtgaggataatactcgcgtagctgagtccgtgtctgctatagaggcctttggtaagcttggtgatgttgaaaaggcagagaaggtttttgaggatatgcttgtgcattggaaaacactctcttccaaattctacaccgcgttg

SEQ ID NO: 6293 - DNA, 447 bp, Zea mays
cccccgctgatccggtaaacccgacctgcaggtccgtccgccacacctttcctgccctcctctcttctgccactgcaattcaagatttcctcattttgctgagaaaataattgaaaaattccctcattttgaggtaatctgttgttgcgtcgctgttcatgcttgtcacgtcgttctgaaacattcagcagctcatatataatataacctgatttctgaatgtgatgctcaggacagataattctgaacacgccaaggtagcatggtgatttgattacttagcataatcaatactaatgttactccttgaaaggatgactatgcaaactatgcctatttgccgattggacgagattcaaattgtcttattgcaattgttataggggctaacatctataacgaatttccatacttgtgttgtcaccgatgtaaactgcacttaggggg

SEQ ID NO: 6294 - DNA, 799 bp, Zea mays
cagggtaatcagatgcaaacccaacacacattctcattgcaattgaaatgtcatagaacaagcaaatcgtttcaacacttacggcaagaccaacggctcctaaaccgaaaacagccactgtcgaacccttcggaggttttgcaacattaattgatgcaccaagacctaaacagagaaagaatttgtgtaactcagcatctcaagataaatgtaccccagcatccacaccaaaatgtagtaaatgaacttaccggtagaaataccacagctaaggacgcaaactttatcaaggggagcctgagggttgatctttgcaacacaacccacatgcatgacggtgtactcgctgaaggtggaagtcccaacaaagtggtagataggcttcccattgattgaaaaccgcgacttgccatcggcaatcatcacaccgcggtcggtgttgatcctgagcagatcacacatgttgctctctgccgacttgcagtgggcacactccttgcactccccagtgaacacaggaaggacatggtcgcccggagctacgtcagtcacaccctctccaacactctctatgatactggcaaaatcaagaattttcaggcggctagaataagcaaatttgcctcagataacagatctaaaatgattctacacaaccctagctgtacgtgcctttgtatactgaaaaaatagtaagagtaaattagctgaagaaactgctaatgaaagaatcatagattaaattctgtccaaaagtccactgccagtaacccagaacatctgatgtccacacagataa

SEQ ID NO: 6295 - DNA, 804 bp, Zea mays
agagatcaagctgaaaactggtatctgggcttgagggccctattaccaactccttgtaatccatgttcatcaattgaatcaaggagcagtaggcagatcgacagttgtacaaatactcccagcagctatattcagcttaagagtaagttactaagtgtgcatggcacaccaaggcacatacaggttagttcaggaagttacattgtagcatctgaatgataacacttgtatagctcgctttggcatttttctctggtatttcatgtagcaacatttgttttttttctcgggaaaggggattcacgtggcaactacagagcagggactgtctgaatttgaaattcaggaggccaattgataaacacaacattcttaagttgtaccaacttatatcaatctcagcaaaccacacatctatgaattatgattgcaagggtactagtaaatgagatcaacattgaaatgattttgactttatgaacccaacaatttgtgtagttttaatcttgtccatatgtaagtaggcataccttactgatgcgcttttctgtttctaaacacttaattctcttggttaaattacagtcttctgtttgggtctaacaattcgtctaatgcacttcatgttaaggtatgttcatcgcaaaggaagcccaagaaggcacacggaacattttttggtggtagcgctgattgttcagaaccattattttacacaaggcagcgaacattctctgacataggtacctacttggaaaatcttacacgcaagatgtcaaatccagaaatacatgatttgaagga

SEQ ID NO: 6296 - DNA, 846 bp, Zea mays
tccttctgcgcatgaaaacagcagtacgcaaaagaagaacaacaacaaaaagtgccagcagaccacacacacaactgctcgtcactaatcacccaaaagaacccttgacctaaaaattgcagcacaatttacatctcacttgagatgctaaaaagaataaccaagttgtgaacattgctaataagggccagtcagatctacataaaaaacttgacctaccggaggggtaaggcagccctcgaccattgaattaagaagacagtggtacccatgtcccacctatacacagtggcaccaaagccctgccccacccatacacagcagcaccgtaacccatgtgagaacgaccacgactagggccaggctttagatttatgttttgttgtgggacagaccagggattttttttaactccggcctgatattcgctcccacgggaagtcaaacccatgacttgaggagtgctactcataccacctaaccaactcagctagaagctctttcgctaagtcggcactttgcaagccaaacataagctgcctttctaggactctcatccaaccaaaaatttaatccaacatctgcactgctatcatgctgttataacatgtgatttcaatttcattacgaaaactagaagtttgtcacacatgtatcatggactcatatcatatgcttgtcacttcagttaataaaagatattaaaagagggaccactcatcggaggatttcaaaccagtttctcgggtagtgcgaactccacataacactctgacagccatgcacaatatacaattgaacataattgttgccacggctgctgacaagaatacagagtataattgc

SEQ ID NO: 6297 - DNA, 763 bp, Zea mays
agccttatctccagcagctagcgccttagctcctgctcgatcttcttccatggcgcgcgcctgctactagcgctcggcctcctgcccatcccctgcgtttttcccctgctgaagcttttccatggcgtcctgttttctgcgcgcgtttctcagcgtacggctccctgctcgagctccccacccatggccgccctcaaccccatggtcgagctcgcccagctccctgctccggtgactagcgctcagcgtccggatccctggatgcttgccctgctcgccgccattccgctggatcctgcgtgctccagccatggcgccctcccttgcttctctctccctctgccatcctccagctcgcccagcccctgctcctgctcgccatggctgccgcgccctcccagccgcagagttaccgcgcgcgtgagtttctctgttggccatcgctgttccctggtgcggtcgcctatgccgcgcgctctctctccagcgcccacccccagctcggccctccacctccctctcgtatggataccggtgctgctcgccctgagctcctgccttggccgtcgcagcttcaaatccgtggacgtcgcccatggaagctcgccgaactgtgtccatatctttcctgcgtcggtcgtggtcttcaagccccgacgcgcgtgtccctgctcccagatccaaggccggtcgtcgtgtatgctcgcctcggctgtgtggccatgctcctgtcccagtcaccgccggtgaagggcctgctgca

SEQ ID NO: 6298 - DNA, 835 bp, Zea mays
cagcaaagtgcagtgggatatgatcgttacgggtggcgggttgcggtagcaccgaaaattccaacgcgacgggcgacagcgacggcgcatcgaccggaaactgtcgtgggctcgtggcgcgtgcgttttttttttcccttctccctcccggaactcaagagagagggaatcttgcatgcatctatccatgcatcaatccatatccatgcatgctagtcattttcaatatcggtacctatgcaaacggaaataaatcacgtacagacagtatattatatatattgatctgcttgttactgtagttgtagatgcaaaacctggcatgtgtacataactacatatacgtatatatatgctagaagagtgaagagctagcatgcatgcagagactttttgaccatgcatgctcagctcaggtgaacatgttaatgttactagcctgccttcttctgatggagttggtgacgaccagactagacaccaccagctagttgagcagcattcagcgtgtggtcgtcaaagtctctctgctaggtagagacaagccgctagctccattcctcggaccccctgggctgacgctgatccgacccaccaaagtacagccacacacacgcacgcacccgccgtgcccgcgcaccacggccgccgcaggctaataagctgtgcgcccatgtgctggctctgctctgctctgctctccggccatccaccttcttttcccacaaaacaacaacgacgccggcatggcctaacgcctttaataattggcatggcagccacactctcttgtcactgaccggggcgtagatatgccacccggacatgcctcttt

SEQ ID NO: 6299 - DNA, 743 bp, Zea mays
taccatcggctgatgagcgactcttcgagaaaccacgcgatgcgtcctctgtcctggaaaaaaatttgctacggagagaaatttggatttatgtcattataaaaattgggttttgcccaaacgccatcatgtgaacgtgtttcactaatacaccagacaaaatgctatttaggagttattatatgaaacataaaataaatttagctgaacgttagcttctagactgactgttttgcccctagatgaaataaagagtctgtgtatcggccggctctcctctgtcagttggctgccgcggctcagatcatcttgccgctgcgcctcaggttctggtgattgcccaccgatgcccgcccgcccagctatgcccggctacacaactcaatttcagtcacctaaacaaatgggcaccacgaactgctagagggcaccatgaagaaaataactgctacaaagtaatgagtgaacaaggttacaaattgaattggtctcaactggtaggtgtatataaaattggaaccgaattgatctgacagctgcttgaattttccatcttacttgctgagccgaagtagttgaagttggtggataagtcaataccagtgtacggcgtccagaatactacagtgacaaggctagcctaacccaaagtgaaaaaaaacagtagcatccatgctaacacatgatgaataagatagctgttactggtgctagctggtggagggtgccactggtggagtact

SEQ ID NO: 6300 - DNA, 763 bp, Zea mays
tcttgcatgcctgcagagcttcctttcacttgctagtttattccatattttgtagaaacattaattaatccgccgtcactcacggaacacgtcatcttttgatctgatgatcgtcggttcatgcatggatgatggccagtttcttcaaggagtgcccgcacccggacgacaagcagcgcaaggagctgagccgggagctggggctggagcccctccaggtcaagttctggttccagaacaagcgcacgcaaatgaaggtgccgatcctgcctataataatctcagccccccctgatccttttttttttttgttctgtgcatttcgatcgatcgggaaaattttggtttcggggttgcattgcattgcattgcaactgcgaggcaaggcaggcgcgccacaactacttcatttaagcctctgacctagcgtctggcaggcagcattcatggcctatttactacaccccatgtcctcttctgcatgcgcgctgccaattgccctgtcgcaaggtcgcagcctgccaggcagtggctggcaccagcaccagcaccagccatggtcaaaccccacctccggcccatgcatgtcttcctcctcctcctcctcctacttctcctccctcctgctgctgacgcctacctggcaagctaggctggcagacgtttacggcgctcactgctcaactgactcaggactcaggagcgattaccatgggttgttattgcacttaatgcatggtttatattatttagcgtcgttgtc

SEQ ID NO: 6301 - DNA, 820 bp, Zea mays
tatcatatctcatcccctatttcaaacttcactatgtaaacagtgcaatctacagtgcaaaaaatcctttattttacacgatttgccgcggatagccttaaggatttgatcagatattttccttacaacaccaacttaggcaaacatatctttatttttaccctcttatctagctggagagatgctacatgttgcacaggcattcatcgacaagaactaccatccaactgttatttgccgaggtaagattcctttattctcagtactgcactttactagggtaatacctgttttttatatcttaacttctgaaacttgtatttttcttatcttcagcatataccaaagcgcttgatgatgctattgctgtacttgacaaaattgcaatggctgttgatgtgaatgatcgtaagtttacagtgaacatatattttgtactggatcctggcactttgtcaatgtcacaggaattagctcttccctcttgcatacaccatgtgttacacaattagactgatgtcaccaaatatactgttaatgcaggtggggcaatgctaggccttgtgaagagctccattggtacgaaattcactggccagtttggtgaccttattgctgtaagcatctttcttccatgtggaacttcaacaattccctccaaattatagttcactttggttttgtcccaagtcaaacttcttttactttgaccaagtttaaaaaaagaaaacaaacaggccaacatctacaacatcaaactagtaccctaatgtccaaaatataaggtgtttggcttttctggatacatagtttttgctat

SEQ ID NO: 6302 - DNA, 865 bp, Zea mays
  unsure (1)..(865): unsure at all n locations
cattcttgcatgcctgcagctccttgccggcgatgaacgtgccgtgcaacccgtacgggacgcggcccggcagcttgacggcggcctcggcccgcatgtcgcgggcgttgacgacgagcatttccgacgcaccgcgggcctcgtcgtgcacgtagcacagcacgtagccgtcgtcctccgcggcgcccgcgggggcgtcggggcgcggcacgaagcagggctcgccgccgtaccggccgtcgccgtagatgaacttgtcgacggtgccggcctcgaggtccaccttggcgaagcccgacaccttgggccacggctcggcgatggcgaggtaggcgtagcgcgtcctcctgcccagcagctgccggttcaccatgccggcctccaggttcacctggtcggcgtcgctcaggaccgcgcgccgcgaggacgtgccggtgcgcgggtccagccggatctccgacagcacgctgcggaagctctcctcgccggcggcggactcgttgaacacggcgtccgcgggggtcatgcaggacccgatcaccacgacctcgcccgtggcctcgtcctcccacgcgttccagaggtggaagcagaagcagtcggggacgtccacccaccgcagccgcgacgcgtcggtggcgcgcttcggcagcaccccgaaccgcgcggtcttgttcctgtcgtacaccacgggggagccgcccaggaccatctcctggagcttgaacacgatctgctggtccgggatgatggcgtggttctcggtgacggcgaagtcgtgcatcatggtgggcgcgtcccggggatctcgacgtcgggggacttgcggccgtcggcggtgaagtanaaagtactgaggaacggc

SEQ ID NO: 6303 - DNA, 705 bp, Zea mays
gcacgcggcgcgtccccgtcccgccctcagctcccgccacgtcgtcggcctcctcccccgtttgactgcaccacccactcccccaccccagcgcctcctataaatcccgccccgaacccgaatccaccacaccgaaaacccaaccccagctcgctcttctctccctcactccaagtctcaccacccacacaggccggcgcgcaaacgccacaaagctagcctttctgctcccgctcgatcagctggctccgttgatcaccgggccgggccacaatccccagctctctgactgattagtttccgctgcaatggcgtcctccatctctgctccagctccaccggcggctccggccaccgcgccggcttcgggcagacccaagaagccgtcccagttcaaccccagcaccggcaagaccaggaccccggtccccgcgcggccaatgcgcgccgccgctcccaagtggaacccgctccagcggctcgccgcggcggcgctcgacgcgctggaggaggggctcgtggcgggcgtcctcgagcgcgcgcacccgctgccacggaccgccgacccggccgtccagatcgccggcaactacgcgcccgtcggggagcgcccgcccaccggcgagctgcccgtgtccggccgcgtcccggccgtgcctcgacggcgtgtacgttcgaaacgggcgccaacccgctgcacgcgcc

SEQ ID NO: 6304 - DNA, 813 bp, Zea mays
ggtgcaggtctttagcaggaaaaaaaggtggtaatacatgtaaatatacaactgttggtctaaagcatgtgttgtttttcaccttttttggttggattttgttttctgcaaaagcaaaaacatgtcggaaagatcaagtaaaagggaggaaggccttcgctgtctagaaaatactagtagctaatgcgcgccctacgcgcgtgtgacaacgtgcaagatttataatttacgcaacaataggatttggaaagtgacaaacgctagaatagattaaaaaatgctgataaaaagaagataccatcctatcaagtttgtatgagctattccttttatcaattttggacataacttcactaagaacaaataaaaaatggagaaagaaagaagactaaagaaaccatgaaactcagatgcatgtaagaataagaaataaagtagtgtatcacttatttgcttgatcatgtgcttctttaggaaaccaacacgtagaagtgcatcatgctaatcacgaaccttactaccaaaacacgcaatacacttttatgcttggcatatatggatgcaggtcagagtgcctttgcaagccaagaagtggcaaatgctcctcttttcaagactcatttggtcaactgggtaatgtcacatgatgatagaaaaacaaaattgttagtttgatatgatgatggaacatgcatgatgctattatataggatttatcttgtttgatatattggcctagaccacaatgttgaaaagttcagtatttgttgccacaactgaacgcgtagttagccggagaagcaaagaatattt

SEQ ID NO: 6305 - DNA, 835 bp, Zea mays
gaacccctgatcctctatgtcgacctgcagatactatattatataacatacatattaaatacaaatctaagagtggattggaactcacaacgtatgagttcacgatataggttgcgatccttaaacaaaaatatgtggccatctaagttggtaacacatcttgtgcattcatgctaatatgtgcaaccatgtatctaaacgttcaaaatctgaagctacaatatctagatattgactgtatttgttttaagtataaaaaatatctgaatccatatccggtacacgacaaatatgttcgaccggttttcacccatatgcgatgacccgttggaacaacaaaggtaaatgcttcccaccttcctattttctttccaaatcctactcgactagacatgatacatatcaatcaaatttctatatattaaagcatgacgcaaagctgcaaaagtagactgtccacgtctccttaattttaccagccgttggattcaatgtatgcggccagaaaagaatatcgaacttcccctgaatacaacgtctcatcatgcaacctgacaccacaggatatttctagagtcctccaaccaaagaggagtcaaacagtcgggcagtaaaaaaaaagaacacggaaggcaccatcttctctaacccagcgcgtcctcgctcctcgccacgccacgggaatcttttagtaagaggtcacgtgctgttagcgaccaatgttggcttccggcacccggagaagctggagatgctgacagcacgcggttgcagctgatccgtcgtcgtgtcgcattaatcgtctccgggcctccacgactcactggcacgaaac

SEQ ID NO: 6306 - DNA, 755 bp, Zea mays
  unsure (1)..(755): unsure at all n locations
ctgagtcgtcgtcgtcggtgcaaagacgactgagggaaatatatatatanntgtcagctgctgctgtagctctggaggaacctgctgtacaaatggtaaagcagaattctcttggtgtacgtcgtcgatcgcctttgcaatcgatgcttgatttggaggagacggcgcatgatatgatggtgtgtgattggtgactgatggattataattcggtggtatggtacgtgcgtgcggcaggtgatggtgagcgtggcgagcccgaggagcccggcggtgcggtcggaggaggacctgggcccggcgtggctgcggccgctgctgggcacgagcttcttcgtgccgtgccggctgcacccggagctgagcaagaacgagtgcaacctcttctgcctcggctgctgcacgggcgacgccctctgcgcctactgcctgccggcgcaccgagaccaccacgtcgtccaggtcagcgcggcggcgagcgattgattgccttcttcattcttggcttggcatgtatataatagttctagtcggcgcatgctggcatgcagatacgtcggtcgtcgtaccacaacgtgatccgggtgtcggaggtggggaagctgatcgacatctcccacgtgcagacgtacgtgatcaacagcgccaagatcgtgttcctcaaccggccgcccgcaggccaggcccggcaagggcgtcaccaacacctgccagatctgctgcccggagcctcccggactccttccgcttctgct

SEQ ID NO: 6307 - DNA, 740 bp, Zea mays
ttcattgaagagtgtcatgctattcggaaccatagttctatgtcatgttttctgcttcactcgtctatgtctaccaaagtttcgcacctatacaggccagtcatttcctttcccttgtgactttttgtctactatttcattagctccagtcgtaaatccccatggcattgacatacaaactttcatggcaatgatgttgtacatgataatgatgctccaattacaagacttgtcagaaccgatttagattaataaatatttgaacccagagcaatatactattagttttttataaataatgtttgaaaaggcacggtaaaactccaatgtcttcctacgtgtaatcgggtccttttccacctattatacggttttcagcagttcactcgtcgtatagttatcaaaatattgttttgtattgtttgtagagtgaagtttgaatataggattgaggatagttaagccgttgaagatatccttattaacaaaatgatacacaattctcttgttcgaaaaaaaacctctaaagtcctcgttcccttgcagcaagatacacctcgcaccttgctgcacacgttcccgtgaccgactctcagagaatctaacaatgcagttgttggtagcttattgcctaagattatagcacattgcttaaccactaactgtttcgacataaggaactgactagctcgtatagcatatgctaccgcatgaatacgattgcatttttatgtaacata

SEQ ID NO: 6308 - DNA, 938 bp, Zea mays
gtaagggatgctcccaaacgatgataacgacggtggcatgcttggagaaagtgactgtgatggcgatggagccagagccgaagatgaactaggagataaatcggagattttgtgttgtacgtacaatgacagctgaacaccctttactttaccaaatacagagtgattaagcccaagattcttcccatcaggttttccgattaactgagctatttgtttcaatctatctggtaaaagatcgctgcttccatctaataccgatgccacaatagttgctggagcttcaactgaagaaccaatcccattcctgaattgcaaatatattttctgcaaatacggcaattagtgagaatcaaattggagcaacggagcactttaaatatgtcactgcaacctcagtagaagaaataaaatcattaatacctcgtatgaccttaagttcaatccaagtttcagctgatccttgagctctgtaagattacccaaaatctgataaatggagttgttcaacataaagttgaatagggggtctgtgttcacccatgtaaaaccagactgtgcaggaattactgtaattcctccagggaatctcaacagctcgaaagaagatgggtgcccaaaaagtgatggtgttaaggataggttcacctgctggagcatcatctctattaaggatgatctcaacacacttagagctggcaaacttattgaagcatcttttggataaggaagaacaccaaaaacaacatgtgtaaagtatttaaaagctaatgggtgcattgaaacgatgatacctgcaaaaaaacatattataagcagcaaacacttcaggcaaaagaaatttgagggaaaaaataggaaagacaacagggaataggcaccttgctattaggtacaccaatctcttcaaatatggcattccctagtttgtctatgtg

SEQ ID NO: 6309 - DNA, 782 bp, Zea mays
ttctgataatgttgagttataatacagattttcacaatataatattttactcatattgttctaatacatggaaaagtccattgaagagttataataggttcctagctgccaattcttgcggcgagcaatttacgttcacaatgctcgttcatgattgccatattttcagactgaacgatgggttcatgattgccatattttcagactgaacgatggtttagttcggacctaatatttaggtgtgtgtctttcttaaaatctaatttgcaaacctttgcttctaagtttcattcatatagacattactgtcagcctttctctttaatatgtgtgaccgaatggataatcttttgtgagaaaactcatcaatgtgaaggattccgagctcgaaataagggttaaagtcgtgtcactcatcaatatctttaattaaccccatgctatttgatgacataatttcacgtgttaatctttcatatttaaattattttgcaggtttatgataaagcaagaaatgcagttgctcttgcccttagtccagttgttcgggctctggttgatcctgatggtgcattgcagcaagtgcgggacttggatgatgtaagtatcccttgcttttatttcatatccattaagagtgtgcatcaagagcattcatttgcaatagtcagtatcttttcaaaatgtgttttgttctaactcgctgataactaaacttttttgtcaattttctttcctcaaacactcgttaattttattttaacccatttcagataagttta

SEQ ID NO: 6310 - DNA, 788 bp, Zea mays
aacttgtcagtagatttccaggcactgctgatgttaacactaagttgtccacaaaaggttccttactgtcagaccttggagttgagctaggacattcacgctcaatatcttgattattggaagaagcagtgaaaatgtgacaacgaggaggctgattaagtgaagcattcgatgcatccacttcaattggtctttgctgattcacaaactcctccattttgcatgtatcagaagcggatgcagaagatcttacaagaatttcaggcgccgctgatgttaatactgagttcttcataagagattccttgcattcagaccttggagttgggctaggacattcacgctctatatctttattatcagaagatacagcgaaaatgtgaggctgattaagtgaagcatttgatgcatccgcttcaattagtctttgctgattcacaaactcctccattttgcatgtatcagaagcagatgcagaagatcttgcaagaatttcaggcgccgctgatgttaatactgaattctccataagggattccttgcattcagatcttggagttgggctaggacattcacgctctatatctttagtatcagaagatacagcgaaagtgcgacactgattaagtgaagcatttggtgcatctgcttcaattggtctttgctgattcacaaactcctccattttgcatgtatcagaagcggatgcagaagatctttcaggtgccgctgatgttaatactgagttctccataaggggattccttgcattcagaccttggagttgg

SEQ ID NO: 6311 - DNA, 760 bp, Zea mays
tgcagaggggcaacgtcaagaaggagtacgtgaaccgggcgcgcgagctcggcgtcgaccccgccgcgccggcggacgtcagccggagcatggcgtacgggaactgcgccgtcgccagcccctcgtgagggatcaaattattattacgtctcctttggtggaccgtcatgtaaattttgtaggagggaaagaagaattctttcgttagttgccggtgcgatccgggaaagatctcccgtcttccgtttcgtttcgttttgacatcgatgcatgtacaggaccaaaaaaaaaaaaaaacaggcaagccgcaagcgcaagtgcgtgcgcagcccaatcaataagtgaaagcgtgtcttgatgtgttctttgacgggtgccccattgtttctttccgagagagaccgcctactccataagttggattttttcaactcttcggaatgctgatgtgaaaaaaagaagaggaagtaagctgtaagtttacaactagtttatacagggaagaaactttttgagagaagaaaaaatataataaagccgagaagataaggaaggcaagcccatggggatgtaaagaaccaacgtggacgtctaactcatatatttccttcagttccgaattagaagtcgttttaaacaagatttgaattaaacttataaaattttgactccaaataaccgttttattatttagttttaaaatctaatagtcatatgtaccaatttatattaaaaagtacttatacaaaaatataaattt

SEQ ID NO: 6312 - DNA, 790 bp, Zea mays
aagcaactcgttctaagttaaacttgattcgttgcttgtacttgacacatttgctgaaacatatatacacaacctctcccaccatgagaacagagcttcctcaggtataacttcccttcctcatcatttctacaaactcttcgtagtcgattctcccatcctgcgaaattcagagaggggcgactgttaatgctatgaaaaaaaaattggtttggttattagcagcaagaatgcgctcaccttgtctttatcaacttcgtccagcacttccttaatgcttgcttcatcacccaccccatactccgccatggcttgttccagttcgtctcttgttatgtacctgtggttgttatgcatgtatgttattatctcggttcaattgtattaaacttttttttttggttttccacagctgagtttaaccgagcaaaacgatgtaaatgtggcagagctagttttacccgctatcgtctttgtcgaagtgttgaaaagcaaggaacaaatcctcctccttctccagtttatgcctgttcatcatggcagtgaggaactcggtgtagtcaatgctgccactcttgtccacgtcaacctgcaccgaagcatgcatggctagtgaagtagtactccaagcctgggtgtggaagtggaacggagcaagcagtcttactgcttccataagcttctgaacctccgcttcgctaatcttggacccgagcttcgccagcccgtccttgagttcctcgaccgtgatcgtgccgctcctgtctgtatccatgttgttgaacatctg

SEQ ID NO: 6313 - DNA, 773 bp, Zea mays
actcctggatagttctaatgttgctgatgtatttaacatacttattttttgttgggtcaagtgtcatgtactttgcacgtacagcaaacctctctgtgtgcttaccctcattagagatgtagatcatgaaaggtatgatcgaaggatgtttcctcattagacccatctggaataattaaaaggaaatgtagaataatttgggcaagttaacaatgaatgttacaactaacaactccacttctattagcagaagaaatgcaatatagtgggtctgatacgacctaaaagaatcaatagctggaatgataggaaagaaatgcaaatgaatagttttctggaagcacataccacaaaattaaggcttaagtgaacaccctcgacaacaactgattctttcctatcttcccacgcagtaattaaccgatccaaactatcaatcaccatctcgctctgtgctttaaaaccttcaacggccatttgcttcttcccgattgatttcccatcaactttttcggtaagagacccacttttctcataatcaatagttgagctgcttgatacgcctgagcgtttttttgctttcctcctagcttttgcttcagcaactgctactggatcaagacattcacctgcatggtaagttgatgcccagagaagagggttttctttttcttcaacaaagcttcgcatcatgtgacgtattgaatctgtagaaactacagttgtaattcctaaacctgctttccctggtaaaacattaacatctctgtaag

SEQ ID NO: 6314 - DNA, 916 bp, Zea mays
gttcgtgtcgatggaggtatgctacattctcaacatgcttatatttttacaactttttaggaacataagctgatccctttcatcttgtgacaggtacgaccaagcttcacactgagctggaggagttgactgcacgttttgttggaaagcctgctgctatcctctttggcatgggttatgttacaaactctgccatcattccctgcctaattggaaaggtctgatcaaatgcttatatatccactttatgaaaaatgtggctaaccgaggtgattactttactgtatctaaactgaggatgatcatttattttacctttttgcattatttcagggtgggctgataattagtgactctctgaatcataactcaattgtcaatggtgcgagaggatctggtgcaactgttagggttttccagcataactgtgagttattgtgcttccggcaatgcaaatcaatatttggtctctcttgttcttgacttaccatggcaaatgaaatcttacagcccctgctcatttggaagaggtcttgagagagcagatagctggtggtcaaccacggacacacagaccatggaagaagatcattgtcattgttgagggtatctatagcatggaaggggagctgtgtaaactccctgagattatagctgtctgcaagaaatacaaggtcttgagaattttctatgaactactattagctgtgtgcaacaaagagggctagtcctctggtctcccataacaagcatattcatttactccttgttctgccaaacaggcttacacatatctggatgaggcccatagcattggtgcttgtggacagtctggccgcggtgtttgtgaacctcttggggttgacccaactgatgtaaatataatgagggtactttcaccaagtttttggatcat

SEQ ID NO: 6315 - DNA, 816 bp, Zea mays
atcctctatagtcgacctgcagagtatatttcattgctagttcattgcatcagtataggcaaagcagcagcagaggtaacaagaacagagttgggattatgattttctatcaatttaatagttcttacaagaatgagagctgcaccaagtttcctaattcttcggggatgcctcctgtgaagctgcacccagccaagattctgaagattacaacgcattaggtaagcttcattgattcattatgatatataagaatttgccccggtcaggacatacagtgttgtgagctgcctgaggttgccaatcgaagtgggtagtgggccactaagaccactgttggaggagaggtccctgcatgcaccataacatatgagtgaacatgatgtctttttcccctcaagcacataagagacatgtatcatttctttaagagagaaaagactacacaagagggacatagccccccccccccccccaaaaaaaaaaagcacacacacacacccaaaacttacataaacacacccacaccacaatcaatcaggagaaaataagacacaaatgcccctttttcaacagtaggcaaacatcaatctaccaggacgtacacatcacttgaaagtttgaaatctgggggttgttgactgatacgatcacccctactacgaaggttgtatgtgtggctgttgggaagagggttgaaggagggccgtgcggggaaccgtgatgaacttgagaagagcaccatgcctggcgaaaaacaggtaacaagatgaggcaagggccatctttttttagattaaacttgcttacagaaga

SEQ ID NO: 6316 - DNA, 789 bp, Zea mays
attttatcttatttctagttttatctttagctactgaatgtggctcccagcatttcactatattctcttgggagtatttcttttcttttacacttttttttctttgggctgtgtgtgcttctgggtatatttggccctggtttggtagttttcttgtatttgttctcttcttaatataatgatgggctgctctccttccgatttgagaaaaaagtaaattctcttggacatgcatgtcacaataagagcatgtgaatatttgactatctaacttgattcaaactcacttcagcaacttgttaagtcaataaactttgctttgacctgaaggccaaaatgtttttgatgctcttcataaaaataataaaaatacatgccaaatcattgttagctttcataattaaatgaatatctggaagttctggatattattcagtttcatcactctgaagtagtttttcatagagatgtgttgttaaaaagggcgggcctggtgcagcggtagagcctaccgtctgtaaccggaaggtcccgggttcgagccccagcctctgtatattatgcaggtaaggcttggcgcttaaagatacccttccccagaccccgcacagtgcgggaagcctacggcactgggtacgcccgtgttgttaaaaatagtcaattccacatcatgttgagttcactaaagttcactataatttgtagtaaacttgaatttagtaactgaatgttctccttatcttagtcaccaactcaccatgttaactgtaacatgctgatgtgtagtta

SEQ ID NO: 6317 - DNA, 734 bp, Zea mays
agcttctgatgacagaagctgaaagaaaactgaaataaacagtgtctttacaggtggcaaatgtgatggatcatttctttacccgtcattcagcttctaacacaatcgctacagtaaaagaaccttatcggtttgtctcatcgcttttgaaacaattaagctcccgtccactcaaatggggtcattcgttgtgccctagcgcctgccattctccaccaccgccaccccacatcagattagaattgcatctaatctgtggtttgtgtctttaatctcactttctgatggcgtagcagcctatcgtctaaaggagattcatatttgaaacatagtaaaaaatagaatatgtagaactaaaaataaataaagatagaaaaatataggattgaaaaacaaaggaaattttacaggagtgagtgttagtgtttggaacacatgaatataagaatatgtctattcctctattctagtgaataaaggcttgctcatcattctatcatgtatagaatatttttaaggaatgagaacttgattaggtgtacaaattttactttctctatatcacgaaggaaaacgagccttccactggaaaaataaaacttaattcattcattctaaacactacatgatgtaaaagtagaaattggattttttttaaatgtcttagaaacttcaatccaaacaagcttatagagaaaccgaactattactctctatcataaaataaaggttgt

SEQ ID NO: 6318 - DNA, 739 bp, Zea mays
aaggaatggttttctgagaatgagtcttttaacattttttcttcgcaacgccagttaaatcgttatatgtctcaagaaataaacattgcagagccatggcatttatgcagatttaaccttatgcagtttaaggtttttggctatgcagactaaacaattcctacagccagcaatcagactaatgcatatttaaccttaagcagtccaggagagttaacacagaacttagcttcggtccgcatgccacaacattagacagagtagatgattgtaggctgtagcatagagaagagaactatacgattttactagagagcacagcagccgtttttggctgcatgggaagccaatcccaattggcaattggcacgatcactacccactggattgagtcaacgccctgatcgattcagcaagcacgcatctactcctgagagattacagctacaagcgtacgattagccgcctgaacgcagcacagcgcattagagtggcaggaggaggagcaccgaagggggacggggaacgcaccacggcagctggcggcgccgaggcaggggagctggcgccggagccggacgaggccgccatgcggataagcggggagcgtgcgagcgggattgcgtctcggcggatgagcatgcgggtgcgccgggaggacatgcccgcggcgtagtggaagaaccggtgggatctgaagagggggaggagcattgtggtcaggtggtgggtgaggccc

SEQ ID NO: 6319 - DNA, 862 bp, Zea mays
atcttgcatgcctgcagacatgtaagttcttgcagtaatcctgactcttaaacgtcatttccacgagtgaggtgatgctaatctgacttctcttatcgtcgtgttcgcagtgagcttgttgttctcagtaggtccggtttcttcagtgatgtggggagaggaaagatcaggctctcatcgtttcggtatgtccaggaacgccactcactctgaggatcaaacagcttgaacaatgtcggccagaaggctcaacccgtctatgaaatgaatctacgatgtggtgttgcaggcagaaacagagtgccggtgctgtgcgacttttcgagctcgaggtccgacgtgtgcgagctgagaggcgacgtccgcgtcctccccaacgccacgatcgtcctccaccatccgctggcgaggcgccagtcttggaggatgaagccgcacggcaggaagaacgaccggcacgcgctcgcccgcgtcactgaggtgacggtgactgtggcgacggcgtcggcgtcgccgcaccacacctccggcgcccctgccgctgctgctccccgatgcacggccaaccacaccgccccggcggtcgtcttctccgtcggaggctacgcggggaacatgttccacgacctgacggacgtcctcgtcccgctgttcatcaccgcgcgccggttcggcggcgacgtgcacctcctcgtcggcgacgcccagccgtggtggctggacaagttccggccgctgctcggcgggctctcccggcacgcggtggtggacatgggcaggggggagcagcaaccggggccgtgctcttgtaccccgcacgtgatcttagggctcgaggtccaccaaggagatgaagcgtggc

SEQ ID NO: 6320 - DNA, 867 bp, Zea mays
  unsure (1)..(867): unsure at all n locations
tgattggtagtaatcagctcatgcaatgcatagtaactcctgtttgttgcttacagatctggggggcacctgaccgaagaagagctggatgtgtagatcacagagtacggctggatgtgcaaatgccatggctgtttggatttcttctgacagctcgacaaaaccttacatcatgcaaagagtcaggaaaacaaaaaaaaccaggaaaacaaaaaaataaaaaatcaggaaaacaacaaaaaaaaataaaaaaccaggaaaacaaaaaaattaaaaccccaggaaaacaaaaaaataaaaaaccaggaaaacaaaaaaaataaaaaactagaaatacaaaaaaaaataaaaaacaaggaaaacaaaaaaaaataaaaaattcaagaaaacaacaaaaaaataaaaaccaggaaaacaaaaaaaataaaaaaacaggaaaacaaaaaaaaacaggaaacaaaaaaaactagaaatacaaaaaaagccaggaaaacaaaaaaaaatagaaaatttcaagaaaacaacaaaaaattaaaaaccaggaaaacaaaaaaattcaaaacccaggaaaacaaaaaaataaaaaaacaggaaaacaaaaaaaaatcaaaacccatgaaaacaaaaaaataaaaaaacagganaacaaataaataaaaaaactggaaatacaaaaaaataaaaaaaccaggaaaacaatataaacatgaaaacagccgaaaatttaaaaacaggagaaccaaataaataaaaaacccaggaaaacanataaaatgaaaactcacgaaaacaaataaacttcgaatgtcaaaaaagtaaaaaccaggaaacaaaaaaaatgtagaaaccccaaacctgaagaacaaa

SEQ ID NO: 6321 - DNA, 816 bp, Zea mays
ctctttgtcgacctgcagaaggtcatagtcgacgcagggtacaggtgatcatccacgttgctgacttacttgccttcgctcttctcatgttttaatctctctctctctctgatctctagaacacctcaaaacatttagtttctggatcttgcgtgatgcaggccggttcctaacgcgagaggcgaggaggtgctggcgaagaagtacaggatcaggctgaggttaaatttgtgacacgcgctctagctattttagtacatttaccaatgacagggagtagtgctgggaattgggccgggccggcccaggcccatcatgcttcgtgccaaacggtttgagacagtaaaacctaaaaaacttttaggcgtgtcgtaccagcccgaagtgtaaaaacagtggtccaactcggccctaaaccacgttgtgccttcgttgagccatgtcggcccaaactcggttcgtatatttgaccacataaaatcaaaatattacaattatgtaaagttcatagcttactaaattaaagatattaaacaattctagcatcatttgaccacataaagtctaaatataacaataatataaagtcaatatcttactaaattaacgaaattaaactgattgggcttaattgggtcgtgccgacccaagcgtagcccacctatgcgggccgtgccggggtccgacgggctggaaattgaggcatgacctaagcccactttcgagtcgtgctagcccgacccatattatttcgtgtcgtgccgtgctttggactttttatttttaggccgggcctcgagctggcttcaaaagccc

SEQ ID NO: 6322 - DNA, 761 bp, Zea mays
cacatggtttaccctatgatgattggatttgtgccaaaacttgtatgactgcatgatgatatggtactcttgtgtttgattcatgtagcatgctagtcaggtaccgtggagctgcgacctctcaattttcatggttttggcagaagatatcactgcttggtggtctaagcttttgacatttgcttgtgagcgtgtggctttcaaagtttgcaactagtatctaattctgtcagaatatggttcctagcgtaatggttaaggcttccgagtagcaccttcaggtcccagtttgatcctctcaggggcgaaattttggcttggttaaaaaaatctcttcgttctgccccactcactccagggttacagggttacgtcttgcgcgccaccctctggctaggccgttgtaaagtgggcggtgacggcccgctagtaatggggagccagggttccaagattttctcgattgaggtcatgtttcggtctattcttaatataataccgggagaacggtctttttctccctgaccgagttttttttaatggtaacacttagtgttgttgctacttagttcctcttcctcataagtagttgaccataagaatgctgatgaatttctgtatccatacatctagctgaagttggtgggatatgtgtggttaatcggtcgtcttcatgacttcacctttattttgctgtcaatcgagtttcggacatgattctcattggtgcttgattaatgtgaaaacattatattataaag

SEQ ID NO: 6323 - DNA, 824 bp, Zea mays
aaacaggtggacattgatcaggttatgggaactgatggttgcaaaaagcacattgaccagattatggcaactggtgattgctctgacaatatgcattctgatatgcattgcaaggaaggtgggtgtgttaatccttctttggctgaccctgaacaaaaatgtgatggcaattttccagatatagaaagtacttctatgcagagaactgatgtagtcttcactatgaatgagactgaacaatcaagcagtcagaccagccacaaggaacagtgtatggatttgaaaagcttagaaccggagtcctcatctttgaataaccaacaacatgattcatctgtccaatataatgattgtcataacgtggatataaccgttaaaggagcaagtgcaccactgagttgtggcgattctgtgtcttgcaatgcaactaacaatgttgaagctcaacctgttggtggtgctgaagaagttgtgtcgagtagccttccatcagatgcacaaaaaaccttgctgggtgcaaaagataatgaagatgccatcacaaagaatcagggcaggaggaagcgaatgaagatggttggtaaggcacagctagtgcaaggtaaccaaaataagcagaaagaggacgagacaaaggttttcagagctgcattgagaagaattcttataagcaaatctccacctgtattgacgattaacttgaacagattcagccaggattctcatggtcgatataagaaactgaaagggcatgtgcgctttaatgagatgcttgatatacaaccattcatggaccccaagtattgtctacttttgaaagtatt

SEQ ID NO: 6324 - DNA, 719 bp, Zea mays
ttctcgtacccgggttcctctttagtcgacctgcagcatgagtggactgttcagatcctgcatttgttgatgcttgtactttcctatccccaccagttgacacgccaggtggttgcacattggcaaaggccatagttgcagcagaagccccagttattggcctgccaagagaccctacaggaccagctggatagtactggaagggaggctgctgaaatccagtaggttgtggaggatgagggtgtggccataaaggttgaggtgggacaataccaggtcctgaaggataggacgggtaaaacggtcgttgagaattctgtggtgtgccaccttgggttgcaattggtggtggtgtttggggcaaaggagcagcaggtggaactataggcctcccaaggaaacctgttggattagagacagttgcagaaggttgtgcaggtacagatggtctagtggctccaaatacctcagggcgaggtggcaccgatgaatttgttagtgtctggatggggattgaaggacttccagaagcacttgcgattgttgaaggagattttgatggcatgccagtagataactgcatggcttggggtgtaacctctggtgccccttggggagtccgatttcaaattattaatgtctgagctgccctgtaataaaaatcattaagttagcaacactttaatcccaagatttcaacatacaaagaaaaaagaacc

SEQ ID NO: 6325 - DNA, 847 bp, Zea mays
atacagaaactgcaagaggaaaacaaccgtcaggttcaaatgtcgtttatgcatttttattaccttttacaaaatatggatgccattgtcacggaggtatagcttgtcttgttttgagaacttgacaattaataatggactattgttgttggtttaatttttgatttcagaacggaaaactgatcaactcagactaatatatacagtgcctgaacaacttgctaatccaaaatcattacgctaatatcttttcatttgtctcgtataataaaaatcacgccaaatctcttaatggccgtcctttaattagatattttgttggttggtgtgcttcagaggaaacatcgtaactaaaatatgtagtgccttgcaagtacatgcatttatatatatatagtgcattgcggcagtctacatccaccaagcgtaaagaatgagcaacaatgtaacgtacgtcacaccaagatgaagaaaccatatacatgtaaaaaaacagtagctaattatatatgttgaacatatcatatataaattgcatgtgtgtttattgacttgattgtcattattaattacatgcgcattacatcatcatcatggatttgaaccatatgcacgagaggaaaaagtaaaaaaaaaacaataaacttgaaaaggcactcatcacgctctacgtacatacatatatatactcaagaaaagaaaagaaaactcacacgatttaattaagattaaccaagccaaaagttaagggtaagcaaacgaaaattaataatttggattgaacccccacccaaccatgggatgccctgaaattaaaatgggattaaaacctaaagtgaaaaaggcc

SEQ ID NO: 6326 - DNA, 786 bp, Zea mays
caattgcaacagaaatagtgagaccaacaccgatagcggggcgttcagatctgcggtaccctacatttagaccacacagggcatactgagcaaagcagttcagattaaggaggatcacaaccaccatcatgtgcatccactcgttaggtttatatgttccatttttgcaatatatcttcctaagccttaagatgtcctgctgctcccatcgacaaagaagcacaaagttgtagatccgttgaggatgttgatagaggcacatgagcgtgaataatgcgttcaggatctggttgttcacttcaaaccaggtgtctctttttgatttgctaggcaaaacacgattcagcattccagtcataacaaggaagagaattgcaccggatacagcaacacaagcaatccaaacaaaaagggccatattcataggctcttttatccagttcctagccatcacccacagttgttcccaattaatcttccggataaactggaaatgctcgtggctaacatggttgtccgaatggatcgaacgtgagaactcatcacgttgaagtgcgatctgttgaaacttgaacgaagtggagggaccaagcttctttaacttggggccagtaccaaggcgattccagaaatccctaaacccgctccacggcttttcatgtcgtgaaacaccctgagtagcaagagtgttgacgccctgttgcgccttgaacattatctgaagctgttgactctacttgttgaatatcagatttgagatttccattaccattggaagccattttg

SEQ ID NO: 6327 - DNA, 834 bp, Zea mays
tttgcatgcctgcagttatcgtcatttgtccttaatttacttctgttaaatgtttgatttgatttgattcttgtcaactgctactatttgtaatttcaagtagcatgcaaatgaattttaaatatatgtcatcaatgtctattttatcatcgattcatttgtcagacatttatgatttattttaaaatataattcagtgagcagtgaggaaaacaagcttattgcgtcatgtacatctgatgtacatgtacccagaattttttagaacttttggattataacaatgaactaaatatgcgatcattgcaccctccttaagcatttcgttgcaatggaaaactattcttacacataactgtcatccatttcgacccatctggaattttccctttccctttacgtgtgctcccatatatgatttacccagatattatgtaggcggcaatgacaaccctggcgatgaggatgcgaaaggccactcaaaaagcaaggttaagaacaaaaggcgacgcccagggtatgccattaacctatcccggcagctgcatgcaagttcttaatctattctagaggctaaactatcatgaagcgaagctgatgtgtcgtgcaacttcagcacaaatgtagatgggatgaaaacgatcggaaacggtcggaaacgatatcgtctatacgaaaacggttgcccggtcggtcggaaatttacccgatttcataaattaatctacttgttgggcgactacaatatgatgtttgataagatattttgaaaattcagaattttaaaaaaccggtaatttttccggaaaccaacaattggtcttttaccggaaa

SEQ ID NO: 6328 - DNA, 769 bp, Zea mays
atattggagccatagaagtggttaaggaataaatcttgcaaccaccaagcaaacaacagcaccacagaagtatgtacagcatttttatgagtcttcacatatttataaataaattgacaaacaatttgcacatgcgtttcagttgagcaggaaaaaaacttctagtaaaaggaataaacgcaccaacagttaaacatagcgcagccaaaattctcaacacaaatacatgggaataaacaaagggaatcaaggaaaattctcagctgcaaatatgatacctaccaccaactcatagtatgcctcatagtactgagggaaccttgctttagctccaccaagggatgtttgtgttgcatctaacagaagaaatattttttctcgaactggtaaatccgtctgcaaccaagataatgtgttacgtcaagaccaattggtgaagttccaaatgagaacaggtttcacaattgccataataaattcagtgaaaaataagttacctttttcttcactatcttcacaagtattggaagaaggccattatcaatgacctgcctatggacaggctctccgcaattattcagaagcatctccaatagctgaatcaaatagaagtgaatctgaatcaagactatagcttaaccataaaaacacattcgcacattatgtaatgtgagctaattaatttaaaaacatatgagaaatgataggccatttaggtacagtgacatcaggaccaagacctaaaataagagtttaaaaaaatcaagac

SEQ ID NO: 6329 - DNA, 808 bp, Zea mays
ggtgaatggatggaccgagctcggactcgattctttttaccggcaggtcaattggtaccgacaagcccacaccagaaatgttcagggtgtaatctgcaaacaaaaagacaagacatgtcctttccttaatccctactcgcttccagactgcccccctcctcgagccctcgcccgcgttcgcccccggctgggatcaccgcgcgtttcgccggcgccatggccgtcgcagtcgccgtcgccagccaaaatccactagcagcgcgtaacctcctgccgatctaggttggtgcgcgctaccgcttccctccccttctgctccccgtcgacgccatctcctcctagccccagattgcatctgcctcttcttcctctggttctttcggcccgggcagaatgcctcttttttttcttcttcttcttactcgcaggctgcgggcttatgctcgaaggcgcgatctttacgctcggagtggcttcgtttcaggagacgggggatttcttctcgcccttttcctcgccttgcggctgcggaataccggggccggcctggatttgctcgagagtgagaggaaggcgtaacagtgtgaaggaggcgcgggggacaatatggctgcggaaatggtgaaagcggcgacgagcgacaagctcaaggagatggattgggcaaagaacatcgaaatctgcgagctcgtggcgcaggatcctgggtatgcttgccatcccccctcctgttttttttccctttcggaaccattggttaccgagtagcattgcaacttttgctggctgaaagcctgtgacgatgaat

SEQ ID NO: 6330 - DNA, 717 bp, Zea mays
tccctcagtcgtcgcctaggcgtccgggcgctggtctaacgcctaggcgccttgcccgcctacctcgcctaggcgtccaggcggtggtccaacgccttggaccgccttaccgctttaaaaaccatggtcgtcgctctccctccactcccgtgcagccgccgccgctctccctcagccgtcgctctccctccatcacagctcctctttccctccccgcagctccttctctcctctgtctagccgtctggagccacgcgccgccaccgccgcagccctatcctcccccaaggcgttgtccgccgacgccctgcgtcgtggcaaatgccttacgctcgagggcaaggcgagttagacgcctcgatttccaggcgcgccttagcacctaagcgacgctaaggcgacgcttcaaggacgccttgataaccatgctcgaccgattgtgttcacgttgattttggacggttttcaccaaagttattcacatagaagttggttgaaaagctgaggtgtttggcagtccgcatcagcttctggcggccagaattagcaaaaaagctgaaacaaacagggaccaatgtgttttggtccatgcagatgccaaatcagaagggttcaaaatctcccgagttaaccaataagacataaggggattccatatgcaatcttcttccttactaacctacctaacagatatatttaataaacggagctatctat

SEQ ID NO: 6331 - DNA, 569 bp, Zea mays
ccctgcacacgaacaggaaccacgccgctgctacgtcccgagcggccgagccccgcccccgcagagaaagaacgcctcgcatgcaactgctcaaaccgaaggaagccgccacactcccgcgcgaggccctcgaggcccacatcgtctcgctggtccgccgatgcccgggcctcctcgcgctccgcagcgcgcacgcgcacctcacgcggctccgcctcccgcgcctcaccgccgccttcgcgctctcgaagctcctcgcctcctgcgtctcggcgcccgcaccagccgcagaccaagccgcggcgtccacctacgcccgcaacctgttcgaccaaatccccgacccgaccgccttctgctacaactccctcatccgcgcgctccccgccgcgggctccgctcccgccctggccgtctaccgccgcatgctgcgggcggggtccccgcgtcccaacagcttcacgctcgcgttcgcgctcaaggcctgcgcggccgtgccggctcctggcgaggggcggcagctgcacgcgcaggcgctccgccaggggctagcgactagcgcctacgtg

SEQ ID NO: 6332 - DNA, 836 bp, Zea mays
  unsure (1)..(836): unsure at all n locations
tgactcttgatggtgtaaatggcctgacagaagacagtaatggggagccatccaatagctcaaggacacctgcttcaagttcccagttacctcaggcatcttctgtgggtcctattttttcgtcagcttcaacagtagttgggcagaatgaagtacctgtcagcctccagtttggtttgtttacgggtcctcctctaataccaactccggttccagccattcaaattggttccatacagatgccaatccatctccacaatcagtttaacccatccctgcctcatatgcacccttcaacaacccctttgtatcaatttggccagttgaggtatgtacgtcctatcgctccgagtgttcgatcgctgccttctcaggccacccgccctgcacattcttccatatcagctcaacatacattgaatcagaatgtgtccagtgttctacctgagctaatggatggaggtacaaaccagaacatcccagctcaggcaagctcatccacctttatcaacaaatcagcagcacctacaaccaaggttccccttggcatggacaattcaaattcccagtatctcaatgctcctgcaaacaatcagatggctggtgtggacggatttagtagtcaagtggacagagagtttgctgagggtacaactccaagtgggaggaatcaaggtctctctttgaagaggaattacagacctacgtccaacaatgtagaatcttctcaatatggtttggaggggagagcccatgggtgatccaaagggctcttggtgttgtctttgatagaaggnggaaggagatatggatatgcttgtaaaagacaataaaca

SEQ ID NO: 6333 - DNA, 751 bp, Zea mays
tttgcatgcctgcagcctccttctgcgcatgaaaacggcaggacacaaaaggagacaaacagcaaaaagtgccagcaggccccacacacacaactgctcttcactaatcacccaaaagatccctggacctaataaaggcagcaccaaggcccaatgcctcaagatgcctggcaccggcaagcctccagcaatctaactcatccaaaaaaaactccctttccgtttatggaaggtctgacaccataaaaaaccgtcttattatgatgaagccataaacaccaagcccccaagatgatgatactggaggcttaaggtgcatcgcattaatgaatcgacggcaaaagtgatggtattcaagttgttttgaaagttgttccttgcacctttgaacaaccagctatgactccgacaaccggcctcacgcaatccaccggtaaaagtgacttttttgcattctgacgttggcaaatgttcagttctcctctctgagaaaacatcaccaacttctcgccctctccgccatagatgtccaccggctacgtgtaccgggcccactattttctcctgttctagagaccttttggttttaggcgttgacaactgttctctctctattgtggagaaaaccccttcaccttctatctttctcccgctggtctttttgctctctttcagctccacctcactgtcctcataactgctcatggctatacttccggtggacccctggtcgttccttctacggagcttg

SEQ ID NO: 6334 - DNA, 859 bp, Zea mays
taatccgagtggacgtccgtgccccgttcgttaggggtcggctaggggcccagaggcacgcccaaaagtacctgcgagtgatctgccggacccggtccccttttgacggggtccgagggctcgatgcctccctctgatgggattctgttacaaaatcgctccttctggtctcggaaatgtcctagggtacctcgggagcatagcccgagccttggttatgtatcgaacgtacccagggtcatccctcgctctgcgtgctctggggcggctgtcgaacccttcgggggccagccttcgaacccctgatcagtaatgggcgcggagcccgagtggcctgaggcggccgttgaacccttccgaggggccgacctttgaacccctgaccagtagtggggcgcggagccccagtgctctgaggcggctgttgaacccttccgaggggccagccttcgaacccctgatcagtaggggggctcggggccagtttccttcgcggagaaggatcccttttggggtatccccctttcccggtcccggttgtaagagagagaaagaggaagaggaaaaggatacgaaatcgaatgacatggcgcaccttttttgacgcgggcattatggtagaagcgaagcgtcgcctgcttctcctgccaaaggtgccgcctgtcctgccgcagagttaatgcgacgggacgagtggttcgcggggcagccgttgcgcgtgcgcgagccgttcgaggaacggaacatggtcgcgtcgtcttcacgccgtgggagagggttctctcgctgtcccaggaggggacgtgagcttggctgatgatttgaccactgcttccgcccgcctgccactgccattact

SEQ ID NO: 6335 - DNA, 785 bp, Zea mays
gcctgcaggctgaagaaatgtcccgaaaatggcatttcgaaggtggtaaagaagctaaggagaagtctggcatcgttagagaactttcaagaattttgggctccaggactccccctggttgatcaacaatgacatacggctgttgtaaatccaccgtccactttgttgtatgcgtccttatcgtttccatatgtttgtgtataggaaacaaaacatcctgacatctagtttggatgtatatattggagtatagaattggaattggaatcagcttttctaaattttgttgtttggttgcacttggaatttagatttggaatcataggcctaattcactgaaattggactataactagaacccccactttcaatacaaagcttcacccatcggtattgtgtagaattagaccgcacaaattataaactttaattcagtgacgtttaaacaatataattagaattacatctcatttcatacataatttagtattcaatttaattttatcctctccaatatcgacatccaaacggagcttgagatatgtataatatctagtctcatacctctgtttgggctttccgatagaggagattgggatggtacatgctttcaagtttgaatcagcatttgaccgcatggacttgtctgaactgcctgtttcgtggcataatattttaaagttcgatgccataattggaatcttgtaggaccgaagatatgagagccattctgttaggcaaagctcgctgcgtcgtaatccatccgtttcgtaatccatccgttt

SEQ ID NO: 6336 - DNA, 676 bp, Zea mays
acacgctgagggcaccatgtcctttgtggtaatgctaggaccacatgtgtatcggcggtcaacatgaaaatgcttatttgtgactgttaatttgggattaaagcgaactttttaaactgacacaactgaaatatatagagacaaaaatatcgtagaatcagtatagtagaagccagtacagattaaaaccaacctaccaagctgattattctctaaccccgcgcagcaaccaggttatcgtccacgacacagatggggtagtagtgcgtgcggcgtgcccaacactttccgtacggctcgacccgtattgtcgtctcctacccgatacgttctacgcacgccgtctgaccacatctctgtgggggaccctttatgcctactacgccttgacaatgcagaacttgtagtaccttttattaggtcaggtgacaacatttttcccccggttttattgactgttcttcgcgggcgcggcggtgtcagttcgagcaaacagacgattcgctgcatttggcatccaattttgctttgtttgttttgcgtggcagagcgaggttcgtcgatacgccgtatgtaggatcgtacacgtacgaaggagggggcgacgctatactactagcggtggggcccgcctatctggcgtggctgtgcctgggcaccccgggaaggggagatc

SEQ ID NO: 6337 - DNA, 759 bp, Zea mays
ttgacaaaagaatatggaaactgagagtagcagaccccactcggcccatgggatgccaatctggcaaccatcacaaacaacacattcctcctatataaagcacaaaccatatgcctctctcatcgcaactcatactagaacatacagcatttcacaagacacaacataagcaatagccatgggagctgtgaagcatacattgaaaatgctttcatggctcctactcttcgcacaattggctgcggccaccacctccaagtgcacaaatgccacaaatgggactgagactgacagcctgggtgcaatgaaactgaagctgattgccattgcatccatcctcacagctggagcagctggtgtgctagtgccagtacttggccgctccatggccacgctacatcctgatggtgacatttttttcgctgtcaaggcatttgcagccggtgtcatcctggccacgggcatggtccacattctgccagcagcatttgatgggctgacatccccatgcctctacaaaggtggcagtggtgggaacattttcccctttgcaggactcattgcaatgtctgctgcaatggccactatggtgatagactcactagctgctgggtactaccgccggtctcactttaagaaggcacggccaatcgacatcctagagatccatgaacaacccagagatgaggaaaggtctgggcatgcacaacatgtgcatgtgcacacccatgcaacacatgggcattcacacggagaggg

SEQ ID NO: 6338 - DNA, 804 bp, Zea mays
agtgcagaggtctccctctggctctgaaggtcatcggcgcgtcgctgcgcgaccagcctccgaagatttggctcagcgccaaaaaccggttgtctcgaggagaggccatttctgactgccatgagaccaagcttctggagaggatggcggccagtgtcgagtgcttgtccgagaaggttagggactgtttccttgacctgggctgcttcccggaggacaagaagatccccctcgacgtcttgatcaacatctggatggagatccatgaccttgatgagccagatgcttttgccatcttggttgagctttcgaacaagaaccttcttaccctcgttaacgatgcacagtacgtatcatcggacatttatgtgcttcaaaatgttcagaacttagatatcccaataacaggtttttctaactctgctgttctatatatacgtgcaggaacaaggctggagatctgtacagtagctaccatgactactcggtgacacagcacgacgtgttgagagatcttgctcttcacatgagcgggcgtgacccgctcaacaagcgcaggcggttggtgatgccgagaagggaagaaacacttccgagggattggcagaggaacaaggatgctccgtttgaagctcagatagtctccattcatacaggtatagcgttagtagttaattgttcttcattacatttgtagatattcatcgctaacaactcgtcatccaacttatttagtgcgcttattctgaaattcctactggaaattttccaactattttccaaaaaattccagggccaaaatga

SEQ ID NO: 6339 - DNA, 806 bp, Zea mays
cttgcatgcctgcagggccgccgacaacggacggagcgtgaatttctgtgcggcacacacggccgtggtagctgaccggacgacgacgagaccggtcgaccgcatgtagtgcaggtgggcgtgcctgatgagggagacgctgactctgactggctgctgctgggtgtgcaagcataccatactctactagtacaccacaccaggcttgccgcccgcccgcccgcggccacgcgacccaactaaccccggcgcggcgttcgttccagtgggcgggtctcgatccccggcacgtccgccccgcgcgtcgtcgccgcccacgtggcggcccatccgcccgtccaactgacctaacccggtcgccagcccgcgcgcttatataaacgcccccaccgggcttccgtcctctcccacaccacagctcccacacacacagcaggcagcagcacagcccacagctcgatcgctcctccgaaccggaaagccaagcccgctttggcgatcgtgcttgcttgcttggttccttcaattcctgccggagccagcgagagctagctagctgctgctgtcgtggtagacgtcttgccgcacgcgacagcctagctcgatcggtctctctggtacaacgtaaggagaaagatcgagggggagaggacgacgacgatggccggcgcgaccgtgaccgtggaggaagtgaggaaggcccaacgcgccaccggccccgccaccgtgctggcgatcgggaaccgcacccccgccaactgcgtgtaccaggccgactacccggactactactttcggatcaccaa

SEQ ID NO: 6340 - DNA, 847 bp, Zea mays
atcttgcatgcctgcagatttcgaattgcatggcatgcttggtatgctgtgctactccatttttagctccatcaattagaaaactcatttttcgtcttgattcggcgactggagggagtgtcgagccagtcagggaaatagtgccagttttacatatatatgtgtgtatgactgaatcaaagcacctggaacaatttagggggcgagattttgaaagaaccgattgcaagtgtttctttgtttttgtatatcagtatacatatggtgtcctcaagccctgtgttacaaatgttgcgatatgccatcacgagagagcttagagcaggcctgtgcataatctccccccactgtactgaagatttggaattgtaggaaactagaataggttcaatgtttttgatgtattgtattgcttgagcctcatgtcctgtttatataggagtgcaccatttagggggcaagtactccaacaggcatggtaggtacattgtgcaaccgatagatgctatgtatcttattgagacttttggcactttcctttttgtgctgatgtattataacaagggatttcgtgtaaatgcagattcaatccccatctggtcgtttcacttcaattctctctataggaattggagggtcagctttgggccctcaatttgttgctgaggcacttgcacctgataaccctccactgaaggtatgcccctaagtcagaatcctagcaatgcacaaaaaatgcatttgtctagcttttgtgtttaatgtcttgtcagttctaagatataaccctaaacccgtattatgcttaatttctagataagatttattgacaacaccgaatctgctg

SEQ ID NO: 6341 - DNA, 853 bp, Zea mays
aagcatgctcaaggaggagacgacactcctatgttatagagcaaagcacactgtagcggcctctatcagggacctggctacaaaagaccatagacccccccaccccccaatccccccttgatgtaatacctccggcaaaaaatgtacataatttaccctgtgtgggctttccctacaggaaattaatcaaaaaaaaactcaacgattttagtcaatcgccatgtcgtcgttgtgcttgcctcaccgttgtcgggcccataaggttgcgtccatgcagtattcgtcttcagaattcagagcatgatatccgagggctttctatttctgataaatgctgaaaagcccttgttctcgctgtgataatcctcgccacacggcacacggaacaccatcaatttgcatataaaagaagggtatgtcatagtgccttgacgagttgtagatatcatccaagccccgagtcgacggcgacgtttttgttatcctgccggtggtcaccgtctggcgagcgtgccgtgcccggaaagcgcacgctctgcaacgcccccaatcggccgaaactcctctcaatttagtgcttccctctacgtgatgaaccatttccaggttcttttgacccgtttacttgtcacactccaaaaggtgtccatgtccggcaagcactacacctgcctcctccctaacggattagatataaagactaaagtcagtgacggaccaattaggtcactgtgatttattgaatggtgaatattttatctagcgaaaatcgccagtaaaatactgactccagacgaataagagaaaattcccataccggaccaagatcgtttttatacattttttcgagctc

SEQ ID NO: 6342 - DNA, 779 bp, Zea mays
tgaacctgggaaggctgattgggagcttgcccttgtagagacagcaagcaacttgtccaatcagaagccagcaatgtcaggtggcatggacccgctgctgctgaatggtatgtatgaccagggtgttgtgcgccagcatgtcggtgcacaggtgaccaccgggagtgccagcagtgtcgcgctgcctgctcctggacagaagactcagatgcttgctctgcccgcaccggatggttcgatgcagactgttggtggtgatcccttcgcggcgtcccttgccgtgccaccgccgtcctatgtgcagatggcagatttggagaagaagcaacagctcttgacgcaggagcaaattatgtggcagcagtaccagagagacggcatgcaagggcaatcgagcctgaacaggctcgaccgcgcccccaacccggccatgccctacgggatgcccatggcatacaacacgaaccccatgccaatggcttacgcagggaacactgggtattactaccctacttactgaggaggcctgttctttaatcatccttacagttgctgtgaatttttgttctgtgttgtgatcttccccgccctgcggttgtgtccagcatcagctgttgttcccctgtccctggatcaaaccttttggtctgatatatgtaatgtaattttctttgtttggaaccaaatgcagcatccgagggtggtggctatagttgattacataatctcatgttgatctttacactgtttttactgatcctccgcatgttatcacttct

SEQ ID NO: 6343 - DNA, 769 bp, Zea mays
gcaagcgggttgcggtgcggacagtctcacctcgcttatacaatccagtcgaccgttttctcagtctttactctttagcctagcatgagagcagccttcaagtgaacacgcccgcgtccgtcttcgtcggacccttctccggcgacgagcaccccccacgccaggtacccccccccccccctcccggcccgctctccgccatttttgcaaaactaagcacccggaccctagttcaagctatttggctatctgtgttcggatctgatctgattcagtgtctattaactttgtttttttggggagcaaatcatcttgcgcactgctttatattggatccgtccctggattttctgttggcagataggtagatagtgtgcccgtgattctgagtttggcatggccttgcacgagcagtagtcctagtttggctcagcgcatacgttttgaatccttttatatgtgatgtttgggatgtgattactccttctgccgtcaacttgtagttttttgttcctgttgttaggactcgaagcttcacaactggtattccaagaaatcatggctttagtcacgggaagttagatcttggtgtaaatttaagtcattctgcattctttgtttcatatgctttctcataatgtttcatttgctttttaatgctggcttacccttcacctgttattttcagttgcaacaaaaatcttttacaaaccattttttgttgttgataagaatgcacaccacgcctgattgttcccctaaatcctgc

SEQ ID NO: 6344 - DNA, 835 bp, Zea mays
agcaagctctagatgagcgtataaggttgatagctatttcacatttctctgcatagtttactctatgctatgtcacagttcttaacaaaaacattatgtaatcaagtgctttgtttcccgttcagtgacatccgtgaaaaattaaggggcttaactgaagatgaaaataatcaaaggtaactatatttcttttacatcagttatgtttgtatgtcactatttaatactgcatctatgtttcatctgtctattaggtggctctatgtgactgaagacgatatcaagggattacccagctttcaggtctggtttagtttagtggtttccaatgccatattaaatggattaactgttgctttaggccaaaataattttcttgatgtcaacatgtataatagattggtagttgacattttggttgtttgtgcagaatgaaacactaattgcaattaaagcacctcatggtactactcttgaagtaccagatcctgatgaggtaggaagcattaaataaatgagttttgcatacacaaataaatggctgttctaatttatggttcttgtgtgtttctgctgcatgcacaggcaggtgattatctccaaaggagatatagaattgtattaagaagtacgatgggaccaatagatgtttacttagttaggtaatgtttatttctcctgtgaagttaattgtttggacaaaatcttagctgatcagaattttgttataatggtagtcaatttgatgaaaaatttgaggactgggtggtgtgcgacacccgcagcatcagatggccagactcaccagctgagattcaatcatattgctgacaag

SEQ ID NO: 6345 - DNA, 829 bp, Zea mays
cagtttgcatgcctgcaggttaccaatcaggcagtaaattgttaaccaagctgacctcgccaatcttcacaacagcggtgtgcaccaatctgaagttgtgaactgatgccctgactaaactccaggtgacattccctgatgaaatcgtccggctcttccgttgcaataataagcatttactgtcacacgagaatccttcccattcaacactcaccgctccaggtgttcagatgtcagttttgttgaggccattatgatcttatggatctgtgcttggaacctccatatgtggcccatcaactgtgaccagctgctgattatgggctcgaggggtgacaacatcttctgacaagaaatccatctcatcccactgcgcttcttttatttttaatgttaagaacatcaagctgtaacaactacataacagaacagatgattttaaaccagcttaatgaatgattatcaaggatacgttctgttttccacatatcagtcatgctaacatccccctctgttaggagccagtaatcagaatccgtctgcaaaatttgtgtagaatggcaagtcactcaagatagcacaacgacctactttaacttagcaggttctgtaaagatttgcattcaggttctaggaagtaaaactcaaaagcatatgaaagattcatatgtcatgcgcattgttgtatcatttttttatagcacctctgcaatctagatataatttcagatagggtgcattgttaacaataagctttatgagcatggcaaagcagggaaaactaaaattcaacttcacaatgatctgactttgccttgtttgggcattg

SEQ ID NO: 6346 - DNA, 767 bp, Zea mays
ttatgatcagcactgaaaaatgataaaacatacgcattttctggtcattctatcttaaggccctgggcagtggacaactatttagtactagcaattactagttatctcaaaggacctctaccgtctgtaatacataatgctcaaactgctttattatcagtatttgagcaacatctctcttgattgggccattcaactttgcaaccaaactgaaccacaaaagtcctgtgtgtgcatggagttgcaagagcatacctcagctacttcaatctccttgtcccaaatgatcttctctaggatgttaaggggggctcccagctcctcctctatctccttcaaggaggcagtggggcggcagtgtctgcggatgcgaatcccctgcctagccgctatgtcattgaatgacaagccattctcccattggaccagctcctttgcgttcagcatatcgtcctgtgccagcacctcaaggattgagtcctaaataaacaaaaaaagtgtatcaaagtgcaccatgaagcatattaactcagtatttatgtgcaagattttactgataaaataacaaataggcattccatacggggcaggcgaaatggtgcaaagattgtgtcttgagttggtgattactacaagtaaagacgaaacccaacgacacatagagaaagtgggaaacccaaaatcgtgctcagcgaatggggaaaaggatactaaatcggtcacagactgggctgtcaaatgggcctaccatggactgagctgccagt

SEQ ID NO: 6347 - DNA, 852 bp, Zea mays
gtttggacctccagagacaagtaatcagcttagctacatccttaacgtcacagagcaaccactctttatctgtgttctgagtaaaattacctggctgcggacgaatgacgtgagggaaagcagccattttctgcacttgacttcactgatacccaaacttctcgtgcattcgacatcaacgtggcgcagagggtaacagctcgggaggcgtatgacaaggtcgattcctgtctcctcctttttgtatgtagcaacgatctcgaaagccgacctgttgacgctaaccgagaaattctcatcgccgtatacggactccttaacctgtaacaaagtaaaattagtgcaacgagcaactgcaaggctcctatgtgatctcatgagacgtacagaatgaaaccgctcagtcactaacatatgaggtcaacgaagtatagaaaaacaaaactacaatacaaaagagatacttgttcccaattgggttcttttatttgcttgtgtaacagttttaagggtcaaataataaaccttagacagatcagagctgtgcaaaacaaatttggacatgcagtgcagggccaatatcctgccaaaagaaagaccgtcttacctgagaaaactcatctagaagaagaggagggctgcaccattgtttggtggaaggactcgcttgagtatgacaatgaacggtctctcaaggtagaaaaccatgtgcgcacaaaagaagggagcagcctaatcatcattccgtacagtgaggcctgcaagtgaggccatctgcaaagtccccgatgggccaaagagactcccagttccggaagcaaagaacacggagcttatgcatttcttcgaagc

SEQ ID NO: 6348 - DNA, 840 bp, Zea mays
cttgcatgcctgcagttggcttttggtcaggcttcaagtttaaatgttgcgatttttgcgccttcacttagtttgtgtgatttttggcttcatgctttaggctgaggcaacaatattgaggggtccccatgaggatttggagagctacctggaggcagtggatgtgctgaaaggcatttctcgcttcttttcctcaaacaagaacttcaagagtagcgaaggagttctgaatcatgtcaacaatctgttagctaaatctactctgaagattgaagaggaatttaagcagctgatgagtacatacaggtaagactgttaacttacggctggtgtatctagtgattcagaggctcaatcattaaggcctccttcatgtatttcgctccatatattggcaaaagaacaactaacttatcactgtgttcttctagtgaagcaaaggcatgaagttgtacttatctaaaaaaaattgtgtcgaatgtccttttcttttcagcaaacctatcgagccagatcgcctgtttgactgtctacccaagtctctgcgtccaacaaaaggtgaccacgagtccgatggaggcagccatcatccatccaaaggcttggaggctgccgtatacaggaccccaacactaattcctcccagaatattgcctctcatgaatgacatagctcagcagttggttcaggctggaaatcagcaaacttgctataaaatctacaggcaggttttggttttcactattattgttttacatctattctgaccctgttctttcttcagttgcactttatgccctggaataggaattttgacatttgtttttttagaattcaatc

SEQ ID NO: 6349 - DNA, 999 bp, Zea mays
ctttgggggcctcacgagtcgacctgcaggattgccaacgaccgaggggcatgcaagagtgccaacgaccagacatgaagctctgccgcgtgggaccgatgtagtccacaccaccaccattcactacccatttgccaatgttcctgtttttggttcgatgaatgcaaggcaagagtcgaaatccgaacgtttctgcggtagcttgattctgaatatacaagccatgattctacagtgtcattttaatgcagtgtcatgattctgaataagtcacggttattgatttgattatagtttcgattaatttatctgagctaaacaaaagagaacacgtgtgctgccttctcatagcagagctttcatttttgtactccttctgccacctacaacagttctactggaggatgaaacacagattgttaggtttgcttgggatttctggtgatccagttgcaaccactaattagtagtgtttattttcaattcctgaaatttgctttagcccattagatctcttaggtcccgtttgtttcctttcattttgaggaattgaaatcttactaatggaatagactatttttttagaatatgacattccaccactttctaaagttatcatgtaagcctatctcaaattcatgggtgagagatggaagttgattctatatatttacatgctattttcccgatgtacaacttatagtgcactcttctacttgcgccgctataacataaatgtagtatataactatctctctcatataatttaggataatatacaaatatattacatatataaatatataaacttaattagttttgtctaaattataattattaaaatggaattcaattccaacgaaacaaacggggccttagtatatttgccttagctgaaattttcctgaaatctctcaattcgcacacctagtatttttgttgtgtattcaagagtaaacaagtttccttcacctttttgagggggaaggcatggagaat

SEQ ID NO: 6350 - DNA, 773 bp, Zea mays
catcttgcatgcctgcagtaatacatttacatgtacagtaggatgaaatagagggagtgtgatacgatgagagaaagcaatggaagcttctagcttccttactagagaacgtagtgatgaactgtcctctccagaacccttccttttgccatcctctaaacacttgcctgtgttcatatttctatttagttgagcatctgggaagagttgggatgtggaatgttattggtcagaatcttcacagatcagcggctgttgttcctaagaaaatgaattgggaataaccatacctccagtagaactgtagagctgaaccccctcttgcatgcctgcattggtcattggggagacgacatgctcatcaaaatccatggtatggtaatggtctagtgaagcaagcagattacttccgattgagaagcactgctcttcctctctgtcgggatcggtgcgcggaggggaatacatctgccaagaatcaacgatgatcttgtcacattgcaatgcaaaccgaagaggtagatagctctattcatgttgcaaactgaacggacataaacgtatgtactcaccatcctactctgatacttggacacagtgcgatgtcgttgcaatcattttgggggaggggggatgcctggtaatcttctagcttgtcattgccaggtctgccaactgaagttgccttacttaaagggtggagtagatcgagagctgggcacagtcaattccttgcaagactcatcaaggaacaactaaatcgtgcagcccta

SEQ ID NO: 6351 - DNA, 794 bp, Zea mays
gaattgcctttgtccattgtgttagtaggagttggtgatggcccctgggacatgatgaaggaatttgatgacaacattcctgctcgagcttttgacaatttccaagtaagttgatgttgaacctaatagctcatgtctatgatgattgatgtcagtaagcatgtttgtgctttttgtatgttgagttattttcccctaacattgagaatttattgcttgtctagtttgtaaatttttcagagataatgtccaaaaacatggcacaatcaaggaaagaggctgcatttgctctttcagcattgatggagataccaccacagtataaagcaaccgtggaattagggattttggggtaagttttctttccttgaatcataccctcgttcttgctttgttcacttgttcattctaattgcttactgacttgtctcaatgtgctgcaagcagtcgtcgctctttcaagtctcctgacagggttcctctgcctcccccttccggaagtcatggcgcttattcctactattcatctaaaggatttagcaaaccgagcacctaccctcagagttcttcatcctcatcaccctatcctcactatgaaactccacatacagccaccccagctgcgccttcagccacttatgacaaccaggtacaatttcatgcgccctgacagaatatttcattctgcttgatctaagtctggcgcgtctcttagagaggtatctgcacagcatttgtctctgatcatcaacttttatctgtcttctaggtctgtcctatctgcctcgtgaacc

SEQ ID NO: 6352 - DNA, 836 bp, Zea mays
ctcaagttctgagtttctctcttgtcagtcaatggcttgggtaaaaattgtgaacagagaatatgaaagcctgacaaactagcaatgagtccattttctgaagataaacagcaaggaaaattctgaatcccatgtgtagaaacatgtaggaaacacctttcttgtttatgagtgataggcaaaattttggtcattgcatcctagggttaacttacagtcttcttttgcaggtcaaggacactcccacgaagtgttctgatcatagggacccaagcggtgatgataattacttacctgctctttgcattgggccggctcgccacactttacgtctctgtcgccttactcgggatatgttttggtatctcgctctccgtgataatctcaacctcctcagagctcttcggactaaagcactttggaaagatattcaacttcatcgcattggcgaatccggtaggcgcgttcctgtttaacaccctcgcgggatatgtctacgatctcgaagtggaaaagcagcacgccacaacatcagggtcggacgttgcatgtcatggccctaattgcttcagactaacattctgtgtcctctccggcgtggcatgcttgggcacactgctgagcacggttctcacggtgagggtccggccagtgtatcagatgctctatgcaggcgggtccttcagccagcccaggaaccccgcacattgacccatggcgataaagctgttttctgcatctattctcttacaataaatccagtatgacgtcggtctgaatagcctcacaaatggtttattgtaattcatgagcacgcaccttattttttgtgctct

SEQ ID NO: 6353 - DNA, 748 bp, Zea mays
atagtcaagcgggtgaaactagagacactgatagctcaaatcgccagccctactcacatatcatattgaatttaattgcagtgcaaagttctagagtggtctctcatcctccataagacattccaggagagcagagttccatgtgaagtggagcaattagaggtcttggagatagaaattgttgatctggaggctttgttcacaaagctgatccaaagcacattttcccttctcaacactgtcagcttgaagatagtcgtatcaactctgagcctgtcacatctgatttggggattagctgatccctctatataagaagaattgtacaacaaaactgtcatttttttccaaattagggtctcctttccatcactgaatgcaaaagtcacttgaaaaaaaaacattttggatgtgcgtgcgcgagtgtgatacaatgacccaaataagcatttgttcagatttttttaaatgctactccaaagatgcttgacatcagtgattgttattaaagtagttagggcgcactgtccaagttgatatttgcatggctttattatgagatggccatgttgctcagatgcaacatgttgcctctgcaacaagcagcagatccttgtccagtggatctggctatctacagccaaagcaagccagctccaacacacgaagtagagcgtgtaagtagcatgagctgtgcagaataaaatacctgctggcattggcgattgcgcaactacgtaacacgcac

SEQ ID NO: 6354 - DNA, 817 bp, Zea mays
aaatgtttgtcattttaacaggaagggataggctttaccaaaaggctcatttgagcctacgtacaacatttggaagttttagcacctgataggccataagtgactgatcagaggcagctttcttttcagttccagtgctaaattcagccaagtaacggtagtagtcacctttcctgcaacagtctaggagtcaaatctaaaagaggtaaggaaaatattgtacgacagtggtatgatgtcagcatgcatgtgttatggaggagacattatcagtaaagtcatatttcaaaaagattgccagggtcacacatagagcacgtaaaaattcctagtataatgctacagcatctagtgtcagatacacaaggactgatcaaacactttagaactactgaaacattattaaggccctgtttggaacctctaaaactaatagttagctactaaaaattagtttttggattccaaacaccatcagctaataccgcagctaattgttagccatctcacagctaacaactagttcattagctagctcaacccagctaataatttattagctggctaactattagctctagggattccaaacagggcctaaattgactaatgttgatgtacccaaaacagtcatggacaagataatcagataccatgataatcatggttactatttcccagaaataaagtagggcatccaaaaattttcactatacttaccatataatggaaaccatttttaaagactgaaaaacagagtgccagtacatatagtgaatttcggtaccggatggacttaaaatgaaaggccggtgtc

SEQ ID NO: 6355 - DNA, 811 bp, Zea mays
actcaagtagagagatggtgatctccctagccttggtcagtagcctgataattgcacaatctgtgctggcaggagtgaccttcttgcatgccttcttgaatgattgtttagccttcttcaccaagcggctataagactggatcttggcttgaacggtggcatcatctccttttcttagagccacttgcagatcttggataatggccttcaactcaacaaagatctcttgcatggtgttgcagagatccagcagctcgagagaagattcgatttctgcatccaacattttcctttgctgggaagagcaaacttggttgcttggcaagtgagtcatctcttcaacattgctgtagatgtctccaagcctcctcaaactttcacacattgtgacgatacatgtggaaggtgaggagatcactgcctcgaggatgcacagctcttgttgcactacagcttcgctggagtgaagcctagacggcaagcttatcgacctaagatgggaagccatatcgatgtatagtctctggcttaaacttttttggtattgaaatgaggtggaagaaatgagaagcgatttttttgcctgatgaatcaagtctctgtcgagacctatttatagagagaagagggtatgaggcagcatcttttgatgggtagacaaaaggaatcctgccatttcatcttctcaatgctgtctatcaagtttttagatctggcagcagcataaggaatctgtttcctccatcacgcgtgtgtttattaattttttactgggccagctattgccccagtgatctatcacattgtaatg

SEQ ID NO: 6356 - DNA, 793 bp, Zea mays
cccttttaagttgacctgcagctctgctccccctccctctctcccgctcctcctccttttccttctccagctcggccgcctcagcccgcgccgcgatgtcagaggaggacgaggaccagccgccggccaagcgacccagcccgtcgccgcccgcggaccaggtgctcgacaacgtgctcgagacggtgctccagttcctggacgccccgcgggacaggagcgccgcctccctcgtctgccgctcctggcacagcgccgagtccgccacccgcgagtccgtcgccgtccgcaacctcctcgccgtgtcggccacccgcaccgcgcgccgcttccccaacgcgcggagcctcctcctcaagggccgcccgcgcttcgccgacttcaacctcctcccgcacggatgggacgcctccgccttccgcccctgggccgccgccgtcgccgccggggccttccccgcgctcacctcgctctacctcaagcgcatccccgtcaccgacgccgacctggacctcctctcccgctccctcccggcgtcattccgtgacctcaccctgcacctttgcgacggcttcacctcgcgcgggctcgcgtccatcgcctcccattgcaggtatcttttttttttcctcttgctcctctgcgccattttcgacgtgtgctcgcgttgttcacctgtttggacttgaacttgaacccgacacccgacacgacaggggcctgcgagtgctcgacgtggtggagtgcgacatggccgaggagcaggaagttgtggactgggtggccgcgtttc

SEQ ID NO: 6357 - DNA, 768 bp, Zea mays
ctggaaagttcacggttgtattcagaggaactaccgttgatatagagtcctgcggctgaaataaaagatactaatgtggatagtctaaaactctaaataaactcctttgcgctgcgctttaatatatagataggccctactcggtgctagagaaatgttttcttgaatgtcaatattttttactttttgcatattatggtatttatctttgctttactcatcctgatgttttgttgttgttgtttgattagtcaaacttgatcagaagttctgcacaaagttatcttttggatcctgggatttattggggagcagcaccaatggtaaaggtatgtagcatcaatttaaaagttaaaacacagaattcatttatgttgtggtactgtgtgttccaaaaaaagggaaacaatggaaggtatgatggctctcgattctccgtcatgagatttagttcaaattttgtagcattttgctatttactgcaagagcagttacatccagaatatgttgtagattacaactgtaactggcgtttgggtacttttatggaaatggattggcttctttgtgtttgttgttgtaccaatgcctcttgttgtcttgtgaaactacaatctcatcaatgttattgctttctccttgcagagcattcgagatgcaactcttgacttgctgcacatccttgtagcagtacatgcagaggttttcatcaatttattatcttattttgattatttattaaaccctgttatgacatcactgtctttc

SEQ ID NO: 6358 - DNA, 775 bp, Zea mays
tttgctttctctccgtctcaactctcactgtttgttttgtttataatcaaagaagaccggccaagtacttggttcgcaagctgaaactctgtgtttttgttgttgatgatgttgttgttgttgtgtctcgtggtggcagacgaccagaagtgcttttacaccactgaccgggtggcgacctggtgcgtggactgggcgtgcaagttcggctgcctgatcgacgccaagcagtaccataccaagtacaagaacagctggtgcgaaggctccaggagaggcatctgtcactgccacttctgcgactgattctcacgaacagtcatctcgaaataaacaaatcatgtaataaaagccccgtggtcgtacgatataattttaaaaaacaccgattatagggatggagtcggatggaaaatgttgttcttttgtggtagattaaagccccctctgcctctggcaatagtataatgttatgcgcttggaaacaaacactggctacccttggaatgatttggatgacggtctttatatggcctccttagttactctaggcgttctagagtgtgcgtacaaatttaattatttggtttgtttttgttttagataaacattttttaatgcttcctaggccagtagccagtttaccatggacacagttcagtccaccttccttctcctaataggccatggtgggccagctcattcactccctttctctcccaccggaccaaggcccacagatgcccggcctactagctgcctcaaccaaaagtca

SEQ ID NO: 6359 - DNA, 789 bp, Zea mays
ttctgatgggcctttgtttcgtttcatatcgtggatgagtttttggaacgtgctctgctatgtacctaccctctctctctgcctcgcggggtctgacttttggagagtaggtaatgcgtgttttgattattattttctgcttatatagttttttttttttgcagtgctcacattatgccagttgccagggcagcaatttggaacgggatgcaggaaagtttcagcctcgttgtagttgtaggaacggatcgaagagtcaccgctgatcagatcgttgccccggccattgctgaacgcgtcgtccgaagctcagctggaggctctgtagtaaccaaaccatgcactaccaataccaaccaaccactgccggtttgtcggtacggtacgaggaggcgggccggccgctgacttggcaagctgtggcgcggcggtgtccacgccgcgcgttcgccgggtctttctttaggaggtgtccacgacgcacggcacaagcacaacacacgggcacacctctccgttgccgtcggccgtcgccgtcgccgtcgcggggcgcctcctgctccggcaaaaagaggcactactcggcagctcgcaaaaagaggcgctttgacaaacgcgcgcgccgccgccgaaaaggccacacgacgcctatctttctctttgggtgtctctctctctccttccatgcatcgctcgatcattcgctcggtgccagcagtcacacacacacgcagataggggagcgaacagggtgctgattcctggagcctgcctgactcagctcgaccg

SEQ ID NO: 6360 - DNA, 776 bp, Zea mays
agtttgcaaggaagcattttggcagctttcgtgctgccctcattttctcctgaaaagcataaacggcacataaccttgacagcagcatttccttgatcctctcgatcccactcgtcttcatcttctcctgcttcctgaaaaaagggcagggaccttgttgcattagaaaattgataataatattgaagtatagcatttgatattagattttttgtatcaactaaagatgcaactaaaaaactaaatatatccaattagctagtaaaattgtgcaccactgaaactttccaagatgatgagaagcttgtatccaaggattaagcattagtacactatctggcgagtcaaaaaaaaaaatgacaccaatagtctattgtagaaaattgataagatgctgtttagatgaaattagagttccctttgacacctaactaaacagcaagagctagaaaataacaaactagttattaactcatgtatctaacaggggaagctaggctacccacatttctgcatggtaatcatacaagcatacagcaccgatcaaaattagtgtataggcaaaggcgcaaagctccatgagccacaggtctgtttccaaagcttaggtacattatacagggttgtttgtatcataaacctacatggacataagttatataaccccacagctctcctaatgaactgctttagccattttctcaccagtgaaaggcctaggtaacgtcccaagagcacaccatacacaacacgataaccacgtgtatgcacacaag

SEQ ID NO: 6361 - DNA, 557 bp, Zea mays
agcaccataggaaggatgggcatgtaccctagctactgagcagctgggagctcgtagtcgccttatagagaagcagaagcccatgcctaatgaccaattcattaggcaggcacggggttttttgtttgcgttgctgaaactacgtgtagtaatttttgttttatagccttattaggctttctgtcaaaggaacatgtttatgctccctccaatgaaactacgtgtaacatgatttatgggtacaaaaaataaatgtactagaaaaatacagttaaaaaacatttgaatcccactactcgtacacttacacttacgttaattgtcgaaatgaactgattactgccattttgggctgggcgtgccatacaacaatcatggggcaacatgtaacgtacgtctagtctaatcagcgcttcccaaacttaattaaagctggtaccaaaccaaggtggtagctgctacattcacaacgttgatgcgccaaacaagctggtccaatagctacctaactgcatcacacatatacacagctacaacaataggccagaatatccata

SEQ ID NO: 6362 - DNA, 953 bp, Zea mays
ttgaaattggccttaaaggctccaagggagccccaatgccaggaacggaaggaagagtggcaaaggatttgaagaaagctcctgcctccttggaggaaagcaatgcttctcgtgatgaggatcctggcggagggcctgccttgactgggaagaaaaggaaggaccggaggggttctgcggatgacaacaggaatgtgacaagaagggtgttgaggtccgatgccatgaagctgcgggctgaggctgaggcaccatgtggagcgggtgtggaggttagcaaaactgacagtttggagaggaaacactgtgacactactgtggaggctgaggcttgcaaaagtagtgtgctgatggaagttacttgcaatggtggggaagccaacgaattggttaacttggactccagtgacgtctcggaagagtcagctaggtgttctgataataatatgggaatgcctagtgttcctgcaacagatttttctcaagataacggtttaggcacgcaaagtagcattgcagaatcagatattaagacaatgaagtcagatgagaagatgtctactgcaactctttcagagtgcaatgactccagagctggaatgaacagtttgagtgttgatgaggctcaagatgacaaagtgagacatgggccttgtcagggtgaggtcatagactcagcaatgggctaatgatgctggcacaagtacaaatttaatcaaaatcagccctaccagcggatcagaatctgttaagcaggagaataatgtggttggtaccgaggaagtgatactccacagtagcgatacgaaagttgagaagcattctcacattgacgatgtttgtacagaaactgagatttctttgactgataatggaatatgcgcagtatataaccacaccgatctaactggggtgcactaaggaaggaggagagggggcagcccccatgaatg

SEQ ID NO: 6363 - DNA, 792 bp, Zea mays
cttgcatgcctgcaggttctggtcccgctggaaccctttcccgcagatctcgcacacgaagcggttcgtcgccatcagcgtcgccggagacagagccacgacctccgcctcggggtctgacgacgacgacgacatgttcaagccgtccatcaagtcaagagagcataaacgagcgaccgagaaccaactcaactcaactcataaattaatcactggatcgaattacgacgagggaggagggaagaagcaggatcgatcgatcggtcggtcgtcgtccacccaccacctaccggggttgcctgggaggctccgctttcgcttgttattattgccggtggccgcagcagcagctggcgccgcgttggggccgacggacgcggaggaggtgaggttgttggacatgctgctctcccgatctgccgccgcagcttctgcctgtaggagctcctgctgatggtggaacatactaggtgaagtccaagccgccttcgagctgaggagggcggctagctagctagcttcgcctgatgatcttgcacttgctgtatactatcatatacacatcactactgatatgtgtgtgtgactgtgtgtctacctagctagctagctagctagctaggagaaggaagatagcggaagaaaaaggggtgtggtggcaggcaataaatcgagagggatgtatgcagcaagcaatctgctgaaaggcatgcatttaactcgtcaagaatgaaagaggggatgggcaagcagaagcagaagccgggcatcagacaagggggtatgtatggg

SEQ ID NO: 6364 - DNA, 784 bp, Zea mays
agcaggcgcaggctgcgtatggggcgcaacagcaacaacaggttgcccaaacaccctggaacccgtggaagggtacctgggatcagcagtcgctggcctctttcttcaacacgatgactcttcagcagccccaatccatcaccgagtggattgctgactccggggcctccaaccatacgaccctggactctggtaacatctcccgttttcgttctccaacttctaatattccttcatccatagttgttggaaacgggtctagtctgccggtcacctctgtaggagatacggtgctttctggccagttttatcttaataatgttcttgttacacctgatatcattaaaaatcttctttctgtccgtcagtttacgactgataataattgttccatggaatttgacccgtttggcctttctgtgaaggatctcagttctaggaacacaatccttaggtgcaacagctctgggtccctgtacaccatcagtcttcctactgcgcgtgctcctccagccactacacactacggccttgctgctgttactactcctgcgtccctatggcaccaacgtcttggtcatcctggccctgacgtgcttgctaagctttctagtattgttgttgtttcatgtaataagcccaaacatgtacttatctgccatgcttgccagttaggtcggcacactaagcttccgtttgcgcagtccatgtcgcgtgctactgcagtgttttgatttagttcatttgtataggccttgtgtgtgtgttgtgggggggggggggg

SEQ ID NO: 6365 - DNA, 1009 bp, Zea mays
caatcttccagtgcctgcttctgtccatcacttccagattcagaacctgaaaaaagatggaaggtgagtcagcctgccgtggaaaaggccataaactaattcagatggggaactgcggattctgcattcgcagcacaaacaaaagagagtacgaaaaccaaatgctatcactatcagctatgatgaaaatttcaggtcctgttaccctttggctatgcacaagcaggttgttttttgcagattgttatcacaacaggaatgtaaggagtaaggatgtagctgcacacggcacaccacgccccaaacccatccgctataaacaatagcagcatgagatgccccgtaaaataactaatcttactgaatctaaccacagatagaagaaggaagctgcaaaaatagaatgatgctctactgtggtgcacggagagtcctctccacggcacttgaggttttgtgtggtggcttaggttggatgaaaccaaaggcaaatttgttgatctcagtttttacaagtcatgactaagactaaccttaccagctccctattgatgataaaaaaaacgccatacaaccctaactggcggatgcttgatggaatagtaccataagtttctccatgccaacatcaacaaaaagcagagaaaatcaattattgcttacagctggggcaacatagtgccaataatagcacaagcttcatttctagcgagcaaagatgtattcatccagttacgctatatggattattgatactttgcccaatgacatcctaattcttgtaacactccagctgctttttttacaccaaatttcacagcaaacacaatctgttttttcatacaagtgtatcaattctgtttgaggacaacatgacaattttcatctaatcagtggaaatgatagggaagggggggggctttgtcccagaaagataactacatgcctggcaacagaatctaattttttgagagaaccaaatgcaaaaaaaattccccaaagtacaaat

SEQ ID NO: 6366 - DNA, 805 bp, Zea mays
  unsure (1)..(805): unsure at all n locations
aagtacagtacgctgctgcccgaatccgcatcgggaggagcggacggaacgcctgggcccacccgtcacaggcacacctactcctcccctccctactctgcacggcttgggatttgcttggcgcacccgcacccgcacccgcaactgcaaatccctctccccactccccagcaccaccgctcaactcaacaaagccgagcagagaagagccgaaccgagccaaaaccaaagcaaagcaaacccagggcggccagcggacggaacccaaggcgaaaaggaagccagcggaagcagcgaaaagcccacgccaccttccaatcccccccaaattcccttgcattccgttcccttcttcccttcccacacacctcctcctcctcctcctccgcgtctcttccccggcccccacatccgtcccccccctctctctctctcttcgccggccgccattgcgctcccgcattgcgccgggtcctaccagtccagcgcgggtccgtgccggcggcgggcatgatgccgcggcgcgtggcgtcggtgccggtgcccgactggctggaggcgctgctggccacgcgcttcttcctcgcctgcgccgcgcacccggcgtccccgcgcaacgagtgcaacatgttctgcctcgactgcacgggcgcgccgccgccgccgncgacggccttctgctactactgccgcgcgcaccgacactcgtcgcaccgcgtcatccaggtatacctggccgtcgtcgtccgggggaggagggggcgcgtttcttcttcttcctcttactttttctcttccctcccat

SEQ ID NO: 6367 - DNA, 769 bp, Zea mays
acgacgacgtgatcaggaaaataaattccctctgaagcttacgggttcgatggatcggacccttctccttggatctgcatgcgtgcattatgatctgcgtacgtgccttctgccattctgatctccggtgttaatacatatagtactccttaagtacccagttctgatctccataatggtctccttggagtacacatgtcctggattcggtcagagatcgagagccatctgaaaagagagattcatcaatgcagtgcaggtgcagtgcaatcctcaggggctaaggtgttgagtacttactagtagtggtatgtagctcctaatataattgccatcatggtcatcatcctgttcttgatacttggtggtactatcatccatcgtgtgacaacctcgcctcaataaaaacatctttaattatgcatggctcatagccttttggtacccccaaggcaaaaggagagaatgagagatctctgctatcagcttttttatttgcatgatagaggctgatgcacccctcttttcggatccaaattcaaaggccaaatctatgaagccacgaacgaaaacaggcgcctacaactacaaccacctttgttttattcttcactcaaagcatcagatgcaggcgatcgagctatctagatgcagtaggaatttccacaggtataatatatctaggtagagccatgcatgcatgcactcagtattagacatgcacacgcaattcgtattcatacagttatgtgcatgcatgggaagatcc

SEQ ID NO: 6368 - DNA, 768 bp, Zea mays
tgcatgcctgcagtactggatggatgagaactacctccacagctgcttcggccccagcggcgaggttcgttctctctcccggaggctgctccttcgatccggccttatccgtaccggatctatcgaatccagctagctttatcccatggctgagagttgattcgtgtatactgtgctgtaacaggcttggcggcgtagttttggacgcaaattctggttttgtaaccaaacagcaatgtgctttgtagtctgttagcctcggtagtagctaggcgccaactttcaggtcatttcaaatctcgcagttcgggcgacccagagtagttacgtaaatttaccctctaccaaatcatgatatgcacaatcgtgtagcatctgacatagacacatagtcatatgtctccctgccaatttgttacatgattggaaatatggactgaatttgtgacatgctgttgcaccattgtgttggtaaggtagcaacgtagtcacgttctcagttaaggctactgtatttgattaaatggattgtccctttaatacattggtcatcatgaatgtcagtgtttctttgagagacttgctctaccattaactatcttttattccatgcattactgattgccaattcgctagtcgtctgctattatgttgttataagttagtaacgtcatcaaacttttggttaagactactatatttggcttaaatggtttacccttttttcttgataacctggtagtactttctacatcaattaagaattta

SEQ ID NO: 6369 - DNA, 805 bp, Zea mays
ttgcatgcctgcaggccgtgaatcttaaaagcactgaagttatcgaacatccatatgtccaggtaatagcagttcaactgctccagtttgactaatattccctgttttatttggagtgctaagtctctcttttgctcctattcagatatttaatgaaggacatcaaaatgttcttgtagagatgttggaaatcataacagtaatttgtgaagagctcaaactacccatagctcagacttgggtgccatgcaaataccaaaatttattgatacattgtggtggtgaaaataagagttgcttcgatattcatgaaagttgtgcccaagaactatgcatgtcaacaagtgctgttatgtttcatattatcgatgctcatatgtggggcttccgagatgcctgtgtagagcaccacctgaagaagggacaaggggtttctggaaaggcttttatcctacgtaggccttgctttacgaaagatgttactagattctctaaaatggagtacccccttgttcactatgctcgtatgtttggattagctggctgtttttcgatatgcttgcaaagtgcttataatagaaatgaggactatgtattggagttcttcttgccacctgattgtagagaagatggtgagcaaaaggttcttttggactccatcttagctctgctgagacagtatcttaatagattgcaggtagccccctgacgaaggctcaaatgaagtttaccttcaagtcgatgctattactataaattgaaaatggagaatataaagaatgcacatgttacaacatatgaacct

SEQ ID NO: 6370 - DNA, 784 bp, Zea mays
taggatgctaaagctgtttcatatagggcatccacagttatcagtagagtgtaaaatgcattagttctaatgttgtcgacaaaaactgcttctgtagggtgagatgcagcagcttcgtgacaaacttgctattgcagagagaactgctcgatcggaagctcaattaaaggttaataatcacaatatccctttcgagctaataattttggcgtgggagtaattaattttcaactgaccattaaaatttatgcgaattcaggaaaagtatcagttgcgcttaaaagttttagaagatggcttgaggggcactccaagtggatcttgtcgtccttccatggaaggaaaatgtataagtaatggacctccccgtcgactttcactaggtggtgctgatagtatatccaaaatctctccaaacggtgtgttaatgaggaggtctccatctttcaattcaagatcccccctctctaccagcagttgtttggtcctgaagcatgcaggaagaacttcaaagtcatttgatggcggtaccaggtcattagaccagggaaaagttctggggagtggacctcattcactcaatagatctacggatgcagttagagattgtgagacagctgatagttggaaggctaatgcagaagaaaaaagtaatgaaaccgcaaacaatgattcagctgacatggtctctggtgtactctatgacgtgttgcaaaaaggaggtgggttccttgagaaaggcatgccatgagaaaagaccaaactctaaaggacaaagaaaatg

SEQ ID NO: 6371 - DNA, 784 bp, Zea mays
aaatttagcattacaccaaaatgcaaagaaatgtccattgttcaaaaactttttcctatatcatcatagtaattgaactttttcttggaatcaagtataaatgaacagataatgcttgaataccttaaaatatacgccttttttccttccagtgccatcatagcgtattccaataagcttctgtacaacaaattcatccttgtcaagagtgtcagcatcctcttgatcctctgaacctgctaaattcgaatccacatcttgatgaacatatttttcacataagactgcccattccttaaggagagcaagaaactcatcagctttctcatttcgcacctacattcaaaggtccaaaaaaactttttgagagcagctggacagaacagatggaatccaagatgcagcttaatatgcatacctcagtctgtggatgattgtattttaaactttggcacgcaaaactgttaagatcaacagcccatcgctgcaatcatagccataacagtagaatcagtggtaagtaagaacatgttctatccaacagataactaggtagaatattacagtttcaagtttcaggccagaaagagcagcacccaagcaaagaccagtggacatgcccccacagcccgaatacaagtcaagaagggttgctgtcctctctggcatattagatgacgtctccaaacccgcatcatcagaagaaatacccgaagcggtttactgcctgactgcccattttttaataaaaaacaattgtgaggttttgcaaaaaaacatacca

SEQ ID NO: 6372 - DNA, 830 bp, Zea mays
agagagggaagaggcaggggcgcagggcggctaacatcgctgccgcctagaggcagtgaagaggtaggggatctcgcgggaggcagggccgctgctgccacctggagatcccgaatcccgaccgccgccgcctggagctcccaaccgctgacgcctggagtgtttcgcgtcgtaaggctctatgtaccccgcggccctacttagggtgtttggttcttttagagcatgtaatccctttgccattcaattttgatctctcaaatctcctccattatcactgctcccaaaaaatccttagagcgtgtttgatttttagtcacccttttaaactttagtgattaaaccttattctctaaaaaattatttggaagacatttttgtcactccgtttagtattttagtgaataaaaataactaaactttagccattgaaattgaagtttaggaggtgggagacaaacacttccttagttcctaaactttaggactaaactttgtccttagaaattatatttggaagacctattttaatcaatctctttggtattttagttttaaaagatgggaaccaaacacccccttaatcctgcgtaccctaacatcaatcttttaccccaaaccctacaaaggctaagatcttcgcaaatcgaagcgccaaggtgacatatcaaaccctaaggcggatgcctttcgagttgctgcaagtttactatgacgccctagctgtcgaactcgcctttccacttaagctctatctaagtgatgcttaaatgttgcctcgagttggtctttttaggagagtacataatcatgttttagtttcattgaag

SEQ ID NO: 6373 - DNA, 942 bp, Zea mays
ggtggtcgacatagctggctctgtctctgtttctgtccctgtgcgcgtttgcacccaccgaggcgcgcgagcactgagcgagttatatggaagcagaggctgcgcgaggacgaggacgagggtcggaggagaggcaccgcagacgccacttatatgtagcgtggtcgtggcgtcaatggaagcatggaatcgaatcggcaagtgcagaaagtacactacatactacaggcgaggagagagggagagacgacaggcacagccgcacagagtagagaagtggtggagagccggatttaataattttcaaaagatatattaattatataatgtacatacattatcctatactgtactaatataatatatataataagaattcatttcaaattggtggtagcaggaggacggatactgcttagtacttattttctttccccgacacatggacaggaattttaaaaatgagttatgtatagtcccgacgcctagttgattgtgtgtcgtggcaggggcagccggtcaccgttgttttgtggatgaggggagtgaggtgagaccgtgagagtgacattgtgacagtgatggccggtgcttactgctctgctcagctcaagtgcccaaccccctagtgcgactgcacgagagcgagcccacacccataaaaaaagggtcaattagaaacatgacacttaacttttttaaaattaaatagcttgggcatccaaataaactagctttcgaattttgtaaaagtgagtaataggtaaataactatttctataaaaaaaaggggccctcacaaggacgcccctcttatttatttgatgaacatgacattgaccaatgctggaaaaatttcataaaaacagtactggcacgggatccatgttcttaacaagggcgtacttggaagcaaatgatttggattggaggtaattttag

SEQ ID NO: 6374 - DNA, 907 bp, Zea mays
acgtggatcaacggatcacaggggatgagcgaatcgaggtaaattgttggaacagagggaagggtcgcggatgaagggagcagaaggggagggaatggctggaaggagacggtccaccggcaatctttcctttactcccacttgtttgatgctggatggctgggtcatggctctgccggacttgtaggctccactttcctgcaagggtggaactgctgtctgcttcccacggctctttcccgagagcacacaactgtgccttccatttcccgcccacctgtgcttctgcgcctttggtttcccggctgcgcacccatgcagcacctgcctggggcaagtctgcacggagaagacgccaagctgcgcctagaggatgccttttgatgtagggtggacaccatatcatgccaggtcatggaaaggcagacacccagctttgaaaagctccaggacgccatggcaacacattgataaccatgattttttttgcatttgtagctgttatagggtaccgcttatgagtattattaacttggtaaagttgactcctttcaccatatattaaagagtgtagttactgtacatgatatgaagtactgttgtgctaacagtaatgttaagaaagttaaaggggctaactctgctatcctagtttcatttcttcttctatttcaaggatctagttcacatagaagtattctaatttagcgtctttttagtataaaaggtagcagtatgattactcaacttttgtagccataaacatcctaggactatttgatgcatgccttgtgaatatttgtgccactggtcaagtccatgttgtggtattttttatgctagccccattatgtttaaatagatgatgcatggaaaattggaaatggcagtgaaagtgcgcattcca

SEQ ID NO: 6375 - DNA, 987 bp, Zea mays
gcgggcgcccaaccggcagccggggcccgctggtggggccgcccgcccgcgcgagtgcggcaccgcgagtttccttgtttgtatttaattatacagatacattagcctcgccttgctcgacgtctctattacgtttcgcacctcgctttatctcgtattcacgtaacagatcttcggtcacactagtatatggttagcacacgaggaggacacgtggaaccttttttttagacagactattctattagcgttacatccaggggctcataagcaaaaactctcgcgacctgacgggtgagtgaccgcggcccactataaccaaaccaacctccccctcccgtcgacggcctctctgccttttccttttccttcccccgctttctccttccttcctcctccggtcctccccgctcccctcagcccagccaccggccatgtcggtggagacggagcgcagctccaccgagtcctccggggcctccgggctcgacttcgaggacaccgcgctcacgctcaccctccgcctcccgggctccgcgccttccgccgccgccgcctccctgcttccctgtccctctcctcctcgtcgtcctccgccttccccgaccccgaccgcaagcgcgcctcctccgacgccgaccccggccgctcctccccgctcgccgcgtcctccgacgctgcaccggcacccaagtacgccgcccgttttctccgaccaacacatgccttttccgttttttatttattgttactcccaggaaacgcgaggcgggcgctggcgcttgctttggcgggtgaatatgaggtggagtggagtttgatgtgcctcctcctcatttgttttggtggggcagggctcgtgtggtgggctggccgccggtgaggtcggtaccgcaagaacgcgctcgccgacgccgcgggctccagcaaggccgccaagttcgtcaaggtggccgtcgacggcgcgccctacctgcggaaggtgga

SEQ ID NO: 6376 - DNA, 794 bp, Zea mays
gcagctaaagattggggagtggacacactcccaacaacagcagaagctggattaacgggaggtctgatttgggtgctgcgaattctacagataatcgatggaaaggagctcctgaatgagaggacgaacaccgagaatcggtacctgaagaaggtaggcattggacactggacagcgcgcagagttcactcagtactcagttgctctgtcttaactcaataagctcgtttgatctcccttgtctctggcagaaaccagactcatggaggctagcttgccagactattgtaggcaacaaagagaactctggcaaggcaagctttgttttgttccccacacatcctgcaatcaacacttcacttccatatgcattgaaaaagaaagttgttcagtgaagtacttaaccatatacactgtcaactgtcatttgcatttttttaggttgtcgtccaacggctgccccagtggaagagatgaccgtgcagtgcagtgcagcaccacgttggtggatgatcgatcgtccagttgtatgtgactaaaacgccatgccctgtgcattagagaagagacagaatcgcctcgtcatatcgcttgtgaccagttctatcatctatgatactagtttgcaagtgtgggcttcggtccacagtatatatgtgggatatatatctgtaaacaaaaaaacaagcttgggcttcggtccacagtgtataaagctggttttcacaaatggagaccagagtactcccggtcagtccgggtgtatgttggtagttttctgaaaaaaaaaaaaa

SEQ ID NO: 6377 - DNA, 743 bp, Zea mays
ttcctccgcagtataaattctttggaggtcttcgagagcccatctatgcaaacttcgttcagcttttagaaaattaatatgaacaccccttggtacattctctacaatcctcctgaatggagcagcattccattagtcacacaacatactttcttttgatgatctcaactggcatcgctgaagatttaccataagttagtatcctcataagacttgtacatctcagagatgccatttagatcaaaagtccatgagaagcttgaagatggtcgctgacccaatggactggttcgacgtagatttgtagccacccactgaaacaaagaaacaacacaaaaaaaaggaatatctgttggctgctgtttcattggagacaacaagatagagtagcctgaaagggcatctcaataagctgttaaccatacccgtgcaacgtccatagaaaattgtcctttaacaagagcatcaacaacctcctgttttgaagaaacctaaatttcaacaataaaatgtaaaataaaaatgagtcctgaagctgtgacagggcaccaaaatgtattactcagtaaagtttttaagatatgtcttaaagtccaacctgctcaggcattcttctgagaaattcaataagttcagcagggtgatcttcaccatctcccccggcccgaactttgccaggagtagcatcaagaacccataccttttaagaaacagaatatcaagaaaataagcctaacagagaa

SEQ ID NO: 6378 - DNA, 865 bp, Zea mays
tagttactattaattatgtcattacaaactatctatgtggctatttcagatttggtattgtgctgttttaaattttgtgacttgctattgttcctttagaaactactttgtggctatttcagatccactattgtgctattgtgaatttgtgatgatttctagtttatgagctgtaactgtaacagctgtttggtactttagttgtttggtattttgtaaaaggctaacagctgtttgtaacagctactaaggcgtcgcctaggcacccgcctaagtcgcctaggcggtcaggcggtggctgggcgcctagttccgcctagccgccttttaaaccatgatttacagttcacaaaggccacctctgtaatgtttaccaaaaacagctagaccttgtttccccccaataattctgatgtttaaaaaaaagatccagtgccgaaggcttctacatgagtggagtctagaaaagagataaattggcaagctttcctctgtacgtggagatactgtttcgaacctacgccatggtgactcattgaggttgaaaagttctactgtttaggcaggtttcagttttacgttgtgtccaataaaattgtagtatattttcttacaagggtggaaagttgtaatttactgactaattctgagttagctattattcttttgtgtttggattttcattttgaggtgatggtatctggagttatgaaagaaattgttcagaagtgccagcttgataacattaatcatacagaatgaaacgagccaacgaggacacatgcagtgggtacacccttttcccaatttacaaggtggtcccgtcatttgcaagaaatatgggtgaccctgggttctaagaatt

SEQ ID NO: 6379 - DNA, 769 bp, Zea mays
aatctccaatcaaacacctatccatgcagactcagaagcatcagttccgatctagcacatggccatggcgacactttaaaaagtcagctttagcattactagagttataacttcctcatgtgcatgatttctacattaattcaatgttggatgcagtgagtttctaaaaaaaaaagaaccatagtagagatatttctaacatggacaatgtcccgacatcataaaatattttgatataggtggcacacatagaaaagaaggcaggtccaatgggtctatagaagggataaaccaaaacaagccttccccttgtatatgcggagaggttgcttcgaatccacgacctggtgactcagtggcatttgtataaaacacaaccaataacgaaagcatgtttaagaaactaaaaaggcactggacaatttttttgaaagcttaaaaatgtataattatcacagtaatcacctcttggttgatatcaatgccaatttcatcaagtacttgattcacaagctcctcagtttcttcttcttcctcatctccttccaaagcatcatctatggcatctcccatcacttcactcaccatctccatcctctcgttctgtcgctcaaactcttgcattatcctctgcaatcctggtagatttagctgcctgttcatttgggacattgcctttgtgacacccttcatggcatcacccatagcttgagttgattttagtgtctgcaacagttgcgcatatccaacgttaaggggaaggggaatg

SEQ ID NO: 6380 - DNA, 763 bp, Zea mays
gtaggtaagcatgatgaggacaagaacatggaccaaaaactagtaatgaaaccctggatgaaaagactggcctggagaggtaaaccagcacgtgcaaccatagcattgccatctccagtacaagtgtgtgctgaggttgctgagaaatatgccctgccataaccctgtgttcataaagcaaaagagaatttgtcaccaaagttggtgcaaacaaaagaaaaaatcagtacgccaaaatcgaaaggctccttactcctgtggctagaattgtattagaagcacggaaacggtgaagagttccatcctccatgtttaaggcaatgattccctgacattttcctggaatattgttgctagttaattaatatataaactttaaccatagttgaaagttgcaatgggcttcatatatcatccaatcaaaacaacagcagcatgaattgcattgtgaacaaaagtgcaattacataggaacacataagcaagccaaggttcatggaaaggcatagcaattgaaacaggccaccatagcaataatgggctaaggagcacacatgccaggaaattcaaaaataaaacaactaacagtaacaggagcttcaaggcatggtcctctgattcaccttttatatcttgccaatgcaaaatatcttaccttcattgtccatgagaaggggtccaaagcaaagtattccacaaaaaattgaatgttgtgcttcattgcttgaccatatagtgtgtgcagcatagcatgttctgttct

SEQ ID NO: 6381 - DNA, 826 bp, Zea mays
atgctccacatgagtctccaatgagggcctatatactaaaatatcatccataaaaataaggacagattttctcatttgagcagcaaaaatagagttcatcaaacactgaaaagttgttggagcattagtcaatccaaaaggaagaactctgaattgaaaatgcccatgatgagttttgaaggtagttttgaattcatcatccacagacattctaatttgatggaaccctgaagccatatcaagcctagaaaagtatttagcacctgacagctcatccaaaaactcatctatcacaggcataggaaatttgtttttgaccattagctcattcaatttcctataaaccacacaaaagcgccagctaccatcctttttttactagcagcacaggtgaggcaaatgggctcacactctttgtaataataccagaaaaaagcatctcttgtacctgcctttcaatctcattcttctgcacaggagagtatatgtatggcctggaatcaacaggtgcagagccaggaagtaagaatataacatgatcatattctctggaaggtggtaaagaagagggagtcggaaaatatcctgatggatagtccagcaatttctgaatctgtgcaggtaactgaggtgtcactacctcattttgctgtctagactcctgtaccaaaaccaaagcccatacttcattccctttgtaccattttaacagttgatcaacctacaccgtagcaatgtctgaaactccccatcggaaagaatgcccctgtaaatctaattggtatggtcccgccatggagaaaaaacttccatcccactttgggca

SEQ ID NO: 6382 - DNA, 860 bp, Zea mays
aagttcacctaggcaggaatccattcaggtggcagtgctaggcattgcaggaatccattcaggtggcagtgctagcaggataatggagataaaccactacgtgctcttgccgtgcacaaacgatgtgatgattaccctcacagagtgttttgaataatccaaatgtgactatcgcaactgtatgctcaaaagacaaagagcagaaaatatatataaaaaaacataccaggaatagtaggtggcgagccttgaggcccatagccaagctttgatgggatcttcaacttccgcttttcaccaacgcacattcccaggagaccctgatcccatcctatagagtagataaaggaattcagacagagaaacataacacaaccaacacaaagagtagacatgccaattaatcacctttgatcacttgtccagtgcccaattcaaattcaatcgggtcacctctttcatagcttgaatcaaaaaccgttccatcagtaagttttccctgtaaaaaaatcacagcaagtgaacataactcagaagatagttattgtgatcaccaagtattgtctagtatcacaatttcttgaaccaatgtagggtggttgaattaacagttctgctcaaagttttaaaaccgataataataccatttttcaaaatattacaatgcactattgtaaatgccccactttccagaatccaacaaaagttacaatgttttattggtaactggaattggcaataaatctagtggcggcggtgacaaaacctatggcatacagatacagacccagactgaatgagcttaagagaaacaatataggtgcgacaggtacttgtaaaaaaagcatttcagttaggtt

SEQ ID NO: 6383 - DNA, 726 bp, Zea mays
aatttaccagtcaatgtttgggttagaagacggatctattccagcaacctttcaagttctgtactattggaataactctacctttatttgaaccagaactgatccagtaaaatcttctttttagaaaaaaaatgaactaatctggtctagagctaattaatccctgtaaatgatacacaaactgggctactgattgccaaatatgttcttgtttgtgcaggtaatttacatgactggctggagggagcatccatcacagcaaaaggctaagagaaggggttctgcgaccatatcattcggtgatatacagaaacaatttggtcccagtgagaactgagcctcactgcttcagaaatggtaggtgaatactggcactaagttcatttttttattatttttcactatctctttgcaactgatctctctgctaacttttagttttctgttaccagtgttcccaaaccccactcaggctttgtttgggtaaagaggaactgaagtggattgaggtgtattgaaaggattaaaagggaaattagttcatgttacactttaatacaccccataccacctcaattcactccaataagagattacccaaacaggcctcatgtgagagcctccggagctgggtctaaccattttagtattcccaaacccttgatcgaaaattaaaaaaaaaaacaacatttgaggaaagaaaagaaatcctctggtggttccacc

SEQ ID NO: 6384 - DNA, 736 bp, Zea mays
acatggttataatgtagctggcatgaagtcttaaaaataagtgttgtgtagacagtgaaacacttgatggcaccatgagaaatggttccaataaggtcaactattaaggtagcagtttcacaaaatagtcatgcatgtaccatttccatgcgctactaaaatgtgttataaatcagtcacaacctaaaaaattcccatttttacttgcatataaataatggttggagcatatgtaatccatttgtgctaaaaaatgctgcatgtgaataatacagagatgtcaaccagctgaagtggtcaagtgggcattgataagatctaagcacaatagaaaagaactgctctagttcaatacaagaaagaaatagaacaaatgaacactccagcaagataaatactcgcatattttagtcaattattgtatttcctatgaattgttttattagaaggcagccctagtgcagtggtgagagctgtctttgaagcagcctctcaacatttgcaggggaaggcttgcctcagtttatcccttccccagatcctcatgtgggagcctcccacattgagtctgccctctgaattgctttattagtgttcatgcagactaactctaaaatgtgaattttggctaacacagcaaggtctacctccactattgttcctctatattggtcacctccaagatttccacagtagtagtaatactgtattaagcagaaaaacaaatagcactcta

SEQ ID NO: 6385 - DNA, 788 bp, Zea mays
tgctgcacactcagacatgtacaaatgaatctgcacatgcgtcacatccattacttttacaaataaatatgcaattggagaaagacacaatcgtgccggacgaaatgctcgtggctcgctggctcgctcggttcatggtcaattcggttcggctcagatcggctcgtttgaattttttctcgagctgagctgacatcctagctcggttcgttaacgagtcagctcgcgagttaaacgagctaccatattctaacaaaatgaaactatattcatatcatttataaaataattgatgaacatgttatatatatgaggtgtttatggcctatgaattaaactaattattaatgaactatgtttatgtgtttatttggtctatgcaaatataattatatgttaaactaatgaacatgtatgtgaattgtgaattagtgagtgatgaattgtgctaatttggtgtaacattgacgtggtttgtgaaactacgagtataattactatttttattgttaagttaatttaaaattaactaaaaataattattatgtacatattattttttctgttctggctcgcgagttaaacgagccagctcgagctcgtaaacgagctgagtcgagctgactctgtggcttgttaccttaacgagccgagccgagctggctcgttagcttaacgagtcagctcaaactcggacgagctgagctggctcgttatccatccctagtagtggctgaagtagctggtcttacttgaaggataatggggctggccattgaaatgaaact

SEQ ID NO: 6386 - DNA, 912 bp, Zea mays
  unsure (1)..(912): unsure at all n locations
aactaggtgtttaagcactacagaaagcaaggttactatgcacaaaatgtattaaattaccccagaaaaaacaaacatcattcgataccttctagaatttccaccagtattaacatgagctttcgtgccatcagcatcctcgtaggacaaagtaggtgaccttgacctttttgaaatgttatgatctgatgattgattctgcattgaacccgtgaatctactaataaagaagaaaacacattacaatagcataaacacacatgcaggcacacaagcaaaaaagcacaaggcgtttgtgcacgctgaatacgacagttttggacattgaatttatatttaactgtataatgacatgaaaataacaatattttaattttcattcaacaaataattacagtgtgaaacttggttttatcatccacgatgtgcttaagttagtattataattcattgatattcattcaaaaaaggaaacatcaacagaaaccctacaaacagtgagtgcatttactgaaacccaatgtgccccgtgtgatatcaactagagcattcctagtgcaactccaacatccaactggcaagacaatagacataaacaatattccatctggaatgctttatgagctaagacttctattccataaggacttggttattgcgtcaatattccatatggagtggattattgagttcaatcacacccacaagaaaaaaagaaaaatggaaaagtacatgccagaagaaattcagatcaaagttatgagcacttctaacaattctagctcacagaacctttcgtgtttccatgaacacagncatgtcttgttaaacccattaaatcatagatgatagcatttaaatactaaaaataccttacgtgaccaacatgggacaagatgaactactttccag

SEQ ID NO: 6387 - DNA, 835 bp, Zea mays
gcatgcctgcagatgtggaaatggtaaggatttggaaaaaatagctttagcaaatgaatgatgcatcataatatgcaaggataatgaaaaacaagaacaaataagtataccttacgcaatctcttatacttaatgtcatttggatgctctataacattcttgataatcttaaagagagtttgaatagcagactctgcctctacaggtgttgcttgcaaccgaagcatcttaatggacttctggagtcgtgaacagagggctctcactggttcttcaaccctttgcagctcattgatgtttgagtcaccaacatgatcgtcaggatcaggttcagctttcagaaccatggaatttccactctgttctgttatcatttctgtcccattaccagattttaaaacatcttgacaagtatcatcaggatcaggttcttcaccatgcttcccatcaatgatcaactcctggttagcatttgaggaatcagcagggtcaagttcatacttcacaactgtgatgtggtttgtcagttcactatccatttccatcgtgtttccatgttccagaacttcattactaccatcatcagggtcaggttcactaaggtgtcttacatcaaacctcagctcctggttcagattattagcatttgaggaatcatcaggatcaggttctaggcatctatcaaaactttgcttgccaacatcgtcaggattaggatcagagtaaccaatagtatgctgccctgcaaatgatagccccagctgctgaatccacatgcatagcataaatcttggatctgggctcttcccttcacaggtttcatggaaccaaaaac

SEQ ID NO: 6388 - DNA, 746 bp, Zea mays
tggtgggtgtggggagagatgtaactcgcggcggggtttgagtttgtgcgtaggtgcggcgtcgcttatgagcctgattatgtgaaattggtgcactaagttgtgtgtcaaaaacaggtggtggacttctggatcgtacttagggatttgcccaaacttccggtaaaggcaagtaaatacagtggtggttgctaccgtttggtttgcatcctattccctgtcattgagtatgcataagttttaattatgttaatcattgaattctatgatgaagtttatttgtttggaagtattaattctcaattgtctaatattgtggatgatcataatttggtaatgatatatgtggttgattcccatcttggatgaagttgaagtgtctttttgaatcacgttatatgaagtgttgtaggcatgacatgcacatcgcatcatccatcttgcattttgaagttatgtcgtgatcttatggtccgaccataccggtacatttttagcatcgtacggttcccgtggaggggtacgatgcggcttcatatccttagaggtatgaaggcagaagtcatccttgcatttgcagacatttgcactcatgaggtatatatatatatgaagtgtgacattactatgttactattgtggtctctacctgcgaggtgtggtgactaggtgtgttgtacgttgtatacgtgctgcacctttcgaataagaaggttgtggaatcaagtggtggtaaaacaatgttc

SEQ ID NO: 6389 - DNA, 706 bp, Zea mays
ggctaattagatgttggaatttaattataaattgtttacaaaacttgtggggaattttatttagatacctctggagtttttgtttgtcactactgctgttataattttaaagatatgaaatggttaagcagcgccactccagtggggagtgtggggagaattgttacccgcggcgggggtttgagattgcgcgtaggtgcggcgttgtttttgagcattgttatgtgaaattggtgcactaagttgggtgtcaaaagcaggtggtggacttccggatcgttcttagggatttgcccaaacttccggtgaaggcaagtaaaactgtgatggttattccgtctgtcaaatgaggagtcttatacttgattatgtttgtgctatttgtgttcatattcatattcctaattgagtaccatcatttgaaaatgttcatgttttattgatcacatatgtggagtttgaggtttgatcatgttacccatgtggtttattatttggaatgggtggaagtatatgtctagcacattttatttgggaagaactcatgttgttgacatgcataatgcattcatcatccattgcattgaagtttcgtcgcgatcttatggtccgaccgtactggtacaatgagcatcatatgttgcccgagaaggggtatgatgcagcttcatatccttagatatatgaaggcagaagtcattattgc

SEQ ID NO: 6390 - DNA, 794 bp, Zea mays
cagtttgatgcctgcagttcgaagctgtctttaatcagggtggttaatgccaagggagcttcatctcctacatgaccaggttcttcaattagctcaagtaaaaccataatcaacttggtcttaatctgattgtcctgaaaatgatcaggagaagcatgcccaagtgcaatcaagcagaggcaagcaagtaatcttgtgcgtggactccgatcatgtattaacccaactactgaacgaaaaccttttccatggtccgttgatgcaaatcttgaagcaacatcttggttattttgaataactgcaatgatagaacctaaacaagcatctcgtagattcatagaacatccaaaaagactaacaagtttctgtggaactccagcactgcatagcgacaattgttctgcactactctcacaagagtgagatacaatagcagcagccagctctgtgacattctcgttctcactgtccaaaagggaaagaacaaaatccacgttttccccactattaacatcaaactttggagctaatcttgattgatatatcattctaagagcacgtgcgcatgcatccacaacctgtaatcaagatgacgacattaaataaaatatatgcagcagcattatctacaatcatatcatacaaaacaatatgcataatcattaaccagaattggctccacttattgggtttaacaaagaagtttttcttgggttccacttcttacaattgtacatatcttacagcttaaaaaaagaaaatccaatgctggagtggcatacatgagtgggtct

SEQ ID NO: 6391 - DNA, 856 bp, Zea mays
agcttgcatgcctgcagttgggtttctgggatgagatgtgtggcaactgggagctacataattccatttgctgttaacatgctctgtagtataagggttttttatctagttaaaatttgaaataactacgggtttgttgaaaagaagtaaacaactttgctttagggaattatgatttgtggtttgtggttaaagcctgggaatgagggcaattatttgagctaaactgttggagaatatgttggttcagttaagctgagagctaactgtggtggttgtcatttccttttctcttcttctctatgcctgtttcttttatgtattctcatctttttggttgaagtagtgtaattattgttcatttgtgcttgaaaacaggagagtttggtagcgggtcaatggttaggtttggcgatggtgggggaggatgtgctggaatatatcttttttatgtttcattcctgtagaggtcgtctatactctatattcatttattattcataagtcagaattttgcatcccaaaaaatttcaacaaatatataactgtttggtttggtgaactctatattctgtggtggagactacagaatgactattatagtagatgggtaagaaaagaaaaagaagatgaaatgattactttggtatttcactattgtcacatctcaatattcatttcataaccatcattttcgaccttaattatatagtgattcttataaaaaaggataagcatgcccatttatctgacataatgatttatcagttgctggctttctttctttttctagtttatcactatgggacaaggtaatatctgatatttatatctgaaaattatttttgtgaacatt

SEQ ID NO: 6392 - DNA, 844 bp, Zea mays
cttgcatgcctgcaggggttatgaaattcatacttagtcaatctattaaaaaaacagacaccgcacaagaccgatccttttactggtaggaaaaaaaaaagatttagaaacctaccctcaggagaaatatgacacactcatcaaattgcttctcaatccggtcgatttccatctcgcatcgtgtcctcacagctgaagccgtcccaccggtactgagagtttgttctacattgtggaagtccagtgccaatccaagaatagtcttaactcgactggcaatgagggcccactgaaaaaagcaaccaatgtccatccttatccaagtctaaatatcaggatggtttattgactcataacaacatggcaaagatccttaccagcttatcagaggccacaaagcattgtcgttgaatagaagagagatatgcctcgtgaacttccatgacttcatccagtgtggtagcagccgtcatgccatcacaaagctcagtccatgcactatgataaacctactcaaaaaaatggcatgagtacgagacagagagtgatttaagggaagaaagtgagcaaacatatttcaactcactcggtccatgacatactgatgaaatgcatcgacaaaatggaggagcttctgtgccactattaggtgttgtttgaaattgtgcgtggtcctgcctctggcctgccaacagaagaggattgattcatggaaattaagttgtcatggtgataaactaaaccacatttaattgtcaactcccaacatatatcaatttatacaattcccagctttgtaaaaaggaagttcataacaaaggatgctgttagatggcgactaaaa

SEQ ID NO: 6393 - DNA, 903 bp, Zea mays
  unsure (1)..(903): unsure at all n locations
atcttgcatgcctgcagaagcagaacatatagagcactgtactagtagcagactagcagcagcatgtacatgcgcagatcagatggatgatgaatggtcaatatcgtcgtgttagtgatctgattattattgtatgtgaacctaatggagtgattttgatggtccatgttttctacagatttgtggcggctaagtaaagaaactaggttttaggctttgattttccttgtgagatgcatgtgtgctgtgcttgctgctgggtgagtgattggttcttacggcggcgggggaaggggaacaaaatatctgcgctcgggccgcattttaaaggcgaaaacaacgagcgggggaaggggatcatactactacgcaagtacgcaagcatggtggtttggcttgcttggtcaccgcttgacccggtccctttaggctgtagagtaacccgcttcgcttgtcgccttcgtgctcggttgttttctttgcgctaacgagcttcactcactgccatttcgacgacttcaaagaaagcaatccttaaggccccgttcggttgcaccggaataagccagaattcattccagctcactaaaatctatataaattagagaaataatccagctagaaattaatccagggctctaatcccaaacaacaacccaacagggcctaaggacaacctcaacctgtggccagcgagcaagtcctaccacaacacaaaacatgcgtctctatgctcaatcttctgcgcgccaatgcgaaggaagggggagctcaacgcatatgtgggcgacaaaacatgccgcaagctctgctcccacatctggancgacatacatgcgaatatgaatcttgggattctccctaaaatatcattaccagggtnataaaaaacacaatttccat

SEQ ID NO: 6394 - DNA, 787 bp, Zea mays
atctccgggtgaaggcactggaggaaccatgtctgacgatgaagataaccaggtggatagtgaagccaacatgttcgatggaaatgatggatcagacggtatgggctttggccccctgatactaacagagggtgaacggtccttagttgagcgtgtacggaaggagctgaagaacgagcttaagcaggtaactctctttgaaaatgcttaattcatcatcgtttatagtgcattgttgactaacaaaacgtttcctacctctagggttacaaggaaaagcttgtcgatatcagggaagagatcatgcgcaaacgcagggctgggaaacttcctggagataccgcatctgtactgaaagcttggtggcaagctcattccaagtggccgtacccaactgtacgtgacaccgcgtcaacttaattccctcgttagcttctgctatcaggttcggctcattgatgagcaactctttgcttactcgtccaggaagacgacaaggccagactggtgcaggaaacggggttgcagctaaagcaaatcaacaactggttcattaaccaacgcaagcggaactggcacagcaacccaacatccttggctgaaaagaccaagaagaaaaggtatcacaatgaaaactgctttggtgttgcctaagggcgtaagcccagacaggcttgcctgcggcttgcaacattttttttttactactgttttcaacacgtggaattggaaacattgcaagtgatgatggcccagagcaatcttggcaaaaagctagagatgttca

SEQ ID NO: 6395 - DNA, 545 bp, Zea mays
atcttctagcacagcagcttcccacttttgatgaggtgcagtctggtcaagcaaccttgaagtcatgggatgaacaatacaagaagtaagatattcttggagacttggagtttgtttacttttgttatcctttttagactactttttttatataaaccttgaacatttttgcaggcttcgtattagcttgaggaatgctaacttagaagcaaaagacaacattagacaagctgctgaagaggaggtacgcgattatgcctggactttgatgatattgatccaagtgatgagctgtctgagtggtacatgcttctagggctcatttggatggctcctggccggagctgcctggcccaggaatccatcccaggcgtccgattttggtcgcatggggctaggatggttgcctggccggcgagctgcctggcagggtagcaaccaaacaggcccctagagtgtcaccaatcaccaatgcaatgtgaaagattaagaattcatgttaaattttaaggacctatgctttatatgcaggatgagttgtgaga

SEQ ID NO: 6396 - DNA, 749 bp, Zea mays
atcttctagcacagcagcttcccacttttgatgaggtgcagtctggtcaagcaaccttgaagtcatgggatgaacaatacaagaagtaagatattcttggagacttggagtttgtttacttttgttatcctttttagactactttttttatataaaccttgaacatttttgcaggcttcgtattagcttgaggaatgctaacttagaagcaaaagacaacattagacaagctgctgaagaggaggtacgcgattatgcctggactttgatgatattgatccaagtgatgagctgtctgagtggtacatgcttctagggctcatttggatggctcctggccggagctgcctggcccaggaatccatcccaggcgtccgattttggtcgcctggggctaggatggttgcctggccggcgagctgcctggcagggtagcaaccaaacaggcccctagagtgtcaccaatcaccaatgcaatgtgaaagattaagaattcatgttaaattttaaggacctattctttatatgcagtatgtcttctcagaggttttttatgtactcatttaagttcaaaagcaccattgaaactaatgctgctttagttttttgcaatttccctggcaaaattagcaagaaaatgacctgtaggcaccctaccacctttttagagcatcgcaagtgccattataacttggctatcggtttctaattgacttttctctagagggcacttcttctaagccgtggtg

SEQ ID NO: 6397 - DNA, 775 bp, Zea mays
aacataatgatcgatcgagaaattcgagagtttaatctgatggttgcagaagcttttttttcttttttctttttttgctatttagatgaagcttgctttcgctctgaatacaagtgcgtttcgattcaactttaactacaaagcaggattctcgagcatgtaacttgcatctcagtggagacagaaacactatattagctttgtgctttaggagttcaggctctgtggactgtaaatatgtatcaacttgttaggtgtaggatatctatcctcgcatgcgtgtagatcattaaaaatgagttaatatgtcctcctaggtctggtttcgttccttgctgcatatttcagttctcgcaatcaaaataacaaacgaacactcatcgctgctgattggatctgctattctgcatcgttagcatacgaagtcactatagttcactagcatatccaaccaaaaaataaaaatacaagaaagctaaagacgataggaaaacttcgtactttgagttgggtttgcatcaaacgcctcatgaactacaagctagttgagctaggcaggcgttcatctctgtttttcaacaaatactctcggattcatacgccatacaacaaataacttggctactcatcatcctcggccttagccttctttttcttcttcttcttaccatcggtggcggtcttaggttcagcttcttcggaagcttcacggctcttctttttctttttcttaagggtagtatctgctgcaccggtctccttctgtgcctgctct

SEQ ID NO: 6398 - DNA, 816 bp, Zea mays
aaccatcattgtctgaaccttttcgctgtagctttatgatgcagcagatgtgtttgtaggaaaggtttatagtaggcgcgttaagccacagggggctggtaaggcctaatggattggctgagccatatgggccaccaagataggctagaggccttatccagattagattgggtcacaggtttatctcttagttggttttggagtccctgttatcacggcatggcctagattataaaagcctggccatagaatgtaataggtatccagaaattaatatatcctccagtttggagggttacctgggtcaccctgggggcacctcgccgcatctgtgacacgagtaacactccttgtcccatccactcgtataatctgcgttccttgtcttctctcccgacgtcttccctgagatcggcaaccaatccacatcactttatctctttacactaccacaactacttattctacttattctacttattgaccaccattatttgaattgtgtatgcttaagatggttgttgacatgaaggaaacaattctcttctatctgcctcctgacaaaaccaatggaacactgtttttgctgagactatctacttgttttaattttagcaggagggagcatctgaagatgacataaacaacctatccaaattcaaatttcagacaatgagtgatgcagacaagctagctgctggcattgcagcacctgtgggtggagtgatgacagagtgtggtaccaatccttctgtcgaacatattctcttagctgaagatgcaataaatttttcaagtttattaagttttaatgac

SEQ ID NO: 6399 - DNA, 1399 bp, Zea mays
ttggccaccgtcttaccattcagggacggaaatattccaacccccccctcatataagagagaaaggcttcaatagtttagattttttggaccggctttgggttcgagtgttggaatttattttaagccaagccagggggtattatttccctttaccccctagcccattggcaaggcttcgttttctttctaaaagtgttttgtttccccttgtttccttttcccaaaactggctcacttgtttggttctaatctttcttcctcctcccctcctcccgagtcccgtccctttgcggatttagctcccacccagtggctcagctcaactcggaccattgagctctgaccactaactcaaccactccagatcacggcgggcactggtgcagcaatagcaaccgggtccaagtccaagaaatgagctcgcggggtcccgacccggcgccgcccggggacgagcaggagacggcggaggagctgctggagcgcgtccggggcatggtgccgtcggcggcggcggcggcgcgggcggcgggcgggttcccgggccggtggaaggcgatcgccgcgaagctggacgcgctgccggcgtgcctgtccgacctgtccagccacccttgcttcgccaggaactcgctgtgccgggagctgctgcagatatactagactttcattgttggttcacaattaatgacctttgaattgtggaattctgaagtggtaattagtgaaactataaaatgttttgtcacaatttatatgtttctgcttctgcccttattttggatccaaatttcagttgatctgaactcacatctgtcatttgtggtttgttcatgtagtttgtttattcagcaaccatataaattaagaacattctgataaatggtatttatgttttaactgcactatagccgcctgacgtcacatattaagttgacagaatgaatgaatgcttttctacagtgaatcatatggcttacatcacatgtctctagagcataaatttccatgttttctctctggcagccctctttccctcactattttctttccaaacattttttcaactggaattcaggtacttcaagggtcctgagcttcttgttgacttgcaagattatgattactctctggacatgtggagtctgggctgcatgtttgctggaatggtattacccacacgactattatacctatttgctgtcatatccctttttttagtatttcttgtgattccttatagacatgaccaatattaatatatttatcatatgctgttggttgcagatttttcgtaaggagccatttttttacggtcatgacaaccatgatcaacttgttaagatagccaaggttgatattcagtctatttgttgtttgcaatgaactagtcaact

SEQ ID NO: 6400 - DNA, 801 bp, Zea mays
attggattttggaagaagttcaacctcatattccttttctttctccttcgcaagcttattttgcccttctattccttcacccttttctgtatcattcttcccatgacaatgttcattcctgaagccgagctccctgcctgggtcgtgtgctacattccggcaaccatgtccttgctgaacatcctcccagcccccaaatcgttcccgttcattgtcccctatctcctgtttgagaataccatgtcagtaaccaaattcaacgccatggtttctggcctgttccagctcgggagcgcctacgagtgggttgtcaccaagaaatcaggccgttcttccgagggcgacctcatcgcccttgtcgagaagcagcctaaacagcaaagggtagggtctgcacccaaccttgagtcacttacaaaggagtcttccagtctcaaaagggactccaaaaggaagaaacacaataggatatacaggaaggagctggcactctccttccttctcctaacagccgctgctcggagcctgctatcggtgcaagggatacatttctacttccttctgttccaaggggtgtcgttcttggttgttgggctcgatctaatcggtgagcaagtcgagtgatgcggtacaagggagagtaatggggtatctattttgctgcgagtggggggcaatgcgaccaaagaggcacttcaggtaaaggcaagcgtggtacatgatccaaagaagatttgattccggattaagaaagggtatatagtttcatcgggggataccttgaaacggtgaaaatgtgga

SEQ ID NO: 6401 - DNA, 737 bp, Zea mays
ggacgtgccatccccgatgtccctacgtgtagaccccccccctggtaagtagggatgttgagctgtggggaaggaggtgggaacagcaggtggcggagtggggggaatgcattgatgccgaacgacgaggaagtgtggacattgggtgctggtgctccagatggcggtggagaaaataaatgaggctgggaggaatctatggcggcggagacagaagggaggaggcggacgacagagatagaaggaaggaggcgggtggaggtagcgacagaagagaggaggatggatctttgatggtccttctattttttttttcttttatttcaagtaatatgtgttatgtgtaaaacgcctaggctcatctaagctctaggtggagggtcaccacctagaaaacgcctaatgcctaatgcaactttgatggcaatgtttggagatttgattagagaccgttagagagttttttttttcaccataatttctagtcctatcaacaaggaaggatataaaagatgctcttgtgattgctatcatctgacctatttagcgaacatgacaatctgcctacatgtaggtttgcagctgcatcccaatcagctcgaatggactggtcttcatttaccaagggttacttcttgaacagagataccttggttggcgtacttcttcttattgatgccagtattccacctcagaaaattgatctagactgtgctaactggctcggtcgtaacaat

SEQ ID NO: 6402 - DNA, 752 bp, Zea mays
agaacctgaagtatattgatttcataggtggttcttgctggatcatgtaaagctccatctcttataatagcttgaacttatacatatttggtacttgttttaaatttataatgcacaaattattgatattcgtatagatgagatgatatgatatgatccatgatgttcttctgctacttcagagctctctttgttctctgtgactgacagcaagagatgaaccaacgtgttttgttgcattgggagcagaggctggagataatcgtaggagttgccaaaggtgttgcttatctgcaaggactaagaaaggaagtgatacacagtgatctaaaaccatccgacatactcttggatgaaaactagagagctaaaattgcagattttggcaccacaaaagtgttcgtggatggccagacgaatccaacacttgtacaatagagtatggctgaaacctgacctcctcgtctgctgtttcaattcaagtacagtagaatcacttggtaacatgcatatataacatcagttagctatgatgtaagcttcctaagaatttgttttttttcatagtagtatttttccccaaactaaactgcaagataaagttgtggtaacaaagtgtaggatttatcctagccacctactctatagtgcacattttttgcttctgttctgttctccatgcgtgccaatccgtcctcaacttactgaacttttttttagaattaaatagcttactaaactgtttatattgg

SEQ ID NO: 6403 - DNA, 840 bp, Zea mays
tgcacgggcacgacgccgtcctcgtcaccctggaacaggtgcaccggaaacggcggcttctcgaggtccgtcggctcgaagtccgtccacctcccgaacatgaccgtcatgtcgcggtagaaggactcctgtaccccctgctgcgtcgccagcctcgccctctgcaagaaagaaaggtcgaagtccgtttcattgtggtgggagacagagagaagctaactaaggcagggcaaccgagcgaggggagagacgaaccgagtggaacatgccgttggagagcgccatgacgcggttcttctcgtccagcgcgttggggaagggcgcggagccgtcgacgacggtggaggtgggcagccacggctggctcatccaccagtgcagcagccacggcgcgtagtaggcgacccggagcgaccactggtcgccgaccggctgcctcccgtagagctgccgggccagcccccgcggcagcccgcgccagcggtagttgatgaccggcgccatcattgccagccccgccagcctgtgcgggatgtacctgacggcggcccagccggcgtgggagcccgagggaggagcagacgaggtggaacttgtcacccagacccagcgcgtcggccaggtccctggatgtccagcgcccgcgctctccggcgaccgccgcgggtccggggtcgctctcgccgtacccgggccccggtccgaacgccaccatgtacacgcccagctcctccagcagctcctgcttgtgtttccatccagagcaattggtgttacgtacagtacttgactttccatcacagttagaccacagttacgcgttgagcaccccggcgaccc

SEQ ID NO: 6404 - DNA, 826 bp, Zea mays
aagttctctttgcattgctgatgccctgattgcggcttcaattcttggacctgctaaggagctgagcacattacatatcttatcatatgcaggaccttgcatacacacatgtcccatggtcgatctgcaaaggaaccatcgaaagatgtcggcatggcgctgcacccaagggatcacgcatatttaatcgcacaacaggaacataaaacgttaagaaatatgtacgtctgcaatttcgtctccttcaaactatggtgttgtttgtgttgtattgaactgccgcgtgtgagctgatccaattgttttctattgccatctttcagtaactatatacgaattgttcgttaaacattgacagttttgaataagaaacattgagatatcaaatttgtactttgccggccccagtgtgatgaccatctaagagtatatttgtttgagttgtatttttttatgttttctaaaaagcggttgttggtttttttgacgctgagagtcgacgatagcttttttcgataatgttattagttttctaaagttaggaagctcgaaagaaatctttaaaaagccggccctccgtttgatcgttctgtcgccgtcccctcctcttctgtcctaacccaactacaacagccagtcaacacaatttcccccacaacttgtgtggacccagacgagagtggaaggcacgagcgacatcatgactcatgagttcctgaaggtatgcgtcccacggttgtatccgtaggtaggagaggtaccacctgacgaacttttttaaccccatctccaggctcgtcgtgggcttgtagccgaactgctcccg

SEQ ID NO: 6405 - DNA, 770 bp, Zea mays
tgcgctggggttttgcttcttctgatgtggagggttcggcatttgtgtgccatgggcgattcggtccctcggaatcccatccggaaggagggtcttctgatttgggctattttttctctctctaggttcgccaggtcgtcggttacttttgctggtcacttcagtgagctcagatgaagttttttcatttcatttcatttgaccctagaggcttggtctttctttagtgcctctgcctcgaatggtattagggatcagcgcctttatggttttttaatgttatccaaagctccgcaatttttttactgacatggggtggtatgcaatgattcctctttctaagattctgcttgtttctgctgtgctctcaggtggaggcatcgacaaaccatcttgccgagcatcagggcacgcccctctacaacctgccatggaagataccctgcaagctcatgaacatggagctgaaggtaacaacaacttggcttctttgctgttcactgtacaatgttctgaatgcatatgatttaccctcgtttcctttgctaggctgagccggatactgatgaggtgtacgcccagctcaccctgctccctgataaggtgggtaacttctggttttgcttcatgcatgctcagacttggaatgttaaccagtgctaatgtgctatctacttatgattgtgcttgattcatagaagcaagatgagaatacatctgcaagagtggagaatgaggaggcagaggaggaggtggtgcctcatgtgcca

SEQ ID NO: 6406 - DNA, 807 bp, Zea mays
agaccccagcggcgctcgcctccgtctccgggaagccgcggtcttcgtacgtcgtgtacctcggcggccacccgccgcgcgccgacggcgtgttgccggaggtcgcgtcccggcgggccaccgactcgcactacgacctcctcggcgccgtcctaggggagtaagcgccgtgcccccgctctcctcccgcgttaaccttcctgatcgaggttccaaatataacgatgtgtgtggactgtggatgcgatgcgttgcagccgggagaaggctcgccaggccatcttctactcgtacaccaaacacatcaatggcttcgccgctaacctcgatcccggcgcggccgccgagatcgctagtgagcccccagtcccccaccgactgatcgaacggaccctctcgtgatctatctatatatatatatgtcgcgatcgatattatattcttttttttttctgaaccttgatgcacgtacgtgaacatgccatgcatatcagggtaccccggcgtggtgtcggtgttcccgaacaggggccgcaagctacacacgacgaggtcgtggcagttcatggggctcgagagggacggcgatgtcccgcagtggtcggcctgggagaaggccaggtacggcgaggacaccatcatcggcaacctcgactcaggtacatctcatctgtcgcatcgccatcgatcgcctgatggagtcttctctgtaatttgactcgctcacattgcgactgctcgtgaaggcgtgtggccggagtccaagagcttcgacgacggcgaaatggggcctatcccaaactactg

SEQ ID NO: 6407 - DNA, 928 bp, Zea mays
tcaaagataagggattcacaatgtcgctaacccattgccaattatccagtgcctgagcaacaattcttgaagaaatggatctgctgcccaccatacagacaacttcaggggaactcttgtatcatcttcccatttaaccatctgtccgaccagaaaagtgtattggtcccattccctatcacatttaggggatctgctttactgatttcatggcgacaagcttatactgccattggatatgccacaactggatgagcaagtgactcgctgctttaaagataaatttgtagggctgtactatagctatgaaaggtcatttccatataacacaaataacctgctaccatgcctacactatacacccagatttcttttgctattgtcctcctatgtaatattcaagtaagttggcacattaagaaattttgggatttattaatgatgcaatgcatatttatagcatgtaggtattttttttttcataaagattcatctatctttatggaaaattaaaaagtggactttccttttgtaactgcatctttctatacattgttggtctggtttcttccatcaaagtccatttctatttattaattctgtgaaagtatgatgagtaatataaaagaaaactcattgttgtggacctgcatacatatatctgatggtgatcttacttctaataatactcatgtggttgcattctgaagcagctcctgttgtcgacagtgcaacccagcgtctcctggaggaaaataatcagttgcttaaccagatttctgcaaataatgaaacattcaaggtctgtttttaattatacatgtcctatgtatggtctacactttgcccttttcatactcttgagtgtcaagcccatgggtcctggggacccggaaaataattcatatttaaatattgggggtcaggc

SEQ ID NO: 6408 - DNA, 763 bp, Zea mays
gcctcgtcccgggcggcaccaagatggacacggcgtccatgctggacgaggccatccactacgtcaagttcctcaagtcccaggtgcagtccctggagcgcgccgcccaccgcgccgccgcgctcggcgccgccgcctacccggccttccacgcgccgtggcagtacgcgctgccccacggcgacatgtgacgcgacgcgcgcgacagacgaacgcgcgcgcgtgccggtcgatcgttaccatcgagctatgctagctagcgcttcggccggccggacggccagcgctctccgttgttggcgtctcgacgggacgacgacgacgtacggccggcctctctgccgatgctcttgtagcgttgtctctgtgtgtgtgtgtgcactgcatcgtgaactagctagcgcatgatcgcatgcctgtgtaaagacgtaggatccttgatacatttattgcctgctgtagccgcatacggcatacgacgtggctgctccaattttttgttggagtcgcagcccgtgcatgcgcgtgatcgatgagtacgtgtacgtgctggtctaccctacgtaggctgtacatttacattgtactaccccttttttatctctctctctctctatatatccatgcagggtttcttcatctctctctctctctctctcttcgcacgacacacgttagcttttcgcggcacaccacagtctacagggtgcgtgatgtgaacgtgatccttaaaattttcgttcgcatgcgccccccccccccc

SEQ ID NO: 6409 - DNA, 780 bp, Zea mays
tcaaaggaaacaaacgaaaacgaaaaccaaattctgctggacaaagacctccgatccgttcccatcggttcgctaatcgtatccgactctgctgctgctgcctccgtgcctcgtgctttttgcggattcaagttgttgctgccgccatcaggccgctctcgtaccttctcatgtgctttccagattgcttcgtcctgccactttcgtcgcccattcatttttgtctcttttgctttctccccaacctcacgatatatagagatatatcactagactctggttcctagagacctcctgcgccttctcgatcaccttctttttaccaccgcagttataggacgaaaatagtttactccttccattctaaaattattgtataccagttaagatctctcttaagttaaacatctctagtttggtagatcgaagaacagattcatgacgaagctgctgcatcaaaaaatgttttgacaaaaaaaatcagatccaaatctatttccagtaaacatgcgcttacgagcgcccggcaaaacaacctagctgctattcccatcctggaaacgatgtccacatcataacatcagccaaaactgacagcattaccacgtagtgaaccctcggaacatgcagctggaatggtcgatccagcaacggtgatccactcattcactcgcaaggttgtgactagagctagtaatggactctaaactttacactacaaaatataaggatcaggttgcattaagatcaggtctatttttatttattttttgacctaaa

SEQ ID NO: 6410 - DNA, 752 bp, Zea mays
tcctgccgtgctgccctggtcgacccgactaaacattgcagtaggcgccgccaagggtttggcgttcctccacgacgccgagaagccggtcatctaccgtgacttcaaggcctccaacatcttgctcgactcggtgagtggtttttcaattttcctctgcgatcgattagccatgccatgtcatcctggttgactaagctacttggggctgacgacgatcgaattcgaccgacgcatgcatgcatctccgatccaggactacaaggccaagctgtcagacttcgggctggccaaggacgggccggagggcgacgacacgcacgtgtcgacgcgcgtgatggggacgcacggctacgcggcgccggagtacatcatgacgggccacctcacggccaagagcgacgtgtacagcttcggcgtggtgctgctggagatcctcacgggccgccggtccgtcgacaagacccgccccagccgggagcagaacctggtggactacgcgcgcccgtgcctcaaggacccgctcaggctgggccggatcatggacccggccatggagggccagtactcgccgcgggcggcccagagcgcggcgctggtcgcgtaccggtgcctcagcgccagccccaagaaccggccggacatgtccgccgtcgtccgggcgctggagccgctgctcgacctccacgacgacgtgcccgtggcgcccctgggccacgccggccccgtcgtgctgttcgtaacggccgccg

SEQ ID NO: 6411 - DNA, 749 bp, Zea mays
agccctgcccaggcgcagcgcatcgcggctttatttatggtctggagtctggacgaagcccccctgacgcagcgacgcaggaggtggctggtgctggtgcatgggcgcagacgaggccaatggcgttgggacgtcggcgccgtgccgggtcgtccggctgcatgcgagacgcggacagcgacgtgggagacgacttggtgctgcgcgatcggttctgtgagctatagacaacgcgtgttagcgaatgcctgtcgagattccagagctgccgacggacgtcatctggaggcagctgaaagtttgttcaggaatcaggggcgtctgttttaggaatcagttcatgtgttcaggtagctaagctgtttcttcctactgttttgagtacactaataacagctactcctgaaaaggtctctcttacacctgaattacacataagattaaaggtattgtaacaattggagcaagaaattcgggtatcgaagaaggaagttttttgcttttttttttcttgaaattacatccaaaaaccgtcacatctccatgaaaaggatttttcttgtactaccgttttgtttggtttgtaaatcaccaagagagtatagtcaatcagaagaaatcatgatgcccaaaagccaatcactgctccatgatttataccctcttgtcacatgcccatggcctgtacgtacgcaaacgtttttgttcgtttgcgaattgccatcgtcgcttcatctgaatacaagcgt

SEQ ID NO: 6412 - DNA, 863 bp, Zea mays
ttgctttagtaacctgaacaacagcaagatcgaccatggtacacctgcctcctttgccacttcacgcttaatttcacctatttaataatgatgttactgaaattttgtcacacattaacaatgcagctaaacctctggttatctctcataatggtgctagcggtgactacccagactgcaccgaccaagcttatgaaaaggcagttgctgatggtgcagatgtcattgactgtcctgttcaagtgaccaaagatggcatactgatatgcatgagttctgttgacctaatggatgttactactgttggaaaatcatcatttacttcgcaagtaactaccatcaacgatctgaaggctggtcctggagtcttcaccttcaaccttacttgggatgatatttctaagaacctacagcgtaagttgatttgataccatttcgcctactttttgtaaacctgaatgtttgctatgcaaaatagatgccaaatgtttagatatcctcatgtatatatagttatgctaagtcatcttttttgtgcaattcataactcgtgaatagttaatgtgtaatttttactgcactggtcacacatttgcttcaaaactaacaattttattggcagccatgatatcgaacccaatgagcacctataaactgtacagaaatcccagaaacaagaatgcaggaaatttcatgagattatcagactttttgacgtttgcaaagggaaaggatttggcaggaatcatgataactgttgaggtaagaaattaatgtatggataaatgttatatctgggggtcctaactggccctttgagtggacattggagtcgggcttttggggttggttccaaaatttct

SEQ ID NO: 6413 - DNA, 857 bp, Zea mays
  unsure (1)..(857): unsure at all n locations
agacgtgaacattaaacaacgctatcctgagtggtgctttgatctgtgaagagtataaaatatatacagatgagcaggtacttgcctgaattttccatccttgaatacaagctcaattaaagcatctctgagatatgggttgggatcagtcagtagccttttcgcaaagtaagggtatgatgcagcaagcaccttaaaatcagggtcagcatagagtgctaaaccttccagtacggtgagcgatcgcagtatcaatgcatagtatgctggtactggaattgaataaaagctttagactttatatcacactatgagaaaaataatacaaaacaaggagctaatatttgtacaatggcaagcttaccattgaatgggtactgatagagaacagcacctaggccatcaactattgtcttgaagttcaactcactcactgttgcatttagtgcatcatcgaaaaaattcttgagagcaggcacaatcggggaaacatctacatcgggttccaagaaatctagtgcataataatcacgagccattgcttcgtagtccctgttgactaagtggacaacatgtcctataatggctaccctcgcatcctctggtgtttcactcatcatgccaaaatcaagaaaagccagtttcccctcaggtgttgctaatatattaccaggatgagggtctgcatgaaagtaaccatactccaaaagctgtctcaagctacactggataccaatgttgaccaaatccagaacctttcatccttgactttcaataactgcttggtgttttaantntacaccctcaatcccactcattggtagaaacctttgcactttgtgtaaattcccaaaata

SEQ ID NO: 6414 - DNA, 791 bp, Zea mays
agcttgcatgcctgcagtgtgcctagtgatgcttaaatcttctctctttttctggcatcactcagggagcacattatggagggccttatttcccctattttcagtcatgaatgtagctgctgttcgctttcagatgtgatcttggtttggcatttcctgtgctaatgtgcagtagattcgtttgtaagcttttgaattgttgatgaatgtttgtagtccatctagtcctgcatttttctgcacagcacaagttgtctgtagatgatttgcaagcttgttcagcatgttaaaaaaaatatgtccactaaggttagtatgtttgccttcacagttgggagtagaatcataaatctgttcggccctggaacttgtattgatgttagcatactgtaggcgtacttgtcactctcactagaatactagattataaagttcagttgactcacatatgccatatgcgtgattgaattgacatagcttgtagtttgcccgtatagcattcttattgtcaccttgatcgttctcttggaggaatgagtgatatatctcttatcttaactgatgtcacattgtttcagggtatgattgctggacatgtgtactacttcctggaagatgtatacccacgaatgactgggcgtcgccccctaaagacaccgtccttcattaaggcgctatttgctgatgacaatgttgtggtggcacagccacccaatgctgggattggtgctggtgcaaggttccgggctattggtgtagatccccaagctcaatgatgaattacttttagt

SEQ ID NO: 6415 - DNA, 811 bp, Zea mays
gaggcctccggtagctccgcgcctgagctcgggcccgccgccgccgcccgcagcgtcctggcgaactggcgagcgacgggggccaccgcctcgtcgcgcaggcgcttcctgggcgcggcgtcgcacgcgtcgcggacgcgctccaggaaccggaccacctcggcggcgccggggctcgggtcggccgcggcgaagtacgtgcggccgtcgtcggccgagaggaacgcgaacgtcttcgccccggcgacggtgtggtggtgccaccggtggtggtcgggggcgtggtcgaggcagagcgcggcgagcgcgagcgccgactcggcgtcctcgccgaccgcgttggtgtggaagtaggagatgctgttcttgttgcccctggacgtcgcggcgacgcagaagaagacatcgtccacgccgccgccgtctcctgcgcctgcggtggcttcctggatcccgtcggcctccacctccatcggcacacacgacgggggtgagttcttggccctgatcggcgcgaggtcgtgcacgctcagtcgggcaggtgctcttgttcgtgcatgtgtcgctgtggcatcggtcgatgagactgtaaggacgacagcttcaagccttcaagtatgtccgatgtgcaaaggctgctgcgacgcaaaaagttttgagggaaaactgctgcaaccgggagttgctgtgcttatgcagaaatgatttcaagcctaccggaagggaagtacaggacagaacgatatagatgatatgtgctctgtttgcccaagaatacacaaagagagaaggaaagaagccctaggtgctg

SEQ ID NO: 6416 - DNA, 800 bp, Zea mays
gagatgcgtcgggaccgcgacacgacggcgctcagcctgcgccatctggttcgcatcacgtcgtgcccaaaggcgaagatgtcctcctcgccgtgcaggttggccagcatgaccttcacgatctccagcatgcgcagctgggtgtcccgggacgcgcccatgatgctgctctgcacgtactcgtacgccctcttggccaccttctcgtccctgatcagcgcccatctgcacgtacacgtacgcacatgtaatgtaataacgcgcacatgatgtgtcatttcgattcgcgtctagcaagtagcaacgcacccgagtctgctgccggcatgcccagatggcttggacatggtgaacagcatgacgtcctcgtcggccggtgccgcgatgtgcgtgaagtgaggccagtagtacgcgtggtcggcgatcaccgcggagccgcgcagaacgggcgcgcggagcagggcgtcggggttgttcggcgacgtgacgaactcgatgaagctggaggagtttcgtgacgcgttggcccatgcagccgccgtggttccttcccatctgtactcacgcccgtcgaacatcgctgtctgtgttctgtacggctgaaccatgcacgcatcgccatgccatcgatcaacaagtccatcagcgatatacatatacagtatgtgctttgaccatatcgatgatgcgcgtgtatatatgcatgctcatcgtcctagatgtctgaccgggtaataccggcgcggtggcgaccacgccggcccgtggcaaggcggcggcggcgttggcctcccgggaga

SEQ ID NO: 6417 - DNA, 844 bp, Zea mays
tctccctcctcacgccctacgtgcaggtatacacacacacatatagacgtcgtactgcctagctacatacccttcatcgtcaccaccgacacgcgacgcgagatcgcgcctccgcgcgtgtgcacgtatactatacgtgcgtgtacatgcggcggggcggcatgcacggcgagcgccgtacgtgtcttgcttgcaaataaacgatactaccgccgatcatgcatgatgttctatattcaaccgctattttacaaaagctaataataagcaggtgccatatacacacatttaatgagtagtagtttgaatttgaaaaaggcagagagcatcttttcgatgaccagtaacgacgtaatggacgtttgatcctgtctttgtctcgtcaaacccacgagagaaagaaaaaaaagtagagtaagcacgtagtacacactgagaatcagcatatatatatctgcacgtacacatgtgtggccaaaaaaacttgcagctgatagctacgtatacacttggtcgtttctacttgatgtatgtgggtgcttcacgatcgaaatgaattatatactccgtatgaactggagcagtgcttcacgatcgaaataattaaactggaaatcctgcttcgtcccttacttcctgctccgccacccaaatatatatgttgtgcctacttttcctccggaccggctaattactgccgaaataagctgggaagaacacagcttcttctctcttccttcttttcattgcatgcacatacaaaagtcaaacctttcagaaacgtttctatgtgcacggcagacgtggtgtgtgtgggacgtacagtaagcactggtattgttgg

SEQ ID NO: 6418 - DNA, 860 bp, Zea mays
cagcagcggcggcaaaaaatattaaacacatgcgatgcgagagagagcgcatgatcgatgagagaatataatagataatccttgaggagaaaaggagcgcgctttcgacgggctcatcgtctcatcagtgatcagtagtggaaggagatcgatagccactgacatgtgacattcacagcgatgccgatcgcctgaacctagtacctacgtgcttgcctgagcaaaaaattatttccccatcaacggtttgcgacggataagaaaaggacgcgtcggcgacggacggaaggattccgagagcagagcatttccgagcacccaacgtggcgttcgttttcagtgctcttggagagctggagtagtccctcgttcggcacgaacccagagccgcgctcccgcctcccgtaggccgaagctggcaaactaggacgtctctttcgaccccgagagcacgcgaaagatcgcgcgccgaaacattccctttcgcgcgcatcagctccatgccgccctctcacatcaataatggagggcaagcgagcggcatagctgtcgtgctttggctgggtactcttcactcttcactcttgagaaggcatggcgtggcacatgcatgcatctcacgccgcagattctagcgacacaagccgtgaacgtttttagaggcggattttctctcgtactgtcatgctcgcgccggatactttcctctgggtccatcggcgatcgacgttcatccacatctactgctcagtaaatctgtcggtcatgctgacttcattttttttgcagagtagtaatttgccaagggaagggggcagggcactgaccttccatcttcaagggtgaaccgggtgggaatc

SEQ ID NO: 6419 - DNA, 786 bp, Zea mays
accgacgagaactcaaagaatccgcactggcgcgcgatcgggtacagcccgcccccggcggacgacgagccggcgccggcggaatcagaacgtcccgagaagcgtcccctggacgacggcatcgttgagacgaacaaggagaacgacgcgtccctgcccgcgttgctagccgagaagggcctcagggtggccgatgacgcggcgcggaacgtgtgcagggtcgagtgcgacgtcgtcatcgtcgggtccggctgcggcgggggcgtggcggcagcggtgctcgcggcggcggggcacaaggtggtcgtcatcgagaaggggaactacttcacggcgcgggattacacggccatcgaggcgccgtcgatggagcacctctacgagggcggagggttcgtcagcacgctcagcgccagcgcgctgctcctggcaggctcgacggtcggcggcggcacggcggtcaactggtcggcctgcatcaagacccccgacgacgttcgcggggagtgggcgcgcgaccgggggctcccgctgttcgccaccggcgagtacgccgccgccatggacaaggtgttcgagcggctcggcgtgacggccggttgtgcggaggaggggctccagaacaaggtcctccgcaaggggtgcgagaggctcgggtacaaggtggagtcggtgtccaggaactcgtcggagggggcacctactgcggcagctgcggctaccgctgccgaccggcgacagcgccgacggacagcacgtggcttgtcaacgcggtgagccccggcc

SEQ ID NO: 6420 - DNA, 679 bp, Zea mays
acttttgtcccaacctgaatccaaagataaagggatcataatgtatcatttcaatcagctaatgactttactgaaccataaagtttctatcagaaaaggcattacaagtatcaatcgtgccatcgattattagtttattactgcttggtggaaccaagttaaaatgtagagactgtcataggtcatacagatatgttctctacgggtgaaggcacaaaggttaatgtgtcgaactgtgcatgaactgagcaacagaaagtctgagtaataaccattttcgaatggaactatggaagtctagaaagcctaaccccacacaaacagaagcactgcaaaattaataaacatatgattgttgcttagtagaaatgactggtaagaggtcttgccaatgaagctgttagaggtaaaacaaaatacattcttttagaagccgttcataccatggtatttgtgagcgaggacttgccggcattgggcgcgccgacaatgccaacggaaagcgacaactggtcttcttccctgacctccccgagatcctcttcatcctcgtcaggcgcctccagcgccgcatcgagcagcgcgagcgccacgtcccgtgagcggtcctcatcctcctcatcaacggctgccgcgcccagccccttaccaaagagcgcctcgtcggcgcgcgcgcgga

SEQ ID NO: 6421 - DNA, 764 bp, Zea mays
gtatttatatcttccatatttggtgtaaatggctcaagtaatgcttattctactatatgaattgcatgcaagttttaaaccaacctgctatcgattttgaccttacttgattctacccctgctgaacagattctggaaaaagccctattcaggagcttgatggtttaaattttatggaggatagtgctggtgctctcactaatttattggcatctacaccagcagagataaaatgtgttgaaagcatggttttttcttctttcaatcctccgccgacctatcggaggtaagcctgctgtcttgcatcttaccattgtcatattatttgtgagtatcttttttagaatcattcttatgaaaacgagggtgcacaaatcttgaagtgcttcatgggttaagtgaaatatcctttcgctcttctgcttgtgctttaaaatgtcattagctgaaagagtgaagcatagaggcaccacccattatttttcaagtctggtaagatctggacatttttcctagaaaggttgttttaccttaagatatattgctttgcctatacttggtctatgttaatatttttttatgctagtcataagctgtggtgctggaattctggataactgtattattggttttctgtgtatttcttattaagggcacagttattccatgttagtgcagaggatatattccatataatggtcctgatgcccaaattctgtaacattgttgtgaccttgtcactatcgagttggaattttgtggaa

SEQ ID NO: 6422 - DNA, 922 bp, Zea mays
aattccaaacgatgagaccaagttatggccatggaaaaagtaacaaaatgatgtctttggctgacgaaaaatcaacaagtcagttacctgccaaccaatgccacgaccaagaactgaaggaggtatcatagtcgcacttgcatatcttgacacagcaatgaaggccccagatgactgaaagggtagcaaactgcttattagaacactattaattatggcacactcattttttcagttttgggtaaagctgcgcaagcaaacctcaacaagagcaacaaatgcggccaccatcattgcaaatgattcaccagcatcaaatgttggggccccccattggaaaggatatgggacactaatcctacaaaaacataattattgtcggtacacaaaaatgttacagccacagccaagaactgatggaggtacctctattctgtaagaaattatacaaaagacaaggatcaaaagcaagaggcaatgcgattgcaacgaactccttaccaaggagctccaccaacaagcccagagcggtcaacacggcaatggagttgtgtctttgttcgggcactcttgtaggcaccgctaaccgtgagaatgtacgcatacagccatacaatcgcaattgtgaaaatcacagaaaaccggtcgaacacaggctttgccgcatggacagcatgaggtaagtactgcgcacaagacagatacattagcacatgagttcagatgtactcctatgtatgatacaatgtactctatactatacctgagaaaatatgagcattaggatgatttcccggaagcccaatttcacacacttagcaacctgaagccaaccgaattctagagtcagtaggaaccggaccaattaaaaaaggaaagaaacattgtggcagatactgaatcagtagcatgatgataatgc

SEQ ID NO: 6423 - DNA, 754 bp, Zea mays
ggtttgtattcttgttattcagcagtgtaggactatgttagctggacctacaaaagccaagactgataaaccactgaatgtcttcttgatatacgattgaatgaatgcaaatagatgcacacgtgcttaattgctaaaaaagaaacgtacaaattaagaagtgcaaacaacaacatctgctgcccttcattacagtttagtgcagtattgtgttatactgttatatcaaacttctgttgtacacattgtgttcacttttatgcgtttcatttcgagaaacatcagcaattatcatatcttaacattctgaacgatttcctgaaaacttctgacagttatagcaaaagaaagaaaaaacaccttcctagcagaactgaagatgtcatctcatcaagataaaaagaggaatatatcttcaaatttctcaaaggtacctactgcaactgatttcttgatgactcctttacgtggacaatatggtgttgatgtctcactgccatgacatttgccaaactagttaaaggaacataccacccactttccacatcgacatatattgattgatgcctgggaaatttttatttcgagttggcatgaatctcaaggtatagctgtagcacagtaccttgtatgcacttgaatctcatccttgtaatattattatggagaccaaactaaattgttgcactccctttgttaaactattttgcggattttttccctacattattaggagatagtctgttgaatggat

SEQ ID NO: 6424 - DNA, 779 bp, Zea mays
agaatccattggctgcccaccatcaggagtaacaagacttgcaccaaaaatgggtatactctagtctacaagtagaaagttataaaagaacaaaaaaatatcaaaccagtaagcttgtaatatttcatcttacagcaatgtctgtatatgtacaggagcaagttccgttattttcttttgccaacatcgatggcaacaatgacacttctgtaactaagacgtcgccgatgaagcaggaaaagaaaatgtctagcaaaaatgctagcaaagcctcttcaagccttccgtgccagcctccccaagttattccgctccatttaacctcatgttagtgactaaagatagatgaatagccatggccaagcaagcataacaaaaatgctagcaaagcctcttcaattatgtgaaaagaacaggtggtggttgcttgaagctggggctggaagcacctgctttatttgacgatgttaacatcttatccttagcagtggcattgcctacaacctgttcagaagaatccggctgctggttgctttcgctatggatgggtcgggcccaaatttttatcagcccctcgcggcatatagtgaggattgattcactagtgaattccaggccggataggggatctacatgtacccggtgtgcaacgagaggtgagagctttggcacatctcgcatccgtggagaaggctgtagaacaccggctggagggcacgcattatcccactgtgcagatgggctttccactactgaatgtcggtgagccaccagacgga

SEQ ID NO: 6425 - DNA, 627 bp, Zea mays
  unsure (1)..(627): unsure at all n locations
cttgcatttgcctgcagttctgcaccaacaagatctagagatggacatggaggcttccgtttgaatgatgatttgcttaattagatggctagttgcctacttgtgttggactattgcatgtcaatgttggtgttgaacacttgaatttatctaagtagataatgtagtattgaactagtttggttatgtaaattgctggttgtgtggctgctacggtctgctagttgctaattattttctaatacagtagtgatgctattgagttgctccacttataattataagttagtcaagatcaagactacattagtgttgctaattatggtcttctttggtattacagcagcaagtcagcaaagaaatggagtttgggacaggaatatggagttttaggcagtggagaaaacagctctcacaagtcaccagctaaacactaatgtagtcttgatgcttgacttattgttgtgtatattatatactatatataggtatatatgtagtaggtatatgtcctgatatataggacaactatatggatgagtaggattgactaatcggcctggtcgacgactaatcgcgatgaatcacncggtcaagtccatggcgactaggttcgactaacgatgt

SEQ ID NO: 6426 - DNA, 761 bp, Zea mays
gtaaccagcacaagtgaaaagggggcaacaagacgtggttcagctattaacaagccagaaattgttcacctggtatgaattttttttgatttctttgtcgtaacattttctcaaaactcttaaaagttcgattgttctctctatatgtggaaaaaatgggtttgtttaatgtagaatgcttcaaggttctcctactgctacagaaatcgactgttccctgtcacatttgtttcaaaaccttttcctttagtatttgttatgttggaactttgaaactcaatctgtcttattattcttgacaaactactgcatgccatatgatgatcactcctttgaatcaatttatattttttctatgtttgcattagctgaattaaactagcccatgtgaggtttattagttcccttaacaacactggtatggaaatacatgatgattcattaatgtttcacatacggtgcaaacctgctgccaatgttgccctcttttacgtggttattcctttttcctttgcatcttgttactttgtatttcctcccagtaaaaaatgaacatcaacacactcacctaatgcaactttatcattattcattattttccattgtagtatattgatgaaacctgacataactgatataacaaaaaccactttgagccaaatgtacacatatgcttgccacacctctgatctgaacactaaaaaaagatattggccggcccaaaaccaattatgggactttcatacctcttaaaaatgttt

SEQ ID NO: 6427 - DNA, 818 bp, Zea mays
gccccctccaccctctgttggcaaaggaactatgggtttgtgcagccagacaaatccacgagatctagcacatcgccgatgatgaccggcactaggggaacagccgctacgctagcataggggccaccagggtgcccactgcccacgtggaaggagcgcgagaacaaccaccgcatggagcgcctacgtcgtgcgatcgccgctaagatctaggcggtgcgttaacgtcgtcctttaatttctcagcacaggtaacccctccccttgcacttatattttttctttaaccttttagactgaacgtattgaagaaaatatattacttaaatgtacattgtttttcggcaagcggttgtgcatacaagtctatatggggatcatgcataatttacatttttcaatatggagaaatgggcagtaatcataaagattgatgcttagcttcattgatcgatcattttgaagattgatgccatggacaattagatacaactaacttatccatgcgaaagattgtccaaaccgtgagtgtcatccaatttcacatattcttaggaatagaaataagtgtgcttggcgtaattttatttatgtttacaatgggaaaatatttttagttttacgacatatgcaactatcatgatcaacggccaagctcagggcctaggttgtttacatagtaataatatgatattagacacgcatttgatgcagcatcagcgatagatgatgtacatattaaaataaaaaacattatgtataactaggatcataaatagattacaaaacatttccttataacagtataagacacattt

SEQ ID NO: 6428 - DNA, 663 bp, Zea mays
catcttgcatgcctgcagcaagcaacaatcacgaccacttgttagaaactaaatagactgactagtgacaacaaacatgaggcgcgcagctcatttgctcaccctgattaggatcgtagaaccgctcaatgagagcaacaaccgtgctcttcccagacccgctgcctccgacgacggccgcggtcttcccagcggggaagaagagggagaagtctcggaaaatcatgacgtccgggcgggaagggtagctgaaggccacttccttgaactctatgttgccatgcacttcgtcgaggcacctcccgtctgccgtgtcctgaactatcgttggcctctgccttatcacctccagcagcttgtagccggcaatcttccctttgctgaacgctccaaggttcgaaaacgactgccccaggctcctgcgatcaacgagttggtttacattgggttcatgctgcgaaagcagaaaaggcagttttttttttggtactgacaggccaccaacgattgctgagaaaatcgcagtgaaggccttcccaccgtctgtctggccgttccggatgaacacgccggcgtaccagaacaccagcgcccatgacatacaggcgattccataggtgcagccgatgccaagccccttggccatcccggccttgtaaccaa

SEQ ID NO: 6429 - DNA, 917 bp, Zea mays
atcttgcatgcctgcagcgacgcacacgcctagagttcacatcccgctcatgggcttcctattcttcgattaagagtagatcggatagaattaagagtggattggagaggattaaatctcttactaattaaaattgaacagaaagatatttaatttcactcaatccccttgaaccgaacaagtcgtgtacaggagcaagaggtttagagaggattgaggcaggggtttgaaggggattgatgttatcaggggagggagatgatgatatagacttctgagaagagttggaggggctgattaaatgtccgctggctagcactatttagagttcaaactaaaacccttaagtcatgcggatttgcttaatgctatgcgcatggcatggttggaggcgaagggagtagtgaccttcaaggtgttgggagagagtttgttcctggtgaattccaatgcttggaagactagaatagggtgatggagggaggcccttggctcttccgtggagcctcggttgtcatggacggcactaatgtgaaggtatacaaactaaacaaaatcctggtctgagcacgaatccagggcacataccagaagggctaataaagaacaaaaaattgacagatggaggaagaatcaacccgacatctgggtgtttatggatctagacaagcgcctggagagggttgtccatcaaaattaaggagagcagaaggcatctggtacagtacaaaaaattacctgcttgtgtgtatggctgggcaaaaactcgaaaccttaaacccgatatacctgaatctgaacccaaattttcgtccgagattctggggtagcaacttaccacaacccgaacttatatttgggtaacctgggttatcattaattgggtaccccaaagaacctgaaactttacggggcct

SEQ ID NO: 6430 - DNA, 772 bp, Zea mays
agtggtcctgatgatccatcttcctttcgagctagctttgcttcggttgtttggttcttgctacttctgtaataatcatagtgcttaatcctcttccagcccttatcctcttcgatcttagccataatacacatttgccaatcaatatgttggccaataatggggagcaacgtacacaaacaagtagctagcagaacatggagaatattttcccctttctcacatttgtgcgcgcatgaatttgacaaacaattggcagtccgtacgtgtgagtagtattattttgtgtgctgagattagttcatggaataatcatccacgtgtcgccgtggtcatcattatcgtcattcaacaaattggagtggacgggcatacgatataattttctaactataccaagataattatcagcggcagcaagtatgcatgcatgagaatattgatacagccaataatgccggattcgagcagaaataatattaattaggttacccagagagcttaattttggacgattgttttttaaagtttttttttaaaaaatatataaatgattttttaggttgagtgtcatgctccaaattaaaagctagcacatgattattaattgtttctggccatatatacgcacatgcttgtgcggttgtgccccagaatagggatgcgttaccaacaaaccagcagggacgaactgccgaactggagctgttccgcttaatgacgtcacacctaaccggcatttcacggtcgaaggacgcatcataatgattgg

SEQ ID NO: 6431 - DNA, 914 bp, Zea mays
actactaaagaaagcttttcgtgactcctgctatcattaatctggtcaattggtgcgccaggagagggaagattgagctgggagggggttcatggagatggaggggaggggcctgtctgatttgttcaggaacaccagcgaggagatcttcctcaaggcagtgatggagaactcaatgggagtggcagcagcgccaccaagcatggagatgctggggttcaaggccatgtcgcaaggtctcagagaagacagcgaggagctgttcaacagctggcttatgaatgaagaggcaaggattctgaaattttcttgttgcttattttctctctgagcatgaagatgaaataggaagtacatagcggatgttctgtaagctatatgaacatgaatactaagtaagccatgtcttcccttttaccaaggcttaccgaggccaactaagtaagccatttcagaaagtgccacttactttttcgtggccatgcctaatcatgtttttcattaagaggaatggagggttacaatgtatgacttagcaagccaaggcttaccaaagccaactaaagtgccacttactatgttcgctaatctcttactcggagtctatcacctaaatgtatggctgcttatttgcagatcccaggatttggttcagcgaacaatcgccctcgacagccatctaggtaagataccggtaaatgatgcagaattaaatttgcttgatctatcaatacacaccaatgacagaaattgtgcactagggtgggagataacacctaaaaacaaaaatcagtaatttaattgaaacctaatctaaaaaggttatctgaacttatatgcctcagatcgtattcccattttttttggaaaagaaaagttttgctttaaaaaaacactttaaggatgcatattgc

SEQ ID NO: 6432 - DNA, 772 bp, Zea mays
aatttattgttattaattattatgtatattatatataatatataatataataatagctcctgtatgatctcctttcatgtaaatcaacaaaatttggctggtggatacacagaatggtacaaggggcctatcctttggatagttggcaagggagcaagcatcaagaaagcttgcacactgctgaaagaattgcctgtacacacaacaaaaagaaccaaagaaagtgtagagctatatcctactcgaatgaacaaaagatcactgtgtaaccccctaccctaagctctactcactgtactcatttgaacttctggatgagttacatcatggaaatcttgcgacttctccatttctcttgcaatctgaatgtcactggggatgaaatactcactgaaggcctttgcggcaaaatgaggaatcatcccaacaacagttaccgcaagcagcagtgcccagaacagcccagttcccatcactttgtagattgccctgtcatacagttaccgaatcagtaattgtgaacatacttttcgtgtaagtgtagaaaacaaatactggaatgcgtgcttaccaaaaaccaggcatgattggtatggaatctatgatcatgacacaaatccatgtcgcagcaatgctaccccatattgccgcatgcgtaatccagttccatctgatgacatccattgccaggtgaatattgacaagaataacaaccggatagtgtccataggtcttcaaggctggaaccatcaattatactcttcctgtatgc

SEQ ID NO: 6433 - DNA, 822 bp, Zea mays
tttgcatgcctgcagtacttgcctacttggacagtttgataagatcacataacacctgcacaataaaaaatgtatgccacatggttatccaattctctgcaacaatattgtcaaaactattgtcatataagcaaacattcgaagtccataaaattacagatccatggcatgtcagtggattattcaggccaacttagtaattaaataatgtaatttactcaatcagactcgcagttacataggcacttgccaagggcatgtatatgtttactcatcgaaactgattatatcattacatcatcctcaaatgatttcatgcaatcaaattacagtaacttcaactaagacaatattataaatgttagagatcatccacactaaaaacataaaagcttttcccctgaaaaaatacttgcatagtagtgcaattcagtagatgttaataatacaatgcaaaattagccggtggacagaaccatgtaacatgtatacgggacagagggcaatgtccaagatgatgcttttttttgacactacagtgtgtaaaagggtatatctgacgctaaactaaactgggcatacatgtgctccaattaacttcatatgatcagctaaccattcagaagcttccaacccaagcttacctgaaagctcaaaaaaattccatgcatatctattgcccagggtaaagagtgacttacttagccagtgttctcgagtacataaaagccatcaccctgttgctgtttatgctcatatacattgcctctttgaccccaccctgtccgcactctctttgtaattctcataatcgtgcgggcc

SEQ ID NO: 6434 - DNA, 807 bp, Zea mays
tttggagagctggtaggaccacagaggcagaacggctgttagagaggatgagtgagaaaggatacagtttggatacggctggctgcaatatcattattgatgggttatgcaggaatagtaaattagatgtggctatgggcattgttgatgggatgtgggaagaaggaagcactgctcttggccgactggggaattcattccttagtgtagttagtgattcttccatcagccaaagatgtcttcctgatcggatcacatattctattttgataagtgcattgtgcaaagaaggcaggtttgatgaagccaagaagaaattacttgagatgatagtgaaagatatttcccctgattcagttatatatgacaccttcatccacgggtattgtaagcatggaaagacatctttggctattaaggttctgagggacatggaaaagaaaggttgcaacccaagcacaaggacatacaacttgttgattcggggatttgaagaaaaacataaatcagatgatatcatgaaactgatgagtgaaatggaggagaaaggggtttctcctaatgtgctgacctacaatagcttgataaagtccttttgtcaacaaggaatggttaacaaggccatgccccttttggatgaaatgctacaaaatgaattggttcctaatataacttcttttgacttgttgatcaaggctttttgcaagatcacggatttcgcttcagcacagatggtttttgatgctgctttgagaacatgtgggcagaaggaagtgctctattgcttaatgtgcactgaactctcga

SEQ ID NO: 6435 - DNA, 858 bp, Zea mays
ggatcctctagtagtcgacctgtagaacacggccgtccttggcgccgagaaccacccgctgcacctccacggcttcaacttcttcgtgctggcgcagggcccgggcaacttcaacgcgcacaggcacgtccgcaagtacaatctcgtcaacccgcagcagcgcaacaccgtcgccgtccctggcggcggctgggccgtcatccgcttcacagcggacaacccgggcgtctggatcatgcactgccacctggacgcgcatctgcccttcggcttggccatggccttcgaggttgaagacgggcccacgcccgacgccgtgctcccgccgcccccgccagactacccgcgctgctagtagcgttcagaaaagagaaggaacagactgccggagatgaaggaacaaactctgtttcagtgtccatctatggttttaaattataacaaaatttgcaaatctctcaatagacagaattttgagcagcacagcaaacttgtgaaaagtagtaattagtaacgcgatattagcctttacatcgtgaacataaaatgctaacataacattagagtcatgcatgctacattgaaaatgccctcagacagacagagcagggcagttggtcatggaatgccacctgatttggcgagatctgaaaatctacctgctagctgctctaagaagctgcccggcccttggctgcaatgaaataaccgaggcatagttagcaatcaatcgcaacgggtgcttagaagcaggagaagcacaagccatatgaatacacaccaggggctcacaatctttatcctcttcgtaatagccctgacagaagtaacagcggtcgcttctgcttcagaaagggg

SEQ ID NO: 6436 - DNA, 766 bp, Zea mays
gagtcgacctgcaggaaccgccggccacgcctcgcctctcgttcatcactacgctcacgcatccgccgcgggccttgtccacaactcctcctcagatctgtccactccagctcccacctctctgcccactaataaaaagaggaaggcttcagggaagaccgccgccgcttcagcctccaagagatcctgcattgctcctgctacaaccaccgatgcaaagggtacacatgacatctttcctccacatagccttattaagcttatatgtatccttttgataacaaaacataaataagaaacattgcattatgctaaccctaccttcctaaatgccaggtagagctgtacccgcggcgtttcaaccgtcgaatcatcagaagaacatgggttccgctgcccaaccaacttcagctcaacattcagctccactccaaacttcatctgttgcaaagagcttatttgcgccgctcccacctccggcccactcttctccctacacgccgcagcaacaagatcagcctgctgctgcttatccgtctgcaactccagcgtgtgccgttgcccaacaggaaatcggcccctcccagtgctctatcgtttcttcttccaagaccctcatcgtcagccctctcaaagggagcgcgtactatgctgtcgagaggagctaccatctcagctcccccttgaaaccgaccgcccgcagttcccccttgaaaccgaccacccgcaagttgaacttcgattgcaccgagctaggtccctgtga

SEQ ID NO: 6437 - DNA, 980 bp, Zea mays
tctcgcccagaaagggaaaccgcatctgctcccgtctcccgcctcggcgccgccgcctagtcgacctgagcccagagaggggggggcgtcgaggccgtcgggcgctcaggtgagctcgactggtgtgcgatttccgttgttcacttgctctcttgatctcttctcgcaactcgttaaaattggcgtgtctcgggctcggctacccaactagcccttctccaccctgtgcgctgcgcgcgcgagttttctagctaggctgccgcagtagctggagctgctgctggcctcagatcaggcaattcttgggatgtgctggcctcagaggcgccgtacttgccctggaccaggcctgattctgattctgattccatctcccctgttgcaaaccctagttctttactcctcttttctcgattaagtagcagcagaatccaggaccacgaaatcccgaactagttgtttacaatttcttctgcttcgttcccactttccgccctctcgaaagcttctctcccttctgcacaagctcaggattacaggtactcctagtataccacaagctacaagcatgtaatccagctcgctcctggtcctgggtgctggcggcgaaaagctcagtcatttgattcggtgttttggttcccggcgtcgccgtcgcactaaccgaggggggttcttgcatgcagatctggggcgcggagtggcaagcgaaggacatgcagatgcaccacgtcggaggaggcgcggccgacatcccggaggcggcgcggccgagccgctacgagtcgcagaagcggcgggactggcacacgttcgggcagtacctgcgcaaccaccggccgccgctggagctggcgcggtgcagcggcgcgcacgtgctggagttcctgcgctacctcgaccagttcggcaagaccaaggtccacgcggcggggtgccctttttggcaacgtcgcgccgcgcgtgcctgccgtgacagc

SEQ ID NO: 6438 - DNA, 829 bp, Zea mays
cttgcatgcctgcaggttcaggttacagtagggccttgcattgcaggctgtagtttagagttgtacagcagtggtgcacgcagagcgcaagcaccagagtgctaccagactaccagagtgaggtcaaaatacgatgacccaggaacgaacgaacgtacgttaaagaatggtagccgatcagagaacgcaacaaaccaatcaacaaaattgttaacccggcgcaacgcagcaacacctcggaaaacgccgctgcggcgaggtgtcaatgggcagcaagcagatcacttggccttgtgcttggggagcgtgagcgccacggccggcgcgcggaaccccatcaagtgctgctgctgctgctgctgcttgggcgaggagcgcctgcacgccggggtcggggtcgcgagcctgctggcgcccgtcggggtggggcagcccatgtagtgcaggccgggcgacagcctgatcctggggctggggcgcggcgacgggatgggcaggcgcggcgacggcgccaccgccgccaccctcggcgacaggttcacctgctccagggccatgctctgcacgtcggccgggtagttctggaggcagccgatgcgcgcgcccgtgggcgtcgaccacttgaacgacggccgcctgcccatcgccgtcttcggcggctccgcgtccgcggccgtgcccgtgccctccttcacgatgtccaccgcgggcagcttccggcacgggtcgtggctcctcttctgtcgccactggggctgcctcctctgctgcctgctgcttctcttttggacccgccggcggcttcttgaacgacgggaacttgttgtct

SEQ ID NO: 6439 - DNA, 554 bp, Zea mays
cggatcctctatagtcgactctgcagcaggtggagcaacgaccagcagatgctgtgcttccagtgcgactcgtgcaaggccggcgtcctcgcgggcatcaagaagagctggcgcaaggtggccgtcctgaacatcgtggtgttgatcatccttgtgattgtctatgtcgcgggctgcgccgcgttccgcaacgccaagaggatcgagaacgacgagccggtgggcatggcgcggatgaccaagtcccatccaagcaggttccagttctaggcaggcagctgctgccgtcgcgggttcggaagcttctgccttgtacagatgatgaccagaccagtgggtggtgctaaggcttgggctttgctatatctttactgagatgtggattgtactgcatttgggggtgaaaaggggaagttcagtgtggtttgatttagtgtttgatttagtgtttagggtaggtatgttatgtggaagggggtacaatatggggatctgcaagaaacaagagaagataattcatctaggaactgttctgtattggagaattttttttt

SEQ ID NO: 6440 - DNA, 785 bp, Zea mays
tgcatgcctgcagtatagttcatgaaactttacttacctttgtgttggttctcttctttttagacctggttatcttgtctgtctaggggggatcaagtttgctttaggtactcatttagtgagggttctgttttgttgagccactgacttcacttcatatttggttcatctttccatggagaccatcaacaattctatgacatgattatttctttttcacatcatgcaacagttccacttccagaatgattgtatgcctgcaactcaagttgactttatgaatcaatttctactgtgttgtcattcggggcaaagctgtcataactcatagacccacccggatatatttatttgactcgaagtttgatacatcatgtgtttaggaaactgtgttcttctatatgcaccggtttttccttgacaatacctacatgttcttgtgtgccccaagcgtgaagtgaaaagattcgccgatctaagttctgatgagattagtgacttatgggttactgcaaaggaagttggtgcacgtcttgagcagtaccacaaagcatcttcacttacctttgctatccaggtgtggtccgtgcttcagtttcgctgttgtagccagcacatcctttcattacacaatactagatttatacagtatataaagtgtccaatttgggtgtgtaaaacgtaaagatgatgaacattgtggaaaatatcatatatgtctatagtatgccatacaagctatgctatgctaactctaactattcacacatttggatagctttttt

SEQ ID NO: 6441 - DNA, 827 bp, Zea mays
  unsure (1)..(827): unsure at all n locations
cctttgcgaatctgctcaacaatttcatacctttaaaattatgacagcagtggtagcaaacaaaaactccagaggcatctgcataaaattccccacaagttttgtatacaaacaataattaaattccaacccctaattagcccaaaacagtccacaagatgaaccgtgcaatctgtttctttgacagccacatacccgggttcaaacagcgatatctcctaatttataactccgaattgagcgcataagtactcgttggaaaggtatgacaaatctctacatgattctcatactgtttatcactaattacccacgaaaaatttctagaaactgctagaactactgctgttcgcccacccactaaatttctggacagcacctctaccaattcgcatacgcaacatctattcaattgaattgcagcacaaataaacaagagataaacacaaaaatcaccttggattctcccccttttcttcctcccttcttctctccaccaaaaccaattggagacttgcaccatgcgacatagatccaagcggcaaggaatggcaccttggggagcaggagatgggagggcggctagggttaggtggtgtgtctgcaagagtttgagggaggaggagatggggggggggggcggcggccaagggctagagaggggagggggttacacaagggagaggggaggggggcggctgaaaaatccaaagggactagggggagggtggctagggttaggggggaaactagtgggccggatcaagatccacggnccaactcgttcacacgtcaactcccgaccccagcgcatgagtctgaccaaa

SEQ ID NO: 6442 - DNA, 920 bp, Zea mays
gtaataagcccaaaaaacaacgtcgcacctacacgcagtctcaaaccccactgcgggtaacaagtctctcccacacccacccaaactgcagcggcgctgcttaacaattccataactttaaaattaagacagcagtggtgacaaacaaaaactccagagacaactacataaaattccccacaagttttgtatacaatttatgattaaattctaacatctaattacccctaaacggtccacaaaataaaccctgcaatctgttttttttctcttttgggcagcgacatacccggattcaaacagcgataacttttaaaatataattccgaatcgagcgcataagtacttgttggaaaggtaagacaaagccctacatgattctcatactgattaacactaattactcacgaaaaatccccagaaactgctaatactgctgctgttcgtccacctgaaaatctgtttttttggacagccacatacccggattcaaacggtgatatcttttaatttataactccgaattgagcgcataaatactcgttggaaaggtatgacaaagttctacatgatccccaaactgatttccattaattccccacgaaaaatgcccagaaactgctagaactactgctgttcgtccaccccctaaaattctggacagcccctctacccaatcgcatacgcaacatctaatcaattggattgcagcacaaatgaacaagagataaacacaaaaatcaccttggattctccccctttccttccttccttcttccctccaccgaaaacaattggagacttgcaccacgcgacgtagatccgaacggcaaggaatggcaccttgggaggaggagatgggggggggcttaggttaagggtggtgtttcaagggtttgagggaagaagaaaatggaaag

SEQ ID NO: 6443 - DNA, 796 bp, Zea mays
atttttgcatgcctgcagacaacctgtcgtcgatggatgaccaaacacattatacaattttactattatatcttcctcttttagagcctccttttttatcttccatttactggttttgcaggaagcatatgctcaatttgtgaaagattattacattaaaaaaatggagacaccaccatactcgtatgatcgagaatatctgaaggaaacaactccacatgattctagtaaggtccaagaaattgagagaaattggaaagtgatctaataataaaatgatatgcactttttagatattggttttaattcacgagatccaaacttgctctaaatgatgttttacttgttttctataacaaaaaaaagaagaaaatttgcttgcatagttacatctaagagcttggagtgtgaacaccaagataactcttgtttggtattcaaattacataccttcaggtacttattcaggttacaattttcttttaggttctaggctctggtggttccaagtttgcagtgaggttgcctactttcaagtggcacccaaaaatgacagcgttcgttctgcaaggatcaatacgaggtaatgttccctatccttatgtgtgttctgactttcgacacacctaccgagttttatatgttctattattccaaaccgtgttacatttgattggaatagcatgagctgctgactgcaaataaacgtgcgtttcacttttcaaagaattgaactttttctaagtttggctagaactgtagaacatatcatcaacaacattttgattcttcaaaa

SEQ ID NO: 6444 - DNA, 1093 bp, Zea mays
agatgctatgatttctccagcttcggcgactgttttggctgctgatgacagtgaggatggtagaaatatggagcaaattgtcatgaagatctcttcagggacagatcacgttggtcaggaccccgtcattatcggggatgtggcagatgctatggtgtcgccagccacggcaataacttttacacatcctgatcctaatttgggtttggttgagcctactgcggctgtggcagacattctgatgtctccagctgtggtggttcccagtcttctttcttcccattctggcgagcaggaggcttcccagtctatgcagagagaagagttccttaaatatgttactcgacaaccttgtaaattgcttcctgctcctccagtcatcttgaagaagaaggataacataatgccctccagatcggtaccacgacgcagccgcaaagttgctggagtaggcgttgaatttaatgcctctgatcttgacaaacgtgctaccaagaaaatcatgaaggcagttggcataattgctgataatgtaggaattgaccagagggctcaagaggagtatgctgatcttttcaagacatctttgtctgatattcatgtaaaagcccttgcagccttgtttggctggcaggttcctgaccaactgtagggtctaggattggatctgctttgtttttccttttgttgttctcatcgcccttgtgtcaatgaatccggatcgtgttctgatatggaatgtaagaggattaaattcctcggctcggcaagactcagtccgttctttagttacttcctcaaaaattgatatcatttgcttacaagaaactaaattggatgtcgttaccagaggggtcctcctatcagccttaggctccgagtttcttaattttatcgagctacctgctgttggcgccagtggtgggattttggtggcttggaaacaagatgtggttgtcacaggcacgcagtatatccggaataatagcgtctcagtccaatttctcaatggaaatgggagcccctggtggcttacttgtgtttatggaccgcagggaaataatgataagatcctattcctgcaggcatgcaa

SEQ ID NO: 6445 - DNA, 782 bp, Zea mays
accagaactaaataaattcatcactatatttaataatatttgtaactagttttaaaatagtggatgtgacgacggagaaagagtgtagagagaggtatatagcagggtaaagtactttagtatgattcatcagatgagcacaaaatgctgccactgttggctgcttgtcggcagtcgtcaccaccaaaacaatgcatctcgtacagtacgtccctaacaactgctgcctgctacgtacactaccactactgctactagttacaaagtcgagaaagcatgcacgagcagtactagcttcttcacttgggctgcttcaggttggtggatgcggaagctgaagtgccttgttcgcgctgcttgagctcggcgaggagggccttgttctcctggtccagctgctgcgccttcctccgcagccggtcgttctcctgcatgatgagcaggttctccaggcacaggctggtgttcccctggtccagctgccgcgccaccctccgcagccgctcgttctccgctcgctccatatatcggttgctttgagactttgagttgtggaacgaaggaaggaaggaggtgtattctgcaagctgtgatatgcctgggccgccgtggcgtattatttatagccagccgaacccctcaatattgcaaaggctagctagctgttcacgagctgcaatgctggtcgtatagatggccaaacgggcccgcacggcccgtcgccggcacggtccgactgcggcacggcccgccaggcccgggtagcaaaccgtgccgtgcct

SEQ ID NO: 6446 - DNA, 750 bp, Zea mays
tacagtttatctttgctggtgtacccataattgatgaagagttttacggaaatagaataaatgcttacaaggaagagttgatggtgatcggagtgcaagttgagtttgcaaatgcatctatacacattggcaaccagtctctgtgtacggaggatgctattttacttctacagtggattcggcatctaagatcaagcggcatccagttacccaagaaatttttgggcaacatcaaggatggaaaatggctgatgacctcaagtggttacaatgcaccatctcagtcgtttttgttaagttcagaatggacaaatttgaggcagattatttcagagttagctgttgtacccttgattgaccaagaattttacgggaacaaaattagttcatacaaggaggagctgagatccattggagtgcggttagaattttcatacgcgtctgtggacgtggccaccgaaccattgactatggagaatgctattttacttctacaatatatcaggaatttaaggttgaggtgcggccacctacctcagaggttcttgagctttatcagcaatagaaagtggttaaagacatccttgggtcacagttcacctctgggatcctttttgctgagtgcagaatgggaaaagtttccacaaatccaatcaatcttagctgatgtacacattattgatcaagacttttatggaaatgaaatgaaaaattacaaggacgagttgagagttattggtgggcaatttg

SEQ ID NO: 6447 - DNA, 854 bp, Zea mays
tgcctgcagccattccccgcgtccatgggtggcggaggacgggagagaggggaggcgcgggggcgcgtctacggttccttgcgcgtgtgtaggtgcgcgccgctggatctgggggggctagggacgagaggctgtcgccatgcgaggaggaggagccggcggggaggagaggaggtgtggtcgcggcgaggtggaggcgggggcaggacggaatgctctggtggtgctggtacctcacctgtccgcgcctccggggcaaaagaagaaaacgagagaagagggggcgaatatgcgtagcggaattctacaccgttcggtctctggctgccatgtggggtcaacatgtcagtaggcgtctcgaatgcacaggcagcacagccgtccatcctaccgaaactcgtcgaatttgatttgattcgatccagtgtttttgttatcttttttttaaaaaaaatatatttattatttttcttagaaatgaccagaactcgagtgatcttagaacatcttggcaattcttgcattttacatgatagagtataagaataatgttatcgcaatggatcgcatcgtatctgttggaacaatggaccgcaatccgagaccgtcaaagtcaaactgcttctgccggctggcatcgtccgccggataccgacgcgagacagccatccagattctctcatctatgccggtcttgtcttctagaacaagatgaatttacagcaaaacacgtgtgtacaatacaggcgcaacgccgagctcgctcacatcacatcactgctagacagcttgagggccatctctgcctgaagcctggtaagttcgcttacatcactgccctgtctagaaaaccc

SEQ ID NO: 6448 - DNA, 833 bp, Zea mays
caagatattaacttactaccttagatttcttttttttttttgaggaaattgctacctttggtttacctttcatactgggtgtgcttccgtaccctccatctccttgcgtgcagactctagagatgctggagaagaaggagcgtttcctccagaagaaatgttccgcggaaatcgagaaggcgaaggattacacaaaagcgaagaacaagaacggtaaggaagagccaacacatccgccattcttatgttccgctacacgcctacaccacaaccttagtttgtcaaatatgcaaattttgcctgcttacctttcttaaactatactagcttttcgctctctcaaaaaatagctatttcgctcgtacgtgagatttcttccgtgtttgtttcgtttcagccgcaatccagtgcctaaagaagaagaaactgtacgagacacagatcgagcagctatcgaatttccagctgcgagtccatgaccaggtaaaaggaaacacatacatgcaatgcaaacggcgcacgtctcggagcttgatagattgatagtaagttgttttgggcatatatatatatatatatatatatatagatcataatgctcgaaagcgccaaggcgaccacggacactgtcgacgctctgcgctcggggtcatctgctgtcaaggcgatgcagcaatcagtgtaagctagctaaggttccatctgcgccttctgaagctgaacccagagctcatggggttgctcgctctcacgtagccacgtacacgtactgttagattatttattgataaaaatggcgccaccttataagggcaatccttgtgcagcacgtg

SEQ ID NO: 6449 - DNA, 793 bp, Zea mays
attgagggacctgttgacatttgctgacctgtcacctgattggagcgcagcagccttcattgcttgtaaaaatgcagggtttgcctgaaaaggcaaaaggaaacaaatcaatgcaaccataaatccaataacagcagatataaatatcattagccatacagttataggagttaatattcagaccaaatatctcattgaacttgtgctaagagacactttacgacaaccaaaagtagcacaaaagcacgttactttattcaacagtaagctctgtgtacaagtatggatattgtttcggccattaaagttggatgaattaggctggtatagaaggaaggtctgcaatttagcttaccttcaagaatttaacagcgttatcagatgcattagctccctggtccttctgcttctgggcgttgacctgtgcagattgacaatagaataatgttagccatgcaagaatgacaaagatatgcagagctaatgaagcagatggggggaaatatatgttacgaacaaactttgtaacgttacataataactgcacattagaacgcacacaataatctcagggccaaaagtgaatcaaccagtaaagctaaataatttgcaatattctaaaaagtaaaatgctaataaacaaacatagaaaatatacctgttcttctcgaagcttaaatgtattcaaccaattttctgaatctttagtccgtgagtcattttcccctaattgttttaccagtatatcataggtcttcttttcatgctggcatgaaacaccaagatgtcaagc

SEQ ID NO: 6450 - DNA, 725 bp, Zea mays
tgatcatcaatcccccttcgctacttctcgatctagatcttggcattaaactccatttgtattttatcagttctcagttcaggatgacatctgctggcctaaaatcagggatgtctgttagtctataggagctggagccatcctaagagatgttcaagcaattggggcgtcccttccatcatgcattgtgcacataaattggttatgggatatgtagatccgtgaggtgctgttgaagaaatctaaactctctactaacaacataaacaatcttccattcaacgaagcttgtgtcacatccacggtccccccttccttgtccgactctgacccacggccaccagtccaccaccatccaaattcccacgacgttcctccctccacgctgttgtgtcctcctccgacctcgccaccgtcgccagtgttgggccaggttcgcgcgcgccatcgactctgtgtccctgtcgtcggccacgacgctgctcactggcgaccgcctcatgatcttactcttcgtggcccaacacacctcgccgcatcacttgcaatcctcatggtgtccgccctcgtcgtcgagctcgtcgtggatggctccagctctgccctgcttcgtcgcttcggaaccagatgcggatgagctgcgcccctcccctatccctctctcatttgatgatgtccctctctcatgtcactgtttttcccttctttgctattttagcatatgg

SEQ ID NO: 6451 - DNA, 759 bp, Zea mays
aactactatttacttgacctttgatttgaaattacagattactggtcccatgcacaaggatgctgcaaattgttgccggtgaagtgctaacttctttacttgcctattgtgttggtcttacttttgtaaggaacacacacatgaaaaactgagcaatctattggatgtactatgccacattcttccattttagatcatggcatatgctacttatagtgtacatggtgttagaaaaaaaagactcatgacttgtacatgatttcactatctttcacttaagtgaattactatacacattatgcaagaggagcattaaatcaggggcatgatgtttactcagatgagcatttgtcatcatttactgttccaaattataagacggtttcgcctttctagatacatagcttttgctatgcactgtctagatacatagtaaacgcaacacatctgaaaaagccaaaatgtcttatagtttataatggaggtagtactgttcttctgtacattcagattaaatcctcagggaacaaatgtttgttctttgttataggtaccttgctatggttttgtaccatgctggtgatacagccggtgcaattgtgcagcagcatagggaactcatcataaacgagagatgtcttggtcttgatcatccggacacagcccacaggtacgcatatttgtttttaaaaatgttactgctaaattttggtattatccttgaatctgacatgaagcctgacgttatcattggaaaaa

SEQ ID NO: 6452 - DNA, 800 bp, Zea mays
aatcttgcatgcctgcagaagcatcttcttacacttggactgatgttgaaaacttttttttttttggatttttaacatccaaaaccataatctatagtggacggcttctgaatttctttaccatggtaatgagtacaaatcatttgaagtttgtgataagtatgtgtatcacctaatatttcaagtcatacatcaaagcaacaccttggattaccatactcccacgcagaaaaactgccacagagaaggaaaatctactaacacaagtttacaatcctaccattttctgttggattttggatgcaatttcctctgtactagctgaccttcaccaacaagatctcccatttaatattatcttcttcaactgtcaggtctcaccttgtaggttcagcaccttgcttgcattatgctgctgaggccttgcttgtcaaggatggaaacagcactgctgcatgcaacatggctgccccttctcgaaaatgtttatcctggggtttaatcctgccctctagcagataatctcggtgggagatttgatgattttgttttcatagtatatgcatggtgttgcttttttccctatcggccagcaaacaccagctgggctaactatatctatatggaactgtttccccatagaaaccagctatcaatccaaatatcatactacccagaaagattcagttgcacagttaagccccacatccaaaaagtattgaattgattcttcttcctcacaatcatagaaacaggatctggagcccccctgccattttcttctctttagagtgtccctg

SEQ ID NO: 6453 - DNA, 883 bp, Zea mays
cttgcatgcctgcagctcgggatcaggtgcatttcttggccgtgatgattgtcaatttgatttttccgtgtgacctcgatgagcttcaaaatgcccatttgatatctcacatagttactaaaatattctgtaatgtgacattgttaattaagccttaatactggctatttgtgacaatttgtatctactttctgggaaagcaatgaattcccttctctctgaacacaaacataattagtattaagccttacattttgccatcatgcattgagaatttgacgagttaaacctaatagagttttagtgtggagtaagggcttcaaactggaacaacagagcatgttcgagattttgatgagtaaacagatgattgagtattgtatatcaggcttagcaccgctttaagaattgttttcattagttgaaaaactaatgacactatattagacttactcagttctggttctgattctgttttctgaatagttttatgttaagaggacaatgactacaccttacctaatttactttacgaatcatgatttatgtatgcattttcagttcttgcaaatgtgctacgtattagatcagcacaatagtttcctattttttttaatatatgtttcttaggtgagaggatttgttcttatctcttgaatgtcatatacctttctgacaacagaaataaattccgtatttcctgaatgtgctttatggaataggcatgcagtaggaaggcaaggtcaagttttattagatctgaaatcatcagcattttgatccaaaagagaaagtgtggacaaaattcccttcctgaaggctcaaaaaataccccctccacacaattttttgtgatttcaaatggaaagaatactgcccaaag

SEQ ID NO: 6454 - DNA, 790 bp, Zea mays
atgcaggtgccttccttacctctaaaatgtacacccaccaatagactgtaatccataatcttctcctgctcgaggaactcacagtccttgtccacttgcctgctttaagatatttaacgtctacattagcacaagggtgaaactaacaaggttatggaccactccttaggtcataatggcatgagatattcacacctttgaaactcttggtaccattgtttctgtaaccgaaagataaagttaagatcaaggtctttcagagttgtatactcatcaatttctgctggtggcttgtcagttatacggccaagagatgatcctttcagatcaaatcgcctatggatagtatgatcagagcagaacaaatttcccattatcacaaaacgaacctgagtagtaagtacggacacataaaatcagccaaataaaatgatgcttcaatactaacatgttctgtttgacaatgacaagtatgaggcatcagtatataaaactggaattgtgtgttttcagtgtttaggtgtcagtgttcctggtgctggtgaatccacttgctatcagttttgtatctcggtaaaactatattttctctttagtgaatgatgattcatgctacccatttcaaaaaaaaggaaaactaaaaataatagtagcaaggataagtgatgagaatgcaacaggcaacaatatagttttctaaccttcttctggtgtgatccagactttacacaatgtaggccaaagaactttgtcactaaggtattctcaaatgcacggacatgattgtagt

SEQ ID NO: 6455 - DNA, 762 bp, Zea mays
atcttgcatgcctgcaggtatgggattcgctcttgcttctgtgcaatatattaattgctagaccattaataccatacctgaatatgttcttttgtcttaatgcaggccaaactatagttgttcaaaatgataatcctgttactgcaaggttgacaaaggtacgacaattgtcatcctctgttattatttaaatttgacatatggaatcagcaaaaatcttgtcatcatcactatagatagtaatgtttgaaagaatcatatagcaatatcttataaactgacaataatgcaaaagggctcatagctgagtttgttaggtagtctaaatagcactcttcatgtgctgagttcgacttcgtcccgaccccggttgtgggctacagtacttctatgtatgagtgtgacagggttcgagggttttctcgacatgcatagaaatattttattctgaacgcaatgcctaggattgtcttatccccgtaggtcgagtttttttatatataaactgacaataatgatgaggcctgctgaaccctaaaatcatgtcaacaaatatcagaatttttacatttaggtttctttgctcattagcttaatcaatgcatgcttttattctctgaatacaggggcatagcagaaagattcttacagaagttcaggattatgattatggaggggcgaattctatgcatgatccacgcagaaagcctgggactgggggcaggaatggctagaccattaaactccttgttattacaattc

SEQ ID NO: 6456 - DNA, 806 bp, Zea mays
ctttgcccccgagcagagccttcgtctcgttcctcttctggaggccagtttggaggcgccagtggttgagagcagcgtccggtgctagggacgccaagaaccactggaccgagtggcgccagtacgggacgcacctcgcctcgtagccaacgcagcgaagggcggccctggcgtactcctcgggcgacggtatgaacggagacgcgcccttcacgggcgacatcttggtagcgacgtacaggggtatctgcacaagcacaggcacagccaagccaaccccatgggaatgggatgtttgaaagcaacaaggtaaaatccttggtttattacgacagaagagcggcgagaattcgaaggtaataatatatatacctggcactgcacgtctacgccgtattgtttgtattccacactcaggcttcgagaaaactggtcgacgtacctgaaagaccaaaaatgcatagccagcacacgtgtaaagatactgtcacgtagaaaactcgacgtactaattgcccgaacgttttgaacagaatttctataatctaatcgtacgtgcaaactactgctactactatctatctgtgctctgctgcatttggctggaagcatatgcctctctggtaccgtggcaagtaggaatatgtacaaccggcattgatggcggcgcagaacattcaatgccgtgtttcttctgtgcaaggactcagcataaactcaaaacgtgggagatataattatcatatatttcatacatacatacattttccagctattccaaacaaactatactgctggagcacata

SEQ ID NO: 6457 - DNA, 767 bp, Zea mays
atcaccagcttgtgtgcggcgagctgggcagcatcacagccaggttcttgcgccactacccggcggcgccagctgggacgacggtggagaaccccggcgcggtgaccgtggcggccatgtcgtcgacggacgtggccggggcggagtccgaccaggcgaggcggcccgccgagacgttcggccagcgcacatccatctaccgtggcgtcaccaggttagtagaccggacgacgtcctccgactcacacgcatgcatgcatctcagcccaaatcttgatgaaccggccatatacctagttcttatgcatgagatcgagcggcgctacttttactagttcttatgtaagttgttttatgttacttttgtatgagtatgaatggtcaaattatgaatgtgcgatgatgaatccgtggcttgtaataaaattactgtattttgtccgaataaactctatatatgcacgcgtggactgagcaatttgcgtcttgtttgactttagatttatttattttatatcactattgcttgatccctctttagcatacacccctgcggccctgccacatcgctaatttggattcaaatctgtgtggtgataatctgtttcttctattgtgtatattgggcaggggaatcgaaattacattgtaatagaattcatgtattctgaattgtaaaaggtttactagataacacttgtcgcacatgtctaaggcccggccctgatattgggtaatgcttcaggcacccgtggacggggagatat

SEQ ID NO: 6458 - DNA, 877 bp, Zea mays
tgggttcttgcctccctaaacccatatgcccttgatagatcacatggtggagccatgaaagtttaactagcacaagcacaagatgtatcatgttggactcgccaactacacatggcatcctgtacctggttggatgttgtccatggcccatgtgaccagacaaaccccaaatggccaaacaaagttaaaatcataattccacccccaatattttggtaacacacaccaatcgagcacatgataccaagaggtccaatgtgacagaagttacagaaccaaaaggctaccctgcccacataagtagtccagcctaatgcgttgaggcacaagggcatgtttagttgctgccctggcagaaaaataaggggactaggcatgagtggaattgtccccccagcaatgatagctcatgcattatactttcagataagaggtagaacctgaacatatacggcatcagagttattcaaccgagtcctccgtaatgaattgtcttttttattactgctgcatatctcttcacaccactcttcttttctgtgcaacaaccgctcccagtgtagaggtgtctttttaatgttaaaaagagataataaatattttgctatacgttcttccccaactaccgagtctttaacagctcctgcatatgattgaaaagaatgctattgatttaacagtggaagaatgcaataatatgattttctttcgaaaaaaagaatgtaaccaaagtattagtagagtctaaaacttgaatcatgattaaactttgattattgtatttttaggaatcaatgcctacaaagagaaccgggaataattgatgaagaatgtttagccaccaaaaatcaaagccaagggtggattaaagaacccc

SEQ ID NO: 6459 - DNA, 699 bp, Zea mays
agcttgcatgcctgcagctcatattgctcgggcttaattgtgtttaatgttttataagcggttgttgttgtagtaccaggcagtcttgcagacatgtgatagacgtttttggactcggcttaactgaccgttctacattgctagtctagtactctagtttcagttgatcgttgccatttgacttttcacaatggcataggtgtttcgaattttgactgaccatgtttaggttttaatcctcaaacctttgatcgattgctttgttcaaagccaatatatgtcaaaattatacttctgcaattttgtttaatcactggacaggatatttaagattttgtgagctaagaataagagcaactaaaaactttttatacctcctgctgtacggtacaaatagagatttgattaaaagaatcccctttagtaacactttttaggtactctcttcaatatcttttagaggcacattatatctagatttatcttgttcttcattaatattgcatcttaaaagagtgtcttgcaatcttctcaactggctttgcaactcctgctcttcattgttttcaatcagttgaggaaacttatcctttggaggcacatcccacacatttatcatgccagagtcttgtatatttgccatatttaatcaccatactcttgccattcatataaatttgtttgactttcagaagatta

SEQ ID NO: 6460 - DNA, 663 bp, Zea mays
gactctggcgacgtcacagcgttgaattccggcgagggggcgtggtggcgacaacaaatgacgctggcagagcagagagcgagagaggagagcgagcagcatcgggaaggaaacgaggagaaatcaccgactccatttataggtgagcagggcagatcgaggggcaccatacgatggagcggctccaataatggtgttcacaagtggaggcataagcggggagatgaacggtatggacggcgtaattctcagaaaagaaacggcggcggctgcgtgcacgagaatggtgcccggtgctttccaaatttcaaccgtggaagatgagcagcaagaaaacccaaaagggtttttaaggtagtgtcattgatttgttggtgtgctcatttttatcattaatcgtatttttttttagttttattcttacagtgctatataacagaagaacaaaattaagcaaaaaaaacacgactagagataaaaataagcaaaccagcaaaaccgagagcatcaccttaaaaaacccaaaaaaatagaaaggggcccacctgtaagcgtaggagagggagggaggcacgtacggcgagagtggggctgggctcgtgcgttcttttatttatttatttatttcaaaattctctttccttttcttttttttcaaattct

SEQ ID NO: 6461 - DNA, 813 bp, Zea mays
ttgagagaggctgagagggaggcacggacgtgcagtgggccacgcgcggcgcgagagcgtttctttttttataatagttatatttaaatacttataaaattataataactccacaaataacttttacataaataaaattccaaattttgaaaataaataattttaggacaagatctattcatttaaataaattgggcttaccaaaaagagtaaattaataaattatttgtaacttattataacaaaccaaagatcatgcttaaaaatgaatgcattcacacatttgaatttgaactccgttttaaaaaaataactatttcctctttaatgattttacagtaaagttaaattgcttttatccaataaatttgaggcgctacataggccctgtttgggagggctctggctcctctgaaaacggctccagctccgacttctttaaaggagtagctcttccgtaggagccggtatcttttacaaatcgtttggcaaaacggctcctcgtgtattttttgatttggtgtatcaatttgaaccttttgagactaatcagaaaattatagatcaatggtttggattgtcctaaagctaaactgaaactgaaataggaactgagccaaattgaaactgagacagtagtgacaacgtcaaactattgcagcaccaaacttttgcagagtgagggcgtcaaactattgcaggattcatcaaacaaaaagacagctttcagctaaagggtgaaatgaaaataatgccaccaaactacaacctttgtaaaactgctaccattgatctagaactgctacttagcag

SEQ ID NO: 6462 - DNA, 889 bp, Zea mays
ggactgtggaaggctgcgccccttcatgaagttatttggtgttgagtgtaattactactcagtgatcaccttatctgttttctttatatttatcattcttttttgtatttggctgatgtctttttactgacagcattaccaggagctgtggatcttggtccttttgttaaacttcctcgtgattgccaagaacttgccatttcatgcctttattattttcccagtctgctccctgacgtcattgagccattggcctcatgttgcttaagtaagctatttttcttaaatagtcaccacttaattttgtagcactattgttgatttttcatgttataaattctgtgtactccatataacctatgaaatccaggtgatgcgctggaacccctcatactgttcagggccattgaagtcctacagtcaacatacaaggctggtagtttacatataacagagcaactcagtttcttgttgctgctaatggcaagattcagagttcatcctggtgattacttaacattattcccattcactacatgtccaatcttaacggaataacggatcgattattttatctgaacttattacttgtcttcagtaattctgctgttccattacctgcccccccccctctgacatgtatatgttacttcgttaaattaaactaggggacatagttactctggaggattctagcaagctttcaaattgggatactttcaagtcattgaatcggctaattttgactttcctatctgaaatgggtgatggctcgctggtccttgaattgatttggaataatttatttaatgcaattgtgagtttttctaaacttcggttatgtttcatgttttatttgcacaacaattgaactaacattgtgttcgct

SEQ ID NO: 6463 - DNA, 748 bp, Zea mays
gcataaattgacccgctgttggagtgacataattgcaaggagaattgtcgcgtgtattcgtccacttccactatacttgtgcgatacaggtccttgagcttagccaagctattggttcagagagaaggcttgaaccacatgttgaagaaatccgcaaagcaagcctaggagaggataccgtggttgcgctcgatggattaataccactcagttgttgcgccctccatctgaagagccgcaagccaaacgttctcagcgagcgtacacatacatgaaagtaggttttgcacgtggtcaaccaagggagcgggttagactcgccatgagagcttggagaacgttagcttgtggtgatgaaggtcaaagtcatcgcggaagccctagatgaagaagccatcacctcaccgctgccgctagcatcgtcgtcgtcaccaccaccaccacccggaacatggttgctgcctttgctgccctagtggaggggacaggcggaggcttcttggatatatatcatccatgggtcgcttcaccagtcgtgccaccatacaatcatgggagaccattcgattgtcgagggttgtaagctatggcaggatctggtccaattttgccgtgtcgaagtcaccgtcttagggatcattgacaatgccgaacatagttgtcgatgcatcgattgtctcttatactaatcttagccactttggtttctatttcctttttgggttggctgacctggttggttgcacct

SEQ ID NO: 6464 - DNA, 817 bp, Zea mays
cttgcatgcctgcaggtattcgactagcacttgtattgtcagagaacctcaaatcaaatacctaacttcggttcctcagtccttgcgctactgtcctctgcttcttgacccttcttgagatcaggttcatcaaattaggaacccactcagccattgtttttccttgcagccaacgatcaatccaattccgtatcatggtgacaacagcaacatcaaacaaagcctgtgttgcgtggcacctggatgaggagtccagcccaagggcaagaggagtcgttcttttgcaaccacagccaagagatgcgcaaggcccagccaaacagctccaagttgaagatgcccagaccaccgaactgtgtaggctgctgaacagtgtcccaagagacgagacagttgcccccatttgcatgttcttgtccttttcaaaggaaacctctccttttatcgatcgccttgattacccatttggggaggtccatggcgagcataagatagacagggatagaggaaaaaacaccttaatcatcacaacatgaccagctctactcatgagcgtggctttccaccctggcaatttatcagccactttgtcaattaagggcagcaactcagtattagtgggcttacgaattgagagcgggagtcccaaataagagcaagggaaagctttaatctcacacaacagcaattcagagatagcaacaagctcctcttctccaaattggataggacataggagtgatagaacttttggcaatatttattttcagtcatgtagcatggccaaaaaaatatcaagaagctgtctgaccattac

SEQ ID NO: 6465 - DNA, 841 bp, Zea mays
agctactgcttcagaatatattattccatacgctaagttcctgaagagcctcaatcatccggtctgtattggagcaaggatcaactttcagtgccataatgaagatgttagtgaaaggtctgtttcttctcaattcaactttatttttgttgtacacatttgtttcctgtttcttatgttttatgtttttaggcgatctggagtggttgttcgcattagtgaaatagatcccatgaaatggcctggctcgaagtggagaagcctgctggtatgcatttcagcttcttttgttataagctctagtctgaatgttatgatttccagcttcctggtctcctgaagcttttgtagatgtatattcttttggagattgtttggattctggtaaaatgtgttgtttttgtgcagtcttgtgttagggaagttaaggaaggagaatgctagccaataaaccctgctataacctgttgcctgcccaacaccttagggcattgaccattgaccagtaaagcagggacttggcatatgaccacaagataaatgcaacagcagagacaatactagtctcatgctgttattatttgctgtatgatggttatatgcgacatttcatattttacctgttggtaataatcttgcatgatgcatgctgtgctaactctttgattcattttaccaagttaagagtcacaaatacactgtgaccctaagtccctaactgtagcaagcttataaggagatttgattcataccaccaccctggatgtccacatttgttgaccttgcaagaaccctggcaagcttatgagggctttctctggatactgaaaagtttgctgcc

SEQ ID NO: 6466 - DNA, 826 bp, Zea mays
tagttttgcgaacctcccctccaccagacccaagcttagcagcatctacaggcgctgaaggtcttctagtctcaaactgatccaagttcatttggtcaggtgtttcatgcggtggcctggtccaaagttccctcggcctatcaaatgggccagactgctggccatttgtacctccaccaccaaacttccttgccagtccaagttgtggaaccacagttcggttaacaacattaccagggtagagagagggcacttgtgctcctggcggagtagatagtgcgagagaacattcttgagttgtagctgataatccattaacagcaactggggcacgcatataactatgcagcccatatctgtctttcagtgaacaagcttccgacatcattccttggaacttaggaaccgcccgagaaatttcttgaccttgcaagacctctgagaatccaatagattcattgaagcctacacattggtaggtaaaaccagagctatgcactgcgagtctgcttgttggaccacccaatgcgcagccatgtgcattactaaggaacctactagcatcagaagattgaagttttgcagcctcagcagtttgaggagcacacggaacatgacaagtcctaaaactcatcaattcttgaccttgcaagaccctgggtaactttccagtttccatggagtcagtacaaccattccctgtaacatctaatgcgacagtcaattagcatagaggtaaaaggatagcagcatacatataccggcattagtcttgtgctatgagagcttccacattgctgaacctccaaatttcctgagacacacc

SEQ ID NO: 6467 - DNA, 810 bp, Zea mays
tgttgctcctcactttctaatttcggctgtcgcattcctttttttacccattaccaattactaatttcggcagttgtagatacggatggatcctaaatatccaaattatatcatagatttatctggtgtttgatttaaagaatcactacatccaatacatccaaattaagataatgcatcataggttcattcatcaaatttggtgggatgacctaattcctcatattagtactaactaattaactatgaggaatgaggtggtgatggatcaactcattccattccacaaaccaaacaaaaatagtgaggagtgagaagatgatagactagctcattcctcaaaccaaacaccctattaatgttttaacatagttgtgcgtaaaattagatgttgatctttaatcatgttgttaaacatattataaagaccagaataaaattttgtataatttttatgcattattttctctcaacaacaaaaaaaagttgaaaatttaaatctgtatccaaattttatgccgattatttaaaaaagatataaaacgaatttaaagcttattttttatgaataaactcaatgctaaaaacaagaatataaatttatatagctatcatatttattcgcaattgaaaaaagatcagatatttaacatcctaataagtatatggatccatcctagtagaagtgtcatcagcatcttgttttccagaattctatatagaaaggagtacacttctgactcctgtgatacagaaaatttaagtattagaaaggacgacacatttttcttacccttgaaaaggggagta

SEQ ID NO: 6468 - DNA, 810 bp, Zea mays
tgagatctgtgcatgaatcttagtttctggtgctctgaagtcatgggtttggctggtagcctgatacagtatacacctatttattaagtgtttacacagttttttgtccatatgatgcacagggtgagtaagctctttttttttaataaggaatgtgtaagctctttacatgctcatctattgatgacttgaatataacaatgaatcacaatgattgtttgtgtttatatttgtgaaggttcatgttgttaatatctgatacggaaacatggctgagttgcgtgttattttatctaacttttggttatctgaaagtttatgtagaggacagccctctcattcatcaggctgaatatatcatagttcagtgatagcaataattcttgaaaactaaactgacttaactgtgttgtacttctgtagagcaaatcctgtgcaggcaggatctcaggctgatttctcccagtggttatgttatgtccataacgtggttaatcgaaggtgagtccatacagccaactttgtgcagttgtttattgttgcctttgaaatcctctaaggcattgcaagtgttgaatatgtttatatagaatcataggaaaagtaaggtctcagggccaaaaagaggaaaactgaggcacacccttttactcctacaataaggggtatgtcagtatatgttcataagtgtggatgtttccattctaataccatgatttgcagaatcttgagcttctgggaatcccctgacgagcttggtcttatgaatttcctatctgatcggcctgggttttttcttgcaaccttgga

SEQ ID NO: 6469 - DNA, 743 bp, Zea mays
cagaagctgctggagaggagccttgccaaagagggccttaatgcattacatgcatatgcatatgttcaatctattgaaatttgatgtattcaagatatggtactaatttcgttattctgatttcatttcatttcagttgtcatatggtaatgtagcagcagagagtaacagatccacaagttctgttgattctttgtctattgaagataacaagagttcagagggacatgatgatatattcaaccttctgaggaatatccctggaaatgacagttgtgcagaatgtcgttcccctgatcctgattgggcatctctaaacttgggtattctgatttgcattgagtgctctggggctcataggaatcttggagtgcacatttcaaaggtgcaataactagtttccttataccatgatatatgctaattggtgatactgtttggttggagatatcttttgtagaaaaaagttcagattcttggatttattcacttagtaatgatagatactagatacagtaaatatattactggatatcttactatagtgcaatactgcttttgttctcattagttgtcatttttgacattggcatctccaatacaaagctttagtggttatgcgatctattatcatataatataaaatttatttccatgtggtaaatttaagtacttctatggggtagtgaaccatgcataagttttaaagacttggtatgaaaagaaaacttcgatttaataca

SEQ ID NO: 6470 - DNA, 904 bp, Zea mays
agcttgcatgcctgcagccccggtttcgcaagccgcgccgtggtttgcttgcccacaggcggccaaaccgcaccctccttcccgtcgtttcccatctcttcctcctttagagctaccactatataaatcagggctcattttctcgctcctcacaggctcatctcgctttggatcgattggtttcgtaactggtgagggactgagggtctcggagtggattgatttgggattctgttcgaagatttgcggaggggggcaatggcgaccgcggggaaggtgatcaagtgcaaaggtccgccttgtttctcctctgtctcttgatctgactaatcttggtttatgattcgttgagtaattttggggaaagcttcgtccacagttttttttttcgatgaacagtgccgcagtggcgctgatcttgtatgctatcctgcaatcgtggtgaacttatttcttttatatcctttactcccatgaaaaggctagtaatctttctcgatgtaacatcgtccagcactgctattaccgtgtggtccatccgacagtctggctgaacacatcatacgatctatggagcaaaaatctatcttccctgttctttaatgaaagacgtcattttcattagtatgatctaagaatgttgcaacttgcaaggaggcgtttctttctttgaatttaactaactcgttgagtggccctgtttctcggacgtaaggccctttgctgctccacacatgtccattcgaattttaccgtgtttagcaagggcgaaaagtttgccatcttgatgatttagcttgactatgcgattgctttcctggacccgtgcaactgctggggcatgggaagcccgcaacccctgtcgatcgaggaggtggaggtagcgcctccgcaggccatggag

SEQ ID NO: 6471 - DNA, 802 bp, Zea mays
  unsure (1)..(802): unsure at all n locations
aaataattaacgaccaaagaatgatgcaaatacctaagctcaaacaatctgagggatccaatgcagcagcagattctctgaaggacatttttgtctggggtgatgctctgggtcgtatgtcagatcatggacatgtatcagcaagcaatatatcacttccaaggttattgaaatcgtcagagattcttgatgtgcagagcattgcctgtggagagaaacacgcagcaatagttactaagcagggtcaggtattctcttggggtgagggaaatggagggagactgggacacaaaacaagtgacagtgtctctgaccctaaaatcatcgattctctttcctccacgcctgtgaagactattgcatttggggcaaagttcacctgtgcagtttcagtttcaggagaactttatgagtggggtgaagggatccacagcctagggtttgggaccaatcagtgtcaaagaagcccatggttcccgcataaattgatcagaacttcagatggcatatctgtggcgaagattgcatgtggtcagtggcacacagctatagtatcctccacaggtaagctgttcacatatggacatggagcatttggtgttcttggacatggtgacacacgtagtgttgttcagccgaaagaagtggagtccttgagagggttaagagtcaagtccgtcgcatgtggaccatggcacaccgctgctattgtggaaacatcaggaacactcaagagcaatgctcctggtgggaagctgttcacatggngtgacccaagcggagagaaactgggccatactga

SEQ ID NO: 6472 - DNA, 900 bp, Zea mays
  unsure (1)..(900): unsure at all n locations
cttcttgcatgcctgcaggctactgaccgtgtcggtgaagtgcgtcatgaagtacccggtgacctgcgccaccgagttccggttgatcctcaccgtgtccgcgaacttcttgatgtcatccaccgacggcttggaggcgccgctgatcttggcctcgatgttgagcaccctcctgaacgtcgtgaacttcttgaacgccgcgagcaccgacgagtcgtcggactggatgaacacctgctgcttggtctccttgtcgtagcccgccttggtcagcgcgctggacaccgcctccaccacgccgatccctctcttggccaggtacgaagcatgctgcatgtgtgcatcagggcatcaggcacgcacaagaacgcttgaccggtacggtattcaccttaaagaaccgttttttcccgatgaacagacagaccgacagaagcaaccctaactgaatgctcacttatctattacctctatttcgatcagtataccggtgatgttgctggccttggccaagtccaagaattggggcacagtcatcagcttgccggcattcttcgcttgaggatttcttttcatgcctgcctgagcaaacggggagatgaggtcggctgctcagatcaagaggggggaagaaataaacggttgtgagtgcatgagcaaatctggcatgacattgtgcggggggtaagcaaacacatgttcttcacgtacgcttcaaggtcgcgatctcactccatgacaggtcgaacgagaagatgccggacttgttctggatctcatggacagtggaggccttggacgcaaaagccgtggaccgcggccgtggagctggacatgtcaacggactgcatgcagaaggccgtccngtcttttgacttctgaaccgtgcagtctatgacg

SEQ ID NO: 6473 - DNA, 739 bp, Zea mays
ctttccttctctccgcaacttgagggcattgcgcttgtgagccagggattcacgctggattttgagacgatcccggctggacattgctttctgaggttgagtccgcttgctcgcttgtgcaggagggggagaagttatgtcgtcagtgtgattgctggagctagcaggttgttggaccaaactgttctgttccacagcaggagtaatggagtcacccacaccatccatggtgtcttgttgagcaccttcaaggtgcttttctaattgttttgccagtttcaattcttctctagcttctgccatcttcccttctctcttaaaggcaactgcttttctcttatgaagtaatatctcatctttaagagtatcatctccttgtgttttctgatgctcattacgatcatgtactacagaaggtgaatgtgaccctttttcagatcccaacggatcagtaaaagctggctgcgacaaggctggagaccttccagctctactttcttctcccacatcaccttgattaggattggttgtctcaatctgcggtttacttggagaaccacacagagtaaccactggcgtaccagattcagatgcatgcactagcaatatttcgtccccgccagcagtagtaacaccttgactagcactcaagttatttgattcttccatctctgcaagttgctgctccaacaccttagccttctcaagttcctcctcagcttcagtgtttttccctccc

SEQ ID NO: 6474 - DNA, 800 bp, Zea mays
gaggatgtccatggctggttctccctagatttcaccgcggagcagctggttcagaacgtcacttgtaagcagcaaaactaagaactgaagcacacagttttcccctgtcagaattgcactggcttgaccttgacatccttgctttcctctcagtgatccagaacatcttttctcgcccgagcacattcgatgcctcctttgggatgtacacgctcgatgatgtcgttgaactccacccccctcaaatatggctgaatgtagaggtaaaaatgcgctgattccagtcagcctccccctcttctcatctctcaaccatctaaataaactgtgatgcgaccttttaatttgttcacttttgcagtacaattcattctttctggagcacaagttaagcagcgaggactacatactagagctaccaaaagattttagcctcacgtacatctcctcgccggagattgggttcctgaaaagcttgagtgggaagctccggaacgccaagacaaagctcatcttccggttcctcaacgaagacgtcgaggagccttcgaccaagaaaacgtacggggagctcctgaaagatctgaagtccatcaaggagtttgcagctggcgtccttgtgcccaagacgtacatctggccactgaaaaaggaccagtacttggcgccatccaccagcttggtcaaggatgctcatgccctcggccctggaagtgtacgcgtccgggtttgccaacgatatcatcttgagctacaactacagctacgatcccactgcggagtacttgcagttcatcgac

SEQ ID NO: 6475 - DNA, 810 bp, Zea mays
tcttttcgatcaaagttgcagggatagaggggggtttacagtggccactccatgtgtttgggaaggttgccctacgcgacgcagttgatcacaatcgcaatatggtcttcgatcgcactagagacaactgccaaatccttacaaaagaggtttgtgttatttcttacttttcgttcacgtacttgttcgcgtcttgctgtgctgcctaaagtagcaattataattttccaccaactactatgctttccccacgcgtcattgctatgacggcatgctttcattacaaagcattcttagttcttcgcataggccctatctatgtaactataatttcatcagtgaacaacttttattaagttgcagagaaaacatgtcattacatgttgttttgttttattaaaactcctcttttagaaatgaccatggttcccctgtgtggaactgccatatctatacatgcatcggtggctcggtgcctttaggctgtctctagcagcttacccatcgtatctcttatcccatctcctatttcaaactccactcttagactgtctccagcagatcgcacatatggtaagcgatgtgacgtgagaaattggataggtataagattcagtcatgcctgtaggtatgatcttaagagactacatgcatgttcacaaggaaattagcttcttgaagtcactctgacttattaccaattcaaattggacgctcttattttactcaatgaattactgatatgatacattcaattttagttgccactcccataatttaggtagttgatgatgcacaatgacagctaga

SEQ ID NO: 6476 - DNA, 736 bp, Zea mays
cttgcatgcctgcagctgaactatgcagtgaacgtgctcctatccatcaacgttgtggtggctctccttgtcgcgttgatccttgacaacacagtgccaggcagcagacaagagcgcggtgtgtacatttggacagatcccaaatccctcgaggtggatcctgcgacattggaaccctaccgattgccggagaaggtttcgtgctggctcaggtgggcaaagtgtgacaaggttttgctctttctcacacaacattgaattatctcaaactcatagcagggtactttattcgccactttattcacctcataaccattagtgttcatccaaaaaataaaaaaataggggaacacacacctgaaagctgtcgatctggggtagccgaccgaaccgaggaggttggagatgcgatgtgtttgcttgcccgtggtttgagcttggatcgaggcacagacggtcaaaggcgtttacagatgctgatcttgggccgaagggaaggtggtgttggtcgtcggtggtcgtcggtgcccgcgacagtttcggcgacgtctgctgctacctttgcggatggaaaccgccagatgcgagctggcgtccctggaccagcccgactgcccacgcctgctgcctagcttcgctgacgaagccgaccaagctcgcgcgagaccgtggttgtgggggagggtcgctagagaatcggagaaggtctagtgctcgtcgaccccggatcgacgag

SEQ ID NO: 6477 - DNA, 782 bp, Zea mays
agactcaatgaccttaacaggcagattaaggcatttcaatttttgcttgaagatgatgcttggcaaatagataataaggatataggaaacactcaactgttaaaggaatcttgcagtctggaggctgctaaattgatgagttttgtgatgaattatgtgaagctattatcttcaggagaaactggtccttttgggtcttatgatgttagtagttcctgggatttgagtctatgttccttagatgaaggctcttttcctatagccacgtggcagcttctgtgtgaaaacattgacgtttggagctctcatgtttctaagaaggatttaaagaactttttctctaatttgataaggttttcttttactcaaaagagatcttccctggacaaggagaataatggcactcaatcttcgggcagagaaatgactttgcatagtgtctctattggagtcctttgtgatacaattatttatgaaaaaaaggtatatatcattgtaatacttctatcccaagaaatttttttcgaagtatgttcgtaatattgaatctaatatttgattatctttgtttattttatatttgatagctgggtgctttctttcacatgcttttcttaatgacttgatcaaatttgaaatgcatatttctaggtaattttgaagaatttggcatcaagtttttgtcatgctttgaagaaatcgttttcttttgttaccaactctgatggagataatgtctttttggacacttcacctgatttgatggagacaataagtaacct

SEQ ID NO: 6478 - DNA, 798 bp, Zea mays
gatcctctacaggcgacctgcagctctccctccaatggccggagcactacgtgcagccgaggaaggaggcagcagctgcacaccgccgccgccacacaggtcaagccctcttctctgtttccagacgccgcccctcaaaaccctacctatcccctaaggcatcgccccgccggcgccccgaggacaccctgccggcgcttcgccagcgccttacgccgtggcggacgccttactccacagcgcaaggcgagctagacaccttgccctgtgagcgcgctcgctaaggcgacgcttaatggacaccttgataagcatggataaagcattaaccatgtgtttttgttgccatcattaataaacatggtgatgaacaggcaaaagagaaaagtgaactagttgtcacaatatttctcattttgaccaaattagaaaatacgtgttgactccagttccatcacaagaccaaaagcgagtcaaaatcaacaatttagttaatgagctgtacatagctgaggaagtgacgattgaggattgacgaataccagtaaagaaatctttcagttgaaagagcctagcatttgagaatgcatgaagtatctttgtttctcgggtacataaatgttataaaaaaactaacctcagcatggaaccggtatgtatttgtgaacattttttctacctattaatacagcatcacacacgtcttcatcgtgttcaaggaaaaacagaatattgttttatcgccccaacagtgggtattggataactctcagctcacaaatacttgacacatttgac

SEQ ID NO: 6479 - DNA, 622 bp, Zea mays
cagtttgcatgcctgcagctcaagacctcagattacagaggcacaactcgctcttcctatcctctactccctaggagatgtcacagtcgtcttctacctacttgaatcccatagctacgactgggattctgacgaggtgaccgcggtcacctttcatggcaatctcaccgaaactgtaggtgccggtcacggacctcgccgtcagggtcacagttatctctcgtgatgctccggggaccacggtcaccgccggaggcgtcacctccagggcgacctctggcggcatccttgtcatgatggtgtaggtctcggtttcgtcggacacgctcgtgacggtccgcttcactaccaccgtgcctcgaagctgagagacggcgatcgaggggatgttgaggtcgaaggggcgttgtcccttggagttggagttgcaagccgagccggctatgtttgatacttcgctctggttgacgtcggggatcgagcacagaaacgtgatgtagtcttcatggcctgccaagcatggataaagcaaaactagatgagggatgttacattgccatctgaataacttcaacaagacaccgccatttcgataacttcgaccggcttatttcgatgaaaa

SEQ ID NO: 6480 - DNA, 782 bp, Zea mays
ttaacatgttttttttttctcaaggtgcgtgttgcggctggctacgttatcatgcatcgtacgcgtccacacacatatatgtaatcgctctcttgccgcgacaaaaacaaaaaacaaaaaaaaaaaaaaccgcgtttgatcactactggctaaggtagctaaccattaccatttgatttgaccagactgttcacatctctgtcacccaaaacgaaaatgacggataggtgcacctggatggagtagcgtgccatcgtatactccctccgtttcgttttagttgtcgctgcatactacaaaattaaactatccagtgacaactaaaaagaaacggagggagtattgtttatacggccaagctagccggttgtgattttatctggttattagatgggtgatataggtaaatccaaatatgttttttttttcacctgctgtcgtgaaaatgaatgttattaatactttttttcacggttggtgcatggtgctatgctatcatgagatatttaggggagttaatccaggtgcatgcatggtgctatcatgagatatttagggcagagctttcgtcggctgaacgcgcggctctcacagtcacatcacatcacatcacatcacatggccgtggctttcttgactcgttttcaatgcaagatcaatatgtgtttgaactttgaacttcgaaagcaatcatcatctaatcgggaacagcggcaggtctgagcacccatcgggccagtgaaaaacacatgtagtaatgtaggagtccatcgtgtggatgt

SEQ ID NO: 6481 - DNA, 816 bp, Zea mays
ttctttgctgtcactttgctatatgaccgcgttttgcccatgaaactaccatgtaagcttgttcgtttagctctcaatctatgtggattgagtggaattgggtgggtttaaatcctaagtaaatcaaattttttcacaatttttttctagtcccgtccaatccgtaggtaacgggattaaccgaacaagacctaacggagagaagatagaaccgtgaaagaaaggcttgtgggatgtactacgttgcttctggcatttagaattcagagacggtaagattattttatcgtagcggtttagttaaactcttttattatatacaaagaagaatcagtttccatttcattgttgtcgtacataacgtcgatttagacgtcaatcactgcgatgacaatcagcgacggtgccctctgcagaggcgcacacggttcgcggctagacgctggacgatccacgaactgatacaggggctgatgttcctgcctaaaggatcggacggtccgcgcctaaaggatcggacggttcgcgcctataggtcggacgttccgcacgtacgtaggggtcggtgaagattgccgacgacgcctggatctcgctcctacgaaggaccccgttgggaaggagagattctaggtgttgtctaggcctaaacacctctaatcgatgtagagccgaagagaagcgaaaaatttagggattaaggggctaaactagaattactcctaatgcataaggtaaaaacgacgaattagacttgattttgataaaattgttcaaggtatttaaatcgggccggtaacccctttcattttatat

SEQ ID NO: 6482 - DNA, 770 bp, Zea mays
tcaggccagatatttcttccagcatttgttgtttctcataatcactggatttaagcttcaattctagttcattagaagtcttccttaacgtgtcttcattggatctagcagcttccatcaactttttcatatgttcagcatctgatgtcaacatttcctcgctttgtttggaggcattaagggaatcaaccaaccctttaatcttatttttagactcctttcggaggtcttccaattgagactcgtaatgtctcaattgtgtactgacatcttgaagattagcctcaagtttagccttgtctgctcgtaggacagatacctctctaatagcatccagagtggcactttctcgctcctcatgtgtggaggagacctgtgcagtgaggctgacgacctccctcttgaggttctctacttcaagagtcttttccttctcgatcttattgagcatgaaatgcgcgcgattaattctttcttcttgttccatgtgctcctggaatatactctccaattctgacaataaagattgctctttagaagaaacgtccttatgtagtgacgaaagctttgcctcaaggaattccactgttttgctaaactcaaagttcctttttttcgactcatcccagttcctgctctttttgcgtaagatgaccatgcatttccaacttctgccttttcagatcagcagttagattctgaagagaactgcactcttcaataaggctctcaacagtagattgtagtttagaattagatcttctcagaac

SEQ ID NO: 6483 - DNA, 796 bp, Zea mays
aggggtccacagctgaagcaagggcacaacaaaccggaaagaaacgcgcaagatcagtggccaactcgtctactaagtctgaggtatggaaagacttcaagttcagcagaaggtgaacccgagtgtttaaccttgcaagattttttttttttttgctgacagtaggaatggaacgtcatctatgttgaggcatgttaaaaaaattaacttccaactactgtctaatagagctgaagtgagcaactatttcctgcaatatgagaaaaatgatgatgggtctggtcgttacactgtaaaaagggatatcatggccatgtgtttgaaaggggaagaaaataagtcactgaagctatcaataataatcttggcagagttaatttcaccttagataattggcaaccagattgtcaaaattacaattgtatttgcattactgctcattatattgatgctaaacggaaattgtataagaggaccatttggatcaataaattgcatccaccacttgtcacttgatatggtttctattgctgatgaagggcacatgtcttttgtaatggaaagttgatagtaaagttatttgcatgaccctagaaaatgcattgtataatgatagaatggtcgctactagtactcttcaagcttacttgctgtgtgaaggtgctctttttacctagccttttctggtctaactatatttgaaggcaaacaagattggctctactccaaaatctttccggttctttccactacctaggtaggtcaagggttaaaaaacaaacatgccatgaactga

SEQ ID NO: 6484 - DNA, 763 bp, Zea mays
tctgcttcagtaaagggggaaaatgaaaaacagaatctagattttggcactggtgatttctcaatagaaaatcatatagcaacagctatttttattcttaggccttataaggcccagcattaggcatgagacatgttagatgatccggttagcaaaataaatagtagtgctacttgaaagatactctccacatttaataactcattagtttattaactgaactcaggaaattagttggtgggaccatgggagagagatatgcaggaaaagatcagaccatataattttatcaacagcccaacaacataaacaagtaataaattctgaaacgaaggactcatacaagaggccatcttccattgttgtgattcatacatcttaatatcaaacttggcaggagagctctcccagaaggaacagaattgacgtgaaatagaaggcaatgaagctgaacaaacagtagatcgcttgaacagtgcatgtaatcttagccaattcaaaatcttagagaatcaacacgctcattggcatgcctgtttggaacggataaaagttgcatttcattggaaaaaaaatatgttgattcactcaaatgacaaattgccaatcttaaactctatattgctctagctggtttgaatagacacaagatccacaaggaattgaagtcaaagttaactctgtaaataggtgttcctaggggagtattctttcatctatatgtatttgggcagtcatttgtattaaaaggggggaaacaagt

SEQ ID NO: 6485 - DNA, 833 bp, Zea mays
tttacacgtgggaagtgttcaagatcagcaaatgagtgccgattcttgcaccattcatctgttgaagatgttgcaattgtaagagtacctcattgaaatttgtgtgttattattactataaattgtctatcaaaatacaacaaagaacagtttttctgcccttttctatatgatgtgtactttgagagcaagaacattgttggtttctaattgattcccctatttgacacttgctaactcttgaaaagatattttggctgatctagtttttcctactttgtttctgtgaaaggtttgccaagattttttgcgtggacagtgcaatcgcatagcatgtaggtactctcatgtagtagcacatccgatgccaccaatgaaccatgttcccatgccataccctgagatggtatatacttctttcgaatatattcccacatgttactctgttactttttatggaaagagtttttttttatctattcttcatattttaataacaatgccctttggaggacttctcaggttgcctttttcttgccatttattcacaatttatctacaataggaaatgaattggcaaacaaaaaaaacttccatttttagtggagttttatgctttgcattatgtttataatctaaatgtaagatgattaatgatcttgagtaacatgctgtgtatctctttttatgcattattctgaagctttacatgccaccaccaccaccaccaccccttggagtacccaatgatgggggccccttgccttcacctcctataccatttgctggtacataacactaaatgatcaattccttccccctatactataatt

SEQ ID NO: 6486 - DNA, 780 bp, Zea mays
aagaaacaactccggttaagatttgtttttttttttaattttttttacatatacccttcaacatgttcaccacaagcgcgcaacgaactctgtgagcaccacaagcgcttgtggtgctcacacagtcacagcctcacaggcaaccggttccggcgaatcctgtactgtaatagccccgcgctgaactttgtgcatagtgtccgtcttcctgtgtgtatttattttttgatggattggtaagataattcatttggctccggcggctgctgctttctgctgtacacaggtccagagtcttatattgcgctgccttcagatgtacatggaccagaaagaagtggtcgatgccctctcccaccactcgaagatagagccctgcattactgaacttggtaacgctcgctgctctcctctcgtgcactgagataactcatctctcttgcttgcttgcttgcatgaagttggtccaatgtaaccccgggcatatctggttctacagtcagtccaaagttacaaccgtgattttgtactacgatgcaatacagatatcacaatagctgagccttttagtcttagtacaatgtgtttaagtaaacaattatcttcactcttgtatcaattgtagtcgtatgctccccgaaaagtactgatttagtggcaaacatgtattctagaaatctcagttggtgtcttctaatattcttatgcactaggataatgaaaaaaacatccacccttgcccaaagcacatgggcaagctcagtggtagcatttatcatg

SEQ ID NO: 6487 - DNA, 833 bp, Zea mays
actgcctccatggaatgctcgggcgacggtccgttgtgagatctcgacttcctcaagagagcacagccacgaagctctctacctgcttcataggagggcgacagagacatgtattctaattagataggaaacaattctacattgagattgtggatcaatatcgagtatgatgattgtggatcaattctagactgatattctggtgctattgtgatgtttgtaccagtttgtgaaatatgaatgaaattagcgaacaagtttcagatagtattgattccagaatgaccatgctccaatttatacaactgatattgatgatctcatctcagtgatggcagttgagaaaaccaaacactcaagtggctttacacttcagccacaaaaaaccaaaagctatccataatttagaggctacccaaaagctcatactattccccatctgcgagtggaaaggcaacacaaaagcttatattgttctccatctgcaaagacaaacatccgaggttgtacaaaaaaacaaactgtgctgattttaaactaaaattcagcagtaagatcataggtgattggtccctacaagaggaaagaacaacaattgaattctttttattatgaaatatcatctgaataattatgtcatcgttgttaaatattaccatcaacaaccgagaaaatttatggatggccatacatgttcaggcaccccttccttctagcaaaaagtactagggactgctacagcaccatcttcgaatgcacagttgttgtactaggggacatattttggactgctggaacactctcaccgaatggcaccgttgtagctttttgtt

SEQ ID NO: 6488 - DNA, 779 bp, Zea mays
ccgcggatcctctatagtcgtcctgcagtgctccaaggcagatccgggaaatgatttgtgtactacaagcttcacaccccatttggactcaagagttgtgataagatcagaagccacaataacgaacagttttcctttctcagaactcaatatatttccaacttttctttgtttaccaccggatgttgactcactttcaaatacagactgtacctcagctactgcataaataagctttgggttcacagcaacagctggtaaagaaaggtagagacaattttagataagtcgttatatttcctaaatatttaatcaaaggaatataacagataaaagttagcatagacaggcagatctaactgcaacattgcacaatgagcatgtttgtttcagtagcaggataagcagatcaatcatactcacaagttcccatgcaattcatgtccatgtgatatatccatattttgtgtattttactagtttactacacaaaattgtagatagggatattctttgttgaattgaaatagaacaaaattcacatggggaaaacttaaacggttaagagctatatcatttactcctttgatagttaaatctcattgtttttccatatacaaatacatgcaggctgaatactctattttcatagctagcaacaattttaaatttcagagataatttcaggtagctctcatgatatcttatttagaaggtctctcactggatgtttcccttaaaattaagcaatcaaggcatcacctcaccagcattagccg

SEQ ID NO: 6489 - DNA, 782 bp, Zea mays
tttgcatgcctgcagcagctttgtaattgttaccattcgcctcctgccagctgcttttgctgcaattagcaggagtctcatttttgtgttcgcgatgcagttcgagatgatggagcctaagctgtgtcagatcgcgtgcaaggttgttctgaccgagcagggagcaaaggacatcatggagaaaatccacgacgagtaccgtgtaaacatgtgagatcagatgccgtgaaaattcagataactggaatgggagaatgagccctgttttcttgccttgtaggattcttgacaacctccctatggtcgtcccgattgagagattggatagagacgcgcctccattctatcagcaaggtgtgcacgtgggtgtcaagggccactacgctggggtgggttcatcttcttgattatactagctgcctgggaattcagccagtatatattaacaaatgtgttctgatctaaatgtcactagtgcagagtaatgaattcaagtatttcatccacaaccactactcatttctcgtgaagtataacaaggatgcacaaacagatctcgctaggattgtggcctttgaggttaaaccgttcaggttaaatatctcatcctcgcaaagtggagtttctttgtggtgttctcacatgttgcatgatagacgatgtcattttacaatctttttttttatgttcacagcgacagtgtacatttaatcatttattgtatctgtcgcagtcttaaacatgaattcgatggtgattggaaggggaatgcaactcgactt

SEQ ID NO: 6490 - DNA, 807 bp, Zea mays
tcgtgaagaaatagaatgctgcatacaggaagaggtacagagccgacgagccgggtgtcaggtaggacctccaccaccactggtagtcctcactgcacagctggaaatagcaaagcacgatggtgatctcggcgcaggtcactatcaggatcacaaagacgaggaacaggaacccgaagatgtagtagaactggtgcatccagatcgttgtcaggatgaagaagagctccatgaacactgcaccaaagggtaggatacctccgaccaacaccgagacggctgggttcatataccatggctgctgcggtatcaggcgtgggatcttgtttgtcctcactgggccctgtatggcaggcttcctaaacccaaggtagctgccgacgaagatgagtggcattgagattccgagccacaggaaaaccagtgccaacatggtggtgaatggcacagccccagatgatttcacgccccagaggagcatgttcagggcaaagaatatcacgaagacgactccagggaataccaagaccgtcttgatggcgaccttctcccattccagccccccgaacatcttgtgaagacgtgcaatggagtaccctgcaagcaggcccatgaagacccagagcaggatcatggctgtcatgaaccctccacgatttgaaggtgacaggagccccaggatggcaatcagcaaggtgaccagcagcatcccaaagaactgtacacctgtgcccacgtacacgcacagcaggtcggcattggcaggaggcctgaacacatcgccatggagaagcttccatccagact

SEQ ID NO: 6491 - DNA, 766 bp, Zea mays
tctagagtcgacctgcagcaccccgagcagcaggcgaccatcctctccgcggtggaccgcaaccgtcagccgcggttgctgcggcgaaaactcaaaaccgcgcaaacgacccgggggcccgatccatccgccccgctcgttcgtttttattttgtgtccgatcagtgccagcgtactggcaagtggcaatagcggcattcttctcctgtttccttcccgcttcccccctacccttgcgggccccacgtgccgcattcccttgccaccaccaaccctcttttttttcttccttcgtccgacctttccatagtcaaaccttccctcttcaccttctcctctcctgtctcgtcttccgttgaagagaggcatgcgctcgggcggcggttgggtgcttcatcatcgtacgtagctgcctgccaaggcgcatcttatctttagaaggcgacgaggaggagaagggcagggagaggaggtgtgtgtgcgcgcgcgcactgtgcagtgatggaagcggcgggggacgaggtggtgcgggcgctcggtgccgggtttgacctcacgtccgacttccgtatgcggtttgccaaggccagcgaggggcggcgcctggtggagctcggcgaggagacaagggacgtgccgctcccgggcggcggcggggcaacgctccgcgcggtgccgcgcgacgtcggcgtcgacaagggagaccgcatccgctttcgctccgacgtactcgagttcaaccaggtgcgtaccacgcccgcgcgcc

SEQ ID NO: 6492 - DNA, 706 bp, Zea mays
agagtgtggagttagtgttatgtgcatgttaatcataattgttgaaggccttataaggtttataatttgtagcgcataaggtaaaaaggataatcaacgccaactggggaaatcagtgatggtgcaaggtcgtcacttacaattttagctagtaatatactatgaatttaatgccacctctgctgtattatatctgtcacaaaagcttatgtttgacatactagttgatcccatttttggtttttgcgacaatatttgtgctataggtatgtgcatataataaatgttgccaaaaaaaagtattaaccactcttttccatggccatgaagcaaaagtgagaggtcaggttgaaagtacaatccaagaatccatggagaaaaaagttactaaagtttgaccatcaatagagtaatggaagaactaaacgaagcacagataaggaatagaaggtccattctaatacaagtgacataatattaccgcattgtatattgcctttaatgttggaagctgttttggagatatcactgacaatgagacagagcactgcatccaaaatatgaaataggatcaaccaaatgctacaaatgttgcgttgagacacccggaaaacaataacaagctatggcagaatttatgcagcacctgagcaaatgaactttgcaacggtctcagcatcagcaattgaagggttcttttgatgtc

SEQ ID NO: 6493 - DNA, 794 bp, Zea mays
tgaggcaatcagtgctactttagctgctgtaaaggctaggcaagttaacggtgagatggagcattcacctgacagggaacaatctccagatgctgcaccaagtgccaagcaaaattcaagccttataaaaccagatcctgctcttatgaacaattcaacaccaccacctggggttcggttgcaccatagagcagtgagttgaaaaaatagttcattttgctgcttgttgtttaaatttagttattctattcttatttagacattcagtctgtttaacttagaagtcatcacatttacatgaaaaatgctcttatttgttttgatgccagttacatattttggccttgtaggttgtggtagcagcagaaactggaggtgccttaggtggcatggttagacagctctcgattgaccagtttgagaatgaaggtagaagggtcatttatggcacccctgagaatgcaactgcggcaaggaaattgctggatcgacaaatgtctattaatagcgtgcccaaaaaggtaatctacatttttctactattgtaagattactgacaaaagcaacacatgctagaaaactgaaagagttattatcataatggcttctgctaaaaaaacaagcacttcatatgatgacattttctctaagatgtagatttctatattgatttgttataattataatctgtggcccaataattcaggtaattgcttctctgctgaaacctcgtggttggaagccccctgtgcgaaagcagttcttttttgactgcaatgagattgcagatctat

SEQ ID NO: 6494 - DNA, 853 bp, Zea mays
tcattgttgttgcagaactccataactctgtcgggctgtggtgacaatgcacgtcaagatcataaaccatgggaaccagctaaaaagcagctgaataacagatgatactgaccccgaaggtaacaagaccagggccccgtgcatttggcctgagaccctctacactatcgttctcagtcggatcagacctttaagcatcaaacaaataaatcatgacatcaacaaataaaaaaacaagaatcttacaataataatctgacagtagcagttcaaatactgaccatagaagatccatcagaacaactgagcctgcttccatggtaattggtctatgaagattttctatttgctctatatggttgatggaccgaccaataccaccgtgcatacagattatcttcttttctattagtgcagccaaaggaagccaattaaataacctgttcacacggtgccaggtccagattccatcccgctcacccttttagtggcaaataaaataacacatgtcagcagaatataggacagacatagaggaaagcaaagattcaaccagactctaccattctttctatgcactcgattcggaacccaaatagagcattgatatccgctgcttcatgattccctcggattaagtgtacattgtgaggatattcaacctgaattatacagtgaacatggtttttttagaaataaatgacgtctgataaataagtgctgctgcaatgcatacttgcagcctagtaagactagactaccttcagtgcaaggagaagactgattgtctccagactatgctgaccacgatcgacataaatctccaagaaaagattatcgatgtaactgcatt

SEQ ID NO: 6495 - DNA, 808 bp, Zea mays
aaatactggcccttcccctaagagcatgtcttcatatagtccttggatatttactgttggagcttctgcccatgacagggtatacagcaactacattgtacttggcaacaatttgaccattcaaggagttggtcttgcccgtaagttcttttgaagtaattttatgtacaaatatagttacctctgtatgattgtaacctgtattgattaattgcaaacacagctggaacggatgatgattgcatgtatactttagttgctgcgccgcatgcactgaagaacaatacagtcagtcctactgaattgtcctttggggaatgccaagattcgagtcgcctagatgcagatttgataagaggaaagatactagtgtgcagctattctataagatttgtgcttggtctttcttctgtgaaacaagctctagatacagcaaataatgtcagcgccgcaggagttatattctatttagacccatttgttcttgggttccagctgaacccaactccaatgcgcatgcctggacttataataccatcatctgatgactctaaggtagggcagccaaaagttaatgttgcagtccaatcatccttaatctttcttccttttctgtgattttttgtttggttgacgattggccaatctgatcatcaatcttagtcagtttcttaaaggggtgtttggttagaggaactaaaaattagtctctagttttttagttccatttagtcccttttttggccaaacactaggactaaaaatatggacctaaaaatgatttaaggctttaagtcccttaacatat

SEQ ID NO: 6496 - DNA, 1370 bp, Zea mays
agcttgcatgcctgcagtagcagatgtaggtgctctgagtgggttattgcagcagcagttaatctgttccgatcgagctgacatcatcatctttcttgcaaagacatacactgcgcttaagcggccgaaacgctgcaaacgtgaagatgctgcaatacatttcagcaaatagtagcatagggtaaaactgaaaagcgaacgagagcggcagccacagatctgggtttcacgacgtacaacacgataatatccagggcctagacgatctggctgggacggcgtgccaaccttaagccttgttcggttaatcccgttacccatggattggatgagataaagccttgttcggttaatcccgttacccatggattgggtgaaaccttaagccttgttcggttaatcccgttacccatggattggatgagataaagccttgttcggttaatcccgttacccatggattgggtgagattgaaaaaaattaagaaaggatttgacttagttgggatttaaactcatccaatctcactcaatccatgtggattgggagctaaccgaacaagcccttagtgtgtctgtaggacacgttagctttagggggtgtttggtttgagggactaaatattagtccctccattttagtctcatttagttcctaaattaccaaacggtatgactaaaacatggactaaactgctttagtctctaatccctcaagatgtggctaaaagggactaaactatattaattctatatttgccactcatttagttcaattgtactaatagcaggtgaatgttaaagaccattttagtcttcttatgagtcattgtatattcttactaatttaagtccatagaaccaaacatgttatgaactaaattttagtcccctaactaaactttagtcctcgttctaaagaaaccaaacatggccttagacgacgtaggtaggtatttgatgctcagacaacaggatgacgatgatcacaggatgacgctatactggtcgtcgtttattttgtctcttggttttctaggttgacgcgtgcgtggatctcataaacgataataattaataggctgacgattaggacacgccttttgtaggctttgttgattgaacaaaactcctgtgatagcgattagcgaactcatgcatttggtaattaataaataatactataccttaccatgcatgtctgcccgctgtaaaccgctacaccattgtacatagatgtgctcgtaatactgctaccttcttttgcgctacgcaagcttgacggaaatttcctaaagttctggcttgctccattcgctaaaattaatatcgctcctgcaggtcgacgctagagcaaccagggtaccgag

SEQ ID NO: 6497 - DNA, 850 bp, Zea mays
caaccttccattgcaagcatatgcacttgtgcagtggtcagtggagacccaacaaataagcaacaacaatcattcaattaacagatcaacacttagtattacaataaggtggctgtcaacagccaacaatgatcattgaacgatctaatctaaatttcgaacaataatgacatataagtctccatatatgacaatataacgtaagtatatcatagattttcacaatgcaaatatctcccgcctaatttaaaatggaataaaaacaggattatcccggtaaaatatgagatactgcaaatatgcacgggcaacaacatcaaccctttttgctcccgctcccgatcaacccgtctcatattctatcccgttttcacacaaaaattatatgtataaaacaagaatacggtatatgataggatttttccctttcgttttatccccacccgtgggactattttgtttcctgccacaggtcgtgccaaccagtaggcagtgtgtcagtgtacaattcgacggtgagactagcgctgcttttgcagtgaaacaactagcgtatctacaatttttggtacgtttggatctgactagcatataggttgtgtgctatcgctacgatctcaagagaggatgggttaacggcagtggtgagtacgacacgagtgaggtggaagtggatgctgggggcaaccaggtcctgagggagggagagaggaagggatgaaggataatccaaatatagtctctcatagattagatttgaagtacgtaagcagaggagggtattcaatgatctgacccttggtttttatggcggggtaaagtttaagggtatttaattgcggggaatttg

SEQ ID NO: 6498 - DNA, 782 bp, Zea mays
accttttcgctcttgcagtgtcatacggaaggaggtcacacaggcatgatgtctcgattggaaagcacccaaacgtctaagcgacaccttaataaccaagcatttgaccagggtaacccaaactgaaccccttttgaatcatattttcagtacactgaaaatatttcaggtaactcaaaaccgagcctaattggttagctagcttgatgaagttatatgacataattattatggacattgaacatggatatatttgtaataggtgtcttcagagaaagtagcaaaagagtaataggtgttatatattttctgatttgcatgctgaaaaggtcagcttacatgtttgtttcggtagtattcgttctcggatgcttaacatttatagtttggttactcctatcttgcttaagtaatgatttttatgctgatgtatccatactatgccagctcatagtgcgggaaagcatctcctatgtctgttgaatctattaatgaatctaaagatatctagaataccccggattacctccaggggtcattggaactttccctttttgctcgtgctactatggatggattattggattttcacaagtacatcatgatgtatcatttattccttttactcttctgtttcagtaagtaggcttatggcctaaagcagatcatgtgtatcaagttaaatctttatgctaatatagttttaatattcctgtatgtttgtgatttgacattgctccccaatgtctcagagaaaatcattgtaaagacacaggatggtt

SEQ ID NO: 6499 - DNA, 762 bp, Zea mays
cccctcttgcgtgcctgcagtgtgtcaccccttgcttggttcatgtcaaatcaggaaactagttttgtgacaattggacaacgagtgcttgccaatccactgaggtaaccatcttggttcatatttcattttacattcatgttgtggttatgcattatctattggttctagtatttcaatctttaggttgtgtgaatcgtcctcttatttgttttgttcttcggggtgttactatcctaagatgtttgctttgtaatttttttcctgaaccttctttattcagggttcggtttcattatggccatcctgatgtcttcgatcgtcttttccacgttacgaggggcggtgtcagtaaagcatccaaaattatcaatcttagtgaggacatctttgcaggtacttttcttttgctgttactgctcaacatttgtaaatgtggaaccactaagataatattttggcttcttatggttcaggattcaattccacattgcgcgaaggcaatgttactcaccatgaatacatgcaagttggcaaaggaagggatgtaggtctcaatcaaatatctctgtttgaggcaaagatagcaaatggcaatggcgaacaaacgctgagccgtgacatctaccggctaggtcatcgctttgatttcttcaggatgctgtcttgttactacacaacaattggtttctacttcagtacaatggtatttttctgacctgaattgtaaaccgctcttgtttattcattggttaacactta

SEQ ID NO: 6500 - DNA, 767 bp, Zea mays
agcggccaacaataattgagtagattggacaatggagaggaggactacaaaacatgctcaactactaaccaggagcaaaccccatccagtgggcatgaaggcaaggatgcaaacaaagatgtccagaaccgtcatgccagggattgctattaggattaccacgatggctgtaaaagttataaatatgagacccttgatcagccggaacactagctggaactctgcactgaacctcctcctccccactgatacggtctgcaaaacaaaatacaactgtgagtcatgcttgcagctagagacagtggtaacgaaacctgttatccttcataacaatttaatttaccttcataacgagtaaaacaacgaaaattacaacccatgagaagcaataaacctggaaaagagcattagttagaaagactgcaccagcacaaagcagatgagaccaacccaatgttaaataagacgagtatattaccagcacactctggttatccttggttatcttcttcgttatattcagatgatacacgagtccatattgatagataaagaaacgcaatgcaagcagtatttcaacaatagtaccacgcttcccagagtaacgaaggggctcctgctctttttcccaccatgactcccagcttttctctggtgccacaccaatacctccacgattgctgatccacttgtgccaatcaatccaggtcattccacaatctttttgccactcaaaatccaagaaggattggaacaaggaatggttc

SEQ ID NO: 6501 - DNA, 743 bp, Zea mays
tgccgcacggggctccctgtatccgatgcgccatctgtggggctatcacgcacgtcgcccccgcccctcctgtcgagcccaaccgcggtgccgtacagccgccgccggggtggggtccaccgccgccgccggtgcacgggcgaaagcgagccgtggtgtgcgggatatcgtatcggcactcgcggtatgagctgaagggctgcatcaacgacgtcaagtgcatgcgccacctcctcatgacgcgcttcaacttccccgacgactccatcattatgctcaacggtccgtagatccgcaccctctgttctgcattgctgctctaccgactcctaggaagtcgatcgaattggttggccgcaatttcgggtcaactctttgcctgtataagatccttgtatatgtggtttctcctgcggcacgattgattgccaaagagaaggataggatgagatatgatgactggaggaggccttgcggtcggctacctttatttgttccaattattcttatccttggcatattttattagggttgatgctggaggatgcatgaatgcatgtttcgtccaatattatgagatatttatcacctgtctgaccaaatggttctgcctcaggccgtttaaaaaaaaaggataagtacatgaatatgcttgcttggccattttggatcatatatgatgttcaggttgagaattgagataatcagaaggaaggtatagtttctgctagtatttttccaac

SEQ ID NO: 6502 - DNA, 827 bp, Zea mays
tgccactatataatatataagactagggggagaagttttccttcccccggaaggcacggctgtacatattatattagggattggttggttgtttgtgcaggcatttttgtatgcatcatattcggcctgtatgggtcgaagctgtaaagtgtaaatgacacattcaaagatggaagttttgtttgaccaaaaaaaaaaaacatcagtcgccatcagcttgtcgtcctgagttcctctcctgctattggctctctcgaccagccaattggcatactgagaactccctgttggtgtggctttatctcatgtcttctgcctgatgtcacggagcttgtttaaggtgtgtggcctggagcatgttacgacggtacctaactgccggcatatgttaatcgccgcaaatggtccaaagtgtgatgacacttgattgctgctgtttaaactaatgccagtggttacaattacaaacgcctaatcctctgtttttgctcagtggagcctgctgccagcagtcgctttgtgtttgtccggttcagtgcttacactggtcgctcgcaccctgcctgattgtttattctgttggcagttgcttgagccatctgaactctgatcacgagactacgagagaagtttaatgctacgacgcttctttgatcgctgctccattggaaagctgacgccaaaggcacgaaacaactggcgttgaactgttggaacgtcactgtcttggaaaaaaaatggaggattgcaccggacatattaactggtagaaatgatcatcaatcatcatcatcttcccatgcatgcgttaaaagatggagtatttt

SEQ ID NO: 6503 - DNA, 772 bp, Zea mays
cttgcatgcctgcagttgaagccaggtctgagctcgtatgctgggcgaccccaggaggccgcaaagtccattctgcctcttctcgagaaggccaagagcattgtcccctcatggcttatgaaaagaacccctgttaagcttggagtatgtgaacagcttcagagtattatattctcatcatctccaaatagctgccaccaatttgagaaaaatgtagcctcttctctagttactagctaatagcaagtatccaaattaactatctgtttgggccaagctgttgcatataattagcgtcagaatgtgatattatcgtttctcagtattttttttttcttttcttttcatgtcatcaacaaacttttgcaggcgactgctggattacgccttatcggaaaccaacaagcagacgaaatcctcgatgcggttagattaatttaattactcgatctccagtcttgtgttggcacatgtgataaatatttgcatcatccatgttagtgcttggactaaaatatgactgatcccagctgattagaagctttgatctttcatacaggtcagagacctggtccacaagaagagcaaattccagtacaagcccaactggatcaatgttcttgaggggtctcaggaagcatcctacctatgggtatgagttagcagtgacacaactacaaattcttctatgctcttgcttactttatctttacactaccacatacatatatatctgtatgctctgtaaggtcgtcggtgtaacttcagtgta

SEQ ID NO: 6504 - DNA, 742 bp, Zea mays
aacttagttttcctagtttcttctgcctgtcaaatcctgttatttgtgtgactgcaaacttaccttcctagtttctgcttcctgtcaaatcctggtacttgtgttagtttgagaatggacagactcttgggaaagtgtgcaaactcaggaagtcactctatggactgaagcagccaccacgtgcatggatcaatagattcaaacgagccatgtgttatatggaccattatcaatgaaatggagatcacagtcttctacaaacatcaaggctcccgtatcattattctggctgtttatgttgatgatatagtgataactggatatgatgtgaaggagaataaggaattgaaggaaaagctaagtagagcctttgaggtaaaggatcttggaccacttcgattcttttttgtgattgagattgctaggtcagctaagggaattattctctcccagaggaattatgtcctcgatctattgacagtgacatgaatgcttgggtgtcgcccatgtggctcacccattgataagaatcaccaaacttgtgctgagttaggtaaccctgtggaccgggaaatatattagaggatagttggtcgactaatatacctttttcatacaagatcggacattgcttatgcagtgagtgtggtgagtaggtatatgcatgatcctagagctgggcatatggagttagtttatcaaatcctaagatccctgaagggaacccttgcaaaggattgtg

SEQ ID NO: 6505 - DNA, 835 bp, Zea mays
cccccgattctctatagtcgacctgcaggaataactttgagcacattgaaccttacagtcttcgacactggcctgaaattaaaacaggagtacaacataagtgcatctacggaatagagcacagtgccaaaaaaaaggcaagatagatatttcatgtccaacagagggaaggtcgggttatattgagctttgctaattgcgtttcagaaaccatgccatccaggtacagcattacaaaaagcaggtccaggaaagatatagcaagctttacctgcactggccaatgatcacatgatctccttccttgacacggaagcatggtgaaatgtgcgcagggatgttggagtgtctcttctcatacctacacaaacaccaacaaattatcagttggcaaacagacaacatgaaggcacgaagtgatcagtaaatacaagctaatattgaagattagcttgcctctggtacttcttgacaaagtgaagataattcctacgaacaatgatggtcctattcatcttagcactgtggcatgttccagcgatgatgcgacccctgatagacacagtgccggtgaatggacatttcttatcaatgtaggttcctgcaacaacaaagaaataagggaaatatatcaactgaactaacagagaacaacaacaacagcctttttagtccgaagcaagttgggataggctagagtacaacagagcgcatctaaaatcaaggacctaaaacaatctataaggttaccacaattttcttcaaacaaaactagattcacttcatcaatattcagtgcatacacccaacaaatggaacatgaagcatatgacaa

SEQ ID NO: 6506 - DNA, 539 bp, Zea mays
aacattcattgttagatctttcgttagtacctctaaatgtaatcaaggaatatataggcatatatctccattagttcaggatttacctttcatatagaaattaataccttgaacattagatgaggtaagtgcagacaaaaaagtgtcaataacctcccttattttttgtatatgccttttgagcatacagtaatttttagacataaataataatactttattgggcttaaatgactttttttggtattgtggtaactataaggtctaaattcttatttcaataaaatatgaagtagagttttcataaaaggtaccataagaaaaagacttatttgtttttttataaaagttgtacaaactaatggggctaaaaattgaagatcaatgacgtcatgactcatgaagcttgagtcatggtaagagctattgtaagctaaaactttaactaaatgtatattgaaatacatggaggtgtggtatagaaaaagaaaacatatagatatggatggaaaaaatacacactactaatgaacatactc

SEQ ID NO: 6507 - DNA, 866 bp, Zea mays
tgtggtcgcgtggatggacagtggcaaatggaaggggcctgggtttggagggttgggcggccgccatgtggatgcggtgcacaggtctgcttcgaggtgggcccgtcatagcccacgtgtccatgacgtggacgctacatgccacagtggtacttcgatttctttttaagtcaggcaaccatgagctgactgctgagcccatggcattttccggttacaccaaactaataatgcccttatcaggtggttccaacttccaaatacttcttcacagtaagtcagggcctttaattaattttagtttaaaagtaaatataaataaagctttatcataatccaattcgatccttaaatatttctctactattttatttaaaaaaaacttatatttctttaaaatcaactcgcggttccagatcatatctcatcaatatcctatttattcaaacaacaacgctctcgctgttgtcgctctagcaatagcaacaaaccctatccatttcgcaacaatcttcgctcgctttttctggcgttgcaccgccaccagtaaagaggattagagcgctcgcctccggataaggatgctcactaagtgataaaagttgcatcgagtccagccaactctgaatctcatcgtcgccaaaagggaccgggagcccatctcctagttcactcgtcttccgctccgatgtgagctctactctggtcctcccatcccatgggcgacgtggcatcaacgatagatctacttagcgtgcgcttcgtctggtcacagttgttctcgtcagatctattattaggaggtcgctctaaatggtgtgtttttcgcaggggacgtctactgaccaggatacaagcttcttaaa

SEQ ID NO: 6508 - DNA, 852 bp, Zea mays
tgaaaagtgacaaaaagaacacacggccaatataacgctttagcaaggccatttcttccaactattattctgaaagaatgaagtaataacagaaaatggatcaatcaattaatagaacaaaccataaaaacagcttgtttggtcagaacagagttactgtgtgtcgataaatagaactagcaaatgcagttttgtcagcgtaattcagtaattgagtcataagtaatcttatccataaaatacataacctgctatgtcaatagaaacagaaaccactgttatggtaaaacctgtagtcgcattgtaagtacgagtaataatgatctctaaattttatactaactagtctaacacccgtacattgcgatatatttgaagatattgattgagtgactaagcgacacttgagagtcttaatggaccctccacataaaaatatccataataaatgaatttaatgccaaagtgaacatattgttcatataccatatgttgaaccggtaaaacaaatattacatttgatcttagctaaaagactaaaaaatgagttgaaaaggagcccctatactctaattaaattatagccaatgttttagcttatgacgagaagatggggtagaaccaaaatcatcattgagattccaaggtaacacatgcaaattcatttatggtgatgacttaacaatcttctctaagtttagcaagatatagaaaagcacaagcacgccaacaaaatacaagtttatcctttaatgcttaacatgtttactaaaatacatacttgttcttgtctttagagtatcatatcaaacaataaaaatgtaactacctctgcatggatcagaaacatac

SEQ ID NO: 6509 - DNA, 786 bp, Zea mays
aatatcaaatttgacagggctcataaaaacaactatccatgtgtctaaaccttgacttgtgatttctattgttttcaattttatcctattgtaacttgtttgggactaaatgctttgttgtttttgaaaattaacagtaggggtgaacccctactgtgataagatttatagataaaggagttcaaagactgtacatggagaaggctttgttgttgttactactaaaacacatatgaacatacagtgcaagggattgatgacccactaagctcaggcactacagatatgttctactgaggcctactcaaaagctggtcatttggacagcgcatggacatatcgattaatcatgcctttagactgggctccgcgttttatagtgaatggcctcctttcactatcaacatcgaagaaaaggatgcatgaccaacttgccaacggacatggcgatcatttggcacaggactgatagcacgcacatactaatgacaattgatgataatctagtaccagaaagtccaggtccagtcataggttgacagcacgtttttcttgaactagtaaggaaataaaatgcttgctagtaccacctttttctttagcacaaaaatgcttattaccttgttactgaagaacaccctctttcccggcagttccctggtggactgcacccaggagttgcaggcgaagtgcaccggaccacacggcagcccaccctcgacgacgatgctttccagaaagaactcccgatggtgcccgttggccacggtgatggcgccaggctcg

SEQ ID NO: 6510 - DNA, 776 bp, Zea mays
atgcctgcagtgcggctgccgccgctgctccatcacgacgacgccaaccacctcagctcactagctcccgcggacccgcctgagcgcagccaaaaccggggatcccaggcgcagcagctaccatggccgcgccatgcagggacctcacgggccttcgccgggggcttgccgcggcgaggctggcgccgggacgccggggcgcgaacaagctctgcctcgcgccgttccaccaccgcgcaccgccgccgcagcagcagcaggggaggaggaggcagcggcaggggctcaaggtggtggctgccatcagcgaggacctgccgaggctcgcggcgcccgggaccgggaagggcgcgccggagggcaggcggccggagaaggtgctggtgcgggccgcgctcacggtgcgccgcaagcacaaggaggacctcaaggaggcgctggccggccacctcgacgcgctatgggacatggttggccggagcgtcgcgctcgagctcattagcaccaagatccactccagtaagcacgccggcccttgctccctgtcctcgtccaatccactagtctctctctctctctctgagttgacctgcctgctcttgacaagtctcctctgcctctattttttgcttcctttggatagtcgttagagctttaacgtgcaaagcttttgccttttggggcatctccgcctgttcttgactgaccgccccgatcggtaggtggcacccgcaatcaggaagatgctaactagatgcacatgatcaacagaacct

SEQ ID NO: 6511 - DNA, 731 bp, Zea mays
ggtattggacaagaaaaaaccagtagagctatttaataaaaggtgaagaagttataaaattacaaagattgttttatggtggcaaacagctaaatgagccaatcctttaatttattgtttgatgaaataccagaacttctttttaccttaggtgtgtttgtactatgtcgtatcatgctgttttgtgtactgaaatgaagtcatgcgtgtttggaaatgatacgctgttttgatatccagatccacagtcacatacttatgtcatttcaactattcaagatagttttattttttatcccatgttattcaagcatatccatccattcatatgctgtgggtcctcttctttcacaccattgcaggcaccatcagaaaaccacatggctcggcaaccttggagcaataatggccatagaaattccccttcaaattcattagatggaggagttcctggacccatgcctctggtcccttttcaggaggaacttgcagttggttgtgaagagattcgtagaattgctgctgataatactcttgtgctagaggatattctgggccttaggcaagaattagctgtcattgaagacgagatccatatacttgccaaacaaaccattcccagacttcgtgttgataatgaaatggaatacagggatattatccagggaggcatgaaagtagaggaacagatgcatgctcttaaacttatcaaggaagaagtgttggtccta

SEQ ID NO: 6512 - DNA, 736 bp, Zea mays
ctcaggtccatctcaggcttgattagccaaacaccatttgttaatagcggatgcttgtgtagtggaagcctggagagtggcttctaacatatgctatataagtgtttgttgatacgaaataagaattgatcatcaacgaagcccgttaggggataaacagtgatgttactgtcagcacttagcaaaactgtaacgcaccatatcagctaatatgaatctgatgctgatgcccctcagcaagtagacttggcttgtactcctacttttttttaaaaaaaatgaagacatccataagagtgtctcgcagttgatttatcttaaggaaaacaaaggacaatatagaagtggataataagacataaaacaaccattaaaaataagtaggagtacttttcgagagaaaaaataagtaggagtacaataaagaccaaattgataatattcttctttcaatcgtccaatttgtactcctacttaataatgagatataataatagcaacgtgttcgcaaataaatgtcagctgctcatccgaaagacaaacgcatttggtcttgactcctgagttcgattaatttctctaatagacaccaaacccttagctacgctttgtgacgcccacctatcagttggaggatgcaatgccatgctctatcttttatagtatgagccaaatgcatgatgcttgaacacaccagacctgctattatacagctctgtccgcaatctctgtgctt

SEQ ID NO: 6513 - DNA, 786 bp, Zea mays
ggccaggcagctgtgtttatcttatcgatgtctatgtagccagatagtttgaacaaacactgcccagagagagagagagagagagagagagagagagcacattaatgtaagcatagacagctgatgtcaagatagaaatcataaaattttagatgaaaaaaaaaattctatttcttacatttctgtcaacttcaggcagttgtctcttatccagggccattttccaactcacaaggtcttgacgtgacaaaggactgaagggaagacaactgattaggagtttgatagagcgtatgagagaggcacatacaattgaaatatcatcacctctcaggggaaaacaagatatgattgtcatgaacatcttctgggatattcatatcagatcttgaaagcttgctagaaatcaatccagcttctgctaggcctatggatatattggaatgaacatgaatgacattacacaataatgattcactaatccatacataaacttagcttcgagacatgcctcaccttgtatgaatggaaaatcaggatcttcaggtgtgacatcgtcaaatgcaagttcagtgacattatcaatatacattgctggatacacttttgagaaagtgttcctgtatggaaaccacgagaataagttgggttaaacagaataatcacctaagagagcaaaactgaaaatttaacagcaagaggcaatgaccttaaacgtatgaagaatatgaaataggacaaaagagaaatgggaccatactggatatttgccaccaacacctggga

SEQ ID NO: 6514 - DNA, 826 bp, Zea mays
  unsure (1)..(826): unsure at all n locations
aagctctgccactgattacgggaaccacatagtgtaggcctttgtttctggttccatctagtgacattttatagctagcttgtcaaaataggttcatagtgttttccctttcaagagaagaatcattcttttgctggttgttaagccattatgaagtaatacaagtcacgcttcacagctatctagtgcttactaatgatataagggaaaaatattcatacatgtgctgttcttaacttgaccaaattattagctactagctgtaattcactaactaacctgtcacaataatcttgagtgggtagtacgcgaatttagttagttgcagtgttgtgtaccctgaaaattcaggactgtgggcttgttgctgtttttagtctcttgatgatgccttaatttgaagtcaccaggtcctttaaccggcacctggagcgtgaaggaccactcctgctgcttcagattgactgcttgaggatgggcatgaggaacgaactcacttccttgttctcaagcagcagcagccaggagttcatcctcaatcttgactcaagcttggctgcttgctttgtttgccaaaatttcacgggcggtccttgaacttggcaggggccgattctttggtccggggagatattattttattcactataatgtgctaagcagggcccgcaggggtggagtggtgcttaacgctgatagcaactaaacaggttacatggcaggtaattgctaggcaagaggtagggtgaggtagccaactagctattggccttccataatatgggtgactggnnctttntctgatggtggtcttttgctggattaa

SEQ ID NO: 6515 - DNA, 614 bp, Zea mays
ttcccaaaagaaaagaaaaaaaaatggacaagccctgctgctagtctgctacagaactaatatagtagcggtccccggaaaaggaggaagggataaaaagacgagcttctttgcgtgtcgctttgcaaaggaacgatcttttggcgtgatcccctgcattggtaaacatattcccagcccggatgctcttgctgcttaggcatgaacaaagagtacgatcatttttctgcctttttcttttttgttgttgttgtgcgtgtgtgattttattctagggctaggaggaggaggagtggtggtggaaaacgcgcaggattgcgtgtcgtgtgggattggcgtcggcgtcggcggccgcggctatgattgatttattaataacgtcgttcgtcggccgtatgtgcaggtggagtcgggcggggaggcagcgggctgcggccggggactagtactaggtagcagtagtccaagtccggcggtccggccgcgtctccggcggcgaagaggtaggggcgagcgaggagccagacaccggcgcgcgtggcgtggcgtggcgaggcggaaacggaacgacggtcggtggttgccgaacaagaagaagaaagactgaaagggaa

SEQ ID NO: 6516 - DNA, 823 bp, Zea mays
agtggaggatttcaccaactaatgactggttagatgacgttggtgcaggcaagaaaaaaaaatggcagaacgaggcagaggttgcgaaatctccaaaatggagcgcccttcaccggagcggagctcgaaggaattgcgaaaatggagcggagaggaggccgagagcagtagtctaaaaaaagtagatgccccactttctcgtgctctccacagttactgacaacttggcaagcaggccctcggacaactggtctggtattccgtataaaaacggcatttattatgattagtagtagctcgggacccgtgcagggttaatctgatatgaatattatcatcggcggtgcgttgaatgcgctacagctaatatctggcttaaaagttgctagcacgacaatccactgacaattgtttgtctatatatgtattaaaaaattaaacaagtcatatcgaatagttatatagtgactaggtatatacccgtgcgttgcgacgaaagacaaattgacgagcctccaaccgctcaaggcctagcgacgtgtggcgtgactgcaatggtgatgggaacgctcgtgggaaacagtgcctcgttgcagaggatcacgagcctaagcacgccaccactcaacgccatgagttccatcatccttttgcggggctgccattgccacgagctccatatataaaatgagttgttcagatcataataaacaaaacaatggttttgtttaattcatgtactgccttctaatattaacaaaagtctcagacaaatattgacaaaagcataatattctttatcttatttgccctcattccttga

SEQ ID NO: 6517 - DNA, 848 bp, Zea mays
atcaacaaaatcacatgttactttgtagagcgctctgccccgcagtatcctgcacagccaaaagtaatgagttactacaggtgtaaagcaggtaatccagtaagtgggataacaactcaagaacctttcttgaggattgccatgaggaaactcccggcaggactgcaattcttcattccagtctctttgcatgccaattaactcagtgccatatgacaacacaacagaatcttcagccctggctgcatcccttctatgttctgttacatataagaatgtgtagtgccttcagttctcataacagatttcccatggtacgtttatactttataccaagattgggagatcaactatagcattatcaaatatcatcaagaaacaaaattagaagtgtaaggtgttccaagccaatgtaaagaacaagctgagaagtaaacagtactgctgcaatgcctttgtagtttatgaagccaatagtataagtttaaacaagatgaacgcattggcatattctgtttagcatcatggattcatggcgcacttaatatagactagatcactagattttaactagattttaactaagtgtggcaaaactaactttaggccataatatatagcatggtcaaatcatactgacaccaaagcacttcaaaatcatattagagaatatgaaggaaacccccaaaaaacatgccacagaacagctacttgcttctggatttctactatataatacactcagaaaggaattcggtgtcaaaaattcgcgggcacaggatacgctcctagccaagaagtcactggaagcaaaggactgaacattcttaaatggatgagcccgatgc

SEQ ID NO: 6518 - DNA, 910 bp, Zea mays
attcatggaagaacttttagttgccaaattgaaatgcaatactaaggaaggtatagaaaggataaatcaagacaagccctctccccgcgatgcggagaggctgcttcgaacccacgacccggtgactcagtgagagttctcactactgcaccagatctgtcctcctggaaatgcaatgccaagggaatatcactaatacattttgtatacaaacctccagttttccgaacaatcgggatggatccgtagcgcatagcaataagctgtgttaaaccacaaggttcgaagatggaaggaacaagaatgaagtctgcgccagcatatatctacaacaggatcataacttcagcacccatcaactttttaattgtaatacacagggctattagcaggagatctgaaactaaccaaatgtgacagtggctcgtcataggttaaacatagcttcacccggccatggtattcaccatgcagcttactggctaaatttgtaaagtcaccttgtatgcgatgatctggtgcagaacccagtaaaaccacctaatgtagaaacacacacacatcagttctgagaaatctgaacatagtgtggatgaaacataacaaacttgcaattcctgagcaagaaaaagataagacctgcccattgcgttcaagagctcgatgcattgcatgtttgataaggtggattcccttctgcactgttagacgagtgatgattccaacaacaggggtatcagtttgctgtaatccaagcatctgctgcaatgccttttttgcagcactcttgccctcaacaacattctctgatgtataatgaacctgaaatagaatgcagcaaaaaagagttgagcccagaaacctgatcataaatgttaccttttctcaatcgtgccgaggcacgttttca

SEQ ID NO: 6519 - DNA, 786 bp, Zea mays
ttgcatgcctgcagtacggctcataattgcacttgcaccttgaaaccgcacggtttgttgacatttgtgttatctcacatttgctctgcggccgaaaacgtcatttcccacgttatctgcatggtctttttacccccgccccccccccctccgtacatgctctatactcacacatgacgtcgttttccacgtggggacgcagagcgcagcagcagctggtgtccggcactgctctgttaactgcgactgcggttttgaagggacaaaaaacaaacagatgcgaaactatggacggtggagtaggctatggccatcagatctcaaacaatgtaaggacaactccaatagttctctctctaaaaagagcttgctaaaatcatgtttagcaagttgctaaataactattggaagtaaaaaataatttagtttccaatagttgctcatatttaggaaaaaatagttcgattttgaatctatctttgtcaaacttgcccccatgagatctgactaacggtaaggttgagagcagagaatgtcgagggcggaagagaaaagaccggacgtcatgaactacatatggaggagcggtggttcggtgacgcaacctatgagacacttgggtcagacggttaaggagaaacttgtgtcacacgtgtttggctacctcactattctaggaattggaaaaaagagtgtgtgttatacttggctacctcattgtgtgggaaagggaaacaataatcacgcccatgtaaagaaattgacgtcaaatgcttttaaggagtt

SEQ ID NO: 6520 - DNA, 789 bp, Zea mays
atatattatatctgtagctgagctaatgttttagccgctcgcctgttcctgctaaattggcattttgaaatctgttcttgtttcaggactcctatgtggttcaaaaggatgctatcaccgtcgaagaagactgaaaatagtccagtatttaggttttttatggatctgaatgatgcaggtaatgctgtctctatacctttcgttgttcttctctgtttgatgcttgtgaccttagctgttatttaaagtctgttcaaaccattcagtcagggacaataaaaatttcctgaatccagttctcgtctttggatttctaggtcaataaatgtcctgaacccaaacctgagtgcaaagcatccctatcttttggaaccgctaaacatgtatagttaattctgaaatggactgtgaccagctctggcaagacaaaaaggtccacagttgcttattgacctattgggcaggttaaaaaacacccactttggttcctagttctctggatgtagtttacactttcttttgatggtggtaggttgcaatatcttgtaccaagaaaagatgatttatttctaagcaggatttactcgtaatattgtctaaagacacttgatttctcggcagtaccttttctataacaatgttctgcaaatttagtcatctccagcttatttagtgagtctgaaaggatgttcagcacttcagctaatgtggtctatcatttccagtatcctatgtaaagcgactaaatgtgccaagcggcatggtgggggccttgtcgccttgatgtaa

SEQ ID NO: 6521 - DNA, 811 bp, Zea mays
ttctgtatgatttcaatagtaaaaggcggcaaaggaatgcaagagaccggcggacagtagaatgacatcgtacaacacattggtccgaagactgtgctagcactgtcagcaacagtgtttgctcctttaccaagaatcttgtgcctgtccaaacgatagtaggcttcagagcttttgtctggtagtaagtacggggctatggctgttgtgtactatatatatatgacatgatgtcctgacaaatatatatgtatcgataacttcagtcaatataatgtcgaaatgggcgcggttaatgttctggttcatgtgtataagtgtattgacagcaccaattaactaacgagcttatatttcctttcatcatcaggtaaaaaaaaacgcaaaggaatggaacatccgtacaaaggcgaatgggtttaactaattaaagtgtacatatatcttctctaaatttttaaaaaataactcagcaaaaggaaaaaaatgacatgctctatatgtataaatatcttgtttttatattgtttactactacgtatatctattttctgaattcattaatatttcaaccatgcatgtgagggacaactaagttttagtttgcattcttcacatataaattatacatatataaaaaaaaattctcccaaccttgactttattgttgattagatgcaaagtgttcctgttttcttcaacagaatcagaccagggatcgaaacttttttgtgatattaacacaacattcaaatatttcataagcataggaagcatgaccctttttattcatgcatcgagagaaaaagaa

SEQ ID NO: 6522 - DNA, 753 bp, Zea mays
acatgtatggggtacagcgataattcacctggctgtgagggagatattacggatgaggagaccggactgcgccaacggccgaccgtaaccacgtcggtccccgcctccgccggccccggcccagcggtagcggtcgcgtggatcgtcgtagcgcttgcgcctaggagggctccggctgtaccgcctccgtgggctgtagcttcggctcggactgcggctgcgatatcctgtcatcgctagtcgccgatgctgtgtcgcgcctgagaggggcaagcggccttgctagggtttctccgaggtttggttcgccggtgttccgtgacgctgtaggcgttgctagggactagggttcctcttatcctaacgaaagatgggagcacccgctaaattgaaagccccatgggcctttttgccgacggcccacgaccaaactttgcgcgcaccgcagacttcagaccgcctccaacagtctaccccgcctcttgcgtcagctctgccgccgccgcccggccggcaccgccatgcccccgcctcgactccgtttcgccaggcacttatgctccgccacggcatccgatcccgccggcgctccgacttcgtccacgatctcaaacgctgctgccctcgccgaggccggcgcccttcgcacgccggggattgaggcccccgccttcctctcctttggtccccccggggcccgggaccttccttccatccaaaactttggcttcgcccttaacggcttttccctgg

SEQ ID NO: 6523 - DNA, 805 bp, Zea mays
aacaaatagatcccgagccacgaaacaagaactcaatttctgcgcaaatgcccatcaacaaccaactcaccaagtcatcaaacaacctcttatacgtcctctccctcacctcttcgcgatccgatcggatctcatttccatatggtcgacaccaatgtctaggtaacccttataccaggttcttcgcagtcgcagacaacgatcgcgcacacaggggcaagagcttcaagactatcaaattagggtttagcacccgaatccaaggcataccttcggggaacaagactgcggccaccggcatgaggatggaactgagtaggctcgagtcccgcgatatgccaccgtggccgcagccgatccgtgcagctgcgccgccgccgccatggaagtgggacacgaaagacgaaaccgtatacgggactctagaagatctacaggcagaggaaggtgaacttgggagtgcgctctctataaccgtcggatgctattaacctcacggcgggctcatcacgaccgtccgatcagacacaaaggaaaggaagttcttgaagaagtcgggtgcactctgttctctctgtaatccacagaatcatactacaacgcattcttcagataaaacgaattcacataaaaaaagattcaaaggaatccagggaaaatgggggaaattcctttgtatagtgacatgattagacaactcgagttgaattggagacaacattttgcggggttttttgcactgttactgtcgttactctgagcacttgctcctgaaacagaagagtccaaactaaaaatgaatggt

SEQ ID NO: 6524 - DNA, 949 bp, Zea mays
  unsure (1)..(949): unsure at all n locations
cagtcttgcatgcctgcagcgatgcgggaagagctgccggctccggtggaccaactacctgcgtcccgacctcaagcacggtgagttcacggacaccgaggagcagaccatcatcaagctgcactccgtcgttggcaacaggtggcccgcccgtcctcccctctcgtcgtgcctcttctgatgggtgcctgttctgactacaagcaatgtgcaacaaacgcgcgcgcgtgcaggtggtcggtgatcgcggcgcagctgccgggtcggacggacaacgacgtcaagaaccactggaacaccaagctgaagaagaagctgtccgggatgggcatcgaccccatcacgcacaagtccttctcgcacctcatggccgagatcgccaccacgctggcgccgccgcaggtggcccacctcgccgaggccgcgctggggtgcttcaaggacgagatgctccacctcctcaccaagaagcgccccaccgacttcccgtcgcccgcggtgcccgacatgtcggcgatcgcgggcggctccggcgtcgcggcgccctgcggcttcccggcgccgccccagaccgacgacaccatcgagcgcatcaagctgggcctgtcccgcgccatcatgagcgagcccgccgcgccccccggcaagcaggagcagccctgggcgccggccgacttgcccggagggggctgacggggatgtacgccacgtacaacaacaccgccgggcacggacacgaagagttccgctacgacaacgggacagtgccggagtacgtnctcggcggcggcggcgcggaccagggcacgtcgttgtggagccaccaaaacatgtacggcgggaggtccggcccgggaggttgcgcccaggcccggcggaggtgttggccggagaaaggccaccaaccgcttttggaggcaacggcggcggcaaaagcggacaacttcaa

SEQ ID NO: 6525 - DNA, 725 bp, Zea mays
gtaattattaagaatgctagatagaaatacatggtatctttatgcattgttgctacttgtagaaaccattgattattataacattttgtggttgtttttttatgtggttctacttaacaatactgattggtcttcctttaaatgcaacgctcctcaggttctcactattcttccgtgtgaatatgaagcatgctcatgcttcacttacgatttttgctttacatttctcaagtttgcattatgtctgcaatctgaacgctctcatccatggccatagtgatgtttagatgtatgctaacacaattatcttgaactgctgttatccatttggttgttcgttagggtacttgttttcttagcaccagcgaatagttgcatttatggagtattttgcgttggttctatccatcgttgaagaaccacaatgtgaaatgtttattgggcagcatttttcttcgatatttagttgcttgcatgtacagctgcgattttttagtcttatgctgttatgcacactcatctctagcaatggtttgcccatgaccagaacactgttgatcaatgtattaagtataagtagttatttacttcctttcaaatgttccctatgctgtaccaaagcactactctaactgttacctttgttttgcagattcataagtcatatttgtctatttgtttaattacaaactgaaaatcatatcaaatggaaacactataatgtc

SEQ ID NO: 6526 - DNA, 839 bp, Zea mays
tctggaacgaagctcaaggacatacccaatggtaagctgaggctcttcaaacgtgttcctttctttttgtcccactggagcgatctatctgcttgcctgtgccatttcattgagtgttaaccgactctacaagatctacatagctaggtctttgtctgacaatggttaatgctctgtccgctcaggggtcaaaatagtttcgaaaaaacattcttttggacagtacggttagtctcccgagggacctgtttgccctgtttttatggctatgatgtgatctttgacactgtagagttttctagaataaaactggttctgctagatatctgacgttgaagccaaagctattagtttggggatggaccccctaacgaggagaatgcaaactttgatattcttgtgcaacatgacctgctaaacaaggacatatccaatttgagcatggcttggctttatacttttcttataggtgctggctcttccttgaacttatcatcggtggctttataggaataaaaactcgtggtgtggcttcaataacttgcagtacatttcacaagtttattcccataggttgtagcagacaacgtgctgctctgtccaacatgataagttctgtagggcatcagctgtggtgagttgatgcttgagagagaaggttgtccacatgaggttccacatgagcctttccttgcactgaacttagctatgtgtgatccatgtgcaaagaacaaaaatatcgtgatggctttaaaagaaccctttcctctagggagggaggatctgattcattagatccatgttggaccatttcctggccattggaagaaccccttaaa

SEQ ID NO: 6527 - DNA, 831 bp, Zea mays
gcttgcatgcctgcagtttgcacatgacctgtgctgtgcgtggatcacatcacatcctagtcacaagcctctcgatctccttgtcgtggctgtacgaatcatgagaggaggggtggcatggcatggcacgtcccgcctggccggctgttgaatgaaccccctacctagagattccccccagccctaaccgaccttctgcctctgtctgcttcaacagtcagtcggtcaacgtctctgatgatctctgggtacaagctaagattagtagtagctaataatattgtttcacggacctgtcagagggcatgtaaccatgtgaatactacaacatctatatgcaacaatgcaatgcaatgcaatgccccgcccgccagatctagcgaagcccactagttgttgcaaccacttttaactccttgtgggtattttttttatatatatgagatgcagtttaccaaaacacacaagtcatcaatccaataaacaaaagctcgacccctttcttttcctttcctcggtcacagcgagcaagaataaagaagccttcctttttttgaagcaaacaaaacgaatacattgagcggcgcggagagcagacaaggcgaactttttgaagcaatcaatcatgccaagtaccacaggtttaaagccaaactatactactagcgttagcttatagtattattatattattaaactcacagcaaaaatataaaaataaaaataaaatcgataccacctactgccacatcagagtcccagatcccccagcttttacatgaactactacggagctttgcaatgcattggaagctagcatcaaaagatgaa

SEQ ID NO: 6528 - DNA, 757 bp, Zea mays
agtgcagacaaacaattaatttgattggtcgacttatttttctatggaggccttttttttgcgagaaccttctatgatgacttgcgcacacatgatttgtatagtttcgtggtactatattatctgctttttaggcagtacatgtatatttgaacacaacatagacgataggtcaccaattaggcgatggatgtgctatagctatcaaaatgctgatttgtttctgtaagactactgcattgtctattcgcagtggtaccatagtgttttcagtgtactttgcctgtatgcaaaacgtacaagtaacaataatgcgtccattttagtaccacactaacaatgacagacagatgtctaagtgccaactagtctttcattatagcataaataaaaacaagaatgacctcctttatttgggtatataggcgaatatatattggagttgaattctacctcaagacatttggaaattaaaaatggctcctttgtgccagagaaaagcagccttcttcattgaactgaaaatgctccacttgtgagtatttggaaatcactcgtttcctttattaacaacggattccctttttgagctagtttggaaacttaaatctccttggatattgtaggggattaaggtagaaatgaactaacatctccccctcaaccttattcaatcctcgaaatgtatttccctggagagaaagaagaaacatatgaaatagaataagctttgccttgtaggaagcaacaacgctga

SEQ ID NO: 6529 - DNA, 1192 bp, Zea mays
  unsure (1)..(1192): unsure at all n locations
tttgcatgcctgcagcatctcgcgctcttctcgggtgagcccagcggggcgcccggaagtggctgctgctgctactgcaccacccgcggggccgcgtgggtcggggaacggacgggggatcggctcggcgacctgtttgccggcctgctgtagctgatcaggatgtggagccacaccaccaggtccagtacgcatgcgtcggccttctccttgtccgcgtggtacagcgtctcgatcttcagcgcgccaggttgcccggcctgcttctgcgccgggtcgttcctgcacaaaccggccggagagttcttcagttttggcgcccacacgtcgagcttagtaataatataatgatgctcttaagaagatctgatgagtgtcttaccctgtgttcgcccactcgccaacccatccgaatccatggtgtgccctggttcatagcatcacaaacaagggttataaacatcatcaacgtccaattcactcctggaaaaaggacccatgattctacttttttcttctgtagctaaacaattcgacccaacttgtagtacctggccgtgttattggcaaccgggacaatccattgcaaagtcttctccattgaactcctggttctagtgatcggaacctgaggcagaagaaagtagcagtcaggggaataaagctcccgagtggatgttgtcgatgtggacaatggaacatcattctcaagcaccagactacctcttgagactctgtcggagttatcagccttgttcgaagagcagacttgacgttcgggggcagactttgatagagcgcatctctggtgctctgaggggggacggagcttcgggaaaccttaaattaagcaatggatatcggtcagcaaacagttccccagcaaattgtagttggagacagaattattgttggaaagtacgttccgatatatgctcacatagcagncatgaggttctgtaaaatatgacaacatgtactcattttttgtttttcttgaggtaacctacgagaatactgtactaatattgtctacatcatgagaaactgagtcattaagctgtaagtgaaagagaagaagactcagctagtacacccaaaagattatgacgtgcattcttcttgnntgaatatcgcatcgagcttcttctcagacatactagggaactctaaaataagaaggctgctataa

SEQ ID NO: 6530 - DNA, 770 bp, Zea mays
tcttgcatgcctgcagagccatttcctcgttgtctatgatcactagaacgcaaaatctagcctttttaatctgttgcgggtttgggtgacgaaattagcaacacaacctttgattttgttctcgtgataatgtgattttgtttcaagtgatgtcactagaatggtcgactattgtcactctgtcaatgggagtgaaacgagctcctgctagttattgtatcaaaaccacttcgtcatgtaactaataagtcctcgtactggaatttgcagaatcctcaatggctgccgcaaggggcattaaccagctcctgaagagaactctctacaaccagtctgctgtaagtattttggtgcactttttgtttgcttgccagttgctttaaattactacctctgttcttgaatatttgtcgcccgctagttcatttttgaactaaaccgcgacaaataaaaaagaacggagagagtacatccatattcattcttcttaccatgtgatttttatttctacatatccatcttgggtacaccatcacaatatggaatatgactgaaatccattgtttatgcttaaaaacaagtcatagaaaacatgtttaagttgttggaatctacagtttctccatcaagtgatgataaatcactgctgcatgtgtttcttgtatggctcttgcttctcagttttgtcttctactgtatagatttgaaccagataacgtacattatggtaatttgtaaagttctgttggctctacattgactacttatcc

SEQ ID NO: 6531 - DNA, 791 bp, Zea mays
  unsure (1)..(791): unsure at all n locations
gcacccacacggccacaccagcagcagcagcaatgccaccaaaaagcacatgcgttttgtaggtagtagcagtccgagggagtcaagctgtccatccagcgtttgcgtttgctagggagaaaacgtaaaatacatcaactccccacaaagtgacacgaacactagcggcaccccaccccccagcccccacaccaccactgtacaccactgtagatccttcctcctcgtcgtttcctcagcgactactttaattgctgttcatcgcatttgaggaggggaggccgggaccccggaagtctgctgctgctactgctttctagtacctgcccacctgcgcttgcatctgttgcttccctgctgctggcctgcgaatccacctgcatttgctgaggctcatcgccgcgtgtactcctgctctgtggtaccaccactaccttgtccttttgctctctccgttccatctcaacctcgaaatttctcctttttttttcacctgcaatccgacttctcgctgaagactggggattccttggttttcctgtgttcttcagggaggattcaggaaatgctcggagttgcattcggcggctgaaacttctaggagggtttgaggtacagagtccttctccgtcttctccatgatctcaatctcatcggcctcctaaaaattgtcaactttttttttctttcttcttcttattcttctgttcttgattctcttcttcttctctctccacttggttcagttcttgtccccgctcctgctaaccttggctgatgcnngtgatgcc

SEQ ID NO: 6532 - DNA, 820 bp, Zea mays
atgaaagaaaagcagcttattaatggctttgcaacaatataattgtaaatggtaactcaaaaaggcattcatagaaccccatatatataagcagtagcaagtaatcatatgaggtaaagttaataaataaaaccaagatgatctacatgattcattatagatagttatagatacttcagttgtgacaaactacaactgtttgcagattcgaattatttctctggttgtaggttgcaccatatatcattcattaataccaaaaccagcatgaaaacactagtcgtatcagacatacttgttcaggaaatccaaaagagtttggcaagtttccatcaataggcaagctcccaactcctggttttccatgctgatggagaagctggtttgaactttgagattgctgtccagagagcgcaggttgctgaagctgctgctgctggctatgactttgctgctgctgctgctgctgtagaagagcaaatttcttctactatatagaaataccaatataagtacatgctcgcatcagaagtaaaaaaaatgttagaagactagtgtaaagggaggaatttgtctgttaaaataggttgttaggcacacaactacacatgtatcagccaagaataattgaaggaaactataagaccagtctaactctcatttcatactgttgcacagattagctgcatagtatgaaaaactcgacctgcgggggtatgacagccctccgggcattatattaagagaaaacattctcacgcaggtcgagaaaacccccgaacccctgcccggccatacatagcggcaccgtacccatatg

SEQ ID NO: 6533 - DNA, 848 bp, Zea mays
aactcaaacagcgggctgagataccgtgcacactgcttgaatgttgcaaccatggacttcccctttgctgtccgcttctctagctcagtcatctcatccaattcctggttccactcattaagcagcttcttaaagaacaccaaaatcttgtcttcattgcaaagctcctcaaacttggtcctcatcctcttggagtccttgtctgcgtcagcatcatcgccgctccccttggcatccccatcatctgcactgtctccagcagcacccccgtcgccaccatcacccccacctacacgcttgctcttgcccttggcgtaggtgtccctcccggccttctgccgcttacgcatctcgatcatgtcgcggaggaagtcgttggtctgtccctcggtcatgtcgatgtcgtcaatgtcgtcgatgacgccggacttgagcacgagcttgaagcgcgcgaggcgggcgtcgtcgtcctccccgaacagcgtgacgggctcgcgcagcacgcggaggcgccgcaccacctcgtgccgtgggaggtcgagctcgtcgatgcgacgctcctcggagagcagcgcctcctcctgcgcggtcttcttcggcgcgagggcgggcgggacggagggcgccgaggaggaggcggcggcggaggagctagggttagggttcgccgccgccgtctgagctgcggcgtcgaggttgctggggtcggaaccggtagcagctgcggcggaattcgcggagggcgccgacgtgccggccttggcgaggagctggcggtgctcgtcgcggcgcttctggagctgcttctgctccagctccgaccgccgcacgaagctcttgcccccgaa

SEQ ID NO: 6534 - DNA, 790 bp, Zea mays
cttgcatgcctgcagcaagaggaggaagagatcaggacggggaggatctgagcggccagctgccagcggagggtcaaccctggtctccactccacagtccacgcgcccctcaaaagaggtagtagtgaagtaagggttgtacgcccagccgcgaggagaaggagcaagccggcggcgagggcggcgcagatccggccgccggatccgcaaaccgcgtccgcgcagcacagaccgccggcggaggggcgcccgcccaaaatcgacgaggactcggccggagggggagggggaggaggagctggcgcgtagagccgtagactctcacccggaattgcggaggaactcgccggagctgggccgaacgttcgcaggcagaagtggagagacctgacgagcgaggcgtctggaggcggcgcggtgcggtgcggcagaggacggccgcgtgctcgtgtgactgcggagggaggcgtggtgcctggcgcgcggcggggttcagggagaaggagccgccggtggtaggacgaggcggccaggatgcggagtcatgctgcgggcaagcagctcgccggcggcggcaggcggaagcacgccgtctggactctggaggaagaaggagaatggggtggggtgaaaaagggtgacggggatagaacatgaaaagggcaccagcgaatttcggtcaattcgaacaaagaaaaaatggagcaaatgcacgagtgggtcctttagatactggcacgaattaaaagtctttttttaattattattgcctcttgagcccgtgtgagtg

SEQ ID NO: 6535 - DNA, 921 bp, Zea mays
cttcgctatagtcttacggtgtgtgcggttcaactctttgaacctgcttctgctttgctgaaccaaaggggttcagcttttctgcagatttgcaggacctgagtgagattggatcactggctgcctttggacattggagtggatcgtggatcgcttcgctgctccctgatggttgccgagtctttttttatatttaccttaccttgaaggccgttgtgtcttgtctggaataaatcaagattgactggcactgaaagtgtcatcgcgtcactctttcatacttattaataaatatcacaagtctgtcctgagatctcagcctggtgcctgcgtgctgcctttgccttgtatatgacgttttactttcttttagtctcaattattcaaattttttttttactaatttcactgcaatttggtttggtatatacacaataaaccataagtgtaggttcagaattttattttttcataagataagtggtcaaaaagttgagactaaaaaggtttatcgttatatatttgtgaacgaggaggtggtagctatgtttaggttcgttcgtctccgtacgctctgtgcttagttgcgctgaacagcggtgattgccaagtggatggacccatgttaacagggtcgtgttgatgacgctcgaccaaccttgccccaagatccaggtcaaagacaacagtaggcctggtggccggggtgttttgtcattttcttttctcgcatcatttgttttgttgcatttggactaatgctcttcttttcatagtatctagcaaaccttctcgtgtgctgcaactgtaaattactatattaacgcataaataaataaatatagttgcgcccgctattttttttaactaaaacacgaataattaaaaaattaaacacgggtaataaaaaagaactagagt

SEQ ID NO: 6536 - DNA, 1145 bp, Zea mays
ttgatagcaagctattatagctacagaaaatgtgacccccgaggcagttaggattcaaacatgaaagatgacctagcttgatgtctgaaatttcaaggacacagaatggtttttttccagtgcttttggttccttccctacgagcaaggtttcatttcatgtgtcagtgtcagactttgttgccattatcaaaacaatattttttagttcaggtactcagtgaaaaatgtctagtgtattgcttttgcccctctagaaagagcgctatgcttgttcgcttggctttaatctttaccgatttctactgcttttacagtgtttttgtctttatgaattacagctgcagcagtccaaacagccggctttagttcagcatgcttgtttctctgtctctaccgcagccactaagataattttcaaatttggtgatatttatggtgtaagagtttctttacccctctttctcttggcaatataaaaaatacgcagctctcctccgtgttcaagaaaaatgatctacatacatctctgttcaagaaaatgatctacaacagttcagatcctgtatgtaggcctttacaaagtggaaggactggcctaccagtttattccttgttctcaggactcacgggcgacaataaaatgctcgcttccatggtggatccaagtcgccatctgcctcatccagtgcaagagggagatcaaactggccacagcagtctcagaagctagtcaaaactagtgggaggctgtgtgcacagaactagaaaagaaaaggaaaagaaaaggcttggagatcgaatggctcgtggtaaggttcagatgaggaggatagagaacccagtgcaccggcaggtcaccttctgcaagcggcgaatgggcctgctgaagaaagctagggagttgtctgttctctgtgacgctgctatcggtgtcatcgtgatctccccccatggcaagatctatgacttagccaccaatgggtctgtatttcttccaggtttatcaatacaaacgtcactatgcgtactgattgctgctcatttctttaaaattccttggccgtagggaacatgcaaggttttgatcgagaaggacaaggagaagcctgttcaaaaaatgcatgggccgaaagtagccacccc

SEQ ID NO: 6537 - DNA, 734 bp, Zea mays
aattcctttcgtgaaatccactttaacacacgtaaaattgaaataaattgatgtggatatatacgtgcatatccaaatagagtctcaatcctttcgtgaaaccgggccgcgcctgagcgactcggcgatgtccgtggcgaggcagtaggccacggactggatggtgaccatagggttgacgcccacggcgccgggcaggacgctgccgtcgcacacgtacaggctcccggcctcccagctctcgccgcgcgcgtccacggcgccgtcccgggccgtggcgcccatccggcagctgcccatctggtgcgcggtgcagcacagggtccacgcctcggccttcgactggggcccgcgcaccacgtccacgccgtccaggaactcctccagcgcggcctccgtggcgcccccgcacgcgaaccgctgcccgtcgctgcggtgggtgccgatctccgccgcgcccgccgcggccaggacgcgcagcgcgcgccgcatgccgtcgcgcatgttctcccggtccgtggcgtccaggtggtacgccacccgccgctcgccgtgcacggtgccggacccgcggtcccttaccatggagaagaggtgcaccgtgcgcccgtacctgagcatccgctccttcatgtcgcgcccggacacccaagggaactgcgtccccgcgccggccaggcccatcgccggcgccttgaggatggcgccgggcccgcgcgccccgacccggcgct

SEQ ID NO: 6538 - DNA, 825 bp, Zea mays
ttaaccagcaatagatggtcctcatggaatcttatatttttaaattcaaaagcattttgaataaggacaaatgcagggcaggttgccaggtgctagcataacatacttctatctgaagccgagacttctcctgtttaagcaatgatatctctgtttcggcctgaaatagtcaataggctgaataagaaccacatctagtgcaaactgaatactagacaaagcctccaaatccaatgcttactatttctttcgatctgcgcagataactgatgacactttgtagatcatcttctgcatgtgaattatcagtacgatgtgatgaaagcccagcaatattccgttctttctcggctaaccgaatgtgtaaagcttctaactgattgtgtagaattctattctgcactcataacaaaatagaaatcatgaaaaaatgcatgctagtcaaactcagaatcattaattgtgaaaagaatagcattaagaagcagtgaaagcacagactcccaatatatgcctagttgaagtagaccataaaaatacatacgtccacaaccgtcactaaccaatttcatcttcaaattatttactactacaaatgagacatttatctagctggagagttcaagcctttttgcatgatactccctacattccaaattataaaacattttggcttttctagatacatgcttttactatgtatctagacaagtagacatagtgtatatctaagtgcatatatagcaaacactatgaatacagaaaagccaaaatgtatgtaattttaaatggagggagctgtgttttcattatcatccgactaat

SEQ ID NO: 6539 - DNA, 813 bp, Zea mays
cggtccccgcctttccgggtaaacccgacctgcagatggcagattttagtgtgagacttgcatctgtttcacttgatttcttgtgtattttaaaatactaaaaacagaagaagagaacgcgacaaagatgggcatcgtaggcatcgttctcggtctcgttcaaggggtagagatcgaagatctaggtcacgttcaagaaggtatgaaagtgaagtccctaagtaatatattgtttacattttggtgagattgatacctaaataaatatccctgctcccccttcccctcctttatagttattatcacgttgaagttggtcattgtaactagagtacctgtgtgtatttgttgttttgatgtatattgtgtttttatttttcaaccaattctcgtattgacccttatccttttcaaaacttatttgagggatgttttgaatatcctaactgatgaagatttagtagatgtcatctatctctttgttatatgtgatcagttttctcatgtgttgtcatagttgtatgagctctctccctcccccacagctctcctctctctctctcgccctcgccctacctcgcagctatcctttctcttctgactggctgactggggccgtgtgccgcgccctgcgtgccgctgcctcctctgttttttgcccgtgccttacttttgcggcagggcggcaggacgccttaataaccttatgtgttgtttaatttccactttatacctaagattttgactagtaaatagtaactgatacaaatcttattgaatcagcaagcgagttagtggattcgacgccccacc

SEQ ID NO: 6540 - DNA, 799 bp, Zea mays
catcaataaatttctagtaggaagcataatcaattagcaattagtaaggtattggtgtattgctcctaaaaggctgtatagatcaagaaccagctatgcagtaatcatgtcaaagaattaacaacatacgtgcaagaacaaatataaatatgtaataatcatgaagctagtaacctagtactagctagttgaagatgaacatgacgatatcaaaccggcgcactgattcttccttgtacattaaagctatagtaggcagctcattccactggtagaagtgaggcaagtgacccaagattggccttgttaccatacatggttgccttcttaccatacacatacacaaaacagacaaacaacaaagaaaaaaagcagaaaattttgctcagttaacagaagtaatggtaaaatggaaacttaaaattatttgtaccagaagaaattatcacacaaaagagagtatccccggtggatactaatggggtgcttctacagagaaagcagtcacttgtgtctcctaatgaatcttttcacataagtgtaccagaagacatatcatcacacaaaaaagagtatccctggtggatactaatggggtgcttctacagaggaagcaatcacttgtgggcactttctcttaatgcatctttttgcaagtgtctcttcaagcatcctataaaaatatctaactaaaggtctacaacaaacagtcccttttactatatccgtgcatttcaccttaaaaggtggaccatccaaaggggatcctactaagcatatttgaacaattctgtattgg

SEQ ID NO: 6541 - DNA, 1067 bp, Zea mays
aatatgttgccttgtgagttagctgaattcccttgccgctatctgggtttaccgcttgccattaaaaagctttcaaaactccaagtacaacccatcattgataagattgcaaatcaactatctggatggaaggctgagttattgactaaagctggtcgtaaggtgcacgtccagcatgtcctcacagggatggtgatctacttggccatggttgttgaccttccagcttgggcccttaaagccattgataagattcgtcgaggttttctgtggcgaggccgaaaagatgtaaaaggtggtcactgtcatgtggcttggggaattgtttgcaggcctcgcgaattgggtggtctaggcatttccagtatgaaagaacttgcatggtctcttagaatgcgatggctttggctggctaaaactgagccatctcgcccgtgggcctctcttgctatccaggtccctaaaaaggtaaaagatttcttctccatggctatgcaaactgagcttggtaatggggctacaacctttttctggaccgataggtggttatcgggtcacagaattgcagagttagtccctcgattatttgggatcatccctaagagacgggttagcaagagaacagtggtggatgctatctctaatcagagctggatttctgacattcaaggagctctttcggttggaattatcaatgaatttctcattttgtgggatttaattgactcaattgttttaagacctcaagttgaagacaaacatttcttccgtttagctgcaaacggaaagttctcctcaaaggaagcatataggggtttctttttgggatcttctgagtttgagccttttcatagaatatggaaattttgggctcccccaaaaaccaagttttttatgtggttggtcgctcacaggaaggtttggacggcagacaggctgcagaaaagaggtatggaccatccagagagatgtccactatgtgaccaggatcaagaaaccttggaccatatgttgattggatgtgtttttgctcgtgaattctggtttaaattgcttcttcaagtgaa

SEQ ID NO: 6542 - DNA, 886 bp, Zea mays
  unsure (1)..(886): unsure at all n locations
aaaagagttttacacaatttctccaatcataacagaagatgacgcctaatctaaggttgttagaaacatcacatgttgcagacatgggtgagattttctttcatttccctatgggctatcggctaaatgatcagtaggcaggcaacaataaacataactctatagttaaattagtgtcggatcaggtgctgttagagctcagacgcccttgatatgcaagctccaatcgtacgattctttagccctgttaatttgcctgtgaaccaagtcaacaggacggtgtaaacacgcgctgtcgttagagattatcgacagctatctcatctttgacagggacctgctggacatgccatgcaacaacttgacaaatccaagaaaacttaatttcccatccgtatgcctgatccaatcttgcagaacgacatgcagtggcactgaagggctgaggcctaattcctgagataacaagtaaagtttattgacaatgaaatactccatagcatgtataataaataatatgtcatgaaataccggaaggtccaccaaactgatctgataaaaagataacagggaggaaggtcacgtacagaagctaattcatctattacaatagctcggttgccttccttttcaaaatattcataagcagatcgcgcatgttgctcccatctatccaatgcttcaagctgatgcacactaactgctgctgcacaaaactcttggaagtncattcttctgtactgacaggcgctcaactgaaaagaatacccatatatacagtcagacaagtgtgcagtttttgtatgaacaagacggcgtcataagacaaaatacaatgttcccgaacaagaatgcttggaactcggattcttcattgataagtagc

SEQ ID NO: 6543 - DNA, 756 bp, Zea mays
gatacactatagtctacctgcagctgatttagcactgcacctcttcgcagctcctccaagttgcgcattgctgcatggagggcctcgatctcgtctgctgcgtcggggatcttgggcatgccgttccccctatgggcggcgggcattgttgttcccctaaggccctaagtatgcggcggcggcgacggttgaggaggtgcagcccttctcgcggttctccatcacaagccctcctctcttccatgtgtggcatggaccagcagccattcaatggggagaaggcatggatcccttgcgggcgcgcatcacatggtgccgccgccttctgccactggcctccgcgagggcgcctccgctggtcgttgttgcaatgcaaccactcccaagttttgataaccaccagactaccatgggatctaggtggttgtacacatgtaactgagctgtcccgatggtgcccacctgttcaattgaagaggccaattttttttaaagactccaaatatatttccggaaaaataaaataaaatcagctgagatgtaaaaggtttattttcaggtgttaggtttgtgtggttgcatctttagaatgagttgcttgtcgaggatggctttagtgttagagccttagaggtatatgtgtatgtcatggacctatcatgcctaggtttgcactataatccattagtgttagaggacccccaattaaactctctatataagaaagagatgtactccctccgtctcaaataaaat

SEQ ID NO: 6544 - DNA, 946 bp, Zea mays
ctcctctaaatcaacctgcagtagcttctgggtattcacttccttcacacgatcgacaccaattcgcatcaccttcaccgcatcccacacctccttcacagtcttgcgttcgccaagagactgccacatctccttaggcacagagcgcaggagcacactcattgcttgacagtcttgcgtccgcttggcaccggtccctgggttgatcacccccgctacccaattcctcgaagttgcattgcatcaccatcgcccacaagaagtagttgtcgtgcatgagcatgggccacagtagcgaactctgcctaacaccgtcgcaggagctcgacgagtcgctcatggcgttcaccggttgttggcgtggtatgactcacttcttccttgatggtctccttagcagactaaatgatccaccatagtgcatccaaccagctcctataccagattgttggcgcagccgctcaacagcgaccatcgttggaacatgatcaagcagcacggtcaccgcgaggacgatgaatagtaagaaaccaaaattgggatttgtttgctaagtggtgcaacaccttttctggttttcattgcataataaaagactcgacatgagttccctcgccacgatcacagctacccgaagtgccttctttctcggcctccgatgcgacatgcacaatgtgcgctcatgtatagatggccaaaaagcacgaggcccgtgagccccggcatgaagcccgcttttatggggcccgggcccgagcccgggcaccggtagaaataagcctggcggggcctttggcacaagaaaaacttaaggcacgggctgggctttagccccgggcaccgggcccgggttttacccttcttaaagcccccgttaaaggcccccgttttttttttaccccttaaaaaccttgccttacccgggccccgtttaagcccccgcttt

SEQ ID NO: 6545 - DNA, 843 bp, Zea mays
ccgcggatcctttttttcgacctgcagctggtgaattctgtcattaggactagggactggggagacgtttctcacactcccaaatataagtcatggtctttatacgatgatgctgtgggcacattcaacgtgatgttcgcccctccaaaggaataggcaacctggcgattacttgggaacttctaacagtcgtgttgcacctttcttctttatgttccatgaaatggcatggtcactggtcgttatgcatatgcgttgaattgcttgcggctgcttgattgggatccaagttacatgtatccgtcttggattgtttcatcgtctcagctattttgtatgggtccagtgaactgtttaccagttattattaccaaatgtagtgcaccttaggtgcttgaaaagcagccgtttggttctcgtggactaaattttagtcctgttccatcaaacgtttagataccacttagaaggattacatatagtctaattataataaaactaattatatagataacgagtaaatagtgagacgagtctattaagccttattactccatgattcactcatatgatgctacagtaaacatttgctaaccatagattagttaggcttaataaatttctcctgtagtttggtcttcatctatataattaattttgtaattagactatatttaatactcgtaattgatattcaaacattcgatgtgacacgaactaaactttagtctggaaaactaaacaccttacaatcatgtgggcgaaaggcccccgtttggttccaagttactaaattttaatcccatcacattcgatgattgaatgcttgttagaaatattaaa

SEQ ID NO: 6546 - DNA, 810 bp, Zea mays
tgcacccgacgggagctattcatgtgggcacagaattcagagttccaactctggctcgacgattaagctgatgatgcttgtgctccgcagtcacttgtcgacctccatggcttgcgcggctttggcttttgctaaggctgaaagtttcgtcttcacctttttcttgccgaccttaaattggccacctttacgtttcttttcagcaccatctatctgaacagtttgagaaaaaagagttagttaagacatatcttagtgttagtgcattatcatgatcaaacgtgtagtgaaatttgatgaaccatagaagccagcatagggtttatagatagcgatgcacaaatgaagtgtaacttgccaatctcagggcgccaagtgcaaatttcatatatttatggaacccagagtgccccaagaattacagttctggtttcggaatgaaggggaatgtggagccacagccatagctaggtaatccagatcttaaataaaacaggcaaaagtacaaaaccaaaccaaaacagcgaaattcaaggagccagatcagagaaaaaaaactcaaggtataaactagccaaccggatcctctacagtaacgtgcagggacgtacctgtcggccggtcactgacatgtggtgccagctggcgtctggccctgcacgttactgcttccatagactaggagtgaacagaaaatctccagaggaccaaacacagaatgctaccaaaggattacagttctggtggtttaagacgacagccacaaaattacgatgagaagcgaagcacatcacatggcatgtgttggac

SEQ ID NO: 6547 - DNA, 872 bp, Zea mays
tggatgtcgtcgcgtgggcgtctctgcggaaaaagccgccagggcgcgcggcttgattagcgattggtttggtttccatgtcaggtcgcgcctgggaagcccgccgcgagtacggaatgccaagccagtagtagtttttgttctcggcacgaagccatttgatgttcgttttgtgcgacggtttgcggcttgatcgcgattggcctcgtagcctttttgaccgaacgagagaagcagcagctctgcaaagctacctccaggttcattcgagacggtaggctgggagggatagcgtcattgcggccaatggttttcggttcttttccacttgtgcacgacgtcataaacccgagaaaatgtttacagcctcacagggcacctctcagagaaccagagactccggttccttgggggtaaaaccgtaaaatggccgccgcttgtcttgttgcttgtagtgtgttgttgttgctttgcgccattgccactgcctgtagcacgcacaaggcgcgcgcagcgagtcactagtcagcgtgcgaggacccgcgctacaggaaagcaatcaggaaaccttttttccctggaaaaaaaaagaggaccagaaaaggtgggatcgaatttatcaaccatggccaggtctggtggaacctgtccggaagagaggagtttgcacatcgcatccagaacggaacaaagaaacaaaaacacatacacacatgtcgctgctcttgagctaacgcagcatatgctatatttattagaagggtttggtttatagggtgttttattttattttagtctataaattgtcaggtacagaaatgaaaatagagttttagtttgtatatttaataattagagacaaataaagtaaa

SEQ ID NO: 6548 - DNA, 514 bp, Zea mays
cagcttgcatgcctgcagtctgtgttgacagttcaattcctcttgataatcttgattgataggctttagacgcgagagtggtcatgttcaagaaggaacggttagttgtttcttggtacttgccttgtcgatgtggatcatatttaagttcgatcagttatgcaacataatactccctctatcttagaaaataagatgcacatatttttagaaaaagtcaacgttttaaaactttgatcaacaatttagcaaaaaaaaaaatatatgtttttagagtaggcatgttatatatttaaatttatatttaaaaatactttagtatgatgtttaatttgcattcgttgatatcatatttttaaaaaaaactaatggtcaaagtttcactttaaatactcttccgaaaaaatatgtcttttttgatagagaaagtagtatttataattggccttataattgaccttgaacaaatacaagactgtacggtctggttttttggaggtgggtggggggaggg

SEQ ID NO: 6549 - DNA, 747 bp, Zea mays
tttatgtaccttaagttctccagaagcctacttgatctgatatgctggtcctacttgaaccatgctaatgactcactcaatagtgggttgcattgggatcaacatgtcaggaacggggcaagttatggttttgtgaaactgaacataaaacatgatggaaagcattggtatcagtgattttctgcacctataaaacaagttttctcacaggaaactattggttttaatgttatgaaacatgactgttggctctgtggtgttgccagagaagatcacaaatgtttttatttgatatccatatcgacaaacagttgtgctacctcgatttttgcccctctgccttcatctgcattagcatccaaaatctgatggctatcatttatgcttcctctagatttgcatcctagatattgcaaaagctactggttgatccatgtcacaatgtttcctattcccattaactacccaccaatgccaatcattgctctgtaccactcagaacttaaggcgttggagaaacacaatgggcgatttgattttagccactggaatatgttacagatacatactgtacatggttctgttctgctgacaccgacatagtacaatccgtgccactgtcctgaatcctgatatgatcttttggagccacctcatcctctccatgtatcatgtctaacatatgagggcaatattattcaatgccttctttttccctaatttgcagggtcaattatagtattctta

SEQ ID NO: 6550 - DNA, 791 bp, Zea mays
gtggacgtgcctgggcctacctagaacctagctagctagagctgggtagccagagatcagaggttatcgggaatttctagggttcctcgtttttgcccgtccttaccctggctggctgacgcgtcccggcgaataatgtggcgcgcgcggtctccgtgtagacgtcatgtgtccggcgggccacggaaatttcgtgctgctagcttttgctccctgtcgtgtggtggtctccggtgctgctagcatgcatatcgcggccgggcagatttgtttggtgccaatggtcaacgacgacgagtacagtgtacgtacgtctttttagtgcgcggcgcgatagggcagcagtcagcagagacagagcgaggcgcccgtgccgcggtggtagcccccgcgtcgggtcgggtgggtgccgaaggaagtcgcgcgtggcgtgggcctgtccatcgaacaaaagggaaaggaaaacgggcagtggccgccgggcggtgggttgggcttgggccacattggcctttactcggcaccggtctttttgacatttgtttaatttaccagcgcaacagcactgcaaacgtgcgtaccgtcaatatatgctggtagatctgaactcaatgtatttctgttacgtgcgtaatagaaatggctcctccggccggagtaaaaaaaaaacacacgggaaatcgtcggacggccgagttcacataacggattattagaggtgccgaggcccagcagatacataagctgacaaggcagcacgacccatgaatgaatggtctttggctctttgg

SEQ ID NO: 6551 - DNA, 815 bp, Zea mays
tagcaccagacatgtatgacaaggacttgcaaagaatgcaactatcttttgagaatatctaggcattatgttccaccacatggaagagagcagatcagaagaagcagaaacttgtaattttcagagattcgtgggcagaattatgctgaattgctcacatagatacgttaagttgatacagaaatcatcctccacagctgttcctcagttgaagagctggcaatatcaaggaatggacagccctggcattggaagttgcagcaggatgcataggaaagtatgttctagagtctcctttcctttctcttgaaaattgatgttttccttctgtacacgactgaacttttgcatatttgagtttttgttctctctggtggaaattaaataaatatagatagccataggcaaaaatgcatgtgtcggtagctctcaacgtgcaagtagccccaaactttcaactgctgccatgcatgtccatgcaaattaattattgcatgttgtatttttcatttctttcgataagttgccgacagacggcagttgtatatttgtaaaggaagaaatttgaaatattgacctgagagctactttcgtccccttccattttcctgttcctgtcgtaaacgtttctgtgtggagaacccaagctacttgatcgctttctacttgaatacaggaatggaaaaggactggttgatttgatagggtccaaaagaacaatcaccctcaaaaagaagtaaacacattcaaggggaaaaaaggaaggaactattcatgaatatttacttaccatgtagattgggtaatatatgaag

SEQ ID NO: 6552 - DNA, 782 bp, Zea mays
aattttacagcaagtttggattaataattggcctggcagcttgcagtggttgctatcattgttatcaaatcgtctaatagatcctagttgccatggcactgatcagcctgactaatcatagtgcataactgatcgccatgacaccaatcaacatgactaatcgcgattagtcggatgacttgataacattggttgctatgtaaatcaagcacaaaatgccacacaaggatagctaaatgactccagaataaaacatcaagagtaaggttaacactcaaaaacatgctacatgattatatttcatggagccaagaatcaacccttgtaacaatgaaattggtgtacagaaggtgttagcaaagatgcagtaaacaaaatttggcggatcagggaccaaaatagaagcaaagcaaatatgggctctacaatcaactttgatttagaaataaggtggatggcaaaattcatttatgtttcagataaaattaacatattacaagaaattgaagagtggtcctatgatgaacccacatattacctttggatgtgcaagcagaatatggacaagttcatgccactgggaagagaagtaatttgtcaacagatgaagactacctgctacaagtgacgcatgcacaagcggagaagcaccaacattgttattctcctaatttaaaaacaacagctgttaccagaattagtatcagatgataattcaaagtggaccacacatcaatgaataaaaacattttggtttaacccattgagaccttctgttcagc

SEQ ID NO: 6553 - DNA, 796 bp, Zea mays
ttgcttctctgggttaggtttttgagccggatttgatgcgcagctacatttaatagcttgatgctcgcaggtgccctgcatcatttgggcattggaatcactcttacgaatccactgccgcccttatttgctacatagacagatatgaaaaacagtagggaaggagttaaaatgtacagtataaattatatgctattactgggagtttctagggccttctaatccatgttagtaattccgaattcatgctagtaattcttcgggaatatctgttgcctaatataacataaccctgaattaatgctagtaattattttctaggtagttaaaactctcattttatgtagggtaacactaggaaatttctcggttctaatagataattttcgaatattatagatacatattgcttggtgtgccaagtgaattcatttgcatgtcaggatgttgttttctcacttcttgactactgtacaaaatataaatatttgttctaacttctggaagatcagaggaagtaggattttcaccatagtattctcatggccttgctacatcacaagagtttccatgttgttttgggttcagatgatagccatggtgtctgctgttgaagagcttagttggttaacctctaaagaacttggtgagatgctcagggagtcagacaactttgttttgcagtccaagatagaagacggaggtccaaagcaagtacttgtatgtacaaaatgcttgcatatgttgcaaacttgcaataccccatttccctggaaagcggtccttggttgaaggg

SEQ ID NO: 6554 - DNA, 783 bp, Zea mays
attttaagggtttagggttcgaacagatgcagtagttgtggctgattacatgctttacaagagaaggagcaagacaggacaagactctgtttccaggtgattgtgaacctctgcatttcattgatcaagccgccggtaccggcttgttttcagagctcagacccatctcaaaggtgcggcgaattcaatgagactatacgggtgtacacttgagccaagcaggtgttgaaatagtatgctactgatatttagatctatactgtcctaacataagcatgtggaaacatccgtgggaaataagtgtgcttcgccttgacgaccaaccaatacaaaaagaagcaggggatatgagcgattgccatgccgaggtacctgcaccaaattcagattgctgtaggcattcccggatagtaaatgatggtatgagaggaggtagatgtcagtaccatagaggagctccagatgatgaaaggtccagaaacgggtatggccacctgaaaaaagcagaaaaggatcacagttccgtcactgaaggtaccacatcagtcctcattcagatgcatgcataaatgaaccgaagcaacattacaatatgcattgcattgatgacataccaacatatagacatatagtaagataaactacaggaattgagaaattaggatatactactttgctaataagagtgtgccaacatgcatggccagcaccaaacagtgaatttgcagcgtattcggaaatttgaatgaaatcacaagacaagctgaatagtgaatacacatg

SEQ ID NO: 6555 - DNA, 769 bp, Zea mays
tgatcaagatgctcgccgagaccacggggagcaccggaaagcagctcaggcgggaggtcgcggagatcgtgttcacggtgagcaacatccgcgccgtgctccagcacgcgcccgctgcccaggtcgggctgcggcggctcggcgccgaggtgctgacgcgtctcgccatggacgctgtcgcgcgggagcggatcggcggcacgggtgggttggtcgcgctcctgctgcacatgttcctccggcccggaggctccgaagaggacaccgacgccgctcgcgtcgaggccggcgaggcgctcgccatgctggccctcgagagcccgcgcaactgcgagcgcatcctcagagccggtggcagctcgagctcggccacatccaccactaccgtagacagcctcgtcgacgcgcttggggacgccgccatcggcgtcggggcgggcaggatcctgatgaacctctgcgcgtacaccggaggcagcagcgagtggttcccgcagctccgccgcgccacgcgtgccgcggccacggtgctccgggaagtcgacacggtcaacgagtccaagccgcttgaggtgtcgctgggcttcgcggctcagctagtgaggctgatgggcccacacgagctggcacaccatatggtcaacgccggggtcagcgaagcggacctggtcagccgactggtcagccgtgctggctacgcacgcctggccctttgaccaaagcgccgcggatccgaaggtttacggtcgacctcgtcatcgcgctgctg

SEQ ID NO: 6556 - DNA, 802 bp, Zea mays
tccaggagcaccctgccgcacaccgcgcaggacgcgaactcgccctccgcccggaggcggcggacagcgccgcagtggccgcaccagcacgtcgccgacggtgccatcgacacaacgccggaggaacgcgtctggccaactcaagatggatttatgtgccggcggctgagttttgcctcgggttcagatgtgccaggactacattatatttggatggaaaggttgttgggcgcttggctcggtttcagttgggctattgcatcgcgttggtttcccgtggcagaattcggaatgtgccgccgcgtcgaattcggtgttccttatatgtagtgcacggacgagtcagtatcgaggcacttccaagaaccgagtggaggaaacttgacgtcatagatgaagatttcctcttttttttgtttaagaaaatagctgaaggtttcttggcagccaaggcccaagtttcctgtatttacaactcaattgaagattctgtttggttcatcaccgtaaaataatgcagaaagatccggtaacccaagtttcctaggaccaggcgtaagatgcaagctagtactgtatcatccaatgcgtcccacgaagtagggctggaaaccagtcgctcgtttcaaaaatatcattctaaaaaaaataaaaataagttgattttaggtgactttcgacttcgactcagcttaaagtaagatctcatacaaaagagaccctgataaataagatttatcaattttgaagaaagctcaaaaatatgcatttgactcgtgaaccaccctagtctacgtggaac

SEQ ID NO: 6557 - DNA, 788 bp, Zea mays
gtgtgggtgttgaagtttataagtgaatttattttcctagcagcgtaagcttttgggttaaactgattagtgcatccactctaacaataataattaatcaaaattgaaaaccaaactgaaagatcttgattaaaaaaattagttccttattcatctctaaatagcaaggacaaaataaccaaagaaattttggctactattctcggttgaacaaaatgatcgaaacaaatgaattgttattgttcccttatcaattgttattatctaaaatagaggtattatcgcctaaatttgctctagatcatatttttttgttgtattaattaactatattaaaaaaatcagttagttcagttagaattaaataaccaaaaccagtgaattggttttggattttttagacaattactgtagggattagtccctacagttttccattaaatcggtgaaatatttacagtttgcaatggggagagagggagagttttttcgcagctattgttcacaattggttttggaattgatctgttcctatttttaggaaccaaatttcttcagaaaccaaaaaaacgaactaaaaaaatagaatgccaacccctatgtagaatgttaatatgtttttgcagacgtgtcaagcgtctgttcaccatccgaactcctaagggtggtgtttggttcaacttcctgaaccagattcgttgtcaaaatcctgaaatcttgaccaaacagtgcaacaatagaatacatttttaaaaatctattcttaatttagaatcaccttctggcct

SEQ ID NO: 6558 - DNA, 804 bp, Zea mays
cgtagtcagggatagacggtcgactgaaatccacccggcgattttttttttaatttcagtcggagggtgggggtgaagcttcgccatcaccatgagtcgtagtcccatccatttgatatttgcacgtcatcctccagctgttggtgtatgcctggtcctagtacaagaggacgaaggtgttgctgagccctgctgagcctgaagcaaagcaaaggcgaaggtgttgctgcaacttcattatttctatggaatggccggatggatatggtactctgtattgcattggcatggggatggatatggagaatgtggctcctttttgtgcgcacttgcaggtgcacagtatggtcaatgttcctacctgctataaacttatggagtttgtttaatgctgtcttaatctattttaaaccttatttttatttttttctcgaaagcgcaagagagctgcgcgaaaatatattaagaaggagataaaggtccaaaaggactcgaaaccttatttttattatgtgtttgatttcgtctgacagtactattttggtctctaaggttggaaatggagcacactctttgttttgaacagataaatggatcttgggacagaatgtgtgtagtctggcgcctaggttatttgccatcgttcctaaaaggattgcaaatagaagaactgtgcttgaggctctttccaacagaaaatggatatctgatataaagggtgctctgtctgtgggagttctagtgaattatttgaatctttgggagcttcttttaaaaatagtgttgcaacctgaagtggaagaa

SEQ ID NO: 6559 - DNA, 725 bp, Zea mays
aaccagaactttcgttgcccacatctgccaccagtgtctttttatgcgtagtcccgctatcactgcccggtgtcccgttttcgtcgccagcatttgcagcggaggacccaaagaaaaagaatcttctcatatttcaggaattagaagtacggaagattcaccagaaattggatccctgcatgaatcgggtcttggtaagcaaagcattaactatatgaaatattatgtagcaagctgtactgtacatctgaagtaacaagacaacaaatgctttctttacgaattagccgagaactaacaaaaatattaacaagagacttgggaaacaaaatcatcccagaaaatgaaaatctacaaggattttttttttgtaaagatcgcaaggaaatgttcagtaatttccacataacattggaaataactagctgtcatctcccaactgaagttgcacatgtcctccacgccagcatctcactacctcgagtaggaaatcaatcgaacatgttacacgcacagccaccggcaccaagtaaaagcgaacagtactcgtttggtcctcgatcgtagggcaccgaaccgaaccgcgcaaaattcaatcagaagggcaactgaaccaaaaaatcgaaacagaaccagacattcgcctagcgagccgtgtcccgtcgatcctcgatcccagaaccaccggcgattcaaggacgccccaccgatccttgacccagcgc

SEQ ID NO: 6560 - DNA, 804 bp, Zea mays
taacgttcttgcagtagcagaggcaaagctcgctgatcgttttcggttagtgtcgccaaggtagagctcgctcctatgccgttatcgtcgttggcccaggtgccttgaggccgtacgggaagaagcagacgtctccccttgcgccgctagggctccggtacccggcgacgtcgaacaggggcagctggtgcccggtgccatcgttgaggaatgcaacctatagtacgacaaattcaaacaatttataatctatttggttgtaatcgttgaggaattgtaagagaaactaggaaaaatggtcgtggacagaagttatttggttgctgcctaacctatttcttcaggtagtacaggacggaactggacttaatcttcctcaagaacaaatgggacttcttttccagaatcacatgcccgaaagaatagatatctcaacatttttcatgcatgaatttatatctcttgccacattactcacatcattgtaaggtttcttcaattccccatccacaagaagaacatccagtgaagatctgccagtcattgccatctcattttcgctgttgccattgcgagaattggtctgagtcagtactagcaacaagcacatcattctggttcttgaacacctgcaccagagtttcagtggatggatggtcgaaatcatcttctgactctgaaaaaaaaatccccatttctcgaagatgcctaagtggccctaacgccatcagcattttcaatgtcctgactgccctctctagcacctggagatgaagattgagcaggaactaacacttcctcagt

SEQ ID NO: 6561 - DNA, 737 bp, Zea mays
tgattaatactcagcatggaattggcacagatggtcgatgtacaggtacatgcattttgttgagctatatgctaggctcagtgttaagatctgggccttttgggtgacttgacagcttgtgcagttgcgcctgagacatctattactacacagttcagtttttacttgtcggataccattataaatcatgttagtctgctgcattaacagtatatgtcataaatatgtactatgcttgagatagcttgtttcaaacatgaaatctgtgtgagctcttttattattctgaggggtgtccctcagatatccttttatgttctggcgatgtaattttatttcaagagacgaagctgattttggtgtcggattgctacctaggttttgacttttgacttggagtattatcttgagcatctcgccaagggttgagtgctttgttcaaagatcaaagcagtttgtgctgttacattttgtatgggctgagcaaccagctcagcttcagttaccttaacacactgacacagctggagacactagccaatttgcatgaaacaaaatataacctcaggaatattggcactttaaatttacaagaacccgttagcgctttaaacatcacgggtacacaagttacaagaatttccaagcactttacccgccacttgttccatgaatgctttcagcactacataaaactagtaattaactgctgcctaacaaggggggtcaggtagact

SEQ ID NO: 6562 - DNA, 858 bp, Zea mays
aactcatactttaaaagactattttcctccagaatgttcttgttagtttagcacccaatgctgaagcttaatgaaattgtttgcacctcaaaagtttgcacttcatatatttgctagtgcactctggggatgactgaatgaataattttgaaattgtagctatgctttcttctttctaattttctccccacatttccacctgtagttggaagtgaattttaaagtgttggtacaagtgcaagccgcagtgttgactaatattttcatctacagctacgtttgtcatgatatttgttttcgcatgagccatcgaaaccagttccttcctgtatttggataactaataactatcccgccctgtatcctaggaggattcctaaattagttttgtgctgatacatctatattaagctcaaatgaaacacgattttttttatcaacacaatttgcctccttttcggttgaaacacaatttgcctcttgttacagtttgaacaagagggcctcgatgttggatgtgcaactggagtgccaagatctggagagaatttctatcgtaaatcgtttgggaagatttcatggccggaaccatgcagcagcagtcgagagttcatctgcttcagaaatgactccccggagaatttttcctgaaagacatgtcatgtcttttgcagtccctggaaatcttcctgaaggagtgcactgtttatcactctagtggaatgatcttcaattactctctagccactcggatgatctcaggtttgcgccccgtgatttccagtgctccttatccatgcaaaacatggcccaacagaagagtatattatcaagaggtactagagaaccgggagcgtc

SEQ ID NO: 6563 - DNA, 811 bp, Zea mays
gctagcttgcatgcctgcagtttgctcgtttcgcaggtccaaaggggaattcaggacctggtggtcgtggtaggcgataagttattggcgttcctttttgccaggtgattcacggattttctcattcaacatattctctcgaaggaccagagttcaaagttttcgtgcggcgataacattaatcgatcgcttctatcactgttttgtaggccagttccgtggtgaatacccatgtggatttgatattgcaccataggaataggattggtagttttggccttgtgcatccagcgttgcgacccttgtttcgctagatgttttttaggcagaatgcactagctggacataataggtccaaacatttgtagcatcgtgcattcgtgcaggcgtaaatcgtaatgtgttatattgctggagttgtttgtaatgtgctgttttgtatctctgaggcagtttggctgtcaaatccgtgggcttgacgaatatcaacaacctggctgctgttaccttttagaacttattcctgaagttgtttggtaatgggtgtatcttgtgcgtgtttttgtatgcccgtgcgtgtgtgtgctaaatcgaaagctggttcacgttttgggctggcacgccgcccattgtatggcttaccgtgatgttctgaaaagtgtcgagtagttccgagtgatgctagactgctagtgttgggtagcttcttgaaacggaattgcaggcgttttgctgtggcttccatggccagttgaacctgatgaaacgttttcatggcctttgtagaaaataaacttgcgtgatgccttgc

SEQ ID NO: 6564 - DNA, 798 bp, Zea mays
atcttgcatgcctgcagggtccactgccaaaacatctcaaacattaatcagcgtgagttatatagctttgttagtgaacagccttttttattcttacatgctaacggttgatatgactcgctcatctgaattcgttctgtacatcttttttttcctgaactgaagtagaaaagactatggaaggtcctgactgtagagttttctctcatattgtgatttttgggctaattctatgtattctgctgttattcttggatttcttattgaagtatgagctctagagaacataactgttcaattttaatgataatttcatactctttaattagtttggtattgattttttcttttccttgtgccagtgagctcatgcgaaaatggacttaaagatcatataaagaaaggtacttgatctttgtatcttacatgagtttgtttgtctttatcctgttcaatattcacaagcacttttttagtgttaagaccatgctgcacttgtgcaaactctatagactgcttgagtggccagatacggtcagattggcgcggcaaacgtttgcttgtggactgtggtccaaagggatttattcttatgttggacatagaagcgttaaccaatgcaatttttgtccttggttcatatttttaaacttggagctatgggtttataatatcacctttttttacatgtttgtgaaaatattcggctctaattgaccttgcgttctttttttattgttctcctagttaagaccttgcttgaagagcttgaatgtctggttgagaatgtctatggca

SEQ ID NO: 6565 - DNA, 809 bp, Zea mays
  unsure (1)..(809): unsure at all n locations
atcttgcatgcctgcagcttcatcatgtcagtcacggcagaagacgacaggccttcctgtccatcgcaacctccaccaaggttacctgaagaaatgtgacgaagccgtaccaatgaacccctctcacgtgaaattctgtcctgctggccgacgtctaactgttgctcactaataagcttagtgctacctgacgacgactcatcgctgtctgccacaagtgcatcgttaggatcatccaccaccttctccatgtcacagcactcatttgatgacgacggccctaaagactcaatttcttgggacgtgcgtgcggcagatgcggaatcacagaccggcgatagcaacagctctgatatctcatggagtctgcttattgcttctaagaagttggaacggattgtgctttcatctttgtggaaggagctttcgagagcctgagccctgacaagctcctcttctgcttgcctaagcttctcgatcaattcatttgatccagtgctgggcagctcggtagtattctcgtcctccaggccttgcagggaatcctccagctcattgttttcctggcgaagtcgatcgatctgggaggtttgtgctgaaaccatgaggtccaagtcaacgaccatgttgacaatttcatcgatcctctctgtaacttctgccatggagatgttgcagtcagactcgaagtgttccttgatcttgtcaatgatagactccgcgtctattgcacatttgttgacatagcacacattctncattcctgcgccatggctcttccgagtggtgttcttctcttgaaagttcaa

SEQ ID NO: 6566 - DNA, 751 bp, Zea mays
ttggcccatcaacttggcagagcttgcaaaatttagcatatggctagattagaggcccaaatgtttgtaagaggctggaaaaggcccatttatatatgcgacagtaggcgtaataaaatagaaatacacacagtggcaggccgtaatccatatggttgtccggtgtccggtgtcccttccgttgccttccgtaattcctgatcggctattccgtggaagaaccttcgagaactgggatgcaactatgccagcacgcagctgggctcctctcggttttataaaaacctcaaagcttttcgccttaatccccatcaacccccccccggacatttctggtcgcaccctcctccggccctcccagccgccaagccctctggaaccttcgagagctcgatcggatcggagcccctgccatggccgacgaggcgaaggcgaagggtaatgcggcgttctcagccggccgcttcgaggaggcggcgaggcacttcacggacgccatcgcgctcgccccgggcaaccacgtcctctactccaaccggtcggcggcgctcgcctcactccaccgctactccgacgctctcgccgacgcgcagaagaccgtcgagctcaagcctgactgggccaagggctactcccgcctcggcgcggcgcacctcggcctcggcgacgccgccagcgccgtcgccgcatacgagaagggccttgcgctcgaccccagcaacgaaggtctcaaggcgggggctcgaggacc

SEQ ID NO: 6567 - DNA, 819 bp, Zea mays
cttgcatgcctgcagggcctcctttgtggttgcttgcaggtcattattcaaaagttgggagggatggagtcaactaagtactctttcttgcagtatgctgatcagatgatggaactgtttttgagagttttcgcatgtcgaaatgccacagtgcatgaggaggctatgcttgctattggtgcattggcatatgcagctggtccaaactttgcaaaatacatggcacagttttatcagtatttggagatgggtcttcagaactttgaggagtatcaggtgtgtgccattaccgtgggcgttgttggtgacctctgtagagcactggaagacaaaattttgcccttctgtgatggcatcatgactcaactcctgaaggacctgtccagtaaccagttgcacagatcagtgaaaccaccaatattttcgtgctttggtgatattgcactggcaattggggaaaactttgagaagtatttgatctatgcgatgcctatgctccaaagtgctgctgatttgtctgcccataccactgcaactgatgatgagatgctcgactacaccaatcagctaaggagtggaatcttggaagcctactctggtatcctgcaaggatttaagagttcacctaagacacaactactgatgtcatatgctccacatattattcagttccttgatgctctgtacaatggaaaggatatgtatgtcaaacttcacactctggttcttatctttgctgcctaacttatatgagtcatttgttttgttgacctaacactttatgatgttatacctcttttgaagggatgatgctgtgat

SEQ ID NO: 6568 - DNA, 1017 bp, Zea mays
  unsure (1)..(1017): unsure at all n locations
gtgcaaaaaagaaacaattattaggcaacaagaataagattagcatgcatatatatgtatactgatccttggcatatactactatgactaccaccaccaccaccataggaaaggaaacacaagtgatgttgaagatgagtagctagctagctggtcgatgatgaaaaaagagggaataaaacggaaggctgaagcagcagcaagggggctggctcatcactcatgtcatgctagctagcattgattctaaagcgcgagcaaacaaagcacaaatcttgtactattcacctgacgaagctgccggcctttcggtgttcttcacggtcctgtacatctgcatgcagcacacacgcagcaacatggcaaaggatcattagtttataggccaggcaaagcatatctatctaccagcgtatctacgaactacatttgaagcaagcaactcgcagtacaaaataggggaatctctttggcgaatcataagatttgcgtttttcaggaggatagatacatcgtgcgtgcgtgcgtgcgtgcatatatatgggctatcctgctgcaagatttgatttgacaccttaaggcataaatcaagaacagcaaagggggaaagtagctagctagctagcaaaggggaaccaccacattcacactatcgacaggcattattgatcaaaggcatagtattagagtaactactgtgtctgggtgtgattcatgtgtgtagtccaattacaaagagaaaagaagagtttgcctagtgccctagattgggaatgaaacctgggattttttttttctggctttgggnccaaaatttggaaatgcttggtacttagcttggctaatgaaggatcatataaggtttccaataagccatgatttttcacaaggggcaaatgaacgcctattaatgtttagagccccatggaggaagaacactctcagggggggtttttttggtgcctcggttaaagaactttttgcccaatttggcccctgccccatgggtggttatat

SEQ ID NO: 6569 - DNA, 770 bp, Zea mays
caccttgagaagagctaccagcacctccagattggccagggactacatatccaactttgatcccataagactgcgaatttgacaaaagatgtatgagatcatactcatgtgccggtaacaagatacgtgctgtaagcaagcaaaatgttatggagagcaggacaagggttcctggtgggcaaatgacatttttcactataggagaatatctaaaaaaagccagaaccagtgccggaggcttctacatgagtggggcccactgggagagggaaaaaccgaagtcttgcccttgcaaatgcggagaggttgcttcgaacccgcagtcccgcaatgactcggtgagaatatctagtttccataaaaaaaacagcaagtttcaagagaaaacaaggacaaacaggaactgtgcctgtcgatattgtcctcttcagttttccatgtttggctaccctcactccaacatttcagtttataaaggtagtaagaagaatttaaactttctattagatagacttatgcacatcgtaaggcagcccatatacagtactcctaaaagaacacaaaggtacatgagtatctggcactcatctcaggaaaggttttgggctgtaatacataggttaagaatctacattagttctttaaatggtacctagagtaatatcgaaggggctcactacattttccttaagcagagcaaaaggaatggtttgagatcaaaagatacctcattagatacaatcgaaaacgccatcttggattttcttgta

SEQ ID NO: 6570 - DNA, 1133 bp, Zea mays
tacaagtatatatgcagtactatacctatctttctacacctcggagctacgtatcatgcatgcttcacgtaagagtttgatttgatatgcgtttctttttttttttatctcggcgagagatctggtaagatacgacattattctgccacagcgcaaaacggaagtgcatgcgtgcgtgcgtgttcgataaagatcgacgacagtgttacgtgtcaggaatatctgtgatatatacagctcccgtcccgtacttgttgttggtgcatgcagctagcgctatgtctcgtcaacagggaaaaggtgctagaagcatatatatatatagcatggaaagtttgattcggatagattctgctgccgccgatcgagaagccgtgcatgggtgtcctagtagtatcctgctagttgcatgtgcatttggctttacatgcacgcactcgaggaggaggatattactatgctatgcaccaagcacaagcagatggtgctagaaggttttgtcagggccgtgggccgaaccacagcagcgctaccttcctagtgcctacatccatgccgggttaccgagatgttggcaggccagctagcggccgggcacgtagagtagcccctgagagctgagacggcgtcggcacatgcaagcaccggtcggtggcgcgccgccctgcggaccggaccgcgcgagcgcgaaaaatgtacgatccaaatctggcgtgtcaatcccagtcccagaccgcggcgcggtcgccctggctcttgccctgcggaggtagccgtaccgtacgtcccagctaggaaaccaatcaaccgcgccgcgctccgaccaacctccagctccaatccggacacctgtgtgtcctgcactgcccccactgtacggacacctttaatttcggacgacgttaccaactgatattaaaataatgtacatctgattgttgaactagaagtattttaatttgatttatacaccctgttgaacttaaactcacctgataatttggatatgtatagaaagaagaaagttatatagtagtttatctaaatgagtgtgcacctttcattactagtataccacatttttatggtttataaatgtacaattttgaggatttgtacagtggaataatggt

SEQ ID NO: 6571 - DNA, 788 bp, Zea mays
gcagttccgcgcgagaagaacgtacgtccacgctgacggggactgggcgggggtctccctgcgcccgaacggacccgtcccacccctgaacgcggtgtggcgggtggagcatttggtctggtcggaccagggggacacattcgtcctcctccagaacgccgcctacggccgctacctctccttctcgatccaggaggcgccgcccggccaccgtggccgccgcaccacccagctcgaccgcaacgagccccacgcgctgagcccctcctccccgtggatgtggagggtccagaggttggacccgcccgaccatggctacgtccgcctgcgctacttcggctgcgacctccgcgccaacggtaggcaccgcacctggaaaacctgcgtcaccgtcgacgtcaaccgaggccgcagggtctccaccatgatgcagtggacggcccacgtcgtcgcagcgagctcggtaccgccgccccttccagcctcacctcagcctcaggtgcgtggtggctgcgcgccgttctttctccttccttgcattgcattggatgggaactctcctcggcggccagctttacttggaacaccaatcatagatgcgtcggttttcattctctctgtctgaatttgtcctttcctgagtctgaatttttttttcatttcttccgatacaagactactggacctgttaattcttgctgacaggttttaattctgtagcccacgaaatgtttttcgtggtttctcgtgttacgtacgttcctgtgcctctgcatctgcttcgcttc

SEQ ID NO: 6572 - DNA, 854 bp, Zea mays
tctttagggtctgtttggactttggagaggtaaaacaattctagagagaatgcttgaaacgattctaacgttttgtcttaggtatgtgaaacggcttcggatggtttctagtgtttctagttcttgcttttccagtgcaccggctaccatattttgtacttaattttttttttacaaatcaataagtacaccggccttttgaagtcaatcaaaacacaccggtctacaaaaaagctacacatttgattgctacacagtcttttagatttgctctcatctataaaatagctacaagctcactatcaaataacacaaactcttttaaagtgaggtttgcttaggacccgctccagattctagcttgagcatagagatgtagtttatacgataaattaaaatattttaaaattgtttttttatcaagaagaaataaaatattaattttaaattccttctaaaggatcataactttagctctatagttttctaagctcctgtgatatgctccatggactccactatttttttaagcttaagtaatctcaacatggcctaaaaaggacaacagcagtggtgagaaattaaaggagttgtttgctcccccccatcattatcccgcccgtcctcgatcaagcctatcccaatccgtctctaaccacctcaaacaaacacccaccactccatataagaagcagcaaacccccatcaccaccccactcacttcctacctaccaactaatacttctcgatactcaccagccgtcagttcgacgacctaccccccaaggtccttgtgactccttccaaagctccgaagttaccccctcctcccgaattattcaacaccttcctcc

SEQ ID NO: 6573 - DNA, 807 bp, Zea mays
atcattgctgaagatgaaggcatcagtcaggaagccctcaaggcttatgcagagcttttcaagcacccactttctcagaaccaggtggaggccttgtcagctcttttcggttggtccacgccaccagaagttcttgtttaagcctatgttcctccccccgttctttgtggtagtgttttgtagactgttatccatgaatccaaacaaaattgtattctgaaatgtgagaggcctaaactcctctgtaaggcaagactcagttaaagagctagtggactcttctcaagtggatgtggtatgtgtccaggaaactaaaatgcagagcatttcaacaagatctatcctctccatgctaggagctgagttctctaactatgtttatctgccatcaatgggtgcaagtggtggcatcttgatcacttggaaaagacatataggtcatacagggcagcaaagagtcgataatcacagtgtttcagtccagttgtgcagggagcaggggcaggcttggtggcttacctgtgtgtacggccctcagggagatgatgaaaaaatcctttttcttcaggaactcagagatgtcagaacagcctgtgctggtccatggttggtggctggggattttaacctcatctataaaacatcagataagaataactccaattataatagagctatgatgggtcgtttcaggggtttggtcaatgatcttgccctcaaagagattccgctactaggacgcaaatacacttggtctaaccagcaagataaccctgtccttgttaagctagatagagtgttttgttc

SEQ ID NO: 6574 - DNA, 872 bp, Zea mays
gcataaacggctcatgaacggctcatgaaacaaagtctacatggttcagaacccagatctggcccaaaagaacccaaatcagaattggcaggggccaggcgccggaactgtagacttcataaatcaggaacccagatatgggaaaaagttttaaaattacatgatttttgtaacaaagtacagactatatggatcagaaaccctgatctggatcaagaagcagcaaaccgagatctgaactgatcaagaagcagcaaaccgagacctgaactgcgtcgcgtaccccatctaccacaaattatgacgtccactctcccacttggggagatggtaagccaacgcatccaccaagtgcaatgtgggccattgatctaggccacgggccttcttgatagccagtcgaccccgtccaggtaagtatgttgcaaagtaggcaggggcactgcttatgtagcctcctcacgcgtcgcacccatcttcaggcggcgaggtgggactaaccgaaacgtgcctcacccagtcaccctgtcgctcgagcgctggaagtgggcgagcgctcgttattttgcagagcccataaacgaaagcccatgaaatcttccgactcgtgcgcgccaacctttttgttgctcgctcaccgaccggcgccatcactcgctgaaatttcttttcccaatccagttcattctgccgctctccaatagtccaatccggtcgcggcgaatctcggccagacggacaccccaatgccgtcacggtcgggctcccggggcaagcggccgcgggccgccccagaggtggctgctcccacggctgtacaagagagctcgttcggctcgagtgaggaagggagctatcaggcagaggagggg

SEQ ID NO: 6575 - DNA, 782 bp, Zea mays
tgttgcatttacttctgctgtcaaacttgtagccttgatattcgtacgtctcacgacgttaagccgatacacaagtaaatgtcacttagtattctcttagactatgtccagcggttcatccatatgatcatttaaaatactattttatactgtagactttattgttcacagagttaagtttaaatataggtacatagatggataaactgctagagcatatggatgaatcgctggacgcggtcttaagagaatataggtacagtgatggataagcgacaaccacaagctgctagagacagtctaaactctaaagcgtgctttaacttattgtatccccctagtagccctcgttttaatcaataatctccagcttaagtaccagaaattgaaatttgtgtaatggcatgaacggtgtatcagttcgaatcgtcaaggtatctaaagtcatagatagacatcgctccaacgttatcgcagatcaatagatgacgataatcgaccagaatggtctgctcaatataaaccaatgagaaaagcagctgatgtagcaatgataatattttggtttggacaatgtaaacggatggtaaaacagcatggtgaactccccaccaaacacccatctgtctgcaatcactgggaaacagatgtttttatttctaaatcaagcaggcaactactcagatacccttcttcagcatcgcccggacccgtgtcggtagggccgtacagcctgatgaacccctcggcgtcagcttggttgtagatctcccgttctaaat

SEQ ID NO: 6576 - DNA, 856 bp, Zea mays
accggcatgatggtgccgccgccgcaccaccgggagcgccagaggcaccaccaccaccaccaccaccacctgccgcagctgcggatgcacgccgccgccgcggaggcggcggcggcggagcaccggcaggaggtgaagcagtcgccgcagcggccggcgtggagcgggcgcgtcaagaacccggatctaaaccgggcgcccagccccgagagctccgacgccgagtgacatgagaagcgagcgagcagcagcagcagccaccgcaaaggctcaacgtcaaagacgacgtccgttgttgcgacggcgcccagcgcagcatgccgctgtcgtcttcgttcgtatccacgtaacgtacgtacgacggcccagctgacccgcctgcctacccgtccgttctctgcgactggatggtcggtcggcgggcgtcgcggcgagggctttcggtacgtcgtggataagcacgaggggagggcgggcaggcgggaacggaggcggaggcggcggccccaagtggcggtctttccaaatgtcaaaaaggacagctgtaacagtgataagaaaaacaagtcatcatcctcgtctctccaccccccctatctctctctctctctatcctctcgcgcagtagcttgttctcgttccgagtagataagcagcaacgattagtactccactactatgatttttcaaatccaatccggctaccccacacttggctttactgccgcctgtattccatgattccatcataaaactacccccgccgcccgttcgttcatacgtctcatcggcatcgccccccgtctttgttaccaacgcattagctgtcgctagtgcgcaaaccccgttagaggtg

SEQ ID NO: 6577 - DNA, 1002 bp, Zea mays
tatgtgtagattttgaatacccagtgtgatgagcatgcatggcgccttcatagttcatatgctgtttatttcctttgagactgttcttttttgttgatagtcaccctgttgtttggtgattcttatgcagatgcagatcttcgtcaagactctcactggaaagactatcaccctcgaggtggagtcctctgacaccattgacaacgtcaaggccaagatccaggacaaggaaggcattcccccggaccagcagcggctcatctttgctggcaagcagctcgaggacgggcgcacacttgccgactacaacatccagaaggagagcaccctccaccttgttctccgtctcaggggaggcatgcagatctttgtgaaaaccctgaccggcaagactatcaccctcgaggtggagtcttctgacaccattgacaacgtcaaggccaagatccaggacaaggagggcatccctccggaccagcagcggctcatctttgctggcaagcagcttgaggacgggcgcacgcttgccgactacaacatccagaaggagagcaccctccacttggtgctccgcctcaggggaggcatgcagatctttgtgaagaccttgactggcaagaccataaccctggaggttgagagctccgacaccatcgacaacgtgaaggcgaagatccaggacaaagagggcatccccccagaccagcagcgtctgatcttcgccggcaagcagctggaggatggccgcaccctagcagactacaacatccagaaggagagcactctccacctggtgctccgcctccgcggtggtcagtaagccatggttcatttaagctgctgctgtacctgggtatctgcgtcgtctggtgccctctggtgtacctctatatggatgtcgtcgtctaataaacatctgtggtttgtgtgtcatgaatcgtggttgtggcttcgttggtttaatggacctgttgtgtcctctgtgttgtacccaaaactctt

SEQ ID NO: 6578 - DNA, 836 bp, Zea mays
tgcagaacaaggacaggaaaaaaaacagtcatcagattcttttacctcaacaacaagctgtaccgcccttttcgtgctgatgacatcccaaagcccgtcactgcgtaaatacaggaaagaaaaaacctgaatagtcaggagatggttgcattataacagtagcaataccttgctagcatcagcgaaacgccgagttacctagcaataacggcaaaagctgtgcacgctttggtgatacgaacagcttggctcagatatggttctgagctgaagcgtgagtcttgctccttaagaaacttgtctccaaacatcctcgcaagattcagtcctgttgaaacaacaacaaaacattgattacgcctccaacgtaaatggaagcaaaaacgatggagaccgaatcataccattaagacggacttccccatctttcaggggctgcccagttcttgctatcctagctctttcagttgcgctagctacccggtgatcttcagtcatatcgatcgtctttccattgacactgaaaaagtttaggttatcatcgggctcagaaacatgtaaccaacaatgttttctttttatggatgttagcaacaatgtttgcgattctacaccatacaggatgttagctggaaaaactaacatatatcagctgtcttccttatatttaataaaaaaaactctgcatgtcttcgaggggggaaaaaggcaaacctcttacctcattacgcaaggcagaatcaccaagattagcacactgggcaaaacaatctttatttttgatcaaaaccaaataaaaagtgcctgtgccctgtacatccctgagaaaggtcaat

SEQ ID NO: 6579 - DNA, 807 bp, Zea mays
caacgaccgcgacgagctggagatcaccttcgagagcggtaagccaagccgcaagcagtctgctagctatgacctgtctgcctgctggttgctgccactagctagcagccgctttcggctctctttgcttttcttgtgctgcttcacgtggtgacgcgtgactgatgccgttgggtggccgtggccggcgccggcgatattttccgtggccgggaccgggagcaggggacaaggcggtgcagactgcgcaggggacctgcatgctgtacgtgcacgccgggaccaaccctttcgacaccatcactcaggcggtcaagtgcgttattgtaacttgttagttgttaccgtgtccctccctcctcgtgctactaccgttgactcaactcaaaaatggacgcagggtggtggagagacacatgcagacgttccatcacagggagaagaaaaaggtactgtaccggtctcattgccttcgattcttcggacggacagcttgttgtgttgggttgggtcactcgtgtagaatagatgttagagagagagagagaggtagagcagtggctggccggcgatgaagagccggcccagcccgggcggtgtcgctttgcgtgaaactgacggtggtggtggtggtggcgcagctgccgtcgttcgtggactggttcggctggtgcacgtgggaacgcccttctacaccgacgtcacccgcgagagcgtcaagcaaggcctcaagaagtgggtggattggattggatccaaatcctgtgatttgttttcgacgcccaacaaaaaagagaagagaatctc

SEQ ID NO: 6580 - DNA, 818 bp, Zea mays
gtagtcagcctcggcatgaagaaaagctttggatgcaaagtcgatgaagaagaagaggttcaagacttgcgcgacaagaaagaaagggaaaagacaataatatagaaagaaagggaaaagacaataatatccctatattatttgtaaatcatgtttgtaaatcttatgggcaagattttaattttctacgaacatccttttctataaattgatgaacaatgcactgcataaagacaccttggagggccttaactttgttttacttggctttgaagtgctttcatgctatcttgtgtcaggaagccgaatgtatgtttgtaaacttgttcaatacgaagaaagatgggatcaatgctaaggcatatgagatgagttatacaatctatcgctcattcttgcttttgcttgataccttttcaccttctatagatgatatcaccatatattgcttgactatggaattaaattcacataattaagtgacaccgatatgcgataatgagagtgccatcaacccggttcaacactgaaagacaaagcacattgatatatattacatcatttgataagaggtcatcaaggcaaaggggatattcgagtgtagtcaataaagatcaacctgtccataatttcaccaagtcacttgatgaagcagggttttgcaggcttcaaaatgaactaaacattcttgatttcttcaacatttatgaatgacatgcatctccttcgactactcaagatatcaccgattgctcatatgtattcattcatcccttactagcattgtgcttcatctaacttcacctgttatgtctaac

SEQ ID NO: 6581 - DNA, 764 bp, Zea mays
acgagcgcgtcgaagccggccgggtcgacgccgcaggcgctgagcgcgtccgcggcctcggctatggtcatcccggtcgacaggacgcacccgagccggccgccggccgctgccgccgccgacagcgccaggtcgacagccttcttcatccgctcggcgtccggtgtgccgtcgccgttgtagcagtcgacggcgaggacgaggagaccctgccgccggcccggcgcgtgcccgatcgccctcgcggccgagctcggcggccggtcggcggagcggcgccggcggagcgcgtccatgatggccgcggcggagtccccggccttgaggtcgtgcgaggcgtcgatggagatggagaggccgcggagcgactccgagagggagtcgtcggtgccatgctcggcgagcgcggcgcgcgggctggccgggacgcggagcagctggtgcggcgccgggtggtcgcagttggcggccacgtgggagaggtagaggcggcagtggtgcggccaggagaagcggtggatgttgcggaggccgttgcgccggcactcggcccaccgcgccttgtcggctagcaggctgagcagcgcctccgttatcgccgcctcgtcgtgcgggtccaccagcagcccgttgtgcagcgccttgatgatgtccaccggaccggccgttcttggtgggccacccacgggcagaccatacgcagcgggcctgcacggatcgcacacacgacacaaacaagatgtgaatggatttttattttattg

SEQ ID NO: 6582 - DNA, 823 bp, Zea mays
attgctgttgaatgtgtctggtttgtatctctaatttctgatttcatgaattggtttacatgtcttacgaacctaacaccctttcactggtttgccattatgttgtcattgatatagcacatgtgtctttcatataatctttgctgaacattgctcttgaccaacatggttaacaggtctgacggggaaatggtattcgtggacgataagcagttgaaagctaaggagcccctggtggtatgacctcattgttttctcatttcacataatgaagtaaaaatggaatgacgccacaacaattattattctggtttgcagcttattgattactatgagcaacaccttcgctacaaccccacctcgtgataaggatgcattgacgctgctgggtttcagttgcatgtgctgcacctatgtttggaacaaatggaaatgtatttaaatgtagcattttttgtgctagatgcatttgtagtattatttgagtaagtagataattagtaagtagccaatgctgagtgcaagtgaaacatgatagcatggtttgtcaaactaactgctcgatattgttactgttttcaaattgtcttattaatcgtgataatcatgattaatcgttcaagtcgatttggaccaatagtgattaatcgtcaaagtcatccgattaatggtgattaatcatgattaatcgtacaaatcggttagctagaatgactaagcagttgtacgacttcaaaacattattgcgtgtattatatgctaagttagttgcttcattgtacatgtggtgctgggaattggagatttttatctgcaaaattgt

SEQ ID NO: 6583 - DNA, 2146 bp, Zea mays
taaacatggcattgcccaacttttacttttagctaaattgctatggtcaaatcacggtacacgtataatcaaatggttttagcttacagtccctccttttaactgaatatcaggaagaatataattccatcagcaaaatcatgttctttgttagctggagccaagaggcaagcagaacactggataccttgtgtgctgatcaagaacaatattgggcgcaattcaaaggttgggctttacaggtgaaatggttatggctgcaaaaaactgatccatccagaccatggcagggaatgaatcttcctattcagcagcaagtaagacagtttttcaatctttcggtctttcatgtggtcggagatgggaccagcactctcttttggtttgataaatggttgaatgggaaggctatctttgatattgcaccagaggttgtctgtttggtggacagtagagtcagctcgacccggacggttgctcaggctatggacaactggcgttgggttagggatattgggagtcatctttctatgcttgggctgcagcagtattgaaaattatgggatgtgattggacaggtgactctttcacaggtcgcgggcaggcttgtttggagacacacggcttctgggcagttctcctcaaagtcttgttacaatgccttcttcttggggtccatttcctttgagccatggaaacgattgtggaagacttgggcccctctaaatgcaagtttttcctttggttggctataaggaataaatgttggactgcggacagactccaaaggagagggttacaatacccggtgtgttgtcccctttgtgatcaggagcaggaaacagtccaacataccctctgcacctgcagtttttctagggatttttggcatctcattttgtcgtccattggccttggtaacctcactcctattgttgctgaacaatcatttgctgtgtggtgggggaaggtttctaaaaaaatgcataggtgcaagaggaagggcttcaataatgtcattattcttggagcttggtgcttatggctcactcgtaatagaactgttttttatggagtgagcccttccattagttcgactaagaggttgtttctagatgtattgatcagttggaataaggtgggagcgaagcatttagacagtttggggattattgtcactttaaatagggtctagtagggcccgtcaggcttaccccttttttggtttcaccttgtgggggtgctagagtggatgcttgagggtttggtcttggtctgtttttctcgttttttcttttctgccctctgggtgttgtatttcggtccactttggacctttcctctcttaatataatgatgtgcagctctcctgcgcgttcgagaaaaaaagtttctgcagcttggtcacatagaagacatttttcagggtggttttgacctcttagctaatcgatcagtcgtccagcatctattatgggcaacacgccaaatgaaaaaacgacacttcggtggagcccatgatttccacacccttagcaggacaagtcttaatgtcagacaaaaatacactgtactgagtaagaaaaaataattgtttcggggtgatctcttttaggacagttaacagttaagttaattagcaataagccatccaacatactgtctatttcaaatgcaagtatcataaaattcaactggaaacttatcatgccatcaaccaacaggggcattcttttgcataagaattgcaagaaccatattacaaaattcagatttaaagcatccatgactagtgtgaacagcataggagaaagggggtccccttgcctcaaaccccttaccccttttatgtctaataaagctaccaggaacaccattcaaaagaatttgagtggagcaagtggaaagaagacaactgattaagtctctccaaactcttccaaaaacccaaaccttccaagatatccaaaaggaagggccagagacagtatcaaaagctttggtgatgtccaatttgagaagggtcctgggaaccttctggccgtgaagaaacctagcagtttgttggaccatcataaaattatcttgattcttgaataaaccttcctttaataaaggcactttggttcttggccacaagctgatc

SEQ ID NO: 6584 - DNA, 861 bp, Zea mays
cagcttgcatgcctgcagcagtacctcataggcagatttggctgaatacttgctattagctgacaacctccagatatgcttatcaggctgcccctgcaactgaaagaaggttcccaagctggaataattcctgtagcaactcccatgacactgccccatgaatatcctgcacccaggagtccaggaccagtcgaccaaggcttcagtcaccaatcgcctgttaaccaagcgccttgggatcatactaaagatcaatggggccaaatctttaatcctttgaccatgcagccacctgtctttccaaaaaagagttgaggatccatctccaatttctgaagacacagccatatcaaatagactttgcaactcagggcacactgaacttgaaggcaccccaaggtctactggtatcagtcttcttgagccacaaccaccttactctcaaggcccaactcagatttttaatgtctgaaatcctgagcctctccaaaggtaactcctcctaattttatcaatggctttgtaaacccaagagggcagatcaagggccatagcatggtaaataacagtggaagtgatcacagactgaacatggacagcccttccagctctggtcatgagatcagctttccacccaggagggaggcctgcaagtttgtcaatgagtggctgcaactgcatcttagttaatctcttaatagacaaaggcagtccgcagtcctaaatacttaataggaaaattatccatacgacagagcaaaagaccttgtatgatgtcaacctcaggctgtccacatcttatagggaaccacactgcttttttggatatttggccccagccccccgggcattacccaaaaa

SEQ ID NO: 6585 - DNA, 814 bp, Zea mays
cttgcttgcatgcctgcagtgcccaactcatcaattgcaaattaggaacaccaagaccccctaaacttagtggccttgtcacactttcccagggaacaatacaacttccaccattcaccttctttcgccctttccaaagaaaccctcttcggatcttgtcaattgatttaataacccatttgggaattttaatggcaataaggagataaattgggatggctgataagacaaaccgcaccaatgttgtcctcccggccaggttcaataaacgagccttccagttagggagtttgtctgcaattttatctatccacagcttaagatcatttcgcttcagcttcctgtctgagattggcagccccaagtaagagcaaggaaatgaggccaaactgcacctcagcacattgcagccctcttgaaccacatgctcctcacatctgataggaatagcataactcttattcatattggtaaccaatccggaggccgacccaaaacaattcagaattaatctaacacatttcagatcttcctcaatgggtttaacaaacaggaccacatcatcagcatagatagaaagcctattacggactcctgccctttccaaactatgcagcaatcctctacattcagcagccctaaaaagactgctaagcacatccatgatcagcacaaacagcataggggagagagggtctccctgacgaagacctctccgatgctttatatggattccagggagacccatttcaataacacttgcgtagaagatgaagccagcagatttgaaacaaattgcgcaaataggaccgaa

SEQ ID NO: 6586 - DNA, 849 bp, Zea mays
attttgttaatcttactgacttttgtcaatgcatgtttatgttgctataagcgctctctggattctgtgttaatccgggaacacatttgcatgccagctttcagattgcgaggatgcagttgcaaacgcgtcgtctattccctgttatagtccctctctttctctctagaggcttgagcatgttgttgcgcaccaccaccaccacgacctccgtgcaaaacctactacgtgctttttaaaaatatcgacggtcaattcattcaagacgttgaccatgctattgtcaagtaattcttgcattccaaatgctgaagcatgatatctctgaatccttattggtccttcacatttctgttttcttttctggtcttttttgggtgtgtgtggctttaggtcactattattacacgtgtagatatggtccgccttggtggagctgttttgagttgcttatttattgttgttttaacttcatttttttgtgtttttttcctttggctaataagtttaacaacaaagttgttgcttttattttttttaaagagaaagatatgattggacacgatagttttatcttactatataagaaacaaggtgtctgcacaaatatctcaaagcaagagtaaaaaggaaaatcacaataacaaccacactagcaagagaaagagagaggcttttccatgcacagcccaataacatcaagaagctattttttttaaaaaaaaataggaaaattcttcgttacaagtttagttaaccatccttgggctcaaatgacaatttcacatttgtatgcataggcttagtgacatcaaactcaattttgggaagttttcaaggaacacgatg

SEQ ID NO: 6587 - DNA, 807 bp, Zea mays
agagagacaatagcgactaggatctgttatttttttttctcattctagcatgtcagtcctttcctatatatatatacctctactgatgagcttccatgctaaaggcacaatagagttcttatagctagcccatgattgtctcttaggtataaataatcaacaatctctataacttgctttatagttaaataatatctatatatgcaactgttctaacattttaaagtgtatatatggtccgtcaaactcatgtgtgaacagttatgatcgaaaaggcacttctgagccattagtcaataatggtacctaagagcacatattaaatcttatatacacgtaaagatcatatgagtcaaaccttggtatacacatatctttatccttttggcacacaatacttgtcgaattcaaggcaaaatttgtgttactgtacctttgtaatatctcgacacttcacttgatctttgtagtagatattaggcctgggcaaaaagaaccggaaccgaggaaccgaaccgaaataaccgagaaccggaaccgaactaaccgaaccgaaggaaccgttatgaatttcggttttggttttttgagaaccgaaataaatgagattttttcggttctgcactccaaagaaccgaaagaaccgaaaaactcaaaagtattagattcaatttgttacatgtgtttgtaacttcggatgttgtgttatcgacttatgttgaacctctaatcatccatgtattatctatgaaattatagtcattgtgcacttgtcgttggttggggggagatattgctggaaattct

SEQ ID NO: 6588 - DNA, 847 bp, Zea mays
ggagtcgaccgcttcaaacggcagttcgctcatcttgaggagcattacagcaaaggagaaagaggttccccactgcaaagaaagcatgcttccttaccaaggtacatgattcaggagcgcagaacccgttgccttgatctctctctcggtcgtgctaaatcctgcgtgtctctgtgtatggcagggaaagagtggttgtatccaaggatggcaatactgaacaacaaattaatgaccaggagagaagcgcagattctgttgcccgcactaccgtgagccctccaaggtcagaggatgctgacatggatgatgtgaaacccacaagcttaagctctcggagctacctgaagagtgcaagcataagcgcttccaagtgcgtcgttgtcagaaataaacacccagagccagaggtaatgctgaactgcctgaattcaactcgtggcaagtaggcagggtggcacaacttgtgcactaccaatgtcgtcgttgtcgttgtcttcttgtttttttttttggatggcatgcacactgtcaacatcaagaaaaaggatgtgccaaaggacatctaagattgatctgttgcatgcaagttgtaccttttcctttgttcaccttatttagagattaggtagtgcatctgtcactcatgtttggtttctctgctaggatgatggaatacctgaggagatggaaggcaccgtcgatggattgtctgaaaaggtctccaggatgcactcctaaggcaggactgtccatggcgacagcaatctcgacacaagatttctgtctggtgcactgtaatgccgacgacacactgtttggatcttgtgtacacccacagctagtt

SEQ ID NO: 6589 - DNA, 773 bp, Zea mays
cccggttatgctgtagagtcgacctgcagtttctttattgcctcgcatcatccttttccacggaacaagtgattattcaatacctccagctgaaaggtgtgtcacaaagtttacatttatttaacattgtgtattgtagatccattttgtttctgttttacacggttaaggtactgttaggatattaaataaaataaaataaaaggggacatctgtgtgtgcaagcagtagaggtagaggacatttaactagttaactcttgcttcttatgtttatcccacttttaaagctgtccttttcaaatccattgtttggaatcacttcaatatgtaaaccttttgtcataaggtacgctgtattaatttgatttttaattcaaaaaatgcagccaagcatttgctgatgctttacaacagcaaggcgcaagggcagatctatttctgtacgaagggaagacgcatactgatttgttccttcaggtagccatcgtgcagaagtgctattcgggttttctttattttcaaaatcgatagtaatggtaattttgaactcagcacagtcttgctttgtggaggacccttcctttttcttggccccaagtgattgtaagttgctttcgtcactgtttttgcagcaactaattaatgttgtgcgcaggatcctcttcggggcggcagagataaaatgctggaagagatcgctcgtgtgatacacagtgaggatccagacgctgctgcccagcacctcgtcgttgtgcctgttgcaaggcgcct

SEQ ID NO: 6590 - DNA, 844 bp, Zea mays
cagccagtattgtgcactccgtttgctacaagtaattttcttacctccaccatgtggtggttttagcctgggcattagttgcctcagatgttccatctctcagtctcacctccatgtgactgttgctttccaggctacacttgatgagtctttgtatgagcttgctggggagttggtatgcttcttatgctatatgttgttcgttttcctatattagtatacttcaaatgaataagggagtaccttcatacttaggttcgcttcttgctaagatctggaagagattttgagaatgccactccagactccgagaagctctctccaagatttctaggctattttctgttccgttcgccatataagaggcaatcttctgatttgagaaggtacaccctgttctttacacttaaaactgcttctgttggaaaatctctcatcttatttcttttgttcgacagtaactcaatgaaagaacttagtccacatattgcttctgttatgaacattctagagcgtcatgctagctatttgatgtctggcaaggagctttctaaactcgttgcttttgtcaaggggactcaatttgatcttgtggtgagactcctgtcattcatcaccttgacaaatcttattgtccaaagtcgtttgtaattgatctgtgttgtaacatcatgcaggaatatctacaacgagaaaggcaagggtctgctcgtctagagaattttgcttctgcactcgaactgattggacaaaaggttctggtcaatatatcacaaagttttatggtttattctgcttatcggggtaaattaattacatccggtggtttctcatgcccctttgt

SEQ ID NO: 6591 - DNA, 754 bp, Zea mays
aactgcaaaggcaaaagacccctctgtgtcttgagtgcataaacaaaaacccccttgccccctgtagctgccccctccttcattccgtttaggggcagggaggtaattaggcagatgcttataatcgattgattaatccacgcggacacgctcctccaaacactttcttttccccgcgccaacaacagcagcactatcaacttcccactgacgacagtacaacacacacacacactgcgtgtgagtgtgtgacacaccatcatatacagaatgtaatttattagtaagtagtgtgtgtcgtgtgtggcgaaaagagaaatggcggctgcggcggtggggggccatgccatgccatgcataaggagcttagcttgcttaccggcaaacggtggagagagaggaaccggtccatgtagttgacggcgaggtaggctgtcaatggaagaaacccatagtattcttgcacctgatggcgacgaagaaggagacagagcgagaagaacagtatataagatgagattgcttgctgagttcatatatctatctatatgcatgcatattgtacaaattaaactgataagactagcagagcacgaaaagcatggtgagagagcgagcgagaaagctagccagcaagcaagcatggtggtgcggcgtctaatctaatccaaacgatgtgaaaagcttgcgagtgtgtgtatatataatatatatggactggcgatccggcgtccgtcaccttgagaatccatgc

SEQ ID NO: 6592 - DNA, 778 bp, Zea mays
agcaccaggcatgccatccggaccctactactactaccagtcgcttacacacctctgccccaaccgtgtgtgtctcattcttggcagtttggggagggaggaagcccaatcttgtccctaaaaaacgctgttccatgtaagtgaccagacgacgactatactagatcactagaccctcaaatcctcgatgaaaagaaaaaataaaagtcgcgagcagtcacgctcgccgaactcaacgtccgggaagaaaattaatggcgacagagggacagagggtcggtcccctttcgttcggaagtcggaactgtcattggtcgccgtcgtcgtcgcgtcactggcatgtgggggcctcggtcggcaaaccatcgagagccgagagccgggagagagagagagaggatggcaggtgcacatgcatgtgtgtgatgtactcatgtgtagtataaaggatgtgatgggatgagacggttccttttaccaatcattccctacttatattacccgtccatcatgcagccatccgatttttctttcttgttttaccgtatactacagcacaaggataaattcctacagaccgacctcatatgcattgcatggtgagcccttccacatatacacacatgcatgtagtggcagtagctaggcgagctagttttttttttatatagatatccagccgtagtgctctcacatagatcgctcgcactcacactcgcactcgcactgacctgacgctacgctgcctacaatctatctacctctaccctccctatta

SEQ ID NO: 6593 - DNA, 830 bp, Zea mays
cttgcatgcctgcaggctgtacttatcattcatattcctgtgcggctaaggaatttcgatataaaggattcatcctactttggtaatggcaaccaatacgtatttgacagatgatgtttgctaatcatggtctgctagttatagcagtcgtggcataaaactcatgtgtccatttattggtttgaatcaggtaagaaatcagataggggagtcagtcttattgcttctctgtgtgaaaaatatcatacctcagaagatgagttgagcaaagcactggagaagacaaatactctcatactggatattttgaaaaagaagccatggacagctacttcagcatgccaacaggataatttgactttcattgatccaggtaaaacctgctacacaagaataattttaatgttttgtattcataactaaagatttagccttgaatagtagtgcatggaaaatagttatccatgtggctgaaccttgacttgtggtttttgtttggtttcaaccatagcctaccccaacttgcttggggctaaaaggctttgtgttgttgtattcactgtttttgtttcacaagattgtctattgcacagtctcactaagatttcttcttcgatccagaagggttgacagtttttaaggatttgcttcagggaggctcattgaaatcaagtcttctaatcctggaaaaagaatatgaaaatgcaattaacacaagaagcgacctacatgagcgcatgtttgctaatgatgaggacagtttacttgggcagtgggaagcccttttcaagtggaagccattaattttaccaagccccaaaagtaattac

SEQ ID NO: 6594 - DNA, 741 bp, Zea mays
aatggcagattcgacagtttctgttcatgctagttttccgtggtcttagtggcctcaaaaaaataaaaagcctatatataagtcgtagataatttgtagatctttccgtggccgcgaagaacacctcaatcggacatcagaacagaaagttatggcagtttgattatagcagtttttcagtctcataattctgtgcagaatctgttctcttaagctttaggcaattttatcaacagaattaaactgtgagttggtaaaagaagttgtagataatttcataagctttccagattgttaaagagtgcattcatatgaattattaaactccagttatgtttgttttactgtggctgttcctgttagcctgacaaaaatgagcgggtctgttcactggtgggtttcatatagtaaatagccgaattggctctcccagctatggagacttttgtagagggataaaagttcttactgacagcagaatttcataatttttggttgagtagtttgggagatatcgaattttgaaagttaactatgctgctgtctaaaacagattcagtcagttatcttgtcagatgttttagaacttgtagatggcagaatttaattatctattgaatactgaagttgtagagtattttgtgtagatactcctagagtatttgtttgatatcaccactgttttaattttaaagatacaaaattaacaaacagcgttgctgctgtatgacatgtggttca

SEQ ID NO: 6595 - DNA, 773 bp, Zea mays
ttcttctctccagagtatatatatctagacaaacttagatgatgccaccacactgcacacctcatctggttcatagctttattttagcagtgttatgtgctttcttcagttgctgcggcatcttctagagagagtggatttttcatacatccatttgcacctacaggttcctcctgttttggaatactctgatttcttaattcattgtttaatcttcactcctcagaactgcacatttacactacctactactactaacccactaaagttgtcaattcctcagggctactttatgtgtaaacaggcatatagttgcagtcactgcaattgatacttccatttttgaaacttcgatggaaattttggagatgtttatattcacacaaagttatgttatatttatcatcaatgctaagtggttacaaattttactgtcagctagtaccgactgaaaaagtaacaggcagaggttcatgtaatcatgttggggactgttgatgcccaaaatgacacgcgaaaggtaaggtgggttcctttgaaaggaatattgaaggctgaagcatattaactttgaacagcagtaccaaaaaaactcacaaattcttatgtaacataatggccaaattcgaacattgttatatgcttgcgggggtgaggggttacctacaagtaaccatctatcaatctatcttcactttttagtaaagataaaacctcttgcagagaaataacttcttttattctgccttttgctaagtgtctcaagtgattgc

SEQ ID NO: 6596 - DNA, 795 bp, Zea mays
atgatcttctccctgtggatgaagcatggctgaggaacataccgagatagagatggtgactggatgctatatttcaggaaccacttgtcactttcaagagcccaaatgtcagtcctgcctgaaagctctgcgttgtttcggcgccaccttggtgcatggctttggtatggcatagtcactacgcacactttgtcatctatctcagtcatatagtaagcaactttgatggtggcacaagaggctgtctctttcacctccaatgctggaagatgaatcaaggcaaacatttcttccctgagatcaaacgatacaactgccatgccacagcttgttcctttatcttctgttagccaatacatcactccatccacatttactactccaagatgcaccatgcagcatggtataggagctctgatagctctccatttgtcttcaccaagggtgtacacttgaatggtgtcgaaatggaaaggctgtcctgatttgtagcgctgaggctcacggagaaagtgcacgagcttgtattctccagtaatcgggtgaaatccaaagctgtatagatagtggaagtcgtacaacaatatgccgtcaggtttcaagagatgcaggcattgacctgttgcagggttagatatctttagtgtgtatgtcttgtagaagcaaagcaaaccgttgcatgatgcaaacaggtgatcatcagggtccatatgcgatgaggcccatgtcaatggagaccacttttcattaatgattgtgcaagacatggtttggcagtctttggatggagcgatg

SEQ ID NO: 6597 - DNA, 1262 bp, Zea mays
  unsure (1)..(1262): unsure at all n locations
tattatgtgactatgtgtatagttgatatttatgatatggggttacacttgtaataaatgtatttaggtctagcttagtaatgtattagtgtatttagcttgatgattctacctttccaaccgtcttgcaccacgtttatttattgtctcatattccagaggcattgctatcactagtagtgcaccttatagtttctaatcatgcttttgctttgctaacttaaccatatgaatacaattttctcaccattcctttgatgcaaagtgattctttaatgacaatgaaattaaggtgggatctttgttttctgtaaaatgaacagtacatgaaacaattatttgttgtataattttgatggtattgggggcaatttgtcattgcatacaacacaatcgtgcacatacctcttacatgcaaatgaaaggaactgtcttgaatatgtactgagaatagtcacagtgaacgttgacttatgatgtgcttctgtaactatatttcagagttcagttccgactttttagtttgaaatgtatgttatattgttatctggttgtttgcaggtcagggaagacccagttggctcataccctatgtgtctccactcaggttcaccccctgtatcaatttttttagaaagcacgtggaccatggaagtatagacgcaatagaatttgagaatacaaagaagcaacggaactactttcctatttctgattgatgagaatgcaacttccaatccacatgcatgtgggaaatgggaaggttgcctacattgacactaaaggaacattgtatctttgggagtaatttgtcaagctgattctctcaagagtttatattttgtctacaaattaatgaagttttcagtcgacctgaacgtgttgtgccaattgctgagagacttggggattgatgccaatgttgttctcgacaatgtatgcatctgcatgcatttaacatttcttggtcctattagcccattgcagaattgttagatacttgtgtgacacagtgccaacttagaactgagtatttcacctgttttaaatntgttatcacactttgccgtgtctttaactttttttattaatgaaaaatgatggattcccataggtcatgctaccagagactgtgcatttgtggtcgcacccacagatccaacccaggcagggtcccttgctaataactactacacttgtaccataagtgccttgtgcctggcattcatctgggggtcctttgctcttaaatgcttttggtc

SEQ ID NO: 6598 - DNA, 786 bp, Zea mays
ggtacccggtacctcgttccgtattatccaggggggtggctccatcccgcagatatggaggacgagggagcatccggcaagtcctagctcccggctcctctcgtttgcgtgactgggcatgggcccgtaggacatagaggatacgccgtacaggataccgctgcggataaaatttatttaggggaaaaactcttttggaggaatctctaaattagtatttaggggatgcaatatacaggctaccgttgctaccagtcttataacactcttctgtttgtagttttgttttcatcgctggtttgaaaccctttctattgtcatcaaccgtaaggtgccgctcattaacttcttttacccccgtgcttgatatcccgttggtgaaaatggatcatggtcttgtcttccattcccttcctccctcattcttcccgttgcagcgattgctcccggcggctaggcggcaatggaggtgccacctgacccggccgtcccatcctgctcgacaagatcgtcgctgacatccacagtgcggttccagattttccttcgctgactgcccctgcgccaacgaacgcagactgctccatcaccattgacttcgctgacagcagcttgtaaccactggcacttcctatcagcaacttggtgcaacgccatcttcctttcagcaacttggggatcctgtgcaatctacaacagaggttggttctactctattcacacctagaaattgaaaggggaagtgtgaaagaacctacttttgaaggaaaagatttaagtgatgtt

SEQ ID NO: 6599 - DNA, 770 bp, Zea mays
aaattgtttatagacaccttaaggaagtatgaccccagaattgtccaccgtgtgcaagagaaattagaaggaaaaacgctaattgattgcttggtttagaggagcatgtgtttagctctatctgcttggtaggtcatagattgttgctactactttaagatcatgtcagcccctttttatttctgcttcagctcctacagctgttacattgaaccacaatttgtttcttattgacaactcaaaatacatccaatgtaattttgttttcaaacggagctaaatggctaaatgcaatccttttcattttgagactaagttgagcatgtcttgtaacaatattgctaattttgatttacttcagtgggtttcaggggtgagcagaattggatcatttgttttatgctgttcttttcctacatgaactgaaatgcaggaatttcctgtaggtgggaggagtctggagggtttaaagttggcggagtacaaggtgtatttaaagaagaatggtcttagccaaactgggggcatggacacttgtgtagacagaatagtactccattggaggttagatatgatagttctttctcacttctgagtatgttcagccatttgatgcttctttagtcagaattcaattgaagagaacactagttgctgtgtcgtttgttggttctcaatatcttctttttatatttgcctagcattattatgcacagggttcacctaagtgatcttaatctcgcttcgtttgatgtgcctagatgtagcac

SEQ ID NO: 6600 - DNA, 752 bp, Zea mays
cattacttacacagagcacacatgctggtaaaaaaagaattgtaatatgcacatcaaatatatgggcagttctgatgccagacagttccattatcctattacacctgacaattgtatcatcacatggcttgaactcctgaagactgatatgagtatttcttatgatatactccatccattccaaattgtaaggcgttctggcttttgtagatagacagctcttcttatgcacctagatataggtcatgtctagatacatagtaaaaacttgttatgcacctagatataggtcatgtttagattcaaaattgtaagtcgttacattaggagtgtttcttatgcatctagaaaaggcagaacgacttacaacttaaaatggagggagtaaaagacgagcagaaagaacataaagcaacagatagaaaacagggtgacaattcaagtgcagagctcttgttacctgacgaaaagtcatcattctgtataggttgcgccctttgacaagcaacagatgcaaaggtggtaatttcccaggtcctttgctccaaaacacttgaatctattgaaacaagtaatgtagtctgtgaatgatcacaagactcacatggcagcatgacacagtaatacataactgctgaatcaaaccttaccgtgaaagtgtgttgctgtttttgtttaccataactttccttgatgactttgccggctactatacgattacctatacattttgcatgcctttttccactgta

SEQ ID NO: 6601 - DNA, 713 bp, Zea mays
agattaggttctgaagagcctccctaaaaaaagaagcggctggtggttcctgttattatgtacggggttttttttataaaaaaaattaaattatatatttgtaagcacgcaatcccctgattcgtattcctaaatcaagtcaagtggtacacgctgggtgggctagttggtttccatgtcgcatccctctcaacaaccgtcgtcctcggataaacggatagcgacgctgatgataagcctctgatctagccgcgaacgacgtcgtttagatgtccaatctccgtgccttttgaccaggttttgcccctcacgccccacctacagcgactcgtttcgacattggttccggagatgccactactcctttccctcccgtaccttcaggccttcttcaggcgggtagttccttctcatggtatggtatatgtatagctgatgggtttaggggatgcgtgccatgctgtccaacaatgggacgcactagctctcgtgcgtggtggcctagagatgccgacagccggattcgtttctcgattgggacccatgcatatgcatatatatggtccggggcgtcgggcaaacgcccgcccgttgatcgtaagcggcttcaattttttctatacaaatatctttcaagtagttaggttaaaatgtgaccttggctcttgcatgccggccaggtttttttctgctttttcttggatgcaaagtgc

SEQ ID NO: 6602 - DNA, 770 bp, Zea mays
atcttgcatgcctgcagcgtactacacgcgcacccgcaccgctcatcttccggactgactacgtgagtgaggactgaggactgaggaggaaaaggaagaacgagcctcgcgtgtggcgtagcgtccgggccgcggccgcttctccgtcatatctggggctaccagagtacaccagtactaccgcgcgtagtagtacctagccgtctagcgctactcatctgaatttaacgcacgcgcaggagcagccgcccaccagcatccacagctccagggctccaatcacacaagatcgatccatgaatggtgttcccatcccacacaatcaaaattaggttgtctccattaaaccatacatattatcacgcaaaacactatttcttaggtcccatttgtttcacttcattttaaagaattaaaatttaactaataaagtatactatgttttttagaatataacatttcaagagtttccaaagtttatatacaaatctatttcaaattcataaggtcagagacgaaaattgattctataaatttacataatactttcctaatatacaacttttagcatactcttttatttgcttatctatagcataagtgtggtgtataatcatttctctcatatgatttaaaataatatacaaatatattacatatataaatatattgacttaattagtttgtgtctaaattattattattattattagattagaatttaattccaatgaaataaatggggccttatactaattaattggctctaa

SEQ ID NO: 6603 - DNA, 1850 bp, Zea mays
agaacaaaacacctccttttccctctctaaccagtaaccagtcgtcccaaatccatcagcagttcaccactgagcagtagcacccgtctcctctcctctgcccagtgcccatgcttcccccgttccattgaaagtagcaatcaacactgtctcctctcatctctccactcgcactattcccaagctacagccctaatcctgtctctcctcatcttttctccctctgccctctttcgcaagatctctccttcgtattctcttttcgcttttaactccacggcagtccctcttctgtcacgagccaagccgagcgcagccagcaaaagagagcgacgccgcctgcaccaaagctcggattcccgtctattttacccccgcccccgccgactcaccgtcgcaagatccatccgcaggtgtcggcggcccgcggcccgtgcgaaagatggcgcctttctgaggctccccgggggtttctcgtcgtttcttgcttggcccctaaagcgggagagcggcttccagggagctcctcccgttcccggccaattcagctgaagtggcggcaagtgggtttagggctcgatccggttttgtgcccgggcgtgtctgactctgacccgggctagggagcggtggttcttggctagttcttgagctggttgcggcgcttatccctcttcttggagctcttggattggtttgggggaaagcaggttcttgcaagcagctgcttcggttctcgaggatgttaattttttgaattcagtcggggggaatggggctctcgcggtctctggattgagcatttctttattggaattcgacatttcgtgcggcctccagtccatggaggatttggggctgtggaagcaggcgtggatgtgggtgttgtcccagaagcacatcctagcgtgggcgcacacggctgcgtgcggcagcagggagcgcctcgccttcctggtcgatcggcactggcccgccgtgtcccgggcctgcgccacctcctcgcgactcgcgctcgccgcgctgcggcaatggcgcgggtgcacggcgcgcggggtgctggcggtggctatcctcggccctgccgccgtcttcgtcatcctctggagcttcttcgtgtgcatgacctcgccggcgtgcgccctctacgcgcttcttagcctggttcgtgctcagcaaatcctacttgccttgttgcttctggactttagctcagatttgatttaccggataaggattttgggtgacggattctaaatcttggcatgtgctgcttatccaactttgcgttgcatgtgaggttacatttctttacgaaagtggttaaagtgttgcctgatggatggtgaaaaaaataggataggatggctcaaactgtgccaccactggttgtcttcatgtgttgctgccaaatgtttgtgtgaagcttttagtagtaagcttcttctgtgatatctcaaagtaatatctatgaaccgttcactgcgttttcaacttcttttatactactagctagtcctatctagtttgttttgctaccaaaaacatgattcttgcaacttagtagtagtaacatatgtgaactgctcactgcgttttaagcttctgtttggtttggtactttggtttgctaccaaagttattaggatggtgatgaaacacaacagttggatgaatatgacctgacctagtcctgttataatatgaacaacgcagtcctactttggtataatatgactgtgttgttcatattatacaagatttgattacggatattttcattctgactgcgttgttcattgtcatcaaatgtacttgtatagtatgtagcttttacttgcaaaaagtat

SEQ ID NO: 6604 - DNA, 804 bp, Zea mays
agaacaaaacacctccttttccctctctaaccagtaaccactcgtcccaaatccatcagcagttcagcactgagcagtagcacccgtctcctctcctctgcccagtgcccatgcttcccccgttccattgaaagtagcaatcaacactgtctcctctcatctctccactcgcactattcccaagctacagccctaatcctgtctctcctcatcttttctccctctgccctctttcgcaagatctctccttcgtattctcttttcgcttttaactccacggcagtccctcttctgtcacgagccaagccgagcgcagcaccagcaaaagagagcgacgccgcctgcaccaaagctcggattcccgtctattttacccccgcccccgccgactcaccgtcgcaagatccatccgcaggtgtcggcggcccgcggcccgtgcgaaagatggcgcctttcctaggctccccagtgttctgtcatcgtttcttggcccctatctaaagcggcggtttccagggagctgccgtccccgcccaattcagctgaggtggcggcaagtgggtttagggctcgattcagtgtgttgggtcgtgtctgactctgacccggtggggagcggtggttcttggctagttcttgagctggttgcggcgcttatccctcttcctggagttgttggattggcttgggggaagcagattcttgccacccgagggtccagcctagcgagctgctgctttcgttatcgtaaaggaggttctttgacttccgtggggggagagaggcgctctgcgtttctggatg

SEQ ID NO: 6605 - DNA, 853 bp, Zea mays
agcttgcatgcctgcaggcgcccataccgtccacgttgcccgggcctggcctctctctagaaattgttaacaatttcctgttcacatttttttctaaaaaaataaataagagaacaataatacaccacggtttatctggcccggcaatagcatactccacagtagtagtacacatgcatgggggcaataaacagcaacgtccttatcaaacagatgcacagattaaatgcaagaccatggattacagaaaaggcctatttccgcaaatcgggttcgaagtggacgcgcgtgtttccaaaaaaaaacgagtgttttcgcatggaatatagttgaatatcaacttcgggttgttcgcagcttttattgaacgtgaacgttcatgcaaaaaaaatcatttatttatttatttacttgtcggtggaaacggttttattggttaccgttgcatatggacctatggtgcctttatttatagattaggggtgttttgtttctagagactaaattgtagtttctatatttattttattttaatctctaaattattaaatatagaaattaaaatagagttttagttttcatatttaacaatacagagactaaaataaattaaaatgaaaagactaaaatttagtcgattagaaccaaacacccgttaattacacttggtgacaagactcctagaggtggaaatgagccgagccgcggctcgcccatctggcgagctcgaaaaagcggctcgactcgctcttggctcgctgagccaacgagcctatcataaacgtaaatatgctctctaaatcataatataaaatcttaaaatatttttaataacatattttaaattagtaaa

SEQ ID NO: 6606 - DNA, 751 bp, Zea mays
aattcaccaaacttctatattagctcactcattattttgttctgatctttgtagattatgattgggattctcttttttctatttgagttctatgatgatcaattgcttgcgtttcttgttttgactcttgtatggttatgcgagctattcacgatgatcaggtaatggtttacatggaagtattactggattttttattatactctactcctgatgtgaaacacctacccttttagagaattcactgtttcatacaaattcctgatgggtctggtttgggtcgggtcgggttcatttgtgatccaggggcaccaaaatgaaaaaaaaactctcgtctttcaggcgtaaagagtattttaatggggccccaggcacccagctaacagctacaatttgacagcgccttccccccaaacagtgacttttgctgtgttctataggctagagttaataatacgaagtcgtgatgtcccacggcaaattttccctaagggaatatctaggccttttgctcaatgtaactgctgagagagcaactaaaataaaagatatgtgggcagagaaagctaaaattaaaccacttagtcttgtcgaaatagtataaggcgggtagcatgaatgcatctatcagaaatgatcttgtgtaggacaaaattttcaagctaatcattcttaaatacttatccttaaatctttgcttttcagtgtgcggacatccatatcgatgcaggtttttccacgcttcttctgg

SEQ ID NO: 6607 - DNA, 812 bp, Zea mays
cttgcatgcctgcagttgcattccaacaatgatgtgcgcgggtacggcgtccggggagcagaagaggagccttgggacgacatcgtgctgtgagactacgtggcagaagttaccaccccagtgctcacgcaggatggccctggacagcgcctcgttgccaagtaatgggcttccaaaggtgacgcacaggacaggaggagcaggtggcgagcttgacgatgagatgcagaggtagtgtagcgccgtgagggccgcaacggcgccaccaagggagtggcccgtgaacacgactgccttgcccctgatctgattcagaagcatctgcaatatcaaccaattctgatgcgtaagtcacagtttcagtgtggcaaaacacaatgtgaacttttagttttagcagtataatttcagtgaggcaggttgaaaagtaaagattggagagaatggaatcattagctgcataaagagacacacactactcattataggacaaagagattcatggaaaatgatcatctcaatagttttatgaacaataattaggtcactcaattaaaaaaaaagcaaaagtgataaaggtatagaagaagataaaggcaagatgtggtcctctggaacgtaaatgaaaagatctacgaaacctgaagaagtgaattgaattccgtcaagaaaagaatggaatttgcgatggagcacaaggctgtcgtcatttaggttattattctacagcagtggaatgtagttcaaaagtatgaattataagtaaagtaatccaggtttttttgtgtggtcatctgaaattgtagaagagc

SEQ ID NO: 6608 - DNA, 794 bp, Zea mays
cttgcatgcctgcaggatgaacaccatgcgctgcacggggtcgccctctcggatcaccttctccccgctggagaacaccagtggccgcagccggtcgcagatgttatccaggatcagatcgtccatgccatggaacagcggaacctggcaagtagcaagggaaaattttgtaacaatttcatcgccgcatcgagcattcatatgtaaaaaaacaagacagcaaaaatcccaagaacttcagttactttaatgactgtacctgcttaaccagctcgaggcagaggtagcgcttgatgtcccgcctcagtccttcaggcagatccttgatcatctccatctcctcgtctcccgtgacggcggcccagcgttcgcgctcatatttgcgcaccctctgcctcagccgagacggcagctgcctccgtctcatccaccattccatgtctcggaaccgcagctgcatcttccgcttccttgccaggaccgcgtgcagaaatacctgcggattcagtaagttgtggtttttagttggtgaaggggtgtgatacaatcacacagaagaacaaaaaaaattggcattgttttacctgtatgtttccgatcagcaatgtgaagagcatcaggccactgaggacattgattatgctgaatatcacctcaataccattgcttgttggggcaagatcgttaccaaaagtactgccaagcaattcaaggaattgtacaagtttatgaatatgcagcataaaaaaatacatgtgtatgcagcatggaacaagactaattttttttttgag

SEQ ID NO: 6609 - DNA, 821 bp, Zea mays
aggtcaccgtctgcggctggcgtgtatggtcgaagaactgaacacaccaacaaaagaagacacgtttttttttctcctatcctatatatctaccactggcaagagcgcacactatacatgacactcgcagctcacgaagaaacgtcccagtacgctgcaaaccctatacatatatgtcgtttacgggtgactttttaacaaaacgtgaaggatccatccatatccaactgcttttcttttcttttgctcgctcttttgtttatgaatatatataaactgtgcagcgctttgtgtaggagtaggagtgtacgccagctttggtctcgtcgcggcctctagctagctagctagctcaggcgacgacgacgtcgccgcctaccgtgccgccgccgtcgcgctcgggaaccctgtacgagtagcccagctggtcgtccgattgtcgcctcacgatgctcgcccgctgcatcaggcgcaccagctgctgcacgacttcggacatcggcggccggaactccggctccgactgcaaaaaagaaggccatcttagtccacctctgaaagaacaaggctctttgcaaaaaagaagagagttcggaggagtttatgctgcatatgcagcaccaacagtacctggacgcagatggcgattatgtcggcgaaacgggagagggacttggcagggtacagcccatccagtgcagggatcggaccatcttggcgagcagatcgatgtcgtggagctgcggggtcccccatctcacaagagactgtttccaacctcttccttggaacctggttaaataaaataaaggtaaaaacac

SEQ ID NO: 6610 - DNA, 740 bp, Zea mays
agtccgaaataagagctggaaaactgagcattttcgaacagagtcgcctgcaacctggggagcaaacgtagtacgtaacatctactgacataggagtagcaacacggatcagggtagcacagcacacggggctatacatgcacaatagtggcatccaaaattacacgacacaacccccctcccacttcgccccccggttcacccagtcatttcccgaccaacccaacagcaatcaacaccgacatcaggaatgactctttatctggtgaccaccaagaattatcggcgcaggacgacttaacacgacgactaaagaagcaaaaaaaaaaaactccacatgtagtctcctccttctcgcaggtgccagggcagggcagggcagggcacggccatctgtaagtccccctcctcacttgctgccgcacttgaagccatggcacaccgacaggatgatgatgaggatgagcgcgatgatgatgcccagcacgatcagcttgatcttcatgttttggagccacatcttccgccgcaccttggtgccctgctgcctgaaatcttgtgcctgcaaacagttttttttttaccccccaatttttacaagttacgtgtatgcagattggcttgctttccgttgatcctattttgcaattaaaaggagctgttttttatttattattggtatttctttccctatttctcaacattcggtacctgccaagtgctctcattgtggttttgtt

SEQ ID NO: 6611 - DNA, 814 bp, Zea mays
gaacagcttgaacagggagtttgggtgtgtcccctttgttcattttatataatatttgataaaccatttagaccccttggcttccttgactaacttctatttgttcttacctttaaagatcaaagcttaaagagcacatgcagtactgtgtggaccaccctgaggaggttagcaagcttgccaaggtgaaggcccaagtctccgaagtcaaaggagttatgatggaaaacattgagaaggtagtatatctaatcacctgaaaaaagtacacatatcatcattataatgaaaaagacagcgcacctcgaacattattcctgattccttattggtattttgatgatcaggttcttgaccgtggcgagaagattgaactgcttgtcgacaaaactgaaaatctgcgttctcaggtaacgggttcctgattcctttttagcaatttaattttgcatgtgtgtagatccaagaaagaaaagatgaatcgcttcatctatagaatatataactttatggtagcatctaggaaaaattgggcataaaaattagcattatgtctttcgcgctgagacgaaaacatgtatatggcttcttgacccttaagcagcccccctttggaacgcaggagtgatagaggagtcatacaagaatcagttcattttgataggaaaagcgcagcatagagggcctaagtgtgtaatgaatttgacttgatatgttgtaagaggtttgatatctgtgcccatcaatcaccttaagtgccaatgaccttgtcctttgtttgtttgaatgtcaatattacgtagtaaggaatgca

SEQ ID NO: 6612 - DNA, 786 bp, Zea mays
tacccttcaatgtatagctgaacaatggcacagggcatgttatagatttgaagcggtaacatcattcggataaaattcggagtgagtaaaagatggggagaacctcatcaagtccagggctatgatcaagtttgatctttctgtcaggacctccctccattatagcctgccctaagacagatggctccatcgccaacctcaacatgccctggtggaaaccagtaacctatatacaaaaagaggggaaaatgcttcataatgttttaatgcaaagaggaagtcatttcacctacacctagtctaactgcacgtgtatgtttaaaataaggaaaccaaaaaaaaaaggaaaagtggcatgaactcatcaattaaaacaggagtaataccatgccattcaaaccatttgtttccgctcctctaacaacactatctgaaatttctgtgacagcagcaaagagagcgttcgaacttgcagttttaacctacagaagacccagcattatattgacccgttggaagaaaatattgatggtatgtttcggaagctcacagttttcccgagatcaccaaggtaccgttttgttccagaaaaaccacccgacttcatgttcttgcttataaatttaaacatgcctgcataatccagaaataagtaaaacaaacagttcaaatctataacagagaaaagaagtccctatttttagatgcaacctgataaccgatcatccatagccataataccacagtagttcaaataacacaacatcaatgaacacactaataact

SEQ ID NO: 6613 - DNA, 845 bp, Zea mays
gaacccggccatcctctatattcgacctgcagcggtcgggaggaacgttacacgaccaaactctaccaggggcaggacactcactatataggagcaagagacttcaggagaagctcctgcttgacaccacaagtgcccctcgaaagccaccaagagaaggacagactgaatagctgggctaacttctttaaagacacatacattcctatgcttccacagctcccagacaactaggattattaaagagttaaagcctttccgcagctccttaactagatttctggaaacaatgctaagggcttcaactcctgggttgacaagattttgatgaattgggttgacaagattgcggataggctaccaaattggaaagctaggctcctcaaccttgctggaaggacatcccttgtgcgctttgtactttcacccatcccagtttatcttttccttgctatgaatgtccctaagtgggtgattatcaaaattgataaaatcagaaaatgatttgtgtggagagggagaaaagaggttaatggaggcagctgccttgtggcctgggattcagtcacaagacctttgaagtatggcgggcttgggattcctaatttacaacacatgtgttgggctctccaaaccaaatggttatggcttcaaaaaacagatcagagcagaccttggcatggcctgactatacccattcagcaacatgttaaagatctttttgcagcatctctgatttcccatgtggaaaatggctctaataccttattctggacagataagtggctaaatggatgctccatcaaaagatctgctccaaaagtggcgtccaaggtgtctaaacc

SEQ ID NO: 6614 - DNA, 787 bp, Zea mays
cttgcatgcctgcagcagcttatctatataatcaagatccttcatacttggctttgctagggttccagtggggaagcagttttcagaaacccactgctgcccaccacaatcgaagcccagtatttcatcactccagcccatgcgatacccttctgacttcttccaatactcagcttccgctttattgattttcaccacatgatctttatccagaggatcaagggcaagcagcttgtccctcagctcagtaaatgaaagtgtatctatttctgggtctttactttctgtttcagttctgaaaagcatctataaggtggcgtaagtgaaaaaaaaacaagcaaacacattgctgaatacagctagaaaatttcgcagaaaactaaacaattttcattttaacttcagttgagtagatcaaatagaaacattatttgaatattccagttgactgcataaaccaattttccgattttctgtgcatatcaatctaaagtacaggaactgaatgctcaaaggtaagcccaacctacacttcttgcatcacctttttttcagtcaaaagggcaagggaagccggaagcaccccttcatagttcaattatagaaatccaccaaaagtttaacacagaattaaaactcttcctctgagattaattaagctaagcaatctcctaacgaaagaacaaaacaagaagctgcaactgcacatattgccatcaacatgcccatatgaataattattgtatcactcatgtgataaatacaactctcccactggaatcacctc

SEQ ID NO: 6615 - DNA, 770 bp, Zea mays
agcacgacaggaatttcagacaggaggaaatccggcaggagatggcgtgttcggatcggaggcgcgtgcagtgctcacgtattgaagggtctctgtaccgctaccgacggcgtccacgacgggcacggcggtcagcgacgccgcccgcatcgccttgatgacgtcgatcaccttggtaacgcaagagacggcgaacacggtgtcattcacggcgccgagctcgcgcacggtgcgcaacagcacgcccctgagctccgcgccgtgcgccctgaggaacctcaccacgtccatctgggtgagcatccggtaccccggcgccgactccaccagctccagcgccaccacgttgtccgccgagctctccagcggcaccagcgcgcggtgcacacccttgctgaacgtctccatgcagtccagcacgctggcgcaacgcaacgaacatgtcgcacacgtgcagattgcgtacaatgcgaggaacgaagaagaaaaaatactagtgtgagctggagatcggccggcgtacctggtgctcgggtggagcgtccacagagtgaggccctcgagggagtgtccgatgacggaggacaccggcacggccatccggcggtcgaggtcggccgcctcgtcgtcgtcgctggcctcggcgatgtgggcaaggatgtcgagcatgttcaccatgccgatgtagtgcttgcggacggcgccggtggccgggtcggactccaagatcatggagccgccggcgccgatccagtggcccggtggttcac

SEQ ID NO: 6616 - DNA, 874 bp, Zea mays
agcttgcatgcctgcaggggttgggcggttgcaggttgggcgatttggatcgctttgtaggttgcgaatagttgtaagcagctgcaaatttctctcgattcttccacccactggtgaagttagttctcattgggttgtggttaggtctatgttgttcagattgcttggtttggactgcgattcttaacttaggtataacaatattatcgttgaagtgggtatgttttttttatgaagcataaatttaaatagcatgctttatggctacatgcagttccaaacttttgtgtcccgttggttctgaccacattgtctgcgggatttcagtaagctacatgagtttctattcttaaaaaaaagaacaagtttttaagtttttacctgaaaacgttcatttgctagtagctatctgagtttctattttcttttcacactttttaatttagcatgcttttaatggctagttgcagttttacattttcctctctttatggcttttgggtagtgttggttttcaactggagaaacgaattatcttatgtttttgaagtgtacattaattcactgtttaacaatatttctgtggaaatatccttctgtattgtttcaaataaagatttgactttcgttttcaatttggacttattaattaattatttagtattcaacattgtatttgggtgtgttcaactggaggaacgaattgttgtagctttagaatcaattctctgtttaacagtgttgctcttggtgcagctgaatgctgctaaagtggtggctgttggccctggtgagcgcgacaaggcaggccattcggatcccagttgctctgaaggaaggcgacactgttcttttggcccgaatttggggggat

SEQ ID NO: 6617 - DNA, 826 bp, Zea mays
cgagagcagcgaatgggtggacgtggagttcttccatcccgacccatccagcgacgactggatcggtgtcttctctcccgcggatttcaggtaacgagttaacagtatcaccgtctcgctaatcgattggttggatcagtaaaactcaaccaaccaaacgggaaaatagatctcccccccataaacactctagtactctgcaaagaaagtgcagcgcagacgttcagtctgacgtttcttgttcggggcatttgccagtgctgcgatctgtgagcctgagaatccgaggcagtctcctccagtgctttgctctgcacctatcaaggtcagcatgtatccacgccagagtttcagaatttcccgagtgcgtatgtgtttgaaccttgactgtttttttaatttcctaacaatatcttctccgttcgatgcagtaccagtttgcaaccttcaaaaatgatgggtataacaagaccggaaagggctacctgaagcttcagctgatcaaccagaggggagatttctcgttcgcacttttttcaggaggcctcttgaaggtaagcacccccccccacccaaaaaaaggatactagggtgagtcagggcctaagatcaggtcgaaaggcgtagtcgatggacaacaggtcaatattcatgtacacggaggaggctaggttagccgaaagatggttataggttgattcaaacatgtgttcagtcattcgctactcaagaaattgtggggctgcatctcctgcccttcttttgcatccagtataatttgggatttttggagatggattcatccattcatgttttccatctgaac

SEQ ID NO: 6618 - DNA, 780 bp, Zea mays
cacgagtgtacctgtggcaaccgaaacctggtgttgagcatcgtccggtggcagcgtgctggtcagctgttgctgctgccgcagcccgcttgaggagctgaaactggagatgtgccttactgcatggctgttggcaaatattgagatttgcactgcatgctgcaaagagatgcatgatacgatgcaaacaaactgaagcagaagcacagcaaaaagaaagaatacagctgtttgagagtaatgtgtgttgtacacctttgctctattaatgagaaaaatctagcaacagatctgccccttattgattgagagtaatgctgaccacgaaaacagctgttgcgacaggaatattttgctcaaatttccttcaaatgaagcacaccaaaaagaaagaataaaaacttggtccgctaagaacaaaaaagagcaagatatgtttctggtggcaggaagcagaaaaaaaaaaggagcctgtcagacaacctatgggccaccccaagtcaagcaagcctgacgggaacgatcctctacagcttaaggacaaagcatcagagccaatcctagccgttagtcacgctctggcccacaggtcatgactcatcaaccaggcttaagtgcttgcctccttattaatcaaggatgcaacggtacgatcctatagaacagatcctgttcaagtaaggtcgtgctggatcactcctgagctgaccttttaagttcacttctacgcgtttgatcaatcgaggtggtgctaatctgtttggccagcacattgcaaac

SEQ ID NO: 6619 - DNA, 1090 bp, Zea mays
atcgataccagttgccgccggtttaagccgcctcagtcatagtgcgcggctatatgtccacaggtagggctagagatgtcaatggagaattctccaccgggttatagcatctcatactcatccctatcatgtttgatccatcctcatccccatccccatacccatcatgggtacaaaacttatcccatacccatccccattcgggtttcgggtccccaatgggtccccatccccaattaagggataactaggtactaacatgtagcaaatgcaatctagatttcagacatcactacatcgacaagcactcatccatgaaccatgattcattcatccatccatcagaaaagacataagtacttcgagaccgatagaagaaatggagaaatggagttttctcaccttccttggtcaccatctgagttcgttggcgcctgagaatccatggtcgtcaccgtcgtctgggcagggcatagcatatggctggttattttagggttttattttttactagtctgctagttgccttgttgggctaggacatagggcctgttgtgttgtcgtgccgggcttgatggccgactcggcctcaactcattcattcaaataggacaggtgtacacgtatgaaatacccatgggtaatcgggttcagattattgcttcccaaacccatacccatttacccaatgggtggagattttgtcccatatccatacccatggagataatttttgtcccatacccgtaccctaataggggaattccccatgggttatcgggtatcgggtccccattgacatctctacacatgcacgtacatatcatcacatatatcatatcattcttctggattaaattaaaactgataatgcctattttctaacacacactctctctctcttgtaagtcacagcgagtacaatggctgatttcatgttgactttcagtagcattcagaaacttgatgggatgaagaaggcgttcttgcaggaaggtcagtgagaaaatgcccccgtaatttccctttcagaccattgtaaaacatgtacctgtttcatactgcaggtcggctctagcggtcaaccggg

SEQ ID NO: 6620 - DNA, 812 bp, Zea mays
ggtttggctgcttggttccaaacggttctgtttcatgtcgcgtgcactggagcacatgtgccatatctgcctgctgctgctactgctatatgccgtgcacgtgcacgtcggtgacctgaaacctggctgtccgccggccaccgagctctaacggaattctgccatgctctccggccaccgagcccaacaagccgcctgagaatttatcgctctcgcggcatggcacggtcacggcactgccggagttggcggcgacaaacgttgcatggtcctgacggaattctgcggtggtcatgttgccgggttagccgttcctgagacttcccaggccgtacaaacctgtggtccctccgtcaaacccggatgctaccgttagcgtgcgtcgcccgactccgacgctacagctacagtcttcggcaataactcgggttgggtttacagcaaggttaaccgtacctatagatggccatttggcactaacacgatgggccggcccaggcacgacacgaaaaagcacagtccaggcacgatccggtccggttagtatagtgtcagtgcctgacacggcacggctatagtgccgtgcctgggccactatctcgacccgtagtgctggcacgggcacgacacggttacattttttattttaaaaataatagtttacatatattaagtataagaattcaacatataacataataaaactatatttgcactggttagatggatgcgtttaaacctcttatgcactaggttgtgagttcaaaaccccaaaactgcacattttttttgctaaattatgcaatataatc

SEQ ID NO: 6621 - DNA, 772 bp, Zea mays
ccagaaatacatgaaaatttagttgtccaaaaccacccccaaaagtcccacaaatattttttttgtcatagacttgcattatataccagctaccatgacaaggactagcatttccctgccacggggttacacaccatttgctatcttgctagacttcagtaagcaacctctgaagtccaaggtggattgccgtggagtggtttcacatttgcttacttgccgtccacaaaagctgaattccaccggaagctgctagtctgaatgtcaccagagtcctaatcgcacatcagcgtgatgtaatgcgcaccgaaccgaatcgttgaaggatttgcagggaaattaattgctgcctgccagatcgaggagccatgatgaaggaaggcaatatccgcagccgatacaggtggccgccgaactccggtaggccgtaggcatcaggatcaggcacgcagctcagcaaaagggatcagcaggataattccaggacgccagacattctccggcgttaatgaatggaaggcagtagcatctcgatcctgatgctccgcagaccaggaaagcttacacggttgttggggcgcgcagactagctacagccactagtaccacgtacagtaatatagaatttgtgcccgcacgcaaaagaaacgaagacgggtgtggcttctactacaactgttgataatgattgaactttaagcacagtacttggattagttgactggcatatcatgtgaacgagaaaaataatggccataccgcgtcatgaagc

SEQ ID NO: 6622 - DNA, 790 bp, Zea mays
agcttgcatgcctgcagtttaaatctagtccacgcaagtcttcatcccttctgatcctttccatgattcctaagcaagataagagcacatgtgtctccatcatctaaacgtaatggacaagagcttaataatgaacttacttgatggttgagttgacgagcacgagcgtgagtcatattaccaaggggcgttggtgctggtgtgagtgcaggggccgatgcacaaggtgtcccaggggtcgatgcatgaggtgcccgggggcctaggcaagatgtgccctatgggctagcgcatgagaagcctcgggggccagggtaagaggtgccccgagagacaaggtgcgagatgcgcgagaccgacgttgatgcatgagagcaccctagagctgatgccgatgcaagaggtgccacgagggccagcgtgcgagatgcccctagggtcgatgtcgatgcacaaggtgccccgggggctgccgctgatgcaagaggtgccctgggggccggtgcacgaggtgccccagtggtcggcacgcgagatgccccagtccatgtgcgaaagggccctggggatgtcctcatcaagctccgtcaaaacacaagaattatggtgagtccaaagaacccaagaacctggtacaaccagagaatcgagacctttcttttgtcatgccgaaaagaagtccatgagaagatcccaaagaccaatataccccactagtacttccattgatgaggcttctcttacatctgaaatccagagtttttagtgagaaccgtacgtttcttgacag

SEQ ID NO: 6623 - DNA, 833 bp, Zea mays
gggatggaaatggaagtggccatccgccaccggcgaaacacgaccagcaaaccaccggaccacacccgtctggcccacagaacaagcgaaacggatagaccaaaaaaaggaggaagaattactagtagtagcgggcgacgcggccgcgaggcaggcaggtagaccacgccgcacgccagccagcggccagcgcccgccccgccgcgcttcggcattttcccattttctctctctgccgccgctccctcccgcggcggactcgataccccgcctctcctctcgcgaactagggggcagcgggcaggtgccggcaggcggctcgatcccttcctcctccctcgtcgcggggactgctgctgctgctgccgtgaccgcgagcatggccaccggcgccgttacgccgccgccgctggctggcgcgcggcgattcccccgtggacgaagcttcctccaccggcgcctcgctacctcgcctatgtgagcactttatttgttgtgttttggttaattcgctattacacatccgattttctgttgttggaggaactctcgtggtagtttttatttgctaataataaccgcaatggaggaaggaaatggggataacgaaataaacgaacgcagaaaggaaccatgggatttcagggcgtcgtttaggcattgggttagtttggttcagttgcatcttcacgctatagactttgtgactggaaagaccacccaatcagttcaatgcaggatcacactgtctccattttctttttttgcgcaaaatttggctgggactggttcattgcgctggttctcatggcacgtgttcgtcaattcaaaat

SEQ ID NO: 6624 - DNA, 880 bp, Zea mays
ggatcctctccagtcgacctgcaggaaaaaaatgataaagtagctgaaaggaccatgctaacagtaaatgtatataacagtgcagacaataagaaacactaaagaattttcccttaaaaacaaatgccttaccgattgcctgactcattttcatactgatcttctgctctcaaccatgcagcgatctatcaatcatcagtaaggagagatgttacttgtatggcatagtgggaggtagagtaataaatcataagaggtgacgttatgtaagctataaatatctagtatatgttagtaatcaatagttagcaagcagttcatcacaagtacatgtggaagttatgtctgcaaaacagaacaaatgaacaatatgctctaacaacttaacaagtttattacccagtattcctcatcgatcacagcctcacgagcaacatagcagccaaataatcttttgtatttgcaatcactttcatcaattgagggtcgaagacgattgaaccggagatcagattgtccagaaggaagcaaaggggttgggaccactgatgccttattggataaacttgacgaaagcccaggatgagacaatcctctagcaacatggaggctgtcagtgtctgtctcctcatttccaccatctgtggaaatcacagattcatctttcctgggagagaaaaatgactgtgcgtgaaattgaggaacaataagcatacgatccaagcatgaagttatgctcgacgctagctctatgacagcaaagcaagaacataaacactgaatacttcaattcagtggaacctaataagttcaatttgtggtcttaatggtgcgtattccattccaactacaccataccaagccataagaatcacccgaa

SEQ ID NO: 6625 - DNA, 778 bp, Zea mays
aaacagcgaaagatcaccatagcatgaaaccaaaaataagaagaaaaaaatcacaaaaggaaacgaaaagaaatagaaataaaggcaacacatggagagctccaagccaaaagcggtgatgcgtacacgctggtagtggactagtggtaggcttgaattcataggaacccaacaaataaaaaaacacttgagaatatcgggaaaagagtcagcagcacagctggcttgattaatcaaagcaatgctgaaagggaccaccaccgattcaccgtgaattttgaaaattatccagataacactgcctgcctacgtgaagaggatttatggcccctttcacgcaagtcggttacaattaacaaatactccaattttctttgaagtagaagtgcagcaaatactaattgaattaggatacacaacacgacatatgatcaacaacgtcggctcggggcaaacaagccgtgcatcatgattgttacctaaagcaaaccataatttaatctctccagagtaattatacgcctccatgaaccatcgctaaccgaccgcaaagcagcagaagatttcgttgaaaacacgtggcccgattgttaattgatttaggatttaccttgcgcccctcgattccgaactggtggagcctgatcccattcttttctaggaactccgtgttcgtccccgggtacggctccgggcacaggtacctggcgcgctggaacggttcagagcgccgcacgagcacagtgattcgagagacggcgccagcgtgggagagagc

SEQ ID NO: 6626 - DNA, 849 bp, Zea mays
gcgaatatctgttcataccggtcctatgtatatactgtatattagttataggttatgtgggcctctttcccgtggacgcttctatcaaggtgatatggggactatttgtgggggtatgatatttcctgtggtcactaattcagcaggaatataaattcaattcttagtccatgaaacatatgtcgaccataaaaaacattcatatagttcattgctccataatatttcataacattacgtgctccataatcaaatcaccacccccctttcactctcaaaattagggatgcatgggagtgagtacgtgtatggataaatatccacaagtaattatccatcggatacagatatgatagaatttattatctatagatatgagtatgaatataataaaatattcacaaatattttttcgcgcgtatggatatctattgtccatactcgttacccgatgagtatctgatatgtgcgaaatcaatactaatttaaaatatgttatttaaattaattttgaaattttatattataatttggatgtaagtttatgcttatggccaagctcgttggctcggcgagccgactcatgagccaacttttcaggcttgttagaccgagctcaactcgttacatgaccgagccgcaacgatccgagtcgagattggcttggctcgtttccaccctaaatagaagccatgtttttgtgctctatctttcaacacaaaaacgactctactttttcaagggctttcgacgagaaaccgaatattttaccattaggtagggctttatgataagtccgagctagagtcgttcaaagagtcgcgccaaaagagccctttattgtaattg

SEQ ID NO: 6627 - DNA, 758 bp, Zea mays
tataaacacaaatccggcaccacggtactgtactacacttgatgagaaacagtattgcattacaatgtgggaccaaaaaaaaatcaaagagataattcatcgatcgcaatggtaaaaacggcagtaaaaattgaagtaaggaggagggcagtagtagtgcttacatttgggcggaggagggagacggcgttgccgtggtgctggcccttggcgatgtggtccatctcctgcattgcctcaccgttggccaggatgtcccactcgccgcggcgctgctcgtcgcggaggtagtcgaacacgcgctgcggggacgtggcgggcagccgcaccgacgtggtggcgctgagcaccacgccggggggatccccgggcgcccccacgctgtgccgcgccatcatccgcaccttctcctcgccctcgcccgcggctgctgatccgccgttcccagcagcgtctcctccctcgccgctgcgccactcgtccaggcgccgccacttctgcgccgccgacgcacacacgccggcgcagaagttgtccgtcatccgctgcgccagcttcagcatgctcctccgccccaccggcgtgatcgctgcataaatccatatatatatccatgctcaccgccgtcgccattggttaaccatctcgtgcaagttactcaccaccaacgatggagtgatcagtaagttactcaccggcgtggtcgcgggcagggagagagttggagccaaaggatggcgaagtacttgcactggcgc

SEQ ID NO: 6628 - DNA, 825 bp, Zea mays
aggtaaaccctatctctgtagcgtagcgtgccgagtccttcagtgcggacagccttagtggctgtagaattcctactgcgcgaacggcaacctccttccacgtcctctcccatccgctagaccgctagcccgccccggcccggccacctcctctctcccgtccactcgcctcatctagactagactacttgcctcccttaattttgttctaacccggaccgacatgtagaagaaaaggaaagaatcgagtgatggaacactcacagtcacagtaagatgtagcttctctgttaaaaaaaaacacgcttacatttctccttgactgtcaacattttttttttctttagaaaaggaccacataacaatattcccaacgtacatcgctcacgacaactgaactctcctcgtcacgtgcagatccacgagagcaaaacattattttctgtccccgtgctgcaaatcagcaaaaacaggaggtgacgcctcctacaggctttaaggcgtggcagatgaggcgacacggtgatggcctcttatttcttcacagggtggtccatcaggctgcaactttcttggcggtcactgagttgataatggtggcgaagtccggggcctgccaaaaccaagggatgtatcaaaacttcgacagcttcttgaaggttttataacctatatatgctgcgtacggagtggagagatcaaataacatagccctatttaacaacactgagaacagaggcagaaagacatcgcaggtggatggatggttttaaaagccactgctgatcagagatcagtatacatagtcatgttaaacaccatgag

SEQ ID NO: 6629 - DNA, 772 bp, Zea mays
ttgcatgcctgcaggcctgtggtctgtgctatctaccgttacacggtgagctacagagttgtcgccacaacattgtagtgtccgcagaggatggtgccgacatggcaagataaaatcctggtccagcaagatccgttcttccaaatgggatcaggtgattggctccagctcctcctcccctcagcaccaccagtccccctctgctcctcctttcagtctcagcccaatgacaaagttctaagcagagtagtgcacgggcagcacggcaacggcatagcacctccctccaccgatcatccagttccgcttgcgtaacgacttcccttcgcaagcaagcttcccgttcagcccacccgcaggccgccgtgctcgcgcgaccatggcgttgctctccgccacttcgcccgccaaggcgcacctctcggcgctcctctcctgccacgacgagccgcagcagcaccaacacgcgctcccggtcccgcacccgcgctgcttcggcggcggcaaggccaggcggcgcgcgcggggcaggtgcgcggcgtcaatgcggccgcccgacgcgtccgtcgctcccgcgcccgcgcccgcgggcgaggcgcggcggaagaagaagccccgggtgctggtggccggcggcggcatcggcgggctggtgttcgcgcctggcggcgcggcgcaaggggtacgacgtgacggtgttcgagcgcgacatgagcgccgtgcgcggggagggccagtaccgcgggcccatccagatccagagcaacgcgct

SEQ ID NO: 6630 - DNA, 781 bp, Zea mays
agtggttacatacagttaaaagcgcagaaaggattctggagtccagctccaaatctgatcctgctgttgaacccacttcattgtttcccttggatctggagtccatcttgttatttcctccctctatttttcctacctttttcttgctgtccttgctatatgtatctcctttggtatcaccagagctcattagtacctaacataattgtgcaacagaacaaaaaaagttgagttatcgtttctatcaaaccttggaagtagtacagcaaaagatgtcaaaatgaaacaaaccaaatggcaaaaaagaaatgaagtgcagtgtgtgttccagaaaaaacatcttaacaaaaaatgggaaaatatctatggcacactgacagagtggttttagctcttggacactagaaatggcactatttatcaggaacacacagggaaacgttgattatcatcaaccgcacaccagagattaaaaattttcattttaggaaaaatcttgtacacaaagtcttgccggaaatggagtgtgcccagataatgaacaatgtttcttaatgttttcctgataataccatttccaatgtctaagagctaaagacactctttgtcagtgtgacacagataatttcccctagagaaatagtacatggcaaatacatgtgaccaaaaagcaataaaatcaaaagatgacaagatcaagcccaaattacatatgacggctggacatcataattactagtgaaacacaccaaattgatggctggcaatgttcccagcacca

SEQ ID NO: 6631 - DNA, 718 bp, Zea mays
  unsure (1)..(718): unsure at all n locations
tggtcagccatagtggatgatgcccccggcgcctatcccaacacctcctgcatcgacgcctgcgcccaagtaccattgggtgccacagtagccgtggacgccttggactagccctgggattagcagtccctggcgaactccttcggcacaatggctcttttgtagccgtctatcgcggtagaggtctgggtcattgactttggtgccaccgacgacattgcttccatcgccggttttacatttacccttcgtccacctcgccctgctcttccttcttctatccttgttggtagcggatcctctctgcacctcagtaggcgattcggttctttccaatccgttctaccttaacaacattttacttactcttgatattatcgctaatctcctttctttccgacgcgttactactgataatcactgctgcacggaatttgatctgcttggtgattctgttgaagatcttttttccaaggacgtgatcgcctacgcctcttcttgttgcctggacctgcacgtgcgctgactgttgtctcaacctccacttggcaccaccgccttggtcatcctagctcggatgttctatntcgtctagcttgcttgtcggctatctcttgtcataaggacacggatgtttccctctgccacacttgccagctcggtcgtcatgtacaaactccctttttcttgatggcttctcgtgctatgcctcagattg

SEQ ID NO: 6632 - DNA, 1253 bp, Zea mays
ctggggggggggtttttatgggtttaatcgtaacagggtgggtctttgatggggaaatctcctttcccataggaaagactgcaaaagaacctttttagatgaattagtatgtggggttatggctggagctaaaaatctagagagtcttgggccctgaatgtagtcaggtccattcctatcgctactatgtagctttccctctgtttaggcttattgcctagcaggttacatgctttgtaagtttttttcttctctatttttatataaagatgtgcagttctcctgcgcgttcgataaaaaaattgagattgtaggggtttagtcccaccttggttgttgaaggtgggtagtccttaccaccacccttttatgtgaagtgaagatgaaaacataagttgcttggtggaggtgtgtggttgactaagcatgcagactgcggagtagatctgagccatttggactctagggcattacaccatccctagtgctgttgtcaccttagtttgagatatcgacactccctttaatcatggtgatgcttgtacccttcataaaccatcatatgtgttgtgcaatatctttttattatcatttatcactttcatccatggttttcaagttgtcgcataagcgtccaggcgctaaaaaaatcatgagtgcccctgtcgtcacaaccaaaatctagcagaacaagagaggaggtaagggagaagaaagatgaagaactagagaaggcaaagctcctacctccgccccatccccattggctcccatggctatgccagctttcctcactggccagcagctctagatctgcatagagtggagaggggtctgcaagggggtggcactagcatgggagaaggggagggtaagcgacagggaatgctggaggagaggtgccggcggcagcaatagatgtgaacgggggagggtgggttatatggactgcttggtggtctcttgggctggaatttgttagtttcttcccctttcttcttttccttttcctacctccacactgcaacactgaagttcttcctattcatatggtgtccccttgcgtatgactcaaaagggtggctcgccatcgccttaataaccatgcttcatcaaatccttatttttctttctcataacagctcttaactatcatcatgctaattgttgcctacagaaaggcaggtctggtgcagtgatgagagctatctcattgagttaccaggtcgtgggtttgaagcggcctatccgca

SEQ ID NO: 6633 - DNA, 773 bp, Zea mays
aactgtttagctaggatgatatgaaccttgtatcctcttctgagaaattcaagggagcttccctcttcttcttgtaaaccaataactctcaatagttcttctttcgcctaaacaaagagaaattgcgtggcagaaccagcaatctcgaacaagttagtatcttttccgccacccaaacacacaggagagcagtaaaaagtagagaaaatgtattcgagtagcttatggtatgacctgtcccaaagtgaaccgagcttcgctctcagcgacacatgcataggaaccatcagcctgcttcagcatgacctgccagggggctgaacaaatagtaacccagtagataagtagctgccggtgctgataaatagggatgagattcccaaccaaatgattgactttgcataattatttactttgatcttctattccatacccagcactgtaatcttttcaagtgaagaaatcgaaataaacccaccaacatttacctgggtattggcggaatacagctccactataattcactatgtatggagcaactgcgattgtctacacggttaagggaaagtagtcatagatggtgcaagaagctataaacacaaggatgtttctagatggataaaagtaagacagatgaatactttggaatagtcacgctgtctgatataaaatactggggtgaattgagaaaggaaccggtagtgcagatcttttggggggaacccgagaagccccaggtcagaactgcaccgtgaatttgcatagtcactgcc

SEQ ID NO: 6634 - DNA, 733 bp, Zea mays
ctcctcagatgagttcatcgatgccaacatccagcttgctctcgttgttgctaggaagctcaaagagctcaaggggactaggtcttgtatagtaagttcaagcttcacacgctatcctccctgatgcagacacgctctgggcatgcaaaaccgtgctcatttgctttcttctagttgatttcaggtgtttcctgatcaacctgaaaaacgtagggcatcagagttgttcaagacagctatagacacggtaagtggtgttgttagaaggtccattttcttttcttaattgacctctggtacgacttgcttcattatctcagtggcacgtaatttaattggtcgtctttagattgagggtgtaaccatcagctccctggatgatgtacccactgaccctgtcaacagcttcttcaaatcaataagaaacaccctggattttgacttctcagatgacaatgaaggtaacatatcttgatccaaatgaactgatgaaagcaatagccatgcgactctactctaaactgacattgttgatgatattattttgttaaagatttcatgacactcttttgcatggaacccatcttctcagaggtgctaactgattgacgaacactttatgccaaggccatgagctgaagatatgtgttgattctttacaatttttagtaaatagcaatcttttttgtgtcgatgaattatcacagctggaaaaatggaaatgaaatgaccc

SEQ ID NO: 6635 - DNA, 764 bp, Zea mays
aacaaagggaaccaatgaaccatattttcgtttgtaagcaggaaaccatttactagtacaaccagcaaattactcttttcaagtaatatattatgggctgttaggatcagtgccccagcaggaagccaggaacacaagttttggccctgcccatgcaatttggctgggctgcaatgctgatgcatcagctggagagtggcccaagaagtgccacacattttgtaacaatctttggaattgtattttctaaactatgtgcccaatatgtgatccatttacaccaattacgtacttgtgatttaatgtaaacaaagacacatgatggataattcgatttatgtcgaaattctaaaaatcactgacatgtgggccccacatgagaatcactgttttagaataatttgctgtggttgcaaccaagtccaatcttggctttgttacaaaccgaacgctgtatttataactcaaatttggtattatcctaactttggccatggccaatatttgggttaggcctcctaggatttagggtctacaagaaaacaaaccactggacgatctattctggaacaacgtaaaattgtgcacaacacataaaccagataactcaatttttagtacagtgcctgtcatagccagatccataacatttcatcacctaaggtacggagtttatctttattgattcacttatttatggcatagttcagtgctcactcattcgaataccacttttcatccctagatctaatatcaaccattgt

SEQ ID NO: 6636 - DNA, 791 bp, Zea mays
tccattcttcttcctcttggtcttctgtttataggaacctccttcctcctaacaatcagtttagctgtcatcttcctctttctttgtcaaatctaagaacttttcgaagtaaatggaaacatgacgtatatttcagtattcaccgaagtaattcttcagtttttatctcaattcatgattattatgtcagatatggtggaattcatgaagaatcttgctaggatggacgtggatatgagtgctgaagaaaggcatttgttctcagttggtttcaagaacactattggagcaaagagagcatcatggagaatcatttgttcacatgagcaaaaggtcgcagctgatcgtcagactggtgtgatgatagatgcctataagaagaaagtagaagaggaactaaggaaggtttgcaatgaagtattgtcagtcattgctattcattgccttcccttggccagtacgggtgaaaatatcgtattcttttataagatgtatgtacaggttccttgattaagcaaatctgtttctcatttgcctttggcttttctgatgatgccctatttttaatgattatgttcagagtttattttctatcaatatctcattaactttccaggtagattgatattgcttttgccaagacattacaattttgagctcaaaatctttttttttgaagagctaagagctcatttcctcaaaaggttttctggtaaatcatttgcaaagctttcatgattgaccatcatcatggtaccactccagaaaatgatgtgtatgtttgggggggg

SEQ ID NO: 6637 - DNA, 773 bp, Zea mays
acaatctggctaaaagagggctgccccatcccaatgtctgtcccctttgtgatcaagaggatgagaatattcagcacctgttagtgggctgtgttttctccaggcaactttggttttatattttccaggctataaagatgccagagctggcacccaacattgctgaaacttcctttcctaagtggtggaggaaggtggtcaagttagtaccaaaagaaaggaggcaagggctgaattcccttatcattttaacagcctgggagatatggaagcacaggaattcttgtgtctttgagaattcagagcctaacacactcactttgatcacaaggattgctgaggaatgtcggctttggaggtgggctggggcctccaaactgcaagacttcctagtctaggcacgagctacgaatgtgtaggtcttgatggcctacccctctgtggtttttgtattcaaatggtctaggtgtaaccgttgtaacagccaaagcttttagttgctcagtccctagctgtaggggtacaggtcttgtggttttggttgttttcggtcatttgatgtatgtggcactttctctctttcttcttaatgaaatgacacgcagatctcctacgttgttcgagagaaaaaagactgttagatttcaaaactaaataacaaaactgttattagtagtcaaagttttatatgggtgactcaaagcttggccaaaacaacttgttttttaggactggagggagtagatgtgttgtgtatcaccacacccctcact

SEQ ID NO: 6638 - DNA, 806 bp, Zea mays
aagtcataccttgctatttgagaattgaactattcgcctagatgtgggaagaaaatgagatactcttgttccagttccagatccagtatcatcaactttctgaccatgtccactactgaactgcctttgtagtgacgagtggttatgtgcatcagatgatctctctctaacacaaagaagcatccgtcctatcatgaagcaatacccgatcagcatgagaaatgacaaattcactgtccccaagtgttgttctaaactagaaatgggtactacaacataagctttatactgcatgcagtctcggaaaaaaaaaacaatagtggaatgcccatcccttaaacatttactaatataacacttggttcacaatcatggtttttaaagcggcaaggcggtccaaggcgttggaccaccgcctggacacctaggcggcgcctaggcgaggtaggcgggcaaggcgcctaggcgttagaccaccgtccggacgcctaggcgacgccttaagaacagtgttcacaatgattttcaaatgagcaaatcagctgaggaaatcttctgaacagtacagtgacaaaagaagtttttggtagacctaaagtcaattgcaacatcaaaggacagctatgataattcaataaacaatagctagcaacggagaactagtacctaaataatccccatttcataattcaatatgatcatcagcgaagcaaactttaaatttcaaaaactgaaaggaaaaactagagtgaaattagtaccaacaatgtctgttgtcgacactccctcggttctattaatctgct

SEQ ID NO: 6639 - DNA, 1162 bp, Zea mays
actgttgccaccgtactgacaagctagctatagctagctttgcgtggtacggtacgccacacccacaccccacagatatgtgtgacaggaacagctgatggcaaggttgttcacaggtctctacaagggcaataatactgcaataggttgctgttcttggagagtgggcgagaataacctaacagatttatcgacgtacgtacgtacgtgtaaaccttgtcagatatccgcggacgaatgtggaaaaaagttgccatatatattgcatggttcgctgcacaagctgggtagtaatcataaattcagggaaaaacaagagacgacgtaattaaaaagaaggaattttgaaggtgtttggtttggggagtcaatccattttagacgagttggtgcatcatgagtctatttcataaattagaattaactcatttatcatattattactaattattagactataaggaataaaacagtgatggatcaactcattacattttacaaaacaaacaacaaagtgatggatcgactcatttcattcaactcatattattattaaaataatgcactaacttatttctcaaaccaagcacactatttaggtttcattggagccacatgctatcactactcacaagacttgcaaaagttaagcacacaaggttatcgatccgagttttaagctctagagtagccatatatgctactacatccattccaaaatagtaatcgttttagctattgatttttacgtcaatattaaaatggatcataataaatctaaacagatatataaaatacatatctcaagtattatataaatctattaattttctaaaccttcgtgtctcctatgccttcacctttagctttcaatctcaaggcctaccgtataaatgcactatcaaataattttggcagatgaagcaccaggtagggagaatcacttagatcaactgagagttgatggcaaccaaaaagtttcgcattgggccatgactttcatcttggtgccttgtgatttgacacttaaacccccgcaggatcacccacacattaagtgttttttgcaagcttttccaaacacttttaagaattttagagagagatgaagaaaacccccattaaagggaacccaaaccatcagtggcacccaattataccc

SEQ ID NO: 6640 - DNA, 1360 bp, Zea mays
ttgcagtcctatccagttactttcttcaaccagtaactctttgtgctgcaacaatctaaattacaaggatgcttctaattcttcatttctgccaacagtcctatccaattactttcttgaaccagtaactgagatagaatttccaaccatcggtgctgtcttcaaagcccatgcccgttccattggccatttgatttgccttggatttgaaggttttttaagcctatcactgaaccaaaatagacaaatcatctgtaggttttgcacttggaactttaaagttcagtctgatcctgatcttaatatgggcctatcttccgaaatttactaccttcaattttgctagccagagaactttcagatagtgtgtattgaagcttgattacttggactgttctactgtttcagatgctttgaatcctccatgctatagttatatgatctacatgatgacaaccaagacgatacattgtccagagattgtttccatttcacttgtttgatttggatttttggtggtttgcttggtttccagttatttgagagaattaatgcttggatgttaggagtgaggaggcactcaaatactctttgctcatactgccattttacattggaaattggatacatttggagctaaggttaggttactcctttgcactacctttattttgaagctgtccttattaatctgcatgcctcatctgatggctcaggtccactatttgcgccgatatccagcaagaactctttcttgacaatacataacttcattgtgcaaaattggtttgttactgaaattgtaggttctttacttgagcatatgtggtcatcgtatactttttggtccaattacccaaattttctgttaggacccctactaatgtttaatctagtttctggttcgcttctaattttacttccatctgttatgtattgtttatgtcttgactttcatctggtgcatcttatctgttgtggatcaaaactaagaaaaaggatgttgctgcttctgtgcatgccaaaagaaaatctctctgaacaaacttgtcttctatgtgcttattgtttgaccatttctatcgtggactagcagtagtgccttatgatgtccatgttggcgctaagaaatgtattgcggtcagttttttgtgatatgctggatgtcttaactgtacataagattgcacgagtgtacactggctgttttttagctgtccacttgcttatctttttttcaaattatgtctgggagcacgatcttctttgtgtgtaattgtttgtgtttcctgatttgttgtttgtttgcggtttaacactgcctttgccggtcccaagcccggatgagaaaatgtggagg

SEQ ID NO: 6641 - DNA, 680 bp, Zea mays
gtggacaggcgctccagcgacagcggcacggtgccgcggatgaggttgtgggacaggtccaggtacgtgagctccggcgggaacaccagcctgctgaggtcgaagttgaggtagttccacgacaggtccaccttgccgatgggccggccggcggcgaacaggtgggaggggtcgccggtgagcctgttgtgggagaggtcgacggtgttgatctcgtcgcgcgcgtcgtcgcgcgggatggggcccgtgagctggttgtaggacaggaccagcgaccggaactgcccctgcaccagccccgccgggatggggcccgtcagctggttgtgccggaggtccagcgaccggaggctgggcaggtcggcgaacgccgccgggatgccgcccgtcagccggttgctggagaggtccacggagtcgaggccgcgcagccgcgccagcgactccgggatggcgccggacacgttggtgtgggagacggtgaggaactggaggttcgacagcgccgtgaggcaggccgggatggcgcccgtcagccccggcagccggaacagcgtcagcgacatgagctccgtcagcccgcccaccgccgacgggatctggccgcgcacgtcgtccgcgccgtcgatgaagacgttgttcacgcgcccggcgtcgttgcatcggaggtggtcccacgc

SEQ ID NO: 6642 - DNA, 827 bp, Zea mays
  unsure (1)..(827): unsure at all n locations
ctcttcacgatctcgtacttgtgttctgtgcaacaaacaatcccataagcaaaagtttctttatgtagcgacaagagtacttataggtgtttgactcaccagggaagactccggcaaaaccatcggccttctcaatgagctcatctacaggaagcgcttcaagcgtagcatccttgttttggccgagcagcgcagaggatggatacatgttggtacccatgccaagcctccttccagtctccttaccgatagcaagctgatcacctgaagtaaaaaagaaaaagaagtccatgtttagcaattgcacaaatactggacctataaactgtatggtcagttgttagtaacaggctacgtacccgtgatcatcttgacgttaacaccaagaacaagagccttgcgaattgtctcagcgctgtcatgcctaggcggatcaaacaggggcaacagaccaacgaactgccatggtccaccaggggactccttgtttttctcaggtacttcctgtggtaagatcacatttggaatgagaaaaatggctcaccgatcactaaaccgcaacaacgggaaaaagaacatcaaccacgatacctgtctggcaacagcaagcgaacgaagaccacgctcggcatacttgtcgataatagagtgcaccttccgcctcagatcctccttgcagtggcacaggtcaagaatctgtttcggtttcatcacagggggcaaattaaattagtcacgctgaaaaaacatattttttttctttttttcattccaggattagcaacaagatcgcanattttctcacctgttcaggagcacccttgctg

SEQ ID NO: 6643 - DNA, 829 bp, Zea mays
gcaggacccgggatcctttgagtcgacctgcagagtaatgttaatgccgctgtttgtttaaatccttggaatgcaattatgatagccatgtggaaagatcaattaaaactgcatatgtaaggcaggaagataccttggagaagagatccattgaagaaagggctcttcgaccagtacattttgtggaatctttagacaactccgatttagaacagtgatattgaagctttccttgaaggtgttcccatttcgatttctctacaccaacaaagttgaataacataaatactacttcgcttctaccatgcccaccagatatctgaaatctgatcgaagtacaaggtattctagcttccttggtagttctctgcctagaacactgcttgaagcttccagcaagtaaacagagaagtgatactgccgatatcaagcatgtgtcgagaagaaaatgtttcaagcctaaagcattatcaaaaagtatgtccagatgtacaacaggccataaagcaaccattgtaccacaatggagaaagaaggtattggaaaacgaaacacaacaggcttcacaaagcaacttgtaaacaggtttcagtgggaggctcaatgcaggtatgacatatgtgactgaagcaccagttgcagaactagattccataccaggacatgcagcaagaaccatagcaaatcttgctcttatctgacaattagaatgctgttcggaaatgctaagaaaaccattcgtttttctgcaaaaccgtttcctagaataaacaaagcgaaacctcctgtcctcaggtgtggttctatccttgagaactttgcactccca

SEQ ID NO: 6644 - DNA, 809 bp, Zea mays
aaagtgatttgtttgacatgtttgattctgaatttcatcatttgtgccgcaatgtggataatgatcttacctgtaaagctgcaaaacccgagaattcaaatagagatgtacctgaatcctctgttcgtcttggttcctcttcatctttcaattcagtggatgacaagttcccttattctgggatcttctcactaaccgataccgaccaactgttggatgcggttgtctccaatgtcaatcctggtggcaagcagatctctggtgacagtacttcttgcaagacttcagcggcagatattcctaccacttcgtattgtcgcttaaaagaaccaaagcagtccgaatcatctgctcctcctttgctaatcaagaatgagttagctgtttcaaattttgttaaacatccatctttcccagaaaaggcagaggatggctgtctttctcaaaataatgcaatacagaaatctcagatacgcctctggattgagagcggacagaacttgaaatgtgaaagtgcctcagcctcaaacagcaagggcgttgatacatcaagcaaggctagtcgaaagaggtctcgaccaggagagaatcctaagccacgaccaaaggaccgccagcttattcaggatcgtataaaggagctccgggaactcgtacctaatggggcaaaggtatcctcttcttctactcacgcatttcaaacgtgttttagtaatttagggttatttaatgttcaattgcacttgtttcaaacttcatacacttgtacgatgacttgtagtctcacagcattttttgtcaacagtggt

SEQ ID NO: 6645 - DNA, 768 bp, Zea mays
ttttcaaagaaatcagtagatgcatctgagccaccatttaggttgtatggatgccatgcaaatatcacatattcacgtcctcaatcttcaaatggtaattaagtttttccatcttcaatccttttagcaggttgcactgcctaattttctggtcttctgatttgcaatgtatattaatgcgtggattctctttgttgctttaagtaggtgttcctccattggtttcacgtcgtgtgctcgaaacactgacaaacttggcaagaagccatccaaatgttgctaaactcttgctctttcttgagttcccttgcccatcaagatgtcgctctgaagcacatgatcataggcatggcaaggctgttctagaagatggtgaagaacggaaagcctttgcggttgttcttttgttaactctgttgaatcagccactttatatgagaagtgtagctcatcttgaacaggtgaactatattttcttttgggtatttcatttaacattttggctcgcgttttcttatcattttgtaacatgtgcagttactaaacctccttgaagttgtcatgcataacgctgagaatgaaattaatcaagctaagctagaagcgtcatctgagaagccatctgagaatgcagtgaaagatgtcaaagataacaccagcatttctgattcatatggatcaaagtcgaatcctgaggatggtagcaaagcccttgctgttgacaataaaagtaacttgcgagctgttctgcgaagtcttccccaatca

SEQ ID NO: 6646 - DNA, 790 bp, Zea mays
ttctctatgcaaatgcacgcagagggatgacctggatatggtcggcaaccaagctcatccggtcaagatttttcggcttcagaagctttcagtaagtgcgacctgtactgtatatccatagccgacaatgcgatctcagcacagcaacaaatcgaaatgcttccatccagagaagaaggttaccccgcattccctctagttgttaggcggagtagtcctgcggaatatggcactgggaccaacttgcaagatccaactactggtaagccattgtcaacttgggtacctacctgcatcgaagtgtaattcaggaacacatagttatgcacaggcagtgaacaaatagggtgattcagtcgacagtctctggtgcacgccatatcccaccacaaacacagggattgcgaagataaaactagggttctgtttcagacatcagcagaaagaatatgtcaaccgttctctctctttcatcagttgcctactgcatcagctaccatgcaagatactagaaactacgtgatataaatgtcgcaataaataagaaagatatgtttcaagatatgatgtaacccagcccattcattcccagaaatgccagggaagtgtacatccctgcttgaacgcttccatcctcaaggtctcggcagaaccaccatggatataaagcgatgatccagcctgagaactacaagctgcaactaaacgatccaagcttccatatgccctccatggacgagcctctgttacctttggtccagcgggaccaaaagttcattttcaagaaaga

SEQ ID NO: 6647 - DNA, 815 bp, Zea mays
aagagctggcagccaagcgtgttaacggggaatgctaccactgtactgagaagtacagcgcagatcataagtgtacatcaaaaggagtgtttttgctggaattagaggatgggatggaagatggggacaccacagatgaattgggcatctcacttcatgctctcattggtattgactatggagaaacaatgaaactgcatatttccatcaatggtacagctatggtggctcttgtggactcgggagcgacacatacttttattagggaatacttagcaactaagattggcatgccagtgcagccatgttcggggctatctgttaaggtggccaatggtgacaaaattaccagttccggcatttgtattgggcagcagatcatcatcgacaaggaacaattcaacatgacctgctacgtgttacctcttgcagggtttgaggtcgtacttggagttcaatggcttcgctcattgggaccaatcctttggaacttcagggacttatctatggcgttctggcacaatggtcgttcagtacgtctagcaggaattggaggttctgagcctcattgcacttcattacaaacaaccaaggatctgctggccactcttctggaatcctttgctgacatttttgaagcaccataggggctgcctccgatgcgccggcatgaccatcatatccggttgctgcctggatcattgccggtggctgtccggccctatagatacccccaattgctcaaagatgagatagaacgacaatgtgatgatatgctacagcaggggatcatttcgggaatgcaacttgctttt

SEQ ID NO: 6648 - DNA, 756 bp, Zea mays
agggcccggtccttgacccacttcaccttcacgttcaccaacgtcgcgcgctgctccgccgcaaacaacggcgtccctgacggcgccgcgttccaccagcccctcctcctcgtcgctgagcgcagccatcgccacgccatgggaaagcgccagcgagaccgagacgcgctgcccaggtgctcgtttagttgggcctaatgaaatgaaatgaaatgttgggccggccgtacgaggaggcccgccgaggttaagcgaagataccgaggggataataaagcgtggccgccgagagagcgagaaacgcgaggtcacgagatatggcggacggcaagcgaggggaggattcggccgtggcgttgaagacctcgccgtcgtcggcggtgatggctgggggtttacgcggcgtgagcaaccctctggaggagtggagcgggcgcgtgaaggcgattgaggccgggttccgcgcgtggatggcgaagcaacccatccaaatcgaggccgcggtgaccacggccgtgggggcggtgcacggcggggctctgggtgggctcatgggctcgctcacagctgacggcgggtcgccgttccccatcccgcagccgtcgcccaacgccaacccagaggccatggcgtcgttcaagcaggcccaggttgtcaaccaatctcgtcttgggtgatttacgtagcttatatgtgtaaaattcgtcttttgctccgaaattgcaattacagatgattaatcctatccatttagag

SEQ ID NO: 6649 - DNA, 827 bp, Zea mays
actgatgcttcctcttcgccccacctcttctccagtttctggatcgctgctctgcttcggtgtaatcagcgcagacatgtttagtaactggcagaatccgctgtagaattccgtccccgcgccgtcgtggcgcgagaaattcgaagtcctccgtgcttattttgaagatctgctgagaggcctcgggctagtagttgggcttttttgaatctatttttcaatgtggctccttagtcgaaagaaatgactgatgtaaatacttcgcgaattgggttggtatgcgattcttgcagtgtggcggcgattcgtgcaaattgtactaaaactgtcgtgatgtcgggtttttcaattctatggtagctcaccagtcaccactgcccactgggactattttctttctctatctaacaacagaacatgatcatatgtcttgatgcacaatggcttttcatctgctaacttgtccatgaaacgcacacagaaaatgtaacctcttctctaacttcaccactactccactaggcagctccactggtactatagattaacaccgagaatagtgtgaaatgcccttgcgcaattataaatttaacgatgaacagacaacagagtatgacttctaattcaaagaaatgactgttgttcatgtgacaaatgttatagttgtttacagttttcttgtatcttctgcctgtacataaaatcatctgggcttcatgctctcataggaagtttactatgaagttaaatttgtgtgattctaatttacctgtgatttccccagaccccactcatcaaggttattaaaacgataaaacgttggaacg

SEQ ID NO: 6650 - DNA, 832 bp, Zea mays
agcatggacccgggacggctcggctcaggcacttccgacgtggccctcctccccggctgctgctgctgctgcatcagcagcgccgctggcggcgggggcttgtccgaggacgtggaggacggcggcgaggtctcctcgacggggagctccacggggcgggcccggttggtggccgcgcgcgccgagacggcggcggcggcggccttctcgggccgccccgacgccgtccggcggtggtggtacgagtggcccagctcgtcgtcgtcccggtcctccacggcgtcgtagtctccgtacccgtccacggggtactgcttgttgtggctcatgtgagggagcgccagcggcggcggcggcggcggcttcgtcggcgaccggtcggtcacgcgtaggtgctggaaccgatctgcacctgcacggcccggggagaaggcgtggtgtctgtcagggaagagaggaaaaaaagtgcaccccccatttggaattgaatgatctggcgaggcaggtggccgattattaattccagatgatgggccacgctgatgcttccacacctcaaaagtcttcgcgaattacgaggttgtgcagaaagggagacgctgcaatgcaaccgtgtgaagaagaccaaaaaggctgcgctcgcttttactaatctcagcagctagcagcccggttgacgccggtgagaacgaaggaaacccatggtagaactcgaacgagatggacgcataagagagatgcgtaccggaagatgagcagccagggaagatctcggagcccttgagcacgtactccacgccgttcgacgggtagatcacgtcgttctccgaca

SEQ ID NO: 6651 - DNA, 775 bp, Zea mays
  unsure (1)..(775): unsure at all n locations
cacccctaccaaatcgagcacagctcagaagaggcaggggaggatcactctcctaccagccaaaagtcacctcgacactggacgtgatacaagagacacaaaacatgggccagaagacaccatgcatcagacagttctgagaacttattcaacagcaaaagtcatcttcggatttgttggcttcctcgttccaccatcctttttggcatcttttcctgtagaacagaccacgaatccaaccaaaagaagcaagcataaatcacatcagtagggtcataaaagaccttgttgttaaagcacacatcattcctaaacttccaaatggcccagagaatggctcctatgcctagaacaatcaaattcctcgtggttttcttataaatgttcatccagtcctcaaaaagagaatccaggttttgaggacatctcttcacatccagggcaacctgaagaactctccacacaaaagtggccactgggcaattgagaaaaaggtgattggtggattccaaaacaccacagaaacaacaatcagtcaacccaggccaattccttttttcaggttttctttggagataatttttaatcttcagaacaagccacaggaaaacttaaatttttgaggcattcttattttccaaagaaacttanaaggaactttagtatgacgtcaaatagatatacttggctaataattttgaagaatttaatgattattatttggtatcataaatgctattatttgattatataaaatttgggcaaacttatgatg

SEQ ID NO: 6652 - DNA, 759 bp, Zea mays
aggagcgctggccaagggccatgtagatgccagccgccaccgccgcaaacgtcatttccatttgtataagcgtagaggagggtgaccccaacacgaacagtggcggtagcagtatgattcagaagaggtgggcgatgccaacaaaagcagcgtcaacacttccgcgggtttgtagtgggctctgctttttccggtttgcttggctggctaaacaataatggtccacaaataattggctggctgaacaatgatggtccatgactccacaaacaattgtctggtgggcaacaacagccacaaatagttattttgcagggcggactggcaggttaaggttacgttaataacccgccctgccagcattcctaactgtgtaccaggcattgacttatgctattgcacaaattctgtatggtcactttttccagtgtctgtgtggtagttcagtgcatagtcacaaagttcccgcatcgatagggttgaggaacgaggtcgaggaacgtggtatgctacttgcgagaggcttttacatggtgggaacgaaaatgaccctgcgtatccaggtcgaggaggtcggggacgatttttccgggtctagggtcgctaccactgtacctgtttcttgtgactatgcttcagtgtgggaagtctcaaggcatcattgattctggcaaaataatacagaaaatggttagtgaatatggtgaggaacgttaacatctttttgtttgataatttctttcatataggactaatctt

SEQ ID NO: 6653 - DNA, 814 bp, Zea mays
cccgccgatcctctagagtcgacctgcagtccgtcatgagcaggtggctgccgctggcagatgctgtgatggatatggtggtggagtgcacgcctgatcctgttgctgctcaaggggtcagggttgcaaggcttatgccaaagagggaggttactccagaagatgctgctggatgccctgaggttgtttcggaggcagagagggtgcggaggtgtgttgaggcctgtgatgtgagtgctgatgcgccagtggtagtttatgtgtcaaagatgtttgctgtgccatctaagatgttgccattgaagggagtgtatggggaactattgaaccaccaaagtaccagtgagtcagaggagtgctttatggcatttgcgagggtcttcagtggcgtccttcatgcagggcagaaggtatttgtgctatcaccattgtatgatccagtaaaaggggatacggttcagaagcatgtgcaggaggtggagctgcaatacttgtatgagatgctaggacaaggcctgaagccagttgccagcgtgggtgcagggaatgtggttgcaatccagggtcttgggcagcatatattgaagagcgccacattgtcgtccaccaagaattgctggcccttctcgagcatgatgttccaggcgtctccgatgcttaaggttgcaattgagccctcaaatccagctgatttaggagctcttgttaaagggcttaggcttcttaaccgggcagaccccatttgttgagtatacagttttcgcagagggggcgagcatgtccttgctgctgctggtgagatacatttggagcg

SEQ ID NO: 6654 - DNA, 820 bp, Zea mays
atcactatctgttatttgattttcctggtcaagtggaattgttcttccttcactcaaatgcaagaagtgttattaataaactcatcaaaaagatggacttgagggtagagtgtgctctttgtcctatttatatcattctaatgctaatgaactagattgttcaatgttttttcctgtattctacagcttactgctgttcaccttattgatgcccatttatgctgtgatcctggaaagtatgtcagtgctttgcttctttcactatcaacgatgctacacttggaattgccacatatcaatgtcttgtcaaagattgacctcattgagaactatggaaatttaggtatttggaaccttccatcttcctgtcatttgagcatttattgttgttcatggaattggatgttcacaccatattctattgatcaatactcctatgtatttactgtagtatctattcatcttcttgattggcagcattcaaccttgacttctacactgatgtccaagatctttcttatttgcaatatcatcttgagcaggatccccgctcagccaagtacaggtgaatttctgaacacaattgttacagcaacagctatgagtatgtgtactttgctcaaaatttgaacttgatgaatttacatgaattgttaacatgtttccaattcacttgaccaaatactgaaccaaacgcagacatgcagtgcccactttctagtttcttgctcccttttgagttcaggtttatctgcaatgtacctagataaaaatcttgcatacttgcagtaaccctgttccacaggagaattaatgagtt

SEQ ID NO: 6655 - DNA, 790 bp, Zea mays
aactggccggcatccaacaaagaaaggtactagctcaagtcagctagtgctagtctccaccgtacagggatgccagaaatttggctgaaatccttgctgggttaacccttttacgcagacccaaattcggagagcaggcttttcctgctgaacctgaacatctacgtcccgcgtgacgaacgctttgggcatctcaagatgtcggacttccttgggtactcgctgaaggcgatcatcgaggctgttcttccaacactggggactttcgtcgatgacacgcccaaggagttcgattcgtttgaagatatcctcgggctctacgagctgggtccagaggcacccaacaacccactgatagcagagatcaggaagaagatccccagcgagttccttcgaagcattctgcccaacggtagccatgaccacccgctaaagatgccccttccaaatgtcatcaaatcaggtaaacccaaatttcttttttttttggaatctttctatgttaaacggccgctaaaggtgtttgaactagaaaaaagatttaccatggctaaggctgaatcttggttggtacaaaaccagatgtgttaaaaaaggctccggagtttaagtttggctggaggactgacgaagagttcgcgagagagacacttgcaggcgtgaacccagtaatcatcaaacgcctgacggttagcgttcttgcatcatttagattggcaaaaatacacgttgccccatatattaactgagtacagagccttaaaagccttttttttatatatatatttcg

SEQ ID NO: 6656 - DNA, 769 bp, Zea mays
tttgagccaatcgattagcaagaaccttagttgttagttttgccatgctgtgcactaagttgataggtctgaaatccttgacctcctcagctccctccctcttgggaataagagtaaccaatgttgtatttattgtatcaaaatgagcaaattttctcccccagatttctgaaattaccgccatcacatcttttataattgaccaatatgtcttgtagaatttacctatgaatccatctggaccaggcttacttgaccctaaagaaatattctaatcaataacttatctctttccttatcttaactaaccaaatctttccttatcctaagtaaccaaatctttctttattctaacaaaccaaaccaatctaaattattcttttcttattattttctcatcctaatggatccactagtcataacactactccgctccttcaagacaactcgccctcgagctgtgctgatggtcatggctgcaaatgtcattgtttctatggcgacaaggtggcatgtgtacaaccccctagatcccatggcgtaatctggtgggtgtcgagacctgagagcaatcgcaacagcgaccagtggagaccagtgatgaaatgcaatggcactatgcaaggcacgcctgtaaggaacaccatgcctttttccccatcggatgcctactagtttgcgtcacacccgggaagtccctaatgttgagatgccatagggaccaaagagttgactcaggggccgaaagaggagttgccctagagaccta

SEQ ID NO: 6657 - DNA, 821 bp, Zea mays
cttcctggctcacaccctctgcatcagagatgattagaagggctttcattgctttttttatggctctggcacctaggtcttgcatattgaactccacccccacacgaacaacccggcaacttcttcttggcacaaacccatccaatgatgatgaaggggcttaggggcaacacatctactgctgtttggagctgccagtaaacatgctggctgtctttttattttttgaagaattcttcctttcttgattcttcaggtctggcagcgtctgcttcaagcatcttatctggtccaggtcgttcagaattgatcacagaccccataatcctctctaaaaggtgagtggtttcctgatttgcgatgtgaaaaactgattgatcttgttaagtgtcttgaatttgctgtgtaacatggatgacaggaatctggaaaaatatggggtaggaggtgattccaaattgaactagagaaatatgtagactttcaggaatttattctgctccccgtttggttgagattacatatttttggcagcgaatctggtttagagagctgaaccaaacacaccttcaatatctcactgatttttatttaaataatttttttccacaagaactgcttttggatcctcggacatggaagaactctcagtaggagacagaccagtagagaccgcaatagatgaaggcgttaatgtatctcccaatcacattctttcaagcaagagaaccttgtttcttggataaggatcagcttgccagattagaagtatcacaagttgcaaaacctgcacctaaacaagtagtagatgctgcaaatga

SEQ ID NO: 6658 - DNA, 573 bp, Zea mays
atcctggtaagtgtggatctcttgacaaatgacaaactgacacaaatcggaatgtaaagaggtcccctctgttattgcatttacctttaacatctgtaccaagtggagcaatgcatatagttagcaatgttgttctgcatccttcctattatggtatcatggtaggttcttgacaggtctccatggtttgtacaacttgatccagcttgtgatgcagtggttgtcggggggacttgtgttgattctctgtattgtgaagcgaggagaattctccaggcaggttgtcacaaagttgggaagcagcttctcaacagtggcttttgtaattgttgtggtgagttgaacaattttttcttcctttacttactgaatatgtgtccgcttcattgaagttcatatattttttggtaaactaaaacaatgctctttgaaaaaggttacaagattggatgttctaattttttgcaggcaacttgcaccattttagcaatggttgcaaccgtaccacttgcccagcttttatgttttcatgtccttcttgtaaaaaaggtaagttgctcttgaggttcaacg

SEQ ID NO: 6659 - DNA, 843 bp, Zea mays
ttgcatgcctgcagtgcgctacctcgttgaggttgccgagatggccgatcctgaagaccttcccggcgaccttgttgaggccgaggccgaggctgaggttgtaccgcttccacgcgtgcctgacgacctcggcgctgtcgatgttgggcggcacgacgacggcggtgacggtgtcgctgaaccactcctccttctggcagcagttgctgagcccccacgcctcgacggcgagcctggtggctgtcccaaggcggttgtgcctcctcacgacgttgtccagcccttcctcgaagatgaggtcgagcgcggtgcggaggccgtagaggagctggatggagggcgtgtagggccagtacgtgcccatgtcgtagaacctgaggtagtccttccagtcgaagaagacgcgcacggacctggccgtcttgctggcctccagcgccctggggctggcgcacacgatgcccatccccgtcggcatcgacagcgccttctgcgagcccgtgagcgccacgtccacgccccactcgtccatgcggaagtccagcgcgcagatggacgacacgccgtccaccagcagcagcgccgggtgcgcgtgcttgtccagcagcgcgcgcactgcggccaggtcgttggtgacgcccgtggccgtctcgttgtgcacgatggccacggccttgatggcgtgcccgcggcgcgtcgtcgcggagcctgcgctccagcgcgggccaggtcggcggccctggccccactcgctcttcaccgcgtccacgtcgaaatcccaggcgccgctgctggtcgatccacagcaggctgaactgccccgatgaggaaaggacacgaccc

SEQ ID NO: 6660 - DNA, 828 bp, Zea mays
ttttgcatgcctgcaggcaactcgagctccttgacatatataataattccttcaccgggccactcccagaccaggtggggaacctgtcaacatatctaattgaatttagagcaaatgcaaacaagctatccggtgagcttccgtcgtcattgtcaaacttaagcagccttgttagtatctattttcacgacaacctactcacaggagccataccagaatccatcacacgtttacaaaatctcatcctgtttgatgtcgccagcaaccaaatgtcaggtcgtctcccaacacaaattggcaagctcaagagcctacaacaattctacaccaatggaaacaaattctatggccccatacctgacagcatcggcaaccttacgtcgatagaatacatctacttgtccgataatcagttaaattcaacagtaccatctagcttgttccagcttcccaaacttatctatctggatctttctcataattccctcactggttcactaccggtcgacgttagtgggctaaaacaagtggattttgttgacttatcttccaattatttgtttggaagcatcccagagtcatttggaacacttaagatgctcacttacctagatctatcattcaactcattggagggctcaatcccaggtttgtttcaggagctagaaagcttggcatcattgaacctctcctccaactctctctctggtacaattcctcagttccttgccaatttcacctacttgacagacttgaatctgtctttcaatcgactagaaggaaaggtacccagagggaggtgttttctcccgcatcaccttgcaattt

SEQ ID NO: 6661 - DNA, 788 bp, Zea mays
tcaatgatgggcaaatcagtattaagttcttgtatcaaaggatgaggagcaattggttgtctaggaccattgaactcagaagtacgagcaaatcccaggaacagtttcttggcccaaggatcatacatctcatcggtgaacttataggcaaaatttcgatcagcacaccaaacatttatctggtgaaggggaaagggctgttaatgaacactgacaatatatgtgataaaaacagatagatgtaaaagaacaactcttacaatacttggaggttccaaactcttttaacatttagagcaaaaaatgtactcagatgactatagacactgatggcctcatgcaatgcaatatacaaaagaaacccacatggacaagacaaatggactcacaggtggtgctctagctggcggaataaaagcatatgctgaacgaagaagcctaatgtttgaagcgagcctgtcgcgatgagaaagcaccagtgcttcatatgggccatcaattggcccagtcccaatctttgtcctaagcaaactgggcttgacctttgtagaagaaagcaacaaacgggcaactgcacgaacttttgtggaatcattctgactggactggatgccggtatcttctgaatcaaggaattcatccagaatttcagcagtgtagttcatattccattgcattactgaaaagactagtctctcaaacaatgaagcagtagccaggaaggaagcttcaactgggcacagatttgacaaacgtgtaaagccaaatgcaccagatgatagaagaga

SEQ ID NO: 6662 - DNA, 858 bp, Zea mays
cggtacccgggtatcctgtagagccgacctgcaggtatcatgcatgcatgcatattactgaatataatttaatttgcgaataactacattaattgctagcttcttgcctgtggagggccattctcattggtttcaaggcggtactcgtgcatgatccagtcggacttgtggccattgggagctctgcccttgtagtacaccagcgtcttcctcatgcccaccaactgccgctgcttgttggcgtagatgggcttgtctctgccggttgccttccagaacccggcggcagtggcgcggttggtccgggtgcccgtcgggtacttcttgtccttgtggctgaagaagtaccactcgttctgctcctcctcaccagggcctcccagtctgcacttgtctgctaataataataataataatgtgcatgtgtcgtaggaggatgtgatataccatactctgaaagaatgtatatagcagtagtgcctccgttctcgaatatttgtctctcgctagtttattttcgaactaaactaaccacgacaaataaaaaagaacggagaagcgctactgctatatatatagcaagagatatatgtactgatcgagaccttggagatcccatggctctatcttgtaaagatcgacatctttgatgacattgaggtcgatccttcttgaggccaccttcttcctgaggtagtagtccaccacctcttcgtctgtgggatggaaccgaaagcctggaggaaccaactgctgctgctgctgctgtgtctgcgctgctgcttgtgtgctggttatgcccatctagctagctagaacaacctgagaatgcttcccaccatgtatatatatgtgtgt

SEQ ID NO: 6663 - DNA, 743 bp, Zea mays
actctccctcacgactcgttgaatcaccaagtattgatcaccattgctagagtcgttccctatcgcctggcggcgacacgatgatgctgcatgactgcaagcacgacgccaacaacgttagcagctctagtaccagttgtaggcttctactcaccggcgtgccttgcctgacacgaagaagatgatccctggatcactctaacgatcacaaaactcaacacgaatactaaaaggacacaatgagtttttggcgctgccaaactacaccgctatttaagtgtagtctattgatctgtttatatacacaattacaaaagctcgtagccacaaatcaggcaccaatcaacaatcaattagctaagaaaagaaactatttaatcagctatcaattagctaagaaaggaaagtaaccaactcagctatcaattagttaggaaaggatactaaccaatcacctaagaagggaactagaaactgagttggattatgcaacaacgtctaattgcttgaattacaactatagagtgtaggactagtgtttatatatatatatatataataacttaccctctttatatatcattcattgtctagtggttatccataaggctgttttgcagtgtctttttgaagattagtaaaccattcgctttttgtttctttggataattccaggttcttcactatctaggcttagatcatgttggtcatataggtgggccgccggaggtaaacatctcatt

SEQ ID NO: 6664 - DNA, 1016 bp, Zea mays
tctgttcatgcccagcagaattaacgatgcgacaatacagtgtgaatggctagctgagatgatggtttattcttgttgttgggggaagccatttcgttggtttaaaaaaattgctttccttagggcagcaaaatcaaatatgcggtgatatgcaagataaattgaagtgataacttaatctatttgtaggaggaaagccatggattgattaagaggatttgctttgtgttagatgattatctttgctgcacctacattatccataaggtattaaggtgcagttcagataggagcaagatgacgatagcagattggttgcctgtgcagttcccttgtttgataaatactagtcatgctgttggaccaagggaaatgacttcacactattttattgattctgatctgatgcatccttagtgtagcactttagaaggttcattaggctgtaatatttttgcatgcctcaagaaaatcacttttctatctagagaattaagtttaggtgaagacatttttttatcttcgaccatcatgtgaagaatagtgatattttagaaagcatgtcgtcaaccatttaatatgttgataccatttttttataaaaaaagtgacttagcatgccgtaaatttgtaaaaagaagaacatttgcataatactccctccatttttttatttgacgttttgcagttcatttttacattatttggcgtcaaataaaaaaggatggaggtagtacaatatactacaattgaaactaatatgttggaaatcaggtactgtgcctgcatccaaatcaccatgtttttttacaagaggaattaataggtttgtttttaaacaggtctgttcaagtttatcagcattttttagataaaggaagtgtttcatcaacatgctcagatcttttgtttagaaagagcaaaataacatctataatatgccaatgcttgcaggtagaatgatatttggccacataacgtgcacatcccgtgtatgtttcttggttgtattagct

SEQ ID NO: 6665 - DNA, 824 bp, Zea mays
tctaagtgcgtcccaaatctctggaagagatacaaagttagtattagtgtggaaaaaaaacaccgcatcaaacaattctttaactattttattgcacttaattttccgttatcatggtagcagaattgggggaggagcttcgtttcgtaaaaaaaatgattgtatctagcgtgttcagtgtgtgccatcggcagaagtgcagaacataaatatttatgtaaacaataccatacacttcagtaaattcatgacagttgcacaacatctacatgttctaaacctttttccgcataatgcgctagtttacaagtatacttatgagaaatttgcatggtggtcacaaatccaaaaatgtcagaaagctgtccattccctgagtggcataggagatgccaatttctactctagttacatgttcagctatgaacttatggtacatctatatatgtatttcttttccttttaatacgacagttgctatgtcaaatctaacaccaaatataggggtgaactgccaagacagcaaaaccaacaatattttggcgcgaattcaaagtgttatgccgccacatttatttagcgaagctcagtcaaaacagaatggaccatcatctcaggaggggggaaaaagagtggtccaacatgcagcataatgcatcacagaacatgcagcataaatgcgtcacagattcactaataaatgccgacagtagaaaactgaagctgccatcagtaaatatgcaatgtacctttctgtccaccatagtgaggagcagtgtcccaaaattcatcacgcatctgtctgagttgtgccagcgttattg

SEQ ID NO: 6666 - DNA, 766 bp, Zea mays
ttattggcaacaacactgacagtttcattcaccttctggtcatagcccccatccctcatctgtattccagacaagcaccatcatcagacagaaaaaaaacagtaatgaaaaacatatgggttacaaaatttctaacataaaatatgctttgatgtagtctaataccaacttagattgttgatcaaggagcaatgacatgtgataaagtttgttcaacgaagttcattatacaaaacgaagaatggatgtttagagttgatagaagaatattgcatgcaaataaaatgcagattcctaaaatgtaatacaaaaacattcctgagcatggccttgtctcaaagtgcagtgttgttgcaataacattcaaacaagaagtgtttgagaacaacggaataaaaaaaggagctatatgagctcggtgaaccccaaagaggggttcaaactccatagccaacgcataactagacccgggaatcaattgttgtgcaggagaataggtaaataagtattactgtatcagtcacctttgattggatttcttttgtgccaacttggacaacactggcagcagactgggcagcagatgctgcaactaatgaaaggcgtccaaatccctgaaaaaatgttatggtaagcaactatatcaaaccaatatacaattgcataacaaggtataatgctggactcactacacctaactaaatatttcacgtggccaaagtaagctgagggcaataatgcatcaactgctattcaactacaatat

SEQ ID NO: 6667 - DNA, 832 bp, Zea mays
aggtagtttgcgcatatgtctgaattctgatgcctatgttcatgtagcatatttcatggcaaagcttgtaaaaaataaacaaaatacagtaatgtgtgagccccttgtgcagattttaggttccacaatttcatacaagcatggtatgttgctaggccaaactagaaagcaaggggaaaacttgaattggctgatgtacaacaatttaatagaaaaactaaatgtccaatacatactttccacagatataacaacattcctgtctcgagctcaatctctcttaaagaggaaatggcaatgaactaggcaatacaatatacatataaaatattcataccaatgaactatagcagtaaagtgactccatatttaattaattgacaaagatagcaaggtgcttaccatgaaaaagccaccttgaaatactgcaaaagcaacaccagttgtaactgcatttgctactggattaggagttcccattccgctcactatggagaaaagagcaccagaaccgaaagcagctgccatgctatacaaacatgacattatcaaacataaaggaacactctaattaataaactaggatttttttaagccaaggattaactacaattaacatattgaatcaagataccatttttgcaccaaataggcaaaagaaatataagaattaccagctttgattcagatatatgaaggtattaagatgtgcacatcttgacattagtgagattaaatcaaacacattgagtactttagtgaactgtgaacgctccctgaaatgtatggaaagataaaataaaattatgaacccccacctgccctggatatc

SEQ ID NO: 6668 - DNA, 747 bp, Zea mays
cgccacttcgctcacttgtactccaggatcatgttgttctctggggccaggccaacacaggccctcatgatgttctccagcatcgccctctgctttgccagagcgttcaccaccggtgtgccagggggaacctgtcgttcaggttttgtattgtaagagaagattagcggctggattggagcaagatacggtgcagcgatgccagaattaatgcaggcgaaaaggcttaccagtggtgccttggtgaggtagcttaggatggtggccaccgggtgaaaggagtggaacttgtcttgcataatgagagagagtagatgatggatgctgaagtgctgaagcgctgaatcacctagcatgcttcgggttattcacttggtgggctcttaccgttccctcaggttttagctggatcctggtgctgagctcagccaggagcaccagatcaaggatgatcggtgcggcgaggagcgagtcctcgcaggtgttgtgcagcacgatggtgctcttgccgcccatgaagatctctgatgtgtactcgtccatagccctcttactgtctcccacgtacggcacgtactgcatgcagcaaaggagtggcaagtttcaatgtaaatctacgtttaaactgctgcacgtgccagctttttacagaggtggaagatcagctaacataccttgatgacaacaacatgatcgggatgctcgccgggcccatagagaatggcattgcttgagaccatgtcatcc

SEQ ID NO: 6669 - DNA, 827 bp, Zea mays
cagtcttgcatgcctgcagaagcagctcaggccctacatggagtccatggtgccacttcccggtgtctatgatccggacttcatcgccgctaaccagggctctcgtgccaacaatgtcatcaagggcaccaagaaagaacaggtggagcagatcatcaaagatatcaggtattcggacatggatgctaacacacattggtgcaattaaagaagtgccctcagtgcagcctaaaacaaagaaatactgctatgaatttagtacatacacatacatatcaaaacatactgtttcactggtgcatatagaagtctacatggtatgttaaacaatttgacattgtgtatacagtaaccaaccgctcacacttccatgaggactccacaaagaactgaaagtacttaaaggttaagcaactatcataattaatgatgtattttggtggacatggtttggggatctagattaacatgattgaagcaacatggctcactggtatacgtaatccattatagaagctatggcttatatgtagccaatgaaacagggagtttaaggagaagaacaaagtggacaaggtagttgtgctgtggactgcaaacactgaaaggtacagcaatgtatgtgctggtctcaacgacacaatggagaatctgctggcatctgtggacaagaacgaggcggagatctcgccatcaacactatatgccattgcctgtgtcacggagggggtgccgttcatcaatgggagccccccataacacttttgggccctggggggttaatttggtgtgatttgcaaaactttatgggtgttgcatttctggtt

SEQ ID NO: 6670 - DNA, 816 bp, Zea mays
gcatccctgcagttagcttgcatgtttgcatcattgacaactcaagcttgcatgcagccctgacaagatcttcctccaataatcttgcatcttttaccttccacaccacaaagctgtaaagatacgaacaccatgccttgtcaaaattagccaactgtgccctgaacttcctctggccagtaacaccagatgactgccctggtccatcaagaattaccttaatcaacagctcgaactccttgataaagtttgctgccgactcgataagctgtttctcccgctcaccttgcccacttaaaacagcactgggatgagccagtatcatgtaagcacagagcaccaccctcagtgagtatctgggcaatttgatgcttgcctcagaacttttagctggtctttttaccactgcccgagtttttccttctctgctaggaggagccctcctccttgggggagaaccaaggcgtttcagtagatgatcaacattttctactgatgaagatgctactgaatgagaaatgacaaggcgtttctccaatcggtcgagtaatgccttcgtgctccgaagaactacaggagattccattgacatggctaatttttcaaaaggcatatttttcacagacttctcattaatccccaaggcatcataagcttgagccaaagcaaatgttgtcttcctggactttcacaaatattctgcagtatctgaagtacaaaaaaaatgacaaaaatagtgatgataattcctctcatcagacaagaaccagaaagatgtttcaaaatatgcacttgttgagagccatattagtacct

SEQ ID NO: 6671 - DNA, 808 bp, Zea mays
aacataatttcatgtactgttcgtacagagattatctttagagagaatagtaagtactaccttcgttcttgaatatttatcatctgctagtttaattttaaactaaaacgtgataaataaaaaaaacgaagagggtatcttctatcttgtaataccaaccacgtgaagaccttcactccacagttgttttgcctttttagattatattaaaactttgcccatacaaaactgtttcttagggaaatttccagatttatctcactcgcaattaccaactggccatcgttattttttagaacgatatcttgcaatcttctaagctgactctgtaaatcttcacgtagccatctcctaaaaatgaggctctagtttttatatttcatggcttcaactgaacaatcacggtcctcgttttttttaaaaaaaatgagaaaagtgtgtctttaaagtaacctatagccacaccatctagtatgccaaaaaaatggtggatttttcattggccgacaccgtagacctgctgcttaagtaaatatatctggtttggggttaattagaagtatgccactccaaatttaaagagttataaagtagtttattttcatgtcgctcaatgacatcaaaatgaattacctatctaattttataaaaacagggtgacaagtatgtaattaatcttttttttcttagctaggtttagtgatcttagtccatctaatcaaatgatatttccctcttccaaaaaaaacgctttctagcactatccatcttttccatagatgtcgaaggtaaaaggcatatcgccata

SEQ ID NO: 6672 - DNA, 872 bp, Zea mays
gtcgacctgcagtcagcagcaaatctcaggtgaggaggcttcgtggtcgatgcaagtgcagcaacaacaacaatatatattccattcattcattcatatgatcaggcgtgacctctgttttttgtctatacatggatggatttggttgtgggtggagctgaaacggtttaaggctcttaacaatgtgaaaatggttggagggtgaaaaactgaccgttggccgttgcatcgcacaagtcaagaacagtctagtgattaaaaaagagagtcaagaacagtagaacactgttgcattgacttccagtcaggaacaaaattcttgctctaccatcaacagtacttcgtttggcacagtactatgcaactaagtttgttacattctttcgactccagtcatgaattcgtgtagaagatgacacgcggatggttccaacttgtactgtacaggatgttttgccaacaggggcagaaattaagatgctacagcttgcgatctgaatcgaaggggaaggtgcaggaatgaaagtgcgatctcaatggaactggctgagcatctcagtcggtacaagtacaacatctgaagctgttttggattttggaactcggaaagggtgattttcttcccggttcttaccggacatcgatgaggcggccggtttgccagagcaattgcagcatcgttgcatacgctcagatcgcagttcgtcggctcctattcctccgttcgtgctttcagccaaaccgttactgagaacaactcaagggacctgcgtcctctttcccagcaccctctgcgttctgccgggtatggcaagttcggcgctgaaaaaattttccaacggacggcccaacggcagaaaggacatcatacg

SEQ ID NO: 6673 - DNA, 1300 bp, Zea mays
tttgcatgcctgcagcaaggcggcggaggcgacatggtgatgccggggttccggttccaccccacggaggaggagctcatcgacttctacctccgccgtagggtggagggcaagcgtttcaacatcgagctcatcaacctcgtcgacctctaccgctacgacccatgggatctccctggtaaccataagccgccgctgccgctaagcatgtgaaccactgctagctagctcctgctcataaggggatctgctggcatatgtgatttcatgcatgtgactttgttttcttttggtttccatctcgtgtgagcctttatatctagcctgctttttgctctcttgctttacttttcgtgcatgcgatgatggtggcggtggtgtcatggatggacgatgctcaccatctcacgctcttcataatacgaacaaccacgaacagctctggcctccattggggacaaggagtggtacttctacgtgccgagagaccgcaagtaccgcaacggcgaccgccccaaccgggtgacgccgtcgggctactggaaggccacgggggccgaccggacggtgtacgtcgaggtcaagcggccgatcgggctcaagaagacgctggtattctacgtggggaaggcgcccaagggacttaggagcagctggatcatgaacgagtatcgccttccttccggcgaggctgaccgctaccaaaaggtaggaattaaaacctgtcgtttattagcttattagcttttaattttccgtgcatgcatctgctaacaagcagtatatataaataaagatgatttcttttttgagaaattttaactctatttgtttcccttaattctatctttcctttcggcgatggatatgatcctctcgctctgcatagctgcttcagttctcttatctgccgtttccctcaattattgatttgagtcgtttttctttttagttctttgagagagatgttggcgcaaagctagcacacaaagtttgaaagatgcctctactctactgcttaaaatccccccacactttccagagacgacgaagttttatttctgaaacgaagaaatccccacttttggaggactagcttgggggttctaaggtttttttttaatggatccctagccttcttgtttcgtgaatcggcccgccttgttcgtaaccgtggaggagggtgtcctattataataatgttaataataattatgaataatatttcccatactaatgacaattattattactgacaccttgctatcagagacattctgttgtcaagtttgcagattac

SEQ ID NO: 6674 - DNA, 793 bp, Zea mays
cagcttgcatgcctgcagcatgagtgtcactcgtcaataactcagtgtgtggcaagatatcaagattctcttagacgtgtcaagttgtggtagagagtttgaggttctaaccttaggcaagtgtgataaaaaacatgtagcaatttgtggcactttaggcatgcaaccaaacatcggaattgttgtcaaagtcatgttgtaaatattgaggtgctgtctggttcacatatttataacttgatgtgtaattgataacgttacatcatgtttgtttaggtctacccgtaatcagtaccacactagaaattaatactggtctattcaaacttgttaccactaataatcgattgtaaatcattaccgttgctatttacgttacattttatgaaccaaaaaacatatgagttactgcctttcaactttccaagcatattaaaagacacaccacctaaagaacaagtgttatgttttgaaccgggtctggcgccctcgggcgtaaaggctaaaaacaatctttttagagtttgttcgttttaattttaatccatgcggattgagcaagattgagtgtgtttaaattcctgacaagttgattattttataatttctttcgatctcatttgaatggggtaaccaaacaatgctcgagtttaggaaaagaaaggactctcttcatcagtttcgtacatgtgaagcacgtagatctatttttttcctcttgctagtcgtctatcattgaactgttacccgacacatgagccatgagaaaccacaaaaaacgcagcgttctcac

SEQ ID NO: 6675 - DNA, 774 bp, Zea mays
cggggccgcgcggctgggcccggcgacggaggcgagcctggacaaatccatcctcccctgtcctgtatcgtagcgggcggagcacgagtacaatcggaaacagcgcaaatcaaagcctgggaaaaggagaggtcgggacgagagaaacaaaagcggattacagagacagagacggagacggaggagtgagtgctcacgtactggttggtggatgtatgcggattgggtcagagggcgaccggaccggaggaagggaggcctgtcacgggagaagcaccgacgacgacgacgacgacgaggaggaggaggaggggcctcggcctcattccattcctacgacgggacggcgcgaggggggagtgcgactgtgggagctggtaggtgacctcacctcgctcgctcgccctggcgttggcgttttgtccgaagagcgagttttgtttcggcaacggggcggcggaggggacgaggcaaaagccaactgcgcccaacttgtcaagccaaacttgcgccttcccgcaccgcaacaaccctgggctgggctttgaaccgcagattttttttaaaaaaaaaaatgttgttcgggtttctgctcctcggatagtggtatattcctcgctagtgctacttctaccccactgattcagccacgggacccgccacgatagggagattaaaataaaattaaaaaggagatagagagacagctcgtttttaagctgtcgttcatcaggaaaaaaaggaaaagtgaaaaaaaagctattacccaaccct

SEQ ID NO: 6676 - DNA, 751 bp, Zea mays
agcttgcatgcctgcaggggctcggggtgaacccggccgtgcacgaggtcgcggacgagtcggcgctcgcggggctcgtcccggccggcgccggcgccgccgccggcgcgctgcccgcggtgttcgtcgggggcaggctcctgggcgggctcgaccggctcatggccgtccacatctccggcgagctcgtgcccatcctgaagaaggccggtgccctctggctctagtttctattacgtattaatcaatccgtacgtcggcgtgtttctttccttcctgcctcttctgtcttctctcagaaacgatggcgccgtggtttcgcccgtggccgttggatcgagcatcacaacaccacaccgcggctgatgcatgatatgagtttggaaataggactttggtttcttttttatctgtttatttatttaggcgaagcaaaaaaaaaagaatggtgagaattcgaaccacagagtaattttattgtccgctaagcgtgtgcgtgcgatgacaagtggtcgcttcgcttcttccatcatgtgaatacggaagacgggcgagagacagaggggacggacgtttgtttgctgccggcatctgtacaatcctttccgtttcagattttaatgagggatgagctgtccagtttcccatcttctcctgtggtctggactctggactctggaggaccatttgcgtgcatcacctgatagtatatagtactactacttcctaccgttcattatttgccgcccgt

SEQ ID NO: 6677 - DNA, 782 bp, Zea mays
cggtagtagccgttgtcgaacgcgcggggcgtcacggcgtccagcatcgcgaacgccgacgggccgtagttcagcgggcacgtccgccgcatctgccgcaggaagtagaggttcatcggcgggccggcggcggcgcccttgaacgggtacagccgccgcacgaacttgtcgcagtgcgtcaccccgatcgtgtgcccacctgtgtcgtgtcatgtcatgtcaggtgcaagcggcagcgcgtcagcgacagagaggagaggcgaggcgcggaatgatgagatgagccgcgcgcgcgcgtccgtccggcgttccgcgaccgcaaccgcatggcaggccggccgtacctgagagcgcgatcatgtcgatctgcgtgagcccgttggcggcgaagagcttgttgagctggtccaggtcgaagccggcgcccgggaggctgtgcttcaccgcggcacgcgtgcctaccttgccgtccagccgccccagctccacctggtagtacggcccgcccgtctgcaccaccaatcccaaccatcacatcatcgtcatcatcatcatcatcattggtaataagtagttgcgttcatgcagtgaaatcctcttttcttttcttcttcttttttacacgcagagcagtcagagaagaaaactccggcggagttgctcttgcttgctcagcacaataactgatgagagcccgtatccgtatggtggcccgtatgtctagctcagtaatcttctacgagcacggaggtagccgcacagcacaggcaatggcagcgcgg

SEQ ID NO: 6678 - DNA, 884 bp, Zea mays
accgccgtgcgtctgggcagtatgctttgcttgccgctgtttgtttgcctactcctcctatcctaatcctaccgtcgtgtggtcggctgccgagtagaagtacaaagtaaacgcaagcagctggtgcagcgcacatggcgtatttggtgcggtgggccgcgggacgcgtttggtggtccggacgcggctccgtgcgcctgtcgatcccgccgctttgtcgcttctactacccgccctcccatgctttgctccagcgttttcgagagcgactgggcggtcgcgcgacaagaccaggttgtgctctgcctgcttgcctgcctgagaaaaaccctgccattggaaattcctctgtgcctgactgcctgctactgtaaaaggtactcctctcctagtacatacacctgcacaacagtgtgaccaggcggatagaatccttttagccttgtcagttgtcacgccgccctgcaaagggagtgcacgcccctttttgccatttccccgtccgaggaacaaggcacggaagtcttctgcactggtacatccgattgccgcgcggatttggccgagaccgagaggttcgatgtctccgctgccgcgtgctgcgctgtactatactccctctttgcggctgttcccggttcgcgctcatcactgcttacgcacctggttctccatttggcagcatggcatcacgtgtttttctttgttgggacggaaaataatacccactagcacagtactcacgcaagaattcaacggacggagcaggggaagaaccgtggagtcgtccttcctctctccctggtatacactagctagtaaaataaaggcaaccgagcatagcgtcgtccctgattcgtcagcctaagggggtgtttgggagg

SEQ ID NO: 6679 - DNA, 820 bp, Zea mays
cttgcatgcctgcagtttcttactagtagtacaaattatacatcactagtttacgcaagagcttgctcaaaaagagagtacatgggattactactcctccctatacatcgatcgatacaagtacaaggcgcgcgcgcagcggcgtgccatgccggttcaagcgcgcggccggccatgtgcgcgcgtgttgggcccgggcacatcaaaagctcggtacgacgccgtagccgaagtcgagcacatatgacatcggcacggcggcctcggcctcggcctcagcgtcgtcggcgtcggcgtccccgtcgtggtcagcacgcttggcaaaccggcccttgattcgcggccgcgtctcggcgtaggccttccgggacgcgtaccggatggtcttctcgaagcgcctgttcttccttttctcacggtaccgcatcaggcgcgcctccctgctctcccccatcagcggcaccggcctcaccgcagccaagtctccccgctccggcaccacctccacgtccgcggatggcacctgcatacggaaccgatcgagtccacaacgatacgtcaggacgagcacatggagtgtctaacggatgtgcgtcccgaaagttgggagcttggttggggtcctacgctgtggctctggggagtcccggtgtatggcatgtaggcctgaggcttgggccttgtgaagtcgagctcaaagctcccgccgccgctgccgctgccgccgaaaggcctttggcaccacgccaacctccgacgaggagccctgcaagatccatcgggacggtgtccacagctccacacatgagtttcaattcca

SEQ ID NO: 6680 - DNA, 834 bp, Zea mays
agcttgcatgcctgcagcagggaggaggcggcggccccggcgccaccacgaagcccaagaacgtgaagagctgcctgctgctgggaggagcgtgttcgccgccgtctgcgccgggccgcgccaagtgctgctttattctcggccctcgaccgggctccaccgtctccgcgtgatgatgatgatgatgatgaggagcagcagcagcagcagcgccggcagcggcagccacgcccatggccgcttgcatcatgcgcatgtagttgtcgtagccacttgcgagcgtgccgctgctgggtgagcctgagccgtcgctctcacatattcctgggcggcctcgccctcctcgcagcagcagcagccgcctcttggggctcgcgctcccatcatcgatctcctcccgctggccacgcccacgcctcgtctccgtcctcgacctattgttcgcttgcagttgcatacatacgcacattatcgaccattgttcaggaagcttacttagcaaaaactctatctacgttaaataagatctgatctacaacgcatgcatgcatgcacctatacagtgtacatgttgactactacattatgcaagcagtacactattgtacatatgttgccaggcacacaaaccgaatgaaacaagagcgaaaatcgaatgcatgcatgccaaaaggcaggtggtcgtctcgtctgtagaatcgcagtcgtttgtcattattcgaccacgacgcgaatggctgggccctggccgccggatcggatcctgacgtgaccgatcgatgagcatataggctggcacagagagagcacgagcagaataggagagggaatgag

SEQ ID NO: 6681 - DNA, 757 bp, Zea mays
gtccccagaaggccagaagaaaacctcgcgctggtagcatatgtggctcatacagataatccgttttcgaccaaatctggacgtacggtcacggatgatatgcaaccaagtttctaggcaaaaaagcaaaaaaaaaaacagagatatgcaaccaatgacggacgcacagttcacatccccgcgggtagcaacgttggcgtggaccgcggggcccttccttgtcccggctcacaaacgcaagccacgaagcgacccagagcacctgcaccagtctgcgtaccgagacggaggaagccacaccaaaggtatgcagcaccgaatccacaccgcctgaactgcacgcaaatcaactgctcgtctgctccacaatatttcctcgatcggcagcgtggcattgcatggcatggcaggcaccgcggactgggactgggagggcacgctgctttttcccgtgggctgtaacggcttttgtcgccttctctccaaacgcgtggccgcgcaggatgggccgagacggacaccgtgacaggccccggccctgtgtgcctgtctggctgaccggccagcaccgccgcgaccacgtcgcctctctcggctctcgctccgccttttgcagcagaaagcgaagcggggaggtcttgacctcacgtaacgtctcgctcttgccgcgctccgggaacaggacacggcatgacggcaaagcggacaacctgctgtttccgtattttatacagaccacgggaaattttttactact

SEQ ID NO: 6682 - DNA, 740 bp, Zea mays
agcagcacgttccccttcatcacgatctgctgctgctcgaagttcctctcggcctgccaccggaccgtgtcgtgcgccatcggagccagccacgccagcgtcttctccagcgcctcccgccagtcgtgcgccaggaacgcgtcgtagatcgccacgctcttcgcgtgcgtcttcaggctcctccgcagcgccgccttcaggctcgacggcagcatctggtacaggtcgtcccgcgcctcctcgccgacgaggtgcgggtaccggagcagcttctcgatgatgatgacgacgttcgcgtagtgcagcgcgagagcggagccgccgactgtggacggcggcgccagtgatgtcaccgtgctcttgggcccgaaccgcgccgcctttctggtaatcctgccactcttggatggtggcgttgtcgtcatcgtcgtcgtcgtcgacagcccctgctcgctgctgaatggcaccagcatccctgatctgatcgtgctgatgcggctggaatcttccaggaactcgtcctcgaacccatcgttccatgacgccgagctgctcaggctcaagcactccatgagcatcttccccgggctcgctccacagcctgaccgaagattcactggccgcgacatgtccggatcgactctggaaaccggccctgagttgccgcaatcactgagatcgcttcggacggggcctgagtttgctgttattggaccggagagccgccggctctggtcgca

SEQ ID NO: 6683 - DNA, 805 bp, Zea mays
gatttccaggtaactcactactccattgaaaatatctgcctgattgtcatttactttatgtttagcgcgttaattggagcagtttgccttgcccagtagtaattggactaaagaattgttatttttgaatctgggcgttcgcgtgatgatctgatatttttagttttctggttgactggggaaggaggagttgacatgttgatgtgcctgtctttggttgttgctgtgtccttgtgttcagacatacaatacgagacagatgcactgagatatgagacattataattccagtgtcagtcattcagtattcaatagagcaataatttaatcagtcagaaatttaggaacattatgcgagaaaaactaaacaaaatcatcattctctgggcaaaagtctggaaagaacagactccaactccaagttgctattaccacttcactacttcagggtctattttcttctctctagtgatttcatttcttctatcagattgccttctcttctgtagtaaaactgttagtctgtgaagtcaattcagaccccagaactcaaaacagggtgtgtatagagaacagtccttgtcaaatttggcggctaatttgagatgctacgctttgttttctgttgttcctgtgcacacaaaaagtacaagcacatggcatagatcatgctactcccctgttaaaaaaaaccccaactatagaattatggacttcgtgctagttaaattggtttatattttgactaaatttttaatcaacggttttcacatttatagctattaatcaacttattattaaaaat

SEQ ID NO: 6684 - DNA, 827 bp, Zea mays
cttgcatgcctgcagttataaaatgcaaagatgaacatggttcaatgaagaaaaagaggaaatagctaattgctccatataatggctgataaaatagagagtgctaatgcaaagatgaacatgattcaaagaaaaaagggaaatagctaattcctgcataagttcagtgacccttctatacattctgaaggctgaaggagaaaacttcaaaagaactggagtgcctccatattgcaaagtgacatatcaggatagcattaaagcatattcacagaaaattggtgtcaaattaataactttatggagacatgcacaaacgactataaaaataaaaatgtgtgaaacatcggaatatcagcaacatccaaaacagtcggcattcaccgctatttgtgctcaaattcattgttttatgactgacaggtatgggttttatctacagcatcattcttttccttcatagtttccatctgtccctatttaagtcacagcatggattgattggctcagaaacgtacatcatatttatttcatccacgtcattacaaaaatttgtcttaatgtaattatctgaattaaaaaaaaacatgtgtatatgtatattgttatacgtgaatttacaacagattcaaagcacagatacatatcatatttccccattgcagaatagtagtgtctgccagtgtccaatttggcaaattattgggaacacgtcaaataccacttggaatctcaatgctgggtgtcggaatccaaccttgccaaaaaaagaaagggcgtggctaaatgggtatctgctaacactgatggctatgcaatcatgtgga

SEQ ID NO: 6685 - DNA, 806 bp, Zea mays
ctcggtacccggtgatcctactagactcgacctgcagacattgcaagaaaaccagcacccatgtccacctcctgcaatccaagtacaaccaacccaacttctggcgatgggagttttagccaagctcttaaagactcgtaggatgccttttcttgcccaacattccaagaacccactaatactttcatgtattcaaaacttttgtatgatgaatctttctccatcaactctgagcgcaaaatgttgtcaagaggccctggtgatgccaagttccatccacggatttctccatgaccagccagtgtaaagatatatgaacctccaacagccatactcagaattggactactatgtgcaatccatcctcctaacaagttgccttcaaggtccaacagctggatgttgccatccatgtaacccacccatattcttgttccaaaattgtaaatgcattggacagatgacgaatgatgcaggaactcttgcaaacgattaccactgccatcccattgggcaagagagccatttgccgatcctgtccagatcatcccatccgttgacattgtaaatgcttcaattctacgagtgtcatcaccaaaacctgctttaacagcaactctccggactgcatcagctgctcccaacaaagcattccgtgatctctgcaagaaaccaacaggactgcgagctttctctttcctcggagagaacagagtttgctttgtctcatagctatatgaatcctgagcagataagatgtcgaaacgggtatcaacttggccatcaatgtttaccacttttagaag

SEQ ID NO: 6686 - DNA, 846 bp, Zea mays
tgaaccactgtatttttcccctaaactccaagaactttctctaggccagccttgtgactgcttcctaaaaattatagacattctgttacttgtttacattcttcttctgcaataacatttgctgtcccttaatttgaccagtgtgatgaaatatggcatactgtgatgttaaataagaagggcaggtatggtgcagtggtgagagctgtctcactgagtcaccaggttgtgggatcgaaacagcctctccgtatttgtgggggaaggcttgttattccttccccagtccccactcatcatggtagccttcggcactgggtctacccttttgtgatgttaaataaattattctggattttccaaatgatctttcatctcagcattccagaagctagttgtatgtccttgcctaattctgggtcctatcgagcatatgtacaagacagtttgatgcctattgtgtgcctactaactatcagctgaaaagtagccacgcactgcaaatgttctagaccatgttgttgtctctatcattggttcagtgaatatatttagctgctggttttattgagaattgaatcagatcattcacaattagtttgcaaatcgatcatatacatggaatacttggggtactattatggaatgcaggaagtagtcttatcagcagtaacctacatcttcaatcaaaccatatgcacccatgaaattctgatgtttcttggatgtcttataggtgatttgtggtctgggtctgaggggggagcaatcaaagattggaatgccataactgattccgaagttacttgttttaccaaccagagaaaaaccttagaaccttttagc

SEQ ID NO: 6687 - DNA, 834 bp, Zea mays
cttgcatgcctgcagttatttcagcattttagtttagcttaatgggatttcaaattaacagacagctgattcttggcttccaaaatatttttttactacagggtggcgtcactcttctcttgctgaacctgcaccgaacgatgggcttcatggtctcagtcaggaacgacctaaatgtcaacctcgcagaagggcaagggatcaggagggacagtgcctttgtccatggcctgaagaggacggtttcttgggtcgggagcaaagcctccgatgggttttccaagagggaagagtaccatctctcgtcgaaagatgggaacccttttgcccggaccatgctgctgaatggagcccctcttgagctcactgaagatggtggcatcccttcattgtatccagtggaagtttcagttaactcgccaatctatgttgctcctctgaccattgcgtttgtcgtcttccctgactttgaggctgaagcttgtggccgatgatcaactgtacatagaatatcacctttttttgctataaggcatctaaagaacaaaggtcattgtaatgtaaagacgtgttcgttttctgatctgtgccccaatcgggccatctacgttttcccaacgaatagtctccaggtgatgtcatactgatcaatgcctcgtcattgtactttgtacatacagttcatcatctcagaaaaaaaatgttcagcatcaaaccaaattccagaggaatttgtcctatcgaacttgatggtgtgcaagtcaattgtgtttatgggcccgttggatctattcattttagagaaactagaaattacctaataaagtattatct

SEQ ID NO: 6688 - DNA, 769 bp, Zea mays
aatgccgaatgcatgcagccgcagctcctatcatatggaacatctcgttttcatcgaacctgtttcccatcctggggtcaggaaggtccccaaacttccgaagctcgattgccttcatcagaagaggacgagcctgaaaattttccagcatgtataaggttctgagttaagatcataacagcagtaagcctgtccatgtccaaatgctaagctcacacaacgaaaaatagaaacacacacaaatgagccaaatatagcacccacggtatctgttacaacctatctcattgattggatatggcattcatattcttcattgtaaaagacagaaactttctaactatatcaaacaactacggattagcatcactagtgctcacgtcagagttaagcttgaggccttgttgagctagtagagtagcggtgatccttggacatgccacatcggggaaaattcttgtgtttccccttgtggtttgcatatctacacttgtgctctttaagaatgtgtccagatcaatttagggcctgttcgtttactccagaacggttccattgcaaccactccggttggaatgataagtttatttgtactagtattgattagttgggatagttcctggccacaatccgacctaaccgaacagggccttaggtgtcatttgtgtgatgtgccagctcctttcatgattgcaacagttataactggtgttttgctttggtcctgcatcaagctgcttgagtcattgctatgttcccatctgagctt

SEQ ID NO: 6689 - DNA, 809 bp, Zea mays
aagtgaagcatcactggattggcagacaagggttaagattgcagctggagcagctcgagggattggttacctccatgaagattgtaatatttttactaaattatttcttcagtgaccccctaatgttggatagttctcttagtatttcttatttttgttcattaggtcatccacgtattattcatagagatattaaatcatccaatattttgttggataacaacttcgaagctcaggtatgatgtgatttgctatacaagtctagaggtcaatattttggtatgctattctgaccataattattgtctaaatttgttgtgttctatggaaactatccaggtttctgattttggacttgcaaggttagctgccgattccaatacacatgttaccacacgtgtcatggggacatttgggtaagtaatgaagcaaatccacactatcttgcaattttcagagtttattggttattctatgcccagtatctagtttagtttacagaactaatatgatatatatcctctccaggtatttggctccagagtatgcattgtcaggcaagttaacagcaaagtctgatgtatattcttttggggttgttcttttggagcttattacaggaagaaaacctgttgatgcttctcagcctttgggagatgaaagtctggttgaatgggtgagttcattttatataatagttggacctactgcatgtcattaatgctaggttctaaagtatgcgtaagttttatgatttttagccagtaaccatagtcgaggctcgagagaatgagatccactaataaata

SEQ ID NO: 6690 - DNA, 871 bp, Zea mays
atcttgcatgcctgcaggcgagctacaggggccttgaggcactgtatgacgatgggtaccagaatgtgaaggacctaggctactactacgaatcacttggcgagctggtggagcatgacactgggccggcgcgctggttttgccctgtccaccccggctccccgatcgaggatgctcctctaatgctatatttgcccggtaggtaaccatatatgccttcatctagtgttgtgcgatcaatatgctaatatgtattagtgtgtaataatgcatcaaacgtacgttttgaggtgagaaactttcaggcatagatggaatggggatgggactcttcatgcatcacaaggcacttggaaggtcgtcactagaaacagagatcgagatgtgcaatttgtttcaactgcaaatagctccactttgttacagttttgatctttgaacaatgttggatgcctactgttctgttcccatgtgcaggatttttgaactaagatgcatgcacgttcctctccatgatcgcacgccatttgaaggtacacagagagattatggatgaaggatagtggatctaggcctgtttttttttaattccatgcatcatgatagacgatattcagatgaagaaaaacttgcgagttttggagctctctcaagatcgtatgttatagctgctttttatttttcagatcttgttacaatggtagaagatgttgtaacagaagagcatgccacttctcccaataagcccatctatctactggggaattcttttggagggtgtttggcacttgcagtaactgctcgaaacccacatattaatttggtattggtactagtgattccaggtacatttccaaataaatcatttcaa

SEQ ID NO: 6691 - DNA, 813 bp, Zea mays
agacaggacaacggaggtcggaggccccttccaagcaagcaatgccaagaaccaacaagaacacggcaagaactagcatcactacagttgcaacaaatactaaatcgccatcgatctcgacggcaaattatccgctaatcatcttccacctccagctaagttctctgagaaccatcattgcaaaatgtgctgccacaagcatgcaaacattactcccgccataagcatgcaaacaaggacatcttttcttatctctcttgccccccatctgtcacggcaatgggcaaaatagttcgttctcctgctcaccgacgcgagccaatgatgctccttgatctccattctccaccgccaccgaacggcggtctcgccataggcaccgtttccggcacggtgcgtcacgcggcgcaggtggacggccaggcgtcgcggctctcctcgtcggggggtagctgatgcgggacctggaccggtggcgcgaccccggctgacgccgacgccgacgccgacgccgccgctgcgcgcttgggggcccgacctggtggctctggagaggacgacacggacacggacgccgacggcgcccacgggccgaccgccgcagccatagcggggggcggacgtcgagctctcgcagctgaagcaggacagcgcgccgatcacgccgctcgggctcgggggggggcgaagtacaaactggccccgccgcggtgctttacgccttaatttcccggcgctttaacgcccgaaaattggcaaggccgaaggaaagcctcatggcccccgtaacccttgggaaaaaagaaactttgg

SEQ ID NO: 6692 - DNA, 797 bp, Zea mays
tgcagcagctagctcgtcgcgaggaaaatccgcgtacggccgccgcgtcgcccgatgcgcgctcgcccagctagctagctgcccctgacttcaggcataacccacgtgcatgccatgatgccgtcgtctagctcgatcgcgctggccatatagacctacgtcgtacgtactcgcatgcagtcgcatgcgacatgtcaaaggatgcgtgacttttgctggtccagtccgcggtagaggatgggagatcaccgaaggcgacgacgagaacagctagacagagaaggaattgaaaatgtgaagcgaaattcatgaaaaaaatgaattttggttccatatgaccccagtaacgggaaagcttgcgcgccagtccacagccgacacgtatggtagcctatggtggtgtcttcgcctatctaggaggtacggaatgctggccaggtcctcttgtcctctctctctcactcatgctgtgctgtttgacatgtctcgatctctcctctcctctcctctcctcccgttggtgtgactgtagtagatcctttgcccgtgtcagaacaagctgctcctcggaccgggtaatgttaaacatcggaggagcctttgcctaggatccgtaacggggaggaaagagaaaaaaaactaaggatgattatggataccgtgtaataactgctaactacagttagcccatctcagcggactctctgccctatattgtatgtcactttctattataaactacactatacaacctatgatgtaaaataatgttttgcacgttcatatataaatcagtc

SEQ ID NO: 6693 - DNA, 739 bp, Zea mays
tccaagtagttcgtttcgtgagttatccaaagttgcgccgcaaagatgagtactgctaatcgctaccaacacatcaagtcaactaagcctgttgtaggtatataagatactctttgataacatggtatatgttatatgccatgtgccatgcttctattctgtaacatgcttacatctaaagaataacgatgacatgagtacatgacaatacaataacagtcataatccaataaataaacaaatttctggcatgaacttcattatattgtatattattgaataggatataagagtgtatttttgtgctataccttgatttgtcaatattacgttattcaactccacaaatagtagcaagtgaatcttcggttccttttattttctgtcacatgcactttttttttttgctaaattcttgttaattgtttgataggcaaagcaagaaaattgaaggatctcatgataaaaagtgacaataggatatgtgctgactgtggtgcacctgatcccaaatgggcgtaagtgacgtcattgtttctcattgaaatcctattattatgtttatcatttcagaagatagctacttacatggcttctgttgaaaagatccttcctttttatgttgataaactggatcattgatttcttttatatgaagacagaatgcaatggagcgcccatgtgtacacacacagctttgctcctatacccatgccattggtttcaaaacaaccaaaat

SEQ ID NO: 6694 - DNA, 825 bp, Zea mays
agccaccaccttgagaagacgagctaccagcacctccagattgcccagggattgcatatccaactttgattccataggactgcaaatttgacaaaagatgtataagatcatattcatgtggcggtaacaagatacacactataagcaagcaaaatgcttttgagaggacaaggttcctggcgggcaaatgacatcttcactatcagggaatttgctagtttccagaaaaaaaaacgcttcatctgcaaatcccttgacattaacaagtaaaaatatatattcctcggtctttttcagcataaaaaaacaccaccccaacaaaattatacttaaaagtttattcaattatgacatttcataaaaggctacttctctgccatccatcatataaattaagactacgaggtctaaaggtcttagttaacagcaagtttcaagagatcacaaggataaacataaaggtacaggagtatctgtctttatctcggcaaaattaatggttaatacattttcggaaggacaatcatgaacgtgatacattgttactaatctacataagttctgtaaatggtagttaaagtaatgttgaaggggctcactacattttacttaagcagagcaaaactaatggtttgggagtaaaaaaatacctcattagatacatcgaaaacaccatcttgaatcttcttgtagattgctccagcagtcttaacaaatgcctgcatttaaaagttcatgtgacatgagaaagttggaaatttttttgacttggcgtagatacaccaagaatcaagcatcaccttctcgacattctgtgcggtcttc

SEQ ID NO: 6695 - DNA, 753 bp, Zea mays
gattgctatgctgctcagatcaagaaatcctcgtgcgtggtggagccaaccgcctcgcctagctttcaggagtgccagcacgccctcccctccgtcggctttgcaaagtcacatcgaccttgtagcactagcacagcgaatgaattgccaccacacaagctaaacactgcctctgcctcaacacaccaccttgcaacgtacgccgtacgattcgcaaaatcgggcgacaagagttgctgcatcggtgtcgcgatccaaccatcagaacatcaaatcataagcaggtcctagggatggaccgatggatgctactggttaaacagtcaggcatgcgcatctcacccaagaggccaagaggtagcacgagcaacaaacagcaaaacacccgataaaaagacactgttgactgaactggggtgatgttattccgctgaggcgcgccacagtacgcggaggccacgcaatgaaacacgggctggggcaggggggccgcgcgcggagcggcggagccccccgcggtgccgcactcgcacgcaccaggcagaagggagtgcccgcggctgtgcatgggtgccaggtgcgttactggcagtggcagagcagcccaggaggaacggggaggcaggggatacagctggccgctggccgctaccccggtggcagagatgaggggctgatggctacagtgcagggaagacgacacggcacgatacggacgagcgctctccgtaccacgcccaatacattgcactg

SEQ ID NO: 6696 - DNA, 738 bp, Zea mays
gctgggcgctcaggccccggacggacgggcgggcatgcagacggcgtcatcaatcgtgcactgcggcgcattcattgcacctgccatgccacgcacggtgcagcgctgccgttgccgtaggcagcgccggtgctcggccgagacgtgatgtggacctgtgctgctgggcggaccggcggaggagacagcgggcaggagaagagaggagatggacggggagggggggggaccccgcatggatggctcatggctggcccttcctgtcctgcccaccgttccgcgcgcgcttcgatcggccggatcggtgtggccggccgtgccaagccacaagcgtctccctccctcgtcaccaccacgcgtactgctttgttttggtctgctccgaggtgttttgcatgtgcagcagtgcaggacgagggacgcgattagcaggcgtctttgtgcgatcatcatcaactggctgggctgggacggcatgcagctttttgttcaggtcttgtgagtgcctgaatgatgggatgggatggcaaatggcaggccgagtcgtgccagtaataaaaagaaatccaaacgctccatgcgcgacgggccccttcttgcagcaattcagtcacgggccgccacgtcgttgctctccgcgcctctagagccaacgtacctctggtaaaaatcatgttgaccttcctctaacatttcttctatatactactactactagatcttctgtggatcggagaa

SEQ ID NO: 6697 - DNA, 789 bp, Zea mays
tcggtaccctttggatgctctaacatcgacctgcagggtgagtgatctgcaacatttgattgccgttcttgctagtaatagtcaaccttcagaaaaaagaaacgaacagcttattgtatttttttgaaagggtttattgtattgtgtattgatttctaactatttcatcgattgagcaggcagagaagagaaggaggttcgatttgagttgaaaacccatggctccaagagggacgatggccctgttatcttggttgtaaatgcttgtgccagccgtgacatgcatgaccatgttgttggggtgtgctttgtagcccaggatatgactgttcataagttggtcatggacaaatttacccgggttgagggggactacagggccatcattcacaacccgaacccgctcattcctccgatatttggcgccgaccagttcggatggtgctctgagtggaacgcagccatgaccaagcttactgggtggcacagagatgaggtgatcgacaggatgctccttggcgaggttttcgacagcagcaatgcttcctgccttctgaagagcaaagacgctttcgtacgtctttgcattatcatcaacagcgcattagctggtgaagaggcagagaaggctccaatcggtttctttgaccgcgatggcaaatatattgagtgccttctgtcagtgaacagaaaagtgaatgcagatggcgtcgtcaccggagtgttctgtttcattcatgttcctagtgatgacctccagcatgcgctacatgtgcagcaagcctctga

SEQ ID NO: 6698 - DNA, 825 bp, Zea mays
ttgcatgcctgcagtccctccctcctcccttcttttggcttactcacctaggcagcaaccaagtcaacgcatcaaataccgtcaattctgcatgttgttttcagaggaacgcattggctccaattttggagactgttgcagaaggaagaatcacaccaagaatctttcaatatctgtcaatccttggaggtggtggccatggagatcttcataagccatggatggcaatccaatgctagaatcgtggctgcttaatttgtttatggttccaaacagatattttttatcttctcatagttgttcatggagttgtaacttttacttgtaaggttgtatgcatgaaagtgcaaaaggctggaatttgctttccattatcaaaaaaaggtcaacacatcaaaacactcgttcaaaaaatcaactggagaacataacactggtgtgcgcaccacaaagaactaattgttctggttctggtttatgttaatacagattaattcacccctttccctttgctttcttttgctattcaggggaatcaaaggtgacgatggcactgaaaacatttggaacgacctcagagcatgcaaatatggtatatctgtgcaggagaaatatcactgtagggtgaagacaaggaaatggaaggatgatttgctgcgcactgctggcatgggaaagaagacaaaaaaaagaaggcagatgcacattggtccaaaaatgtgggttcctagcacacctatgtggtactaggcaactaagaaaccaccctcccatctagcatacatgaccatttagcccacccagtgctgattaaaaaataaatgt

SEQ ID NO: 6699 - DNA, 834 bp, Zea mays
atcttgcatgcctgcagacctgcatacaattttttggagtacctttttttttgttgctccttgcctacttggagtttgggagcagagctgctctgggatggagcagagctgctctgggatggagcagagccatgctaaacaccctcatagtgtggctcatcaacttaattctccggtaattcgtacaactttgaatatctcccttattcttgtagattgataccaatataattctccatgccattagtatctacaattggagaaatccttttgctctatgtttgttggttatgcccatgctttctcttaccaatataattctccatgacattagtatctataattggagaaattcttttggttctatgtttgttggttatgcccatgctttctcttgcaattttaggtgtatacacgcacgagttccatttctgtgagaaggtgaaggaaaaactggagcatgaagcttaccaggagtttttgaaatgtctacacatctacagccaagagattatcacgagaagtgaactgaagaacttggttggtttcttatttttattttattttatgattcatgcttaatgcttgaatttctcaagttatcactaacttcagttataatatgtcttaactcttaagtatatgtgcatgtttacttaccacaaggtgaagcattgataaattttattgatttgcaggtgaatgatatactccagcattatccagatcttatggaagggtttaatgaattcttggaacattgtgaaaatataggtaatttacaaactttacacatttgtatgatcatattgtaacatttcgattgtccaagtt

SEQ ID NO: 6700 - DNA, 827 bp, Zea mays
aacccgcttatcctctagtgctcgacctgcagcgagcggagtactataatgaaggattaattatatacatgttactcaacttttacaaattaatgagcaacgttagggaagtacaaggaaaggtcaaaacgtttacatgtggattcgggtattatatttttcagtttaccatcagattcaaacttatgtcaaatgacaatccaaagagaactaaccacgcttcattgcacacttcgtgagtgtaggaaagatgcgcggtagtgggcgggcacatagattgcggcaggtggcacggtgttgaaaactggtgctccgccctgatcttgcataactaggtgatagctctagtggaattcagtgtttttgttttaaatgatgtacccttccttgtaacccctagtggggatgatgcgagccgaaaaaaataatgaataatgacatgagaagccttgaatgccatattttttacctgattagcataaaaaacaaaaaaatcacaagctgtaagtaaattaattcagatgactacataatgtacccatgaatgtctggactccaatctgggcagattttatctgcatgcctttcaagcttctaaataatatactaatttacagaaacctagcaccagttcattgataccatcaactaatttatgagaaccccacgctcttggcctagattttttttagaaaacacaatctttcctagaatttctcaaaaatattcggagttaacatcccaagatgcatccttaccattcttgtttccatggaaaggccttaagacacactagatcatgaaagtgacttgaaacaggtaactga

SEQ ID NO: 6701 - DNA, 879 bp, Zea mays
agagatataatcttgaactccaaaattacaggttcatatgcagttatagttctatcctggaatagaaacaagtcacttacggaagtaggccttcctccaatggctcccacatatcagtaatatcagtagatccagtggtggtattctgatggaggccaacaatcctcctcttcacagtaataacagtaacaattagaatcaagtgataagtaatattaccaagcaccagagccatcaggagtaccttgatcaattccacaaccatgacagtcttattgatagccctccccatggccttgaatacaacctcatcagaacctttgtccttaaagtaagaaatattatggtgcaacttatcaggcacacaacacaacaaaagtatattgcataaaagcagtagtatctcataaagtggggccatgtgaagacattctggacactcttacacactttgaaattataaagcgcaaaaaactgcttgaacaagaagatatcacatacaaaaatgggcaagaataaatataagtatccaacaaatttcacacaaattcagaaacagaagttgctatgattaatgagcactggggtcctaattttcgaaaggagacacacatggaccatatgacaaaaatggcaacatgttgacagaaatagtattgccacatccactacataacaaaaaagcagtatgccaattaccaaatcatgactactaaaacaggagggtgattagacagttaggacaagaacagtatcatatattctgcctttttcccgtggcgcatcgcatgacagacatcatacacttttatttgccaccacatatctcagcgaatatctggacgaaaatctggtgtttcttagcataacatacttcgg

SEQ ID NO: 6702 - DNA, 859 bp, Zea mays
aatttggcaaatctcactccatgaatgcgttgcataagggcattgtatttttttttttttggctccgggcctgagaacactagtatctcatttgtaaaaatttcttgagtttagtacataacaacaacatcttcttgaccagtcaaaaaacaaaaaaaaatctaggaatcccttgatctatctttggcacctaacattcatgtggatttcaacacatttcattcctgccaatctgccatgggatgggagaggaacgacgacgacaagcggacatgtaaaaattgtaaggacgccttgtctctctgtaaacaaaccagaaggccaacatcatgatagcgcagcatgtacagctaacaaccagactaccagaggttctgcaagcagggcacggaaaaaaaaaatactcctgaacctcaaccactttcacaagcatgtacaacctcggcgctgttcatcgctgctcccagcagtgagttgtcaagcattgaacttccgctcttcatgcgcgggctattgctatcgttcgatgggtttgtacaggacgagggttacatatttggactcgaacctgtgggttaggccgagagccaccagggggtgggcgccccagcccttctctatgaagaggtgattgaggactatgtgctgcggccgcgcgcagctttcttccgagttctgtgagttaaggacgcctacatggaattgagctggaagagcaggtggctcccttggcgaagtccttgtcctcaggtgcctggaaactgtagctagagtctggagaaagcggtggctcaaattctaccacgctctcaacactttcttgggacaaaatcctgcatgcacaataagagtttcgggg

SEQ ID NO: 6703 - DNA, 744 bp, Zea mays
gcaggtttctgtcttccggcggcaaggtcctcagcgaggaggagaaggccgccgagaacgtgtacatcaaggtccagatttctctcttctctctctctctctcacacacacacacacacacacacacacacaccatccttccttgctccattgtggtacctgctactgctagaccttcggttcctgatcgaaacgcgattttgagtaggcgaccgatgatacgattttagaactcgcgtctagttccgcaagtgttggagcgttgtgatgcggtatttcggtgacctccgcgcgtgttgggaatatttttcctagtgttccttgttgtagtgtggttcaaggaaaaaatatcgtgctggtgacggggggtatgtgttgtgtgaacggttgcttgttgttgacattggattggtcctgtcgcagtttcgatttatgtggccgaattgttgaatatctacgtctgcctcgttttttttcttagcactcttttggttgagatgcatgctacttgattctctgatgtctgagactgacagattgtgcatcttttttttttttttgtttctggaactagttcatgtacaattgtcgatgcggtgacttactctacaaagtaggcttccatctagggacacaagtttgtcggttcattaacttgcatactggctattttaagtgtctacctgctttaactcacttgcctccctactgacatcccaagactcactgctgtgcttatgccta

SEQ ID NO: 6704 - DNA, 828 bp, Zea mays
tcttgcatgcctgcagtgtcttaatcattcgatgggcaggtaatttctcgcgagcgcattcagcacagcaggttactattggctgctcgtccacttaagcaggttgaggtatccatttggttcgacacagtgaagaactgaagatacgcattgtgcttgcttgtcttgcggggctcacaaacatcctgctggtgtgctgtgctgggaaggtcacataatccacttggctatatgccggggtgggaatgtgaatcggggcttcattagtgcaggcagcaggcttgttaacttggtaattagtcaatgaaacccatactctttaatgacttcttttggccactgttagcctgtgtttgatataatgtagctggtcatttgtgcttccttccaaaagttccatattttgttctttattggagcatcaattttagatggcaatgtatacctgaacatcttcaaactgtctacacaatatgtctgcattgtttttgtgcttatgccagtagaattaacaattaacaagtagtatctgttcattactttagttcatgttttgtgccccatgaaatgggtaatggaattgcaaattggagttagacatcatgctttgaaatgcacaaactgccacaataaagccgtgacatccagctgagtgaaactgtcttttcatgcatatactctcagtaatcatcactaaatttatctggaggagtttatttgttctattgtaagctgcccaatttctttgtttcttctgtcaatcaatgaatattgcacgcttgtcttttttccacatttaggttgatatttcagaacctttttctgtga

SEQ ID NO: 6705 - DNA, 795 bp, Zea mays
aaggccaacgccttcgtcatctacatgctcggcgaattcgtcaaagcttgtgaggccaagcaggtgaaagaaactgaacttttttttgatcaggctttgccgatctcttgttcctctgtttgttgaactcagttcaggtgatgccagagccagacttaggttctaagtacagtagcatcttttttctgtatttttttttttttggagtgtcttccatttgtttcgatgcgggagcttggaagccaagcttgtgcataattgctagttggtgttcttttctgtcaggttttgtcatatctttgtagctgctaccccagttaggtgaagtagagcttttggatcatgaaatgatatgatggggccatgctctgagtctgtcctttttttgctgtcatgctctctcgtctactactgcccgctttctttcaccggttggtagtcttgtagcagtattgggaacaatgtagtatggttaggagtgacaatcatgttaattgagtaagttggattcggagacaggcctgtaactttcttacctttttagattaatttggaggccaaggtgatatgcagctcaaacattgggagagccctgacccaagaagctgcactgactgatgggaacatcctcattgttgggagatcaagaaatgcgtaccataggtagtctcgacagtctgattcaactttcatgttcaaatggtcccgaactgaatttttctaaaaagaaaaaaaaacatttttcgattgtcagttcgaagcctagaaaatattgatcttaccattatgaccatc

SEQ ID NO: 6706 - DNA, 767 bp, Zea mays
aacgcccaccgcgatcttgtacctcagaggccattcaagggttctcccacccttccctgtaagattagaatttgatctctacggccaccattcaagagctctgaatgatgatatgtatctgtactagctacgactgaatgaaatgagcggtaccatgcagtgccgatgctagggtgccattcgtgcagaactcgaatatcaggtacagcccattctccacgcagcatccaagaaggtaggatgtgtttggatggcatacatgcccctggatccctagctctgccaggaactccttttccttctgctcgctcggggtgccttttgctagcctcttcacggctacaagatggccgtcagctagggtgcccttgtatacttctgcatagcctcctcttccagccatgttgtctacaagtgaaccgcagaaagggattataatcttgcaggcactctgacattgacgtttcatttcttatggcaacaaatctcatctggtaagcttttttttttcacactgaataagatcgatacctgaacttgtgaagaacttaacgaaccagtatttattttaaagaaaaacgaactagtatttgaagagtcacctgggtggaagtcattagtggccactgaaatctcctggaagctgaagcacctccaggcaggcttgtgatcttcagcgaaggccgaaccgacgtcgcttgccctggtgctgtcatcgccgatggttcctcaggaacgggagccagagctttatgtttgacagccgc

SEQ ID NO: 6707 - DNA, 799 bp, Zea mays
acccatcggcacacgcagacgcctgattgcgatgctctttcttgtcgggatatttttgtacgcgaccaataacttcggtacagtcgtgtaaggggtccagtagcgtttttttaaatcctttttattacagtttcccccttccgatcagatccctagtgtctggagatgtttgttaccggcgacgacgattgctagtacgaaggatcgtcgtagagctggagcatatgccgacccagatcccattttctgagtcccgatggattggttgcgaactcgtgcgtgcggcagccaagcaaagcttccccgcgctagctgctcccgatccgtgcatctttacgcgtggatgctcttttatggtgggttggttgttatttgttagccagtaaggagatgtttcgttccgaactgtcacatcaagtatttaaaataattatgaatattaaataatggcttgattaggcttgtcttttagtttttatttgtatagttagttttataattagactgcatttaatatctgtaattattattcgaatatacgtttgatgtgataaactaaaatttagttggctggaaccaaacatttcttgatgtcgatccggcttttgaatgttccgtcaataatgaagacatgtcaaagactattttttccccttatcggtaaacaagaaatattttattcttttttctcattttcttctcgttatcattataagggcataaatttattatatagaaaggtagagtgactcaggcatatgtttgatactagccgacgtaaccttttatagggtttttt

SEQ ID NO: 6708 - DNA, 835 bp, Zea mays
tcttgaaagatcaaggggggatcccaagaccatgacccgcagtgattgctgggatggaggagaattcaggtggcggtaagagtctcaagggcttacggaactaatgaagggtacggatcgataatggcgtgacacaatgattggcggcggtaggatttggagatatatatcacccaatcatgcaatcatgcggaggggaaaaagaaaaagaaacagcatcatggtaggactagtatttgaaaatgaccatagttacactgactgggataaccagcattgatgggggaaaactggatagaaaacgatagttcagtccttcagtgacgcattgttcacgggagggcggcggccttttggcatggtagtaataattgttacgcgacgagttttcgaagcgtaaaattcgcggtttgtctcccagcataatacgatatattctcgttttcatatctgccgctgctcgagaattaaagactagacagactctaacgtggctttcgttctagggacacttgtctgattcctgttcatgccattggattctctcctcctaactatttatcagcacgcagtccttgtcgctcagatggttgcgtattttcttcgagtgacagctagttttttttttgtcgcataatacaagaatgcgtattcgtttttgtttcgcatgattgcacctatcaattttacgtggctgcgagacgagtgtggacagcgctgattttggaccgaccatggacagaaaattgttaattctgtccttttccaaatcaagtcattgatattgggtttttttttactccttgcaaagagctttgccatggtatggaccatt

SEQ ID NO: 6709 - DNA, 845 bp, Zea mays
agcgatggaagacattactgagcttcaactgtagaaaccgtcttcttcttactgggacaccaatacagaacaatatggctgagttatgggcacttcttcatttcattatgcccactctatttgacagccatgaacagttcaacgagtggttctcaaaggggtattgttctctctttttctagttgtactttctttattttgtacatacttaagttgctgatgttttgacagtattgagggtcatgctgagcatggaggagctttgaatgaacatcaacttagtagattggtaagacttgatcatactgtttatgttgttgttttttgaatattttgagtctgggtacaatttgctatcttgctaagattataatgacacttctctttttttcacagcacgctattttgaagccctttatgctccgccgggttaagattgatgtcattgctgaaatgaccaaaaagaaagaagaaattgttccctgcaaattgagttctcgtcaacaagttttctatcaagccataaaaaataagatctcgcttaatgagttgcttgctggaagtcgtggcagtctaaatgacaagaagttacttagcctgatgaatattgtcatgcagttacggaaggtagtgggttgttatagtatgtttttttgcttttgatcatatatgtaaaatcatttagaagaacccaactgcctagaaaaaatccttccctaacgtaaattttgctaaatgtgactccttttctggttttaattggatgctatttctctgcattgccttttaggtctgcaataacccaaagctgtttgaaccgaatgagggaagctcttacttcaact

SEQ ID NO: 6710 - DNA, 803 bp, Zea mays
atcttgcatgcctgcagggccggcatgctgcatgcacggtgctgcaccacagccacagtacaagcatcccatgcctagctagatctttgtctcactgtgtgtcgttgatcgcccagtgcatgcgctagtaattcttatgtagttatgttccctcaatcattgagcaaaattttttcactaggaactactgctagctcccatatgtccccgaatatagattggtaggttttaacttagaacagattattatatatggcagatctttcattaagtagttgcacatactcaccggagattatttcaacagtatttgcagaggtgagtttacgtacgttgtaagacggtctccagcagtttacccattctacacatctcatttcctatatattttatcaaactttactctataaacagaaacagtattgaatctacagtataatatagtattttgcacgatcggttggagacagattaaacgtctatgttatattgtatagttgatgaggacataggtatgtactgatggtcgtccatgccacagagcggccaccatgtttacttttgtgcggtggtggtgccgtggaaaccagaaaacagcacacgtgtcgaatcttgagaggttgaggaagatgtgaggtacgtaggttcaaccatctcatcgcaggtagcctttcgctgcatcgacttttaagtgatagtaggtaacaaaagggacgtgcatgttttatttgatttgtcgcaattctaagacctccactggatatatataacctatggtggattctaaattttacgtgaaaaac

SEQ ID NO: 6711 - DNA, 935 bp, Zea mays
tgcatgcctgcaggcggccgtcccggttgctgccgttcccggcctaaacggaggcggccgtataaaggcattctcctcgcgccccacccggcggttatcttcaccaccatatcgacatcgacgccagcgagccaaggacagaacagccggcgcccggccctaaaactgccgtgcaggtaacctgccgcccccgcttcacgactagcaaccgcgcccccccggctccgctccattatatttctcgccttggacttgcgctcgcgctacagcagttgccgcgctgcgctctcgcgtcttgccggatctgagtgggctcgcttgcattgtgctgtgctgtgtgtgcagcgggagagaagcgagggaaagatggaccggtaccagagagtggagaagcagagggaggaggcacccatcaaggaaaacgagatccgcattaccacgcaggggaggatgcgcaactacatcacctacgccaccggcttgcttcaggtatccctaccagctcgctcgctctttcgtcgatggttgtactgagtttcaatgacattgcacgttttgaattctcttcttagcgccataaagtttggttcgttgtggccgtggctagatatccgaccttttttaatgacaacttgaattgtgaaagggaaaaagcacccatgtactataagttgacgtgactgccaactttaaagttgttatattagttatggcgggatttaaggaacacaatacactggtttttttcgtgtactgcctatgccatgtaatcccattcattataatgtaattgccagttggtttgtcgggcatttggtatcccgagaagtaagaccgggtagttaaggaaaagaagggcatcgaaaggctgaaattgacatgggaagaaggaagccaaaggtttaaccccgtcttggaaattaaccaaaggcaaa

SEQ ID NO: 6712 - DNA, 818 bp, Zea mays
gtgtttggtcgttgggagctagctctggctggtggtcacttctcagtacgacagtacccactatggcactatgctcgttagtggcgtggcggccgcaacagcaacagccgtgcgtttccgccggctggttgcgcgcggagagaaatgacatggcgtcacgctggttctcatcacaggtggtggtcgcggcaccgggtggcctggcgctcggtgcccccacgaggccccggtggcaaatctcaacgggaatctcgtggtggttggcgcggttggcttgatccagtttttaatggagaaagcgcctgcctacccggcttggcttcgcttgtctagtctagctagctataagcgcgaccggtggcaggaaatggtttgggttagttcaagggtagtaccaccgtaccagctaccgctgatcgtaaagcacagtccgtccttgctctttttctccgttcttggcagctaaagttttgcttctttttccaagacagatgagagaacgcgctctctttctctcgaatctctcgcacgggggaaaaaaaatctggaaagcaactaaccgataaccgtcataaccgcaaacttggcccaagtaagtatgttctttcattccgcttcggcccaacaagcctggaccagactagcaacttgcaaggtagccatttcattttgggtaacataccgtcacacctgctgatagcgggtgtgagtaacatattgtttccatcgcgtgtgatgggtgtggatttaatatttacctcgtgggtacgagtttgcaaaccttgaattgactttatacatattgccatccctgctac

SEQ ID NO: 6713 - DNA, 843 bp, Zea mays
cttgcatgcctgcagaatctccccagggtctcctgaggacgcctgagaccgtggctaaatttcaggtgagttctatatgccctttcaacagttgcaacctatgtacattttttgtaaaacacatttaattcagtgaaataactactgtgctagaaccttgatagaatcatggggccttgttgattaaagtgattagttttgtgtactctggaagagaaacctttggtgcttactggtcacttattagtattattaggtaataggtgcagatgaaagtaaatggttaattttatcacatttctctcctatcagggttgatctatacacatgctgttaatcagcttcatgtctaggttccttaacttactgaattgttatgcttatcaaaaaattgcagagcgttcctgtgcaagctgggcaaacgcccccactcttgcagtactttggcacattgctaactcgagggaagctcaatgcttttgagtcgcttgagctatctcgacttgttgtcaatcagaacaaaaaaaatcttctggaaaattggttggcagaagacaagctggagtgtagtgaagaactaggagatcttgtcaaggtaaactggatgcataccatgtttgtggatcacatggatcttactgtactttaccaatttacagtcacttgtgtcttggttgttcactaaccatttattgtaccacttctatgtagactgtggacaatgatcttgcactgaaaatatacataaaaggctagggcaaccccctaaagttggtgcttgcttttgctgaaaaggaggggagtttgaacaggatacctgatattacctcaaaagaaggtttt

SEQ ID NO: 6714 - DNA, 772 bp, Zea mays
tgcatgcctgcagatgcacccaagatttcggtaattagaagcaataaggaagaaaagaaatgccagtgtgttggttgagatggggagggggtcataggaagctggacaggaatacctgcaccacaatctgaagatttcccctcagattaaccagtaggaggtctttcatgcactccaaagcccactctcttgacaaggtgccaaagaactcaacaagtgcctgtccgagaaagttgtcaatgggcaaaacaatagaagaagatatctgaaaattactgaagtctacaaacctgtggctcaatggcatgagtatttacaatggcacgcttgatatcaggcaactctgagtaatgctgcatcacaaaatataatattttagttaaacaggaaagtgaagcggggatatcagctgcaccaatgcaaatgcactgacctggagggctcgcaagtacaaaccggccttttcacatagctgagcaatacgagggcggtcgtaatgactgaacataccattagcaagaatggcatcagcaacatttgggtaagtcactaagtttatctccaaaacctacaattcatacagaaatgctcctgagaaacaaataatgtacacatccaagcacaaccaattcatgttcaaagaggaaagatgataaccttggtttgaagaaaagcatgctctggcaagtttggcttcagaacatccaacagaaaagctgttgcctcccgtatcatatttctctgttaacagaagtatgtaagtgaaggcatg

SEQ ID NO: 6715 - DNA, 786 bp, Zea mays
aaacaaaaatttctgattgtaatgttttaggcctctgtcctggtgaaacatgtcactttatgagcaaattcttgattacatggaaagctccagaagatgtcaatgaaatatgttcgcttgaaaataaacaatctctgtccaagctttgtactgtgaatttgggtggaagtcttgaagtccggcacatggttgatactgattggttgttccttgctgaagtttgtaacaccccttcagtggaagagaaccgtagtcatccaagagcatcctgtaccaagatgaagatggattctgccctgcatcactccagattcttgcaacaatcagcacagaaagctcttcagatccttagatctattccagctgctgcaagacgaacacttccagtactaaccaatgcacaaggtgacgtagtatgtataccggtaagtatatccatcagtattacctgattttccttggattcgatgttttcaggaattcaatgtcttttgctttaagagatgtcttatcgaatgtgctatctgctaacttgattgaagtaattatatttaactacaacaacatatcaacactacctgtagagtaaattaatgtcggcagttactgtatcatactgtccatatgcaattagtggcatcctgaatttaaaggttctggaagctttgtgataaattgcatgcgatacattgggtgatactccttccattccaaattataagacattttgggttttctagatacatatcttttactatgcactcttatgtctagatactttgaaaa

SEQ ID NO: 6716 - DNA, 756 bp, Zea mays
agctgctgttgttccgcgcccaagcgactcaacgcctccgcctcggcggcggccgccacgaggtgctccaccgacggggcaacggcggcaggaggcgggacggctatcccgtccgccggctgcggggggcgctcgggcccccggcgcggctggtagggcttgcttccgtcatggtgggagtgggacattgatggacggtgagggatcggatcggaacggacgatggggattggggtggagggtaaccctacccctaggatttcgatctgttttcgatttggagggtggacatgcaggaggcggccgtgtgggtccgggtttttgttgacagatcacagacgtcggatccactagtttttgcagtacagtgtccctagtcgctacttctctactatctattaaagtcaatagtgtagactctttgcacaaccatgtcccgccaggctctccccacccttctccgttcgccctggcctcagcgccgcatcctccgcgatgcttgcgcgccagtctccgctccgtgtccgccgcccacgctcccccgtccccgcctcccaccaaagatcgatcaaggcggcgatcttctccgccagggccttcgcgctggcggctgtccgtgcgcaggggcagcatcacggcagcgggctcttgaaccaccagaacttctactcaccacgcatggcaatctaccctctgtgatcgccactgaaaaacgtccacgcgctggttcgggcaggggcctcctttgtttgcgcg

SEQ ID NO: 6717 - DNA, 777 bp, Zea mays
aattatcaccggtaaaaacgactgcatgtctccatctcaaaagaaaattaaaacaaaaaactacatgccccatatcttaagtcatggtagtaactactggtacaactagcaggcaagttttcataaaagagctggcagaatgaaggtaaatggaagttcaagaacaggaggtgagaacaaaaaaaaaacatacccagctgttcaggaatcacaatagattgtcatccatatgtgatgctttggcgccaattgcatctgttcagactgatcttcattttctcttgctagaaaggctagcatcaccctctgcgctaatagcagaaaggaaaaccggtaaacacaacatactgccctttaaataaacagatataaagtaagtatgattgttagtttgttacaaagatgcatgacaagtggttaaggtatatattttgaggagcatgctaaattctagcaaagatcttttgctcattgcttatatctattgttctaggccgcttaacgtctaggggactcgaatttgactaggaatccaaattcaaaatgttgttatggttgttctccgaggaccagaaaatatacctagtcagtttatgaccaactgatgaagttatggcaaaaccatggacaatgtcacatatcagagcagcaaaactcagccatatcctatccagctgcatgtgtttgcctcttttgccttttgataaggccttccattaaagtgatataagttgaattgtcaacagacatgcccttttgcatcatctcatccaaaac

SEQ ID NO: 6718 - DNA, 799 bp, Zea mays
gctcgcgctggccaggtaaagaatagacctgctgatccccagcgtcaacgctggaatcttttgtgtggttctcctaggagaagaggcgtgtgctgtggactgtgatggctgatttggttgactgaaagggatatgatttctgtttcatttaatttttatggaccaacgcgaacgaaatggaaatgatggttagtggattaaaacttgggatgagtgggggcatttattaaatgttcaatctgcattctgaccagattatgctgttacccttcttggacaaattctctaaagggaagtttttttttttgattcagtagggtaggaattgcaggagctgattttattgttaattgatttggtttctattgttttggatggaatggaattgactgcattttctctgtggacaaggaatgtcgatatcataacacttaagtagttaagtggatgcctaggccctagtggcttctgcatgagttttatagctatggactggggggcgtatattattttactagtgttttggaagcagtctgggaggcttgtttgtcaaatgttaattctagttcaaacttttagtatccatctatttttacatgcaaatttcatttggatggcatcttggactctcatgttggaatattcttatggataactacatcacatgtcttggatatgtgtttaaaatgaccagatgaccaaaataatctgccagactatttggcaaagagtaaaacttttttgaattaagagtcacctcaaattatagtacaatgtggatattatgacttgaccaagg

SEQ ID NO: 6719 - DNA, 792 bp, Zea mays
aagtctcacaatgttgcaatcatgcctaaatgcatgttgcaaatagaaacaactacacgaaaaacataatagtagctacacatgatgcacaccctgaggtgcacacaattatacatggcacaaaagaagggttccgctttggtgctcagagcctacctccaaaacttgctgccactccttactagtaagctgacaaaaagaaagcatgaaattcagtcaaagcaaacaaaatcagcatgggattacaaatgcagagaagtgcatctggatgttcaaaagaacctatggaaaaataaaggatacccaaaacttcaatatccaagatttaatttgatgaacatcaagagaaagacatagggacggaccttgtgcaaaatgatgtcaaatggaccttgttcagagagggggcaagtctcatcaattgatacgaaatgaatgcctttcttcctaaacaaatccagttttacaaaaggctcatcaaacggtataaaaccaaggcaggtaacagtataatggtcatattaacaagcatggactagcaggatcatctaagagcaacaactgaaaaaatattaaggccccgttcggttactagggattgaagctcaggattgatttctagccggattacttctctaatttatatagatttcgatgagttggaatgaatccgggtctgttccggtagaagcgaacaggccctaaggcagcttcaacacctcaatataataaataaataaataaataaatatttgtgaaactaaagtagcaagggtaatcacatctgggaga

SEQ ID NO: 6720 - DNA, 778 bp, Zea mays
atctgatttagtatgtgaaattatttttcttcctttcaattagttaaacatatattgatatttagtgtaaactcaaacaaaagcaaattcgataacagtacacataaatgcttcaaagctcaacacattatcgacgattctgcatttgaaactcaagatttgattctgacacgttttttctaatcaggaagtagaatactctgaagaacctggaaatttgtacttcatcaagtaccgtgttgctggcggaaccaggtatttttcactataccttgcattaagacatttcattatttggttgtcattggacatttcattgttgagttcgtttcccaccagattcttgtttcattatatttgaattttcattttctggagaatgactttgcacgatgtacaatttaactttttatcttataatatgagaaattgagcaacatgattggcaccctatattgatgaaaattgcttagaaatatttggtttatacttggcacagggatgattttatgactatcgcaaccacaagacctgaaacaatatttggtgatgttgcaattgctgttaatccagaggtatgagttctccagtgttctacagtaatgttttcttacattctgttagaactatgtcaagttatttatttctcaaacagctagtttattagaaaaccttttcactaatatgtcaattggccatacaggataagcgttatgcacaatatgttggcaaattggctattgtaccgttgacatgtgggagacaatgtcctattatt

SEQ ID NO: 6721 - DNA, 951 bp, Zea mays
  unsure (1)..(951): unsure at all n locations
ttggatctcttcaatgacaggcctaaggttgtaagtcataggggtatttcccgaaccagtgaaatgcctaacttgcttattcaatgtattcagaagcaactgcattgaaaatattttgggtaagttcaagcttgaactgaaagaaagagagggggggagtgtaacctagcgccaattacctcctcaataaagatatgcttgtcggtaggtgacaactcaagatcagcaggcataatgtcactcagtagattgtgtgtgtatggatctatgccatatacttcttgctcaagaatttcatctcctgctacttttcggggttgataatccttaacctctggaagttccaagttttcggtgccattcttctgtgacagcaacttctcagaatagtcatcaggtaaagcaactctcatttttcgctgtacttcctccaaatctgctacaataaggtactcctcgataacttcatacttcctagtaactggaggaacaaggctggcctttgtcatgcgggcacccaatatacgatcatcggtcacagattccccaggttcaattaactttagactgtttccttttaaatcccaggctccagaatttacatcaaggtcactctcagtatcagaaacagtagtttcgctctcagtttcatcaacttcagagtagccatcatcatcatcagatgtttcgctaccagagtagacatcctttttctttaatttaaataggctttttttgatttcaaggtcaaatgcacgagatgaattattctgctcagcagccaaatgaatttgctctctaattntatttgcttctttttgagtttagtatcaaatgaatattgattaantgtcaggctgtccttggctttctgctcatatctatcagaaatgtaccttggggtccctagtctctttgctagcttgatgaaggaaacaacatttgtttata

SEQ ID NO: 6722 - DNA, 1173 bp, Zea mays
cagccgctcctcacccaccggctggagggagcgggccaggttgacacggcggcagcggcgaggcccgaggagttggcggggccgcagtcgttgctcgcagggcgccggagcgagctctgctgggcggggtctatgcggcagagaagggacgagatgcgtgtggggagtgacgcgacgccgggtcgggaggcgcgggcgtggtcgcctactcgcctggtcggtgtcaagactcaagtggcgttggcgttcgtttttttttaaaaaaaaaacttttctcgagacattgggcggggtcggttgctggggacggaggaagagaagaaagtctggatgttggacgaaaactacctctagtagataggaatgggtagggctgggtaaaaaatccgaaacccgaactcgtaatattcgaatccgaacctaaaatacccgaacccgaattttgtttagggatttcgggtagcaacttgtaaaacccgaatttagttcgggtaattcgggtatcacaatcgggtatccgaaatacccgaattaccgaaactttcatatgtcatgtactcatgtcatacttaatttttaatttatacatttataattatgtgtatgtgtgcataacttgtgattgtagattgcttgtgttttatatgtccatgtatatcattattcaaactatatttttatactaatttaatagggtgtatgtgtttttatgaagccgacataatagttcaggtagttcgggaatacccgaacccgaacccgaaattccgggtacccgaattttcgggtattgcaaaacccgttgtaatttcgggtatcaaaacccgaaatacccgacccaaaatacccgacccaaaattttcaactgctgtcctctttgtaataagccttaagttgaacttttggtaaagattattgcaaactcggtagatactgcacacttgtttgtctgataggaactgtttaacgttactgcctccatttccagggccagataatgttacaacagcgcagaagtacctaggcatgactggcttggaagtgaagaaaatcgcaaagcttaacgaggagaggtatgcgttactaccgtcgacatcgtatatgcttgcgatgctgtcatgattcatcgagttggatcggcaattacaatttgttcctgtttcccctgacagg

SEQ ID NO: 6723 - DNA, 722 bp, Zea mays
attaaggattaaatgttgttgaagatcatagggatgcaaaagttgtgaaaatttgatgcaataattttataatgtttgagttatgagattaggaccgtcatgtccaccagccctcccacacccctcgtcccttgcataccctcctccccatccccggcgcacacccccctcagcctcacgccgaatcctgcttcaggtccaacgaccacatattccccctcccctgtgctgaggagtgaggacctcaccatctcctcctgttggttgttccaaggcccagcgatggagcgatgatggtggtcttgcctcttttgcgggtgcttcagcggacagtcggcctcaggcctcttacaaagaggtgttgctttcctcccgatcccccatccatcatcctgctgctgaggttgatggcgacggttgggtgagagtcaaggatcgtcgtgcatgcttcagggatcttcgtgcttgccagcgtgatcttcgtcaccctggcctctctgcccccaaggctactcctatcgacttgcgggggtggtgcttcaattgcttttcctcgtctcatcgtgcagtcagctgttgtcgtcaggtacgctgctttctttgccggctgcctgggcaccgtgcttacgtgtgcccgcgccgatggacgccttgccagcacaagcgcgtctttgtgtggcgccccgtccatcagacgacgtcttcgtgtggggtcttgtgcg

SEQ ID NO: 6724 - DNA, 588 bp, Zea mays
tcttgcatgcctgcaggtgcttgtgcttgtgatgatcgtgagggacttcgtgccgggacggaacgcgttcgaagcgctcctgggagagctgagccggcaggggcggtgggctgacgccatggccgtgtacgccgccgctgtgaagcgaggcgtggtggtctcgtggaagcacctcggcagagaggcgcactcaccggaggagcccattcggctgggcgtccctgtcccgcagtgaccgtttgtctggggctctgggcgcggccgggatcaccatctttctgagcccattcggcttgcgttctgtttccgatgctgtagacggaaaattctgccagtttggaccgcttgcagatggcactgaggaacaagcgtagctgatggttcaggtattcgcgttgtcatgcgtggactttggaattttcgtgacactcaccgcaaatgtaccgaaattatgtaaatcatttctgcttctacgtaaatcatctctgcttctattatccggccgggagcattggcgtccagcttacgagttacggatgataatcctgatttcatagctgtaaacgcacaaagcacttttatttatag

SEQ ID NO: 6725 - DNA, 824 bp, Zea mays
tgcttgtgcttgtgatgatcgtgagggacttcgtgccgggacggaacgcgttcgaagcgctcctgggagagctgagccggcaggggcggtgggctgacgccatggccgtgtacgccgccgctgtgaagcgaggcgtggtggtctcgtggaagcacctcggcagagaggcgcactcaccggtggagcccattcggctgggcgtccctgtcccgcagtgaccgtttgtctggggctctgggcgcggccgggatcaccatctttctgagcccattcggcttgcgttctgtttccgatgctgtagacggaaaattctgccagtttggaccgcttgcagatggcactgaggaacaagcgtagctgatggttcaggtattcgcgttgtcatgcgtggactttggcgaattttcgtgacactcaccgcaaatgtaccgaaattatgtaaatcatttctgcttctacgtaaatcatctctgcttctattatccggccgggagcattggcgtccagcttacgagttacggatgataatcctgatttcatagctgtaaacgcacaaagcacttttatttatagacggcgccacgaaaaaaaaaaccaacaacacgatcactgacaaggcgcagtaacactgtaacagagtagaaacactttccggtggcgcgcgcgcgcttctgaggaagccaagagtccaagactgaaagatcaagcagcttactccgccgccgcctgctcgacaaccatcggcagtgactcctctttctccctccctttcttcccatgctcctcctcctccttcccaggagaggacggcataatcagggcct

SEQ ID NO: 6726 - DNA, 772 bp, Zea mays
atcatatgcagcgtggacgcctccgatagccttggctttggacctccttatcaggtctcgccccctcctcttcttttttgcactcgtcgtcgtcttcctgttcttgttgcttgcaggcaagagaacatatagtatagtacatgcaatccgcgattcccagcactgatgaaccatgatccaacaaatccaatgcaggccttcttcctcggcggcgcaggggacccggcgtcggtcattgccggttttgggccgaagacgcttacccgtgccttcaacgtgagatacatgtactaatctaatatgaacatttcgcatagatcgtcgtgctctaagtgacacaggtaggcggtagcagctagcagtacccataacttgcatgtcttctactaggccacctacgacgagttggcgcgtatcctgttgccacgaaccggcggccccatcgtgtactacaccgcggacgcggagccagagagcggtgccgccgaagaggagcgcgggcaggtcgacgggcacgacggtgtgctggacaggggagcgcgacgcgagggcgccggcgcgtgggtgccgggtggcaggggagacggaggcgacgagtgcggcggcagcgatggcgcgcgtgtggcgacgtcgtggtggacgaagctggttaacagggtcgtcggaggggcggctggcggcggcgtcgccgcggaggcgaacaggaagggccaagaagaagaagggccggcgcgcccggacccgtaccaacctctacgacagcgagccccgg

SEQ ID NO: 6727 - DNA, 795 bp, Zea mays
gagcccagcgtcctcgagcttagctaccaatcacgcccttagagaagtttatgcgcctgaattgattgatttggatggatgagttttgcaaagttgagaagataccgtgggatagctgctggtccactcactctcggcagtggcaccaccccttggccgcatgcgtgcatgcatggggcggttaattaacaagatcatcaactaggaaatgttgcaccatttctaattaaactaagttagtgcagtgaacgaaacggaatcactataaatatataactgtctaaaaatggctaatagtctgtgatgaaattaattactatccatgcaagaacataaaataaaactctgtgcaaagtcaacgagaggcaccattactttgtgcacagcaagttctgtatataatccatcgtatatgatatatatgcgcctctagctagcttgatcactagtgctaatacgtgatctatccatcatctagctatcctcctagctagtgacacaagcaccatgcggagaagtgagctggtggactgaaattcatgtcaacttttattgcatgcatggtcaacttttcgcctctcgcagaaacagatgctgggtgacgcatgcgcaggttcttccagcacgcgcgcagtgcatgcggccgtgaacagcgagcgatcgaggcgatgccaactcccgagccattggcagggcggctagcttgttgctgctgctgctgcatcttttttccatccacgcaccagcactgcactgcatcagcatgcttgtagttgatagatatagatgcatgga

SEQ ID NO: 6728 - DNA, 859 bp, Zea mays
cttatcaggaagcaagtcaaaagctgttaaggagcttgatgccgctacttccaaagaagatgggacagtagcatccactcttgatcgctccaagcgttggcttctttctcactctcaacatctcaacttcttctctatcttgatacttgcttcggttagtgccctgtctgccattttttgttaccaatttcttcagtgtggaaatcttataaccatatttgttttattaagcatttgactttgtgccttgaaaattacctttggactgtttgcaaggtttaggttctcacattttaaagctgtctagataaaatgacaccaacaaataaacttatggaacatttcctgtacagcaattaccatagttccctctaataggattttcgttgaattgttttttttttgcttaattttgatggcccttgttaggttccgaacccactctttgatctcgctggaattatgtgtggccaatttggtgtacctttctgggagttcttttttgcaactttgattgggaaggccatcatcaagactcatattcaggtgaggcatctaactttatacctttatattatttaataatcgttaattgtttttattgtgatttgtgtttgcaattgttctacttgttgccacacacttaattgtttggctgcgcgtgcatgttcaatcttttggaggatttctattgatagccggtggtctttttaatgtttgggaagacaatcttttttattaacttaattagatgaaactattctttgatgtgggcacttggatccaaatcttgaaagcctaccaacatttcagccaaaactcatcaagatacagataactagattatactgatgccaat

SEQ ID NO: 6729 - DNA, 828 bp, Zea mays
  unsure (1)..(828): unsure at all n locations
atggctacaacgcccagacaaacaagtggtgcctgacgctgatgtctgactcccctgttagtttgcgatagtagcaaatgcattgcattatactcccccacagccacatgagtgagatgcccagacaacctactactactgcatgcatgcatcatgtacggttttatccgagaggaactagatagatagagcaaactaaacgtgcttgcaaaagcacagatctcaaggggcttatgggtccgggcccaaagcgcattattcaaattaccaggcacagatctgagatgcaaaaccgtatgtgtatgtatgtaactatttttcaccgccggccatgtacgcccctcatttgtttaattaaaccagacaccctctcaggctcaagtcaatgctttacagtcctgaaaaacaattacccaagtgccaagcctaccgaacaccccccacacgattaaaaaaaaaatagaatccagaacctttgtcattagtagtagtagtagtatattatataagcactaagcagggcagttaacgttgattgattggttggttgattcttccttctgaaaactgtccttcagcgagcgagcgagcatgcatgcatgcagaggtcagcatagcaagtgcccacacccgtgaccccagtgtgcaggtgttgtagtagccctcctccggccatgcttgctttgctttgcttgcctacctaacatgccatggcatgacagcgacgcctggccctactgcgaattctttttttctatatgggtattaggtgcaatacatanggccaccgacattggcgacgttgacagcagatcccaaatggagctc

SEQ ID NO: 6730 - DNA, 747 bp, Zea mays
aacaaacgaccccttttgcaatcagatttgctaaagacgtacttatgctgatataatgccgctatgaatatgttgaattgatatcttgttagcatattttctataatcctatttgtgcctatttctataagcctacacacgttacattatcagtatacagccaaattctcacatgtatatacttttacttatcaactattttctgtttattttatatttacaaacttacaatatgagctttatattaactcatatataatatttatatagaaactaaaaatctgcaattgaacttgataccgcacccgtaaggcgcgcgacatccactagtattgttaagtttttgctgatcgaggcgagctggcgttgtgatgatgatgagcggggccggacgctaggaaggggacggggttagatgacgtcgcgcatcaggaagaggcgacgtcgggaatggggtattatggcgaactagcccagacgacgtcaaaaagaatagagccatataggtagatgtgaggactaaatcgagacagaggacgggagtcagaagaacttaaccgatccgacaataagacctagacaagactgttttggcccacccaagaacttaaaaattgagggggccatgaccaacttttcccctgttcgtccgccctaaccccaacctatgtttggtttgacgcctaccaacacagatgttcataaaatcgaagaagtaccgaagatggtcgttcttaaccgttacaa

SEQ ID NO: 6731 - DNA, 770 bp, Zea mays
atcaatcggtgctccagctgtgcatgggaaatttgcaaaaactgctgttagtttctgctacccaagagggaagcttcttgatatatacaggcagaaaaatatgatgtcgtcgtttgatgatgtccacatgaaactggacgaaattccttctgtcacactctctactgctgcaaaacctctagcatttgttgcaccagatactgttgaagaggtaatacttaggttatattcttcctactagctttaacctctaatctctctctctttttttctgtttatctaccttcttgattacttgttcaggctctcctggaagatattagaaagggtaaagtcattagcagtgaaggaatcaatgggattggaaacaaaaaggagagggcaaaagagctcgaaggtatatctacactgggtgttagttgtgctgttactgtttatccatggcttcctattcattaggtagagtctaaatgttataattgtttcagaacctgcttctggcattgatgatgacatgggcaaagccagttttgcaattgctgggttgggtcaagaagggttgtcaggtttaatctcagtgaatgatgcctcctatgttgaagggacacttcctagtggtgtcagtacatctctgctgaagataagtctggaggaaaatgccatcagcaatcaacatgggattactgacacccaggaaggtttgaaaactgctgaaatcaaggaaaatgctgatcatgctcttggcactaggttaccttgatgattcgaaa

SEQ ID NO: 6732 - DNA, 773 bp, Zea mays
aaaattgaattctagcttacattagaactagtagttgatgaaaaggtaagctggtgtgatcttccactggaatgtgaataagaagacccttttgaggaaccagaagcacgtattggagcaggtgaaggggatacattatcccacggggacgctgaacattaagaacacagagaggatattagtttcatgatttagttgggttactgaggtgtcaagagagtatatttactacacaaaaacaaagcagttttactgagagtcctgtctcaacatgttttacctgctagacgtggtgtattcccgtctaaccaaggagataccaggcgtgcatccggggatgcagcagcgagcataggagatcgtgttggatgttgtctccgggagccaggacgattatcacgataatctcgacgaggtgtatcttcccattcccagcgtccatcatcccaatcagatcgtgctaatatttgccagagtaatcatactcctatcagtaaaatgtcaattcaatgataagaccaataaagaatgccaagctaaacaagtaccagatgttcttgagcttcttgagctatgctcatgtcgacttctcttgttagtatattcatttgatgtagacctctcacgctcagcgcgcctagtatgagattctctatcatcatggtatcttcgccttccactattactatagccaatggatgcagatctctcacgatcaccatgtttattatgggatcctctatcatcatagtaaccataaccactaggagtgc

SEQ ID NO: 6733 - DNA, 1254 bp, Zea mays
ttggagtttctgaatggccagcccaggggatgcggagggcatcaccatctccatgggggagctgagcgtagaagcagcgacttcgtcaggtgagaacgaaatagcccagtatgatgcatgtctcttatccctgacaagggggcaaccatgtgcgcttccgtagccatgcgttgcttgcttaattattagcactgcttgtagttttatctcatgttggaacctagttggtttacttatgcaaaactttgtcccagctaacggcggtggtgatgttgccgctgtcgaccaggatgatgtgtgggaagatgtttcagattctcatgggcacgcgtctaccttagacagagaatggatccacaggcagaaccagtttcaaaaggtattaatcacccccctagagtttatttggaacgcagttgttaatgctaactactcttttgcagttttttttgtgtgtggctgatagcagaaatgtttaaaattatttttgcttttgatttcactctagatgggatatcgtgatggtgtaacacaagggcagaaggactctgcccaggaaggcttcaatgttgggttcaggcaatctgtaaacgttggctacaaatggggccttgttcgtggggttggcaggtgcatttcctctatccttccaataatagatgtcttgtattatcattctattctagtgtttccttggattttaattttccatctgtcatcttttcaagcagtgcgctagctagtcttcctgacagcttgaaagaaaaactggtgccggatgttcagcgtagggggaaattacaggacctgcaccgctcagtgcaagaaatatcagcagatgatgctgtccagatgttccacgagagtatctgccagagcaaccgtccttccgatggatcaggatcacacgtaacatcaacctcggatggagctacagaatcaaataggatgaaaagcctatcaaaggaccttgtgttgctgttgcgcgaatgctcggatattaaagtgagtgaagagctggcgtcagattcatgaacaaggtgcccgggaatttcaaccgtgttttctaggtctggcagaatcacatcgagttcccagattactgaacatataaccttagctgtcgatgaacgtgattcacggattctgttttggaaggacctggtactcaaaagggctcgagcttcagagacatggagtgtagctgtagatcctgttattacatatttcccttttgctgcaacctgtaactaa

SEQ ID NO: 6734 - DNA, 877 bp, Zea mays
actgcacacctggtccggctgcttcaatcttccaagactggtggaggaatctgggggccagtgtgccttcttcgttacgaaaaggggtcaattcccttgtggtgttggtggcgtggtggctttggaagcaccataatgagtgtgtttgaaggggcttctccaagcttcgataggatcatccgaaacatcaaggatgatgctcaccgttgctgtctggctggcgctgtggggctgcgagccctttggccttagcctcagttgaattagggagtttgctagtgtttttcaattcttttttggccaccgtaaggtgtgtattttttgttctgaccttggacctttatttggtcttttcctcttcttaataaaatgatgagcagctctcctgcgtgttcaataaaaaaagatgtatattatgtatatttatgttttctgtatttccccattgtataaaggtcttagtgcatatttaccctcatgtatgggtatatatatactggccttagggcctcatattgaatacaagtgctattcataacatggtacccaacaggggcagatctaggacctaatcacgctccgggccggtccattggatataatattctttcaatatactttggtataaaaacaacaaatttaactagaaacatatggatcatgcccgggccacagaccaagtggccctagggttagtttctaatctaatttcctactcacctacttgccgccaatcttcttcatcttgaatattgttgctcgtctgcacaacgagagcgcgcgttcctcccgtcgggggctaggtcgcgcagtttttatcacgctcttcgacagtatacccgtcgactgacgttctcccactcttcgttgcccactc

SEQ ID NO: 6735 - DNA, 495 bp, Zea mays
atatcaacaagaaaaaatatcaaataccaagcttggtgaaactaaaatgatgcatggactaagaagccctgatgtaccagtaccagtacagacaaaatgaatacctgtagatcaagatgaatgttctcacacttggctttgagatgatgcatatttaagctggaagctgtagcaggagatataattgatttctcaaaatgctcagaggaaaggcagctcgaaaacatttcagaatgtctcatatcatccaatgcactgataggaacactggaattttttatatctgtgtcatcactgaacaaaagaagaacagatatctcggtgatggaggctcgtaaggtcctctcgacaactggttctgttaccaaatgaaatgtaaaaagtatagtcatatatatggatgatctgataatttcaatgtcatagtaaaatactacaaccaaatggtttttttctcaaacacgcaggagagttgtgactcattatattaagggg

SEQ ID NO: 6736 - DNA, 794 bp, Zea mays
atcttgcatgcctgcagcagcagcagagcgacatctctctctctcgcggcggcggcggcggcggccacaagcacgcggcggggcctgggaattgggatggggtttgtgatgtggattagtgtggatactgtttttacatagaagcgtattgctcacaaggtttatcagacgccccgcaggcgaattaagtcgcatcaagtcgcagctaaacgctttgtttctgctctctggcttccatttatctcttctctcgactcggttcttatgtctcgtctgtatgtacagtaatatttaatacagagacttttaggggtgtttggtttagggttttggtttaaagaatcactccatccaagataaggtaatgcatcattattttattcctcaaatttggtaggatgatccaattcctaatgttattactaactaactaactatgatgaatgagatggtgatagatcaacttattttattccataaatcaaaaacgtaaggagtgagaagatgatggactggattcttcctcaaatcaaacaccctattaaggtgtctaaagagatttttgcacaaaaaaactcgcggtggaattgttattcgtgaagagacgtctctgtctcgtaaatcaagtagcaacagatgtctcactcctattgtacgaatttgtctgttttatcgatccaacgctatacagacgcatttacttctgtttttattagtgaactacatttataaacactctagtgtataattgagtctcttagagcatctacaagatactctttattttggctctt

SEQ ID NO: 6737 - DNA, 783 bp, Zea mays
cctctcgtcctccatggaatataatggatgattgcttctagtgctagtcaaaactagaggagcgcctcccaggatcctctcgcctgcgggcaccgagctgccgtctctggtaagcgccgctcactcgcttccttccttccccctgtgtgctcctccgggtcgagcagtttccgcctgtactacttcctgttgtgtgttgcttgttgtttgacccccgagcaaccgccgtccgccgctatcattcgttccgttcctgccgtctggtcttttgcactcgcattttatcgcccgcatctattgtagttctcgggttcttgtcagcgcccgctctcaaacttagagagcgtgcttcaggaacgaagcaaaacccatggctgcttgagctgtagttgtagcccactgaaatgaacgagcttccatgggtgccgatttctccgaggaagggcttcttcggaagggccaaaacggctccggaatctttttcgctgaaaaaaatagttccaaacgactcgtgctactaaaccgaccgtttgatatagagtgagtttctcgcgaaaaatcctaccaagcgggctttaattatcatgtggtggcgtcgtccgcgtagtagtgctgaggatctctcgcttgcaattgcaatcgaggtgcccgtttttcgtttttattaaagaaaagaaatcaagatgctcatcagctcatgtgggtgggtccccttatttttagaattggggaaatgcttagaattggctaatgttaagcaaaaaataggctatgtcgtaattt

SEQ ID NO: 6738 - DNA, 784 bp, Zea mays
gcccaattctagagggatcaaaccagatatgttgttagcagataaaatgagaacctgcatgtatttcagacgccctatttcaggtcctataaaacctgaaacctctgatgacgataggtcgagagaaatcactctgttccttccattgcagccaacaccgttccatgtacaaggagttgcatcagaaccactccagttggttcttatgaaacttggcagtattagggttttggacagagcaagaagagctaggccatctgaactcataccctgtgatgttgaaactaacacgaagaatagaaaaaaccgatgccagaaaaccagcttcatcttgtccctgaaaattttggatagaagtcagtagaagatctttttttgcctatgtacaagtagttcaatgcacaattcgatggggattgcatgtatgagcagttgtcatcaaccaaaattgcgcaccttggcaaccttccccttaaaagcaacgaagtagaacaatttgatgaaactagaagttacttattttcccaataagagttggtagaaatccttaaacattaacaatcttgaaggaagccaagcttactcttccggaacacatactaacactaagtagaatgtgctaaaagattttaattggatagatgtttaagttttcagatagactagaatatcgtttaaatttgtatgttatttacttaggacgccatcgtaagaattgttcctcatccaacagatcagcacgcagacccaagtttgggctattggccattctttcagacatgta

SEQ ID NO: 6739 - DNA, 844 bp, Zea mays
aactccaccattttgatatgaagttgaccctttagcttgattcatgtaaaaggtataaatgattggtagtagacaacctatttagggttaggtaagataggagcataacgatcaatcttttagcatctctccttgccacattgagaatatattgtttcttaattataaattataagacgttttaactttttctagatatatcaatatctttttgctatttatatggatatatatattatgtacatatgtaggaagcatatatctttaaaacatagcgaacgtcttacaatttagaagaaagttttttttatgacgaagggacatagccctgtattttattaaaaagtagacaaacgagttcgatacatgaattaacaatcaccacaaaaaggatcggaaagccaagaactatccataactattagggctcggtcagctctcaatctatgtggattgagtgggattggtatgtttaaatccgaagcaagtcaaagttcttttaaattttttataatctcatccaatccatgtataatgggaataaccgaacaaagccttaatgctagacacaggaaacttcactgtcagctacggcacctggaccacatagactagaagggaggaagtagcactgcaattaatgaaataatgaatagtgtcgatgatccaaaaattaccaaattcaaaaaaaattactgaaagttttacctcattactaatatgtgctaagcatcgttatactggtaagtagtgtctgctgtctggttgataaaaaaatctatgtgcatgacgcgcagggcagcgggggtgcactcgacgacgacgacgcgcgcggtcccagacg

SEQ ID NO: 6740 - DNA, 799 bp, Zea mays
atcttgcatgcctgcagtagcactaacattttcaatctctgcctcagagactgttcgcaagcttttgcatattctttgcattgtgctggaaaggttgtttaataacatctgctgctctccacagcccttgcagttgactgggagaaagaattctagtatgtagtcatcgtaactggtgtacgtactcctcagccgtatggctacagcagcgtgcagaccaaacttacgagcatggtgtgcaagcgggtagtcttcgatactgtactctcttatatcaggtgagaagaatggcagattcgatttaagggctcggcctgcaataccctgccccttctcaagatgacgatcagcacatgcatgaagaaacccctgcatctttgcatcattaacatagcaagctgattcatggatacgaagtgctgcttttcctggttgcggatctatcccaatattctttccaacacaaaaaccattagcgatgccatttgatgtagggacccatgtaagggccaaaggaagcatgtgtgcatgacaaatagctcttagaacatccaatatctcagtaaaagcagatttctgattttcagagtaaacctgcaaatgtaaaagataatgtatgcattgatcatcagtaggtaaaaagtaaatacaagaccaagagagatctcagatggagcatgttagaagtgaagattgacaccttctgattgctgcgatctgttgttgtctgcaagttcacagcctacagaagagcaatggataagtatcaaatatatggattgcttatatacaactgaac

SEQ ID NO: 6741 - DNA, 858 bp, Zea mays
aaaaggcccagagattaacagaccaaaacgtgatagctactccatatcactatatcagtgttgggcgcgtacttctcttacactgggtcaaaagagtcttttgctattataacactcaattaaacaggcttctctcttctagtatctacaaattcaacttctctaaaatagtattttttaagttaatctcttctctaaaataaaattaagtgtctttttactctcttttcttcctcttaatttcccggcaacgaatgatacgcttcaattcgtcaatttatttcatgaaatcaccatgtaacgtaggagcaagccgaactttgagacacaaacatatcgtttccgttcacgttcaccagcaggctgatatgaaaattttccggaaccacgaatcaggaaccatacaactcaccattcaaatctgaagttccatacatctcactcttcaaatcagaaagggacatgaaaccaatctgcttcctaatatcttttgttgatctaaacttgccttctgcccgaaccagctgcttcaacttacttcaatactgcaacctcaacttctttagaataaagttcagtaccgcttcaactaataattcagataactattagttgcactctcaactgcatgttagtttattagctggtccaacctagctaaaattagctaataattagttggctaatttcactagcaagttttcattcaactaactaagctctagtgcattcaaacaggaccttagcttgtcctaaaacttataacatacacttatacttttgcacttaattatcaacatatgaaataattatgtatttttttctaaaaaaggcttgtgaaaccacccaagtgtataa

SEQ ID NO: 6742 - DNA, 756 bp, Zea mays
attcggtcttgttggactgcgataggaacaacaagggaaaattccacttaagcatccagctgaggcaagagttcacaaagaagtcagaaaggaatattaaccttgcaaaagctgattgaagaggaggtggtagcttcaatttaatactgtccttcacttgtgatcgaaatgaattgctgtccaccggcacatgtctcctctcagtgcacgcccttttgggagacctgatttcatctttatctacaggaaacacaattaccaaaaagggggttcaatcacttattcgcgtgattgaaaagtgtaaaaaaacaaagaaatactgcttttaacacttcaggaacatgtaataggcattatgctgatagtggctgataaagtgataccttgcaaacgctcctgtttctggaagggaagaggcggcaggccacccattgagatattatgatgtgctgcaattgcatcaagtgatggcatcggttcagccagtaaacctaaccgatttatttcgatagatagtactggcctagcaacaatcaaagaattgtacattgatgaccctttctcccatgacatgctttccagaagccgttcctcaagagaattcagatgacgctttaactctctggggagtgtatcttcatgccgaacaaaaccctctatgactttactcaagtcaaaggctgtaatgccagtcttctccaacacagctgggaacatcaaagtgacagtcttgtgagttgcaagaactaactccgc

SEQ ID NO: 6743 - DNA, 1028 bp, Zea mays
  unsure (1)..(1028): unsure at all n locations
aatcggctgaactagagcgggtaagtggtgatgacggtgtatggcatcaccgcaaaaaatgggtttgagcatgaagcagcaccggttgggatcatcttgctcaggcaacaacgcttcaagcatgggactgaatatggacaggattgtctccagcaccaccttgtcgctttccttcatctgaaagcacaacgagaaagatgtgatttttagatgacgaatatgtcgatcgaacgatgtggcctgtaccgtgattcatgggaccatcacagcacccttacatcagcctccgcagcgggttcgtctacctcacagcctagagcagcacgaagatgggtcagcaagggctgaggcaggccatacgtggggaatcctccggatgtcgacagccatgtcccacgaaccatatgagttgtttggcttgtagtcgccgaagactgagctgtgatgtcctcgtcatccgcggatgtgtcaagatctgcatgcatgtaatcgtgcatctgttaaataaagggtgcacaaaatctgttgatgtcaaacggggaacctgctgttcatggaaactgtgcctagtccctgatcaattgaaatggctatgctggttggacagaaatcgagatagccagactgaactactgtaacaggtaaaagttacgttaggtatttcaaatctaggccaaccgacatttcattggcaagaacagagcaaaagtaacctctctacttgctgatctacatgcagccaggaatacaactgccgtaacagattacctaaaggtataacatcataagggttgtctcctcttggtaggaatccatagaacgtaagaagatgcgaccctggatgtttcccataactgagaaagcattgctcccctgcatcacagggtcgagacaagggaaacttcaacgattttgtagcttcatctactcgaccatagttcaagatatgagggggataccttgagaanaaaattggaaaacagaaaaccatggagagaccaaacctgaaagactaataaaaagaaaac

SEQ ID NO: 6744 - DNA, 868 bp, Zea mays
atactacatgatgagatagttgttaagctcaaatctgttggaaagtctgacaatgcttggatggttgttcaaacacagaaccatgatgctgaggattctcttctgaaatggggggagcatcttggtattaaatctagattgcagatagcctgtaagtcaccatagaattttctgataagttatgagtgctttgagcatatgtgcaaattaacaatgtcgagttgagtttttgtgttcatcctattaattgatcattgaatgctgtctttgaattcactaaagttgagttgagttcttgcaatactaggatgcttttctcttctactgtttttttatccaacttaatttcattaaaattgatcattgaatgctgtctttgtattcactaaagttgagttgagtttttggaatactaggatgcttttctcttctactatttttttttatccaacttaatttcactaaaattgatcattgaatgctttcttcatgtaacttctttgtatcagcatacatatcatttatctgattctagaaggtttagattttcagggagctggaagaggaatgatagcttctgaaagtatatgtgtgggggatattgctcttgaaattccagagtccctcattatatctgatgaacttctttgtcaatctgaagtggtatgttctccttcgttaatctaattccctgtgcttctgaagcaccgaaatattttcagtactgactgactcaaaatgtgggtttctgatttgtctatacataacatgttctatattggttgcagtttcttgcattaaaaagatttaataacatcacttctgagactatgttattggtgtggagcatgagagagcggtataatct

SEQ ID NO: 6745 - DNA, 819 bp, Zea mays
attagctatgttctgtttcttgtatgctttcagaaaccaaaagtcattgggctgtcataataacttctcgtcaatggattcaactatagcagaactgtagagttgaatagagataaggtaaatctgtctaaaaattcactaggctagaaagccaaactggatatagaaattttagttgtgaggcagctgctaagttacatcggatagagaaacagttagataaaaaatggtctctagaggaggtgaagattaggcagaattccagagacagagatttgctaggaggcagaaatactgcatattttcaagcagtaaccaatcaaagcaggaaaaagaaaatagattgtctagagggatctaatgggttagtatatgatcacaaaggtatggaggaagtggttgtagatttttataagaatgtctttgtaaaggatgaagaggctggagccaaattaacccaagagttctgggatgtagatgataagtaactagagaagagaatgagttgttgattgctctttttacttaaattgagatcaaggatgctgttatcagtgttatgttgaaagagctatggtttaccttttttttattttaccataagttttgggatctagtcaaaggagacatagttgcttagtttgaagatttccataaaggttccctggatctgtgtagactaaattttgatttagttcctcttattcccaaaagcaggagatgcaactaatctgaagcaatttagacctattagtcttttgaattgtagttttaaaaatcttctcaaagcttttgactcttagaataagtgctatagtc

SEQ ID NO: 6746 - DNA, 816 bp, Zea mays
aaaataaccacacaaaaagaagattccagtaaacaacattcagagagcatggaatacatgacatagtactatgcagcataatttactatagcatggaaaaccatgtgacaaataataagaagctataccatataggtagtattaaaaacaaacttcaatcaaggaagaagtgaagcgcgtgcttgcaaatagatgcttatgatcatgtccaaggaaataagatgttttacctgtatcgccagcttgtaattgcaaagactgtatgcatggtgtaacaccctccaagacatacattctgctgttattatttggccaaaacctaaactgaaaatgccattcttttcctcttgcatcttgaattgtcaaggggcgaccttccggttgggaaattggggggaaatatgcctacacagagaactcaggatgtcagaaacagtggaaaaaagaatgcatacagaagcagcttcctgcactagcaataagtttcatgaacacgagcagtagatcacaacgctgaaaagatgtgcattgattaattatttacacgagactatgagagtatccatggacatatactataggaacttgaataagatcattgcattaataccatagatatgatagtggttcaccattaggatgcatttagattcaacagttagtgtcagtttttttccatgttaacgtataacccaatgtacaaggaagaccaatcccctttcgtaatatgggtttaatccatacatgggattgggaccatattgtaagcaccctaatagaatcccaggaacgggtcacccatggtttaatttttct

SEQ ID NO: 6747 - DNA, 895 bp, Zea mays
tggtggtgcctgctttacatgcacgcgcgcaccgacgggcgaccggtggtgctgatcagaaatgtacacgcctttcagcctgtgaggcaggcaggcagagagagagagagagagagagagagagagagagagatattcacacacgcacgcacgcacccgctgattctgattgggggtggggagctagggacgatgaggttatatattaggcgtggatggacgtgggctggatgatgatggagtccaggtcggacgtcgtcgacctcaccacgctcacggccggcaccggcagcttgtcggaggagcgttcagcggcctcgccccagatctccgggatggcccgccggagcgcgccgatgctctccaccgcgtagtccgcttccttgctcctcgccctcttgccaacctggtgtgcgggaaacagcagagagattgacgaatggatcaacgcatgcactgctagctgtatgatggttgttagttaataactgtgtgtatgtatgtatgatggtcgacgagtactgctgtatcggtcgttacatcgacgtgcgtggtcgcccccaagggcagacatgcaacgtgcgtgctgacgtgactgccgtatccacgcacgacgcaccactggtatggtatgggttgggtatgcctcagggaacaatgcattatggtgaaacgttacgcctcctagatattttttccctagggtacgatatttttggtgagcccagatgcgaacagtgaatcctccgtttggtatttggatgcccattttcatgtattgggggaatgaaaatatatattggtgagccacttatttgtacctacatacatctccttgtgtgcataaatactcaatttgttaaagcagctcctaatctcatcttagattagttag

SEQ ID NO: 6748 - DNA, 724 bp, Zea mays
tagcttgtggacctcctcgcctatggctctgcgcttttcttcgtcgaaacggcgcaggtgctgcttcacgggtcgggctccagctcggatatccagtgagtgctcggggacatccctcggtatgtcgggcatgtccgagggactccacgcaaaaatttcggcgttcgcacggagaaagtcgacgagcactgcttcctatttggggtcgagctcggagccgatcctgacttgcctgcaggcgtcgttgctggggtcgagagggatggacttaaccgcctaagctggttcgaagttgccggcgtggcgcttcgcatcaggcacctccttggagaggcactccaggtcggcgacgagggcctcggattcggcgagggcctcagcgtactccacgcactccacgtcgcattcgtacgtgtgtcggtacgtggatccgacggtgatgaccccgttggggcccggcatcttgagcttgaggcatgtgtagttgggaacggccatgaacttggcgtagcacggtctccccagcaccgcgtggtaggttcctcagaacccgaccacctcgaacgtgacggtttcctttcggaagttggagggagttccgaagtagacaggcagatcgagttgtccaaggggcaggacacgcttcccggggatgatcccgtgaaagggcgccgcaccggctcggatcgtggacagatcgatctttaagagccccgagggtctc

SEQ ID NO: 6749 - DNA, 781 bp, Zea mays
atctcagcctcggtctctgcctctcggatggggctgctctggactgggctcggaggacaggccaggtttgggttgcaatataatgacatgttgggctagctgggcctatgcgtcgtatccatatgcccaaagtctgcgctatttctcctccaactgccggatcagacgtctttacccgcccgaccccgaagcctcaaaattaattgcccaaattgcttccccaccttgggttcaagtgtgctatgaatttcagagggatttgaggtttatggttgattagatgatcaacttgcatatgccatacatattatccatttatccaattcatctttgacaacgaaggcgaaggtcatgcgggtttgtgtcaatagatcgtgagcgacagatggtgaacgttgagccttgatcgagggaccggagaagctggatgactagccatggcgactaacacctaggaacactgataggcgcaaggacgtggaggcgcggatggtcgtggattggcgggacacgtgtctaggacataagggatgtgtatggggtacgctactcatggaggtttcagtggttgagcctcaaaaccactccgctttatagttcgctagtttcgtcgggtttgggcctcaaaatccggtggtgcggttccgacaagaatcaggagccgcacgtggagtcatcacgaagggtgtgtcgaggcaaagcaacttcgtgaagagcgcgtgactgtcagaggcatattttaggagttggtccattttactccagctaagtagataagctt

SEQ ID NO: 6750 - DNA, 802 bp, Zea mays
ttctgtgattatcacctggtttcgtttcctgtggttatgtaattaccatccgcttcacccccgatcaaaaccacctgtggtaaggggaaaaaaaaggcaagaagcgctgtgttgtcgtattggcactctacatttaaagccccgggtttggctctacgttcgtttctccctgactcgttggctgacagcgaagttttgtcagttgtgttctctctccttttggatgatctccatgacttgtacagagaggcacagtatgcatgctgcactaacgaagcgtacggaggcacccagagcaataggcagttgacacttgacaggcagctgtcaagcatataacctgcgagtccgtgggcccgcagagaagaagtgcagaacgcccacattcgacacccaccgagcttttgtaaaagtttgtagaacgaccctgggtgcggttctaccaaaagccgttgtccgtcgtatcgactagggtgcgacgctgactctgggctggcaaactcacgagattctagtgctggtggtttcgaataaaccatgtcatgatcgagagtcatggatcaccacgttcacctgtacagaagaggacggctggacgggcatgcgactaaccctaaaccctgctatgaagcaagcccgaccgcttcctgacaggggaggcttggcgtgacccgtacgcaagactccacagaccccccccccccccccggtcccacccagcgcagctttcaaggcacgcaactcgacggtctggccaccacgtacgtgcttggtcggtgcccacgcgccggcgccgaagaca

SEQ ID NO: 6751 - DNA, 789 bp, Zea mays
acaaaagggaaacttcaccatcacatcactgtttcattgttaccaatacaacagcagtaaatgcatagtgtctcagggatgctaccatcgtcagaaaactcgatgaacgcaaagcgtaggacagagtgggggtcgccacagatacggcaatctaccacctacaggtcaacagtagtagacataatgttacaattaagctgcattgtcaccacctagacagagcagctactagatcatcaacatttcacttctcaagcgaatggaaaggcgaaaaaaaaaggtcgcctagatgctgtaatcagccatcacatgatcaagaggaaaaatgctttcggcaaaagaaccacaggactcactcgcccgcagttggagaacacttcagcgagcttctgctcggtcacctgcaaagcagtaacaagaagataatgtgacagcgatgacacagaatcggcgctgcaaaaggccaccacagctgtctagttaagctcacatacatgctgatcaatgtcggacacgtagacggtccggcgcacgctgtcctccctatcaccccgccggggccggcctccggcccccctccgcctcccgtggttgaagctgttcctcctctgatgccaatcacgagggcaaagtcaatttgtcgtcgtaccaccagaattattaaatgaacacattttttttgttctggaaattgtgaaaagagctaaacgggaggcccacggagacgaatagttggcatcaagcacagtgcccatcgctatcacatggatccacgtatcaagttcttgc

SEQ ID NO: 6752 - DNA, 572 bp, Zea mays
atggagagaagggagatgtaggttattagctggaggattgagatcggtatatggcattcggatagtcatatgccactaagataggggaagttagataatagcctctcttcctccacttgttttacggtttcacagactggtatgttcaattgtttcctccacttgttttatggtttcacatactggtatatgttcaattgttcatcaagttctggtgcccactggttacctttagagctggtttggtggacagggaaatagaggggatccacgggagaggaattctttcgctattcaattttaaatagagaggggattcttccccattgagcccctccatttctctgtccgtgggattaaggtcttgtttcgatactctagtattcaccttaattattgagatggattgagatgtaaattagtttaatttacgctttaatccacctcaatacatttggattgggtgaatattatagtagctaaacaaggcctaagagggagaaaataccttactattcaaaatgtatgatgacaaggaaattggaaggaacccgagagtcctcgatcccctc

SEQ ID NO: 6753 - DNA, 830 bp, Zea mays
  unsure (1)..(830): unsure at all n locations
aagcagtatctggactgaagagtgcttgaaaaatctccgggtctcctcatcccttgtgcccatgtaaccttcctacaggcaagaacccaataagcaaacaggctttgttcgtgttctacaacggcatgggtactacggcctacgacgtaccatcttgatgccaaggagtcttcgggacgtgggatcgtcccacacgagcagcagcacctgcacgccctcctgcgacttcctcctgagcaggtcgccgagtgccatgtcatcgtggccgtcgcgcaccaggtggatggtgtggaacatggaccacccgatgatgtagatgagcctccgggcctggcatatggcatcgtagacgtcgcgccagcactggccgtgctggtagccgtcgctgttgccgagccttacctccgacagcttcaacacgcacactgtcctcctcttctgcgcaatgaaaccactcaatccggtagccagtttcgaaatgctggtgtgccgaacaccgcataagtccaaggcaacacgacgacgcccgaccatccgcgacgcgataacgaactagggttcctcgatagggaaaacgaccgaatcgactagacaaaacgcaagttgaacatcatccaaccgcgtcggactcgaagcggggcagaccaggggggaggggcaccgcaacgcttaccttggcggagcaaatcagaccagggccctggcgcaaatcaaaccaggcgtacatggttttgtctaagtcgcggtgaccgcnccgtggcggcgccggctaccggccgtggcgcggcggcggctcggccctgcgctaatgaaaaaagaacccgtgtggg

SEQ ID NO: 6754 - DNA, 952 bp, Zea mays
ctggctgacacacgcaacggcaccttgctgcatgcatccgcagcggactggtgagtgacggacggcttgctgccccgcgctgccgcgcagcagcgaggatttgctagggtattccgtctaaaccataataaacactaaaccctaaaccttaagcttagcggacgaggaaggagctgccggccatggcgttggcgagaaggcggcagccgtgaggccatcgccttaacgtacgggtcggtgtgaggcccatccccatctctaccccacccatgagaatagcggatcatgcaatgcaatcccaactcttgcatttgtgtgattgtgtcatagaaaagtcgcggctagctgtggactcttccgctacgtacgaaatggacatgcatgcatggagacacgaatggtttcttccgtcgaccaggacgctagctggggttcttttcttcgctgcccgtcttgcattgcgggaatgcgggatgcttatgaacgttacgaacgagtgtgtttgttgtctgcatctgcgcgtgcttgcatcgtgggatgcaggtagctgctgtttggttgctatgagccaggctatgcgcgtgcgagctctgtgtttggttgcctgtatgtagatttggatccagactcgcacgatccttaaagcaccttgggccaggctcaccagatacgagcagattggtcgcatcttcagagccaggctccagtgatcctggctcacacagccaggttggcgagagaaaccaaccaaacagacccagaggtactgttcctgtatccacagattatctatgatagtacactccgtattatttatatatatcactcaagtatctgtgtggacaagattgccgtggtaggaacttctctttcatcggaactcaagtgggatttcttgtgtggatagcagccccttttttcacatgtctctcggcaaaggcagtggcacaca

SEQ ID NO: 6755 - DNA, 776 bp, Zea mays
cggtcggaaaaatgtcagaagggcttccagcaggcaacaatgtagatagatgaatatgacacatgaagtcaaaatcaagactctgtaatagcagaaatggacaaggcttttatatgctgggcctgggcttcttcataaaaggttccaattcaccaccgtccaagtataacttgatgcaattggcatctcagtataacatgatgctgagcctcctccacaaggctaagtataccatgatgcactcagcactcctctctacttggcatgtctcgatcaacttcaatcctggctaaaacaggagaagtatcaaagcttcaaactccttgctaacagtcctaccaattgaagtataatgactcgaggactatacggatagctcttatgagagttcctgcattcctggttgttagccactagtcacgtaaaaaaatactctgctcgcccactccccttgctatgatcttagtaaataagcttgttctgaccttacctttcattcgtgctcccttcatataaatcattttggcttatctaagtacatagcttttgacatgtatctagacaatagcgtagtatctaggtgcataataaaaaggcatgtatctagaaacaccaaaacagcttatagtttggacaagagggagtagctttgagagcgatactatcaaataaacacaatgtaactatcctacctagagaatatgctggaataaaggaatccaccatgggggactgatcttaccttaagtaaacatggaaaccaattgatcgtattg

SEQ ID NO: 6756 - DNA, 791 bp, Zea mays
cacacagtacacaccgccctcaagaagtagcagcagcggcgagggtgagccgggcactgggaggcgcgcggcgtgcgtgggctcgtctatcgccgagctccaggaaaccgcagggtttcgccgcggagctagattgtgcggggttccaggtgcttcttcttgtccgcagagttccgggggttctttggcttgattctgctgttccgttccggggttttcggaggcgttgctggggaatttctctggttcgtgcggaattcgatcgagttgtctctatgggttgggaatctaggtagcggggcgaacggccgtggattccgtgagtcgtgattcaactgctagttccgtttatgacgatcttgtttcagcgatcaagccatcagccttggctgcgcaacatgcccccaattcgcagaactgcgatcgctagacgaatttggtggttagtttccggttcttcatctggtaattagcatctcactatgctgttactctccgatgaatccttggcaatcttcgtgaaccggtgaacacttcacaagttgctgtaaatttagtttcacacgcaccgcaccgtctttctcaagtgcgtactacattgtaatgtttcgtcatatgcctctccgtaaattggctatatgtttttgtggttctcggtaggtgttcacatcgataagacatcagagatttcgtgcagaatttgattgagttgtatctctgtggtggggatgagtcttcttggcattattcgttctgcttatttaagcattaaatcttttgggctaatcttt

SEQ ID NO: 6757 - DNA, 805 bp, Zea mays
tgtgtagaagcagctctcttcaccaaataatttgcttcatccaatgcaggcatacgttcaagcaaagatgatctgcgcatacaccagcattatcctcactttgacaaaactatggaatacaaaatgatcctcaataattgcagaatctgccactcactttatcgactgatgtctttgtataatggaactgaattcaatagatctttgctgcaattcaagcacagtattccctttattttgcgcaactatttcttttattctcctgacaacacaagaataaaaaatgataaaatatatcagccactttacaatatatcacatcaatctaatgaacacgtagacttgaaactaagctgacactgtaaacaaagctaaagaaatgaagaaaaataaaattgatacactataaactcgatgatatatagttcttattgcagagaaagatcaaaatgatatagttcacaagaaatcatgtgatccacagatgacagaccacaattactggaactgtggatctgttattgcgacaattgtgaacttagtgtttacttgtttaatgatggcaagcacagacagttcatgaacaaatatagagaacaaaaatagaacattttttaagaaaaaacataactggtataaaacaaactccatgcaagtcatttggtaggttgtcctgctacattacaaagtatttaacaactatgacaaagaccacttcaacaataacttactctgatgttggtggaaaccgggaggaaagcttcaaaagagagaccagacacatagccctggtagtaacatccgc

SEQ ID NO: 6758 - DNA, 757 bp, Zea mays
tgcctgcagccctctacttcaatccaggaaagtttttggacataagagataaagataggagacaagctccgcggctaagatcaatggtcaaggatgttgtggaagacggtgcccaatgatgaagaaccaaccaatattggcaagtaagcagacgattacgagaggtccgaaggcaattgcttctcaaagcaattagtgatcaaaggtagaaacaaaaaatctagtaaatatcaagtatttgtctattttccttcttccttgatcattttgttttggtaacatagcactgattagtatggaattgtactacagttctttagtgagcttcatatggtggcctagcttatgagctccaaagtttagcaaaaaatattattagccttagttgtgcagcatttggatgcgagtgtaattggagtgtgttttgttagaatagaatgtgcttgtatatcaggctacggccatactagatcaagggtccatgttagagaaatgaaaaccctaatccattgatagtgggatgagtatttacatatacccaacactagtgggttacaggggttgggctctgggcccataacacttagacctacaaacagtctaccccacaccgcagtggaaactctagccacgacagatgttgagactagaccaaactctgagaacaacgaggaggaaagacccttattgaaaatgtcaggaaactgtgaactcgtcgggacggtgatgaacacgggcattcccaacaacaacgtgc

SEQ ID NO: 6759 - DNA, 807 bp, Zea mays
tttccatctggggatacgttctttagtgagccaccgtgctggctcgatgatctccttgcagattccgggaaagctcccaagcttcctcctctcagaagggcctgtagcgattctgatgccatcttggatgctctgtcaacatttgaaagcccaatttgtcgaattgaggaaggcaatcaaatctctggtggtgaagctgatgacttgttggatgctggcgaaggtggtgaaagcggttctgtggtcgaggctagctgtgtttatggtccgaattcaccaagacagaagagtaggctgacaacttcagagagttccatggtaaatgctgtgcttgagaatgtacccagcaaccccttgcagtacttgagcatcgatgcctccagtggtatgaatggtaatgtggccaatggaactgctgatacctgtgatgcttttggccaccctgatcaagacaagtcatttaaaaggtacacttacatttgtgagtgaaatatctaaaatacttccttcgaatattctctggtaaagtagcggtacattgctgcttttactaaactggagttttttagtgaaaatgctagaaagatataaattatcaagtgcagatgtgaactttggctctcgccaacagaaatggaacacgacactctactgctttgcagaaattaaattaactgatggcgcttctaattgagtaacactaacgacaacagctactatgccaatcaggttttaggtgcaagtgtgtaatgaacctcttgttccgttagacattattccaccgtaatataacttggtttgttagag

SEQ ID NO: 6760 - DNA, 804 bp, Zea mays
atcatgatagtagaagtaactatgtcaaactttttgtcggatctgttccgaggacagcgactgaagaagacgtgagcattacttccatgctactatcttgtcttcttgcgtaatgatctttattttttctagcatcttttatttgaactttattctggacacaattttatttgtacttatggtgtgttatcattgtttatcaccgtgcacaaaacaaactagaagcttctaactaagaccctgtttggatcctgtacggtccaaagttggctaaagttaaggactaaaactttagaccacttcagttcacttgtgtggtttaaaggttttgtgaggttggctaaactttagataacacttagacctgtttggagcctcaagagctaatgtgaccatgggatccaagcagggcctaagttcttgaaggtagcttatataagataaaagattcaaaagcttttttgtcatataatgttcatagatatataaatttgagtgaattattggatttttaggattcagtcaaagcggcatcaagacaatcatttcttacaccttttcttgtcagttccagccaccaattgtgatcattgtatcagttactttcttattggctaacaagttgattgttgaataaatctagtcaaatatgcatttttctgtgcttgtgatgctttatttttctattatttatatttttggattggtcagtttgtgacacattcttgtgtcttcaggttcgtcctttatttgaggaacatggagatgttcttgaagttgctctaattaaggataggaagaccg

SEQ ID NO: 6761 - DNA, 771 bp, Zea mays
ttgcatgcctgcagtgatcctgacgacaggcttgctccaagacctgttttggccaggtattgtgaaactgatggctttcagaattgtcctttatggcttgtgtataacactccttgactggatatacttttgcaattccagactttctgtaactattttgagcttaaacttttgttatcagtccatccatgaattactcatgctaatcattatgtcccttgatttctagaatggaagtgacatttaatctcagtagccatgctcttgtaggacaccagacgaagtaattgcagccaaaggtgtgaagccaacattatcaccaaatctcaatacacttgccttagtcgaggtaagtcgctccttttaactctatacttcccatgcccccttattcttgatgcaagctatggtgccatgcctcctttccctttcttataacatatagaagtaataatgggtcatatcagcatatctctgagagtcagagagaatcagctgtcctaatattaatttagggttaattgatccagatattcgttcccatttcccaattcaagagaattagaagtagttcaattatatttgaatttgttgcttggcaagaccgcaaatgtaattctattagcctattaaatctggagtagccccacattctagtgggttccaaagcctattccaatcatccctccaaccataacaatacatatgatatcctatagtgaccagtttataaatccagagagtttcacagtttcctttggcaggcagctg

SEQ ID NO: 6762 - DNA, 794 bp, Zea mays
agtaatcactgccacacttccgggttattttcttttggcccggtatagtatactccctccgttcgtattgacactgcaaggggatttgaatgacaaaggctaaaacagcaaaaacattagcggaccaacgaagcttacctagctagctacagaccgtttgaatcgaagctgacattattcttcatcgtatatagaccttctgaataatacctgttaagaactatcgagagaaagagcatgtgaaggttgtacgtaaaacaccatcaaattttgataggaaaacatgacaaacaacaataagataaataatatatttttgactgattggatgttcgacaccccagtcatgtaatccctatttttgtaatagagcgagagggatggtcttattccattgaaaaaaaactaatatagtgctactatcatatcgttttatatagtaataaggggtgcagggagcagacctttttttttttgaaaattacgacatggatacggattgatctcgacaccctctgcaaggagccaaggagcaaagcttggtacgagtagaccttgctactctgcacccccccccccccccccccgagatacccccatacgtcgctttcttcggtaaatctcttggcatgcatagataatatttggaatcaagagaaaaaaattcaaacagttgctttgctccgtccacgtgtgatgtcccactgtcatggacagtggtgctctgatggcgtgggggctaccagcacagcacagcaggcactggttggaaaacatgcaagaagcaatgatgg

SEQ ID NO: 6763 - DNA, 779 bp, Zea mays
accgaggcgtagacacgcgggacgtccggtcgccggccgtcgctctccgagggtcgagacgtccgtctcctgtctctgcgagcggccgaagaacgggaaaaaaagaagcgtcggtctgatagatcaacatctagacatgcccagataacatatagcttggtgactatactatggataaccggacgggacaggacaggtcgatcacactctgaagtgtttggtttgagatatcacagtcatataggaggtccacttatccgagaactgaaagacaaatggtcagaattcagatggcgctgttttcacgctagcgcttgtctagactctgaacataataatctcggttcaaacatctaccaaatcatgctgaaatccgcaggtgttaaaatttgaacaacctgctgttccacaaccaaaaaaaaatcagtgaacgttacaccgtttccctttttattacttgcaaacactacaagctcaccgtagttgtggtagtctaggaaaatctcgtggtcatgggtagctgctacctattttgccgcttgcttctgcctcagtgctctccaaccaatgtcgtgcctgaagaacccttctggccactcgacagcgtctaccgcaccatatgctcttgcccttgcttcttcaatgtccttgcccttggcagtgacaccaagaactcgcccttcaacggcaacgagggtgcccgtctccatctagtgctgtcccagcatggaatatcttgacagccggagacacctgctcagccttggccacgtttttta

SEQ ID NO: 6764 - DNA, 755 bp, Zea mays
aaaaaaatcatttccatttcttttttaccaatgacagtcttacatgtctagcttggaccgcttattttattcagtaatatctaaggatatattaatgtcatgggcatactttagatgtccctgaacccaagcagcgtcaccatgctgacactcagcagccgcaccagaagatctggaacacatgaggtactagaaaaatagaaacttagagagatttgttgcttaacgagagaagatacaaggccatcctatagatgggacaactggaccttaaggaactattctctgaaattaaagaaacaaatcaacataatcttatttttgaataaaaacaaaccataaggctactggaacattcaacatgcaggaccattagaagtattacaacatcaaaattaaatatgagaaactgtaagtggagagggggtggggttaagatggcttctgggcattctgcttaagatagaatgtaacattctctcgccagtcaagaaaacctctgaactcctgtcctacccatacgtagcggcaccgttgcccatgtttttcttaactccagccaaaaaaatttgaggagtgctactcaagccacccaaccaactcaagctagaagcccttttgctaatagaaaacgtacgattgtttcttggagttgttcatagctgttctgttcgcctaagtaatatgaatccaaattataaggtctctatcagttcaaactactgttctaaaaatcctaatgggttactacattg

SEQ ID NO: 6765 - DNA, 811 bp, Zea mays
attggttcacattgaagtgtcaaaccaaatcatggatgatgaaggctttgaatacagatgtgcatttatatcacataagtaatgtggccagaatcagtattcagcttcattttttttccaaagatatcataagcagcagcaacaaagaccaatacaagagttcaggcacaaggactttctcgcgcattctcatcagctgcgtgtcaaatgatccaatccagtataggcttaacactgacccttcagacagcagttacacagataatatttctgcgagccaagtactttaagtgatgatcatcacacagaacagataaagcgtcattggctaagtgaccatgtttacattagatgtaagacgcacagcactggtacatcaccatgtgtcatcaacattcaaatccatgttacagaactttaaggaccattgtgaactacatcagacaagcttaccgttagctggaagaattattacaaaaactacatttatgtagatatttcatgccaacagaaaatatcaccataaccgctgtcgtgtcaagcaacatcatccagtaagggaaacactaaacacatccaaaatttacacccaaatatccacaaattgcatatagcaagaacataccacagtcaaagccacaactcacaagattcataatattcaagtaccaggttgtcaaaccacccatgaaaacattggtatccatcaaatcagatgaatctagattgacggtgcgcaacatacaatttccaaacagtagaaggtcttaaacaccacacaccacctgccataaatcgtgacagcaatatg

SEQ ID NO: 6766 - DNA, 761 bp, Zea mays
tcaaaaaaacaaggaaaatagactctggctttgcatgatgatccagagaagccccataatgctctcaaacaaagcacccataaaacacaagccctataaaagcaaagctctagatacaaatcacattatgatcaaatggaaaaaaatgtcaacctactttaatcatgtgaaccaataaatgctggtagcataatagttggttttctaaaactgtgttatccaaagctgacttcattccatgaagcaatagcatcatttcatccaaatgagccaaagaatattcactatgttcctgaaagtaagaaaaatatgagacattaaggtcatctcaagcaagaagaggaagaaaaacatcagtgtcatgactgacaggaaactaccactaaccttcacaattgtgctcaacgcaaagagagctttgttgtgacaagacatgctgctgtcctgcggaaggagtagataaagtttatgaaaaaaatgaatgtttactaagagttggggtcttggggtagtaggagcagaaataaataaagagtaccagcaaacaagacttgataaatctgaaaagtttatcaagcagatcctcatcagcaacttcaacaaatgtggaaatgagttctagtagaagagacctgcgcaagcaatacaatgatcatataatgtatacatcctagactagcacaaagtaacaagatgagattgagtttcatcataagacacatgcacaagcaaaactacatcatcaagcagtttgtgcgctt

SEQ ID NO: 6767 - DNA, 961 bp, Zea mays
cggcttgctgttccctgcggttgtagccgtacatctgttaataaatatttcaagttcttcacaaaaactatactactgctaatcggttttgttgattaactcaactgcacatggaacaagtgcttaactctgcaagtgactgcaaacacaggacaaaggccaagaaaggaaagcacctggtagaaggatataatatgcaccggcgatatcatgttaatgaacgcgtatccaacattgcatttgttctgcataagcacaataatacaacataagtaaattgaatatgtgtggcctataaaatacaggcctcaaaaacaagagagtagcacaaattggtgctaaatctagtaccttgaaatcaattggcaggtagaaaaagtcataagttcctctgtgaagctcatcaattgcagccaggagcatcttagatgtatacctgttagattcagggaaaagaaaaccgaatgaacacaactgacaactggctagttaaaggtccaaatggaaacataatgcgataaagcatacttgtttgggatgttcttaatcatcaatgttgtccgagtatcatcacctctgtgaatcttctccaagtcaagctgatactgcctcttgctatcagcctgcaacacactgctgtcaacccggcggttgcggacacggtcaatggagctgtcaagtccgaatgtaccaatcccatggtatggaggattagtgtaaaatgtctgtcccaatctaggcgacaacatcggtctgaagttagtagagctgttatctgtcagacttccaattagagaagaaccaggattcacagaagcacgattagccatgcccagcaggagacctcccccgttttggccagtaccaaaattacccatgttcccaaacctggcttgcttcataaaagatgtctctggcaattcaagtaagaagccaaaatggctctcaaatggagcacctg

SEQ ID NO: 6768 - DNA, 802 bp, Zea mays
ctagcttgcatgcctgcagcatatcatagagctggtcattgcgtgttacttgtgcctctggcagttcattttataaatcacgaatttgattgtcatttgttaacattctaaatcactgttattgatgatggtcccctctgctatctatcactaatgatcatgtattcgcatttgcaacgatacctcggatgagtttatgtttactaggcaaatatgcccgtgtgttgctatagactaagaccatatggatatagtgtcacactatgagagtaaatgtgattttcataaaagtgtctgttatatatttttctatactaatttttacggtaatagaaagagcaatagctgtagatcaattttattttaggatctataagaggttgtatcctttaagttctaaaaaaaatccaatagtctccatatttacttagtctgtaactctgtatattttaggatctataagagattgtatcctctaagttctaaaaaaatccaatagtctccgtatttacttagtctgtataaaaattcagacaaaataaaatggttcccaaaatttttattggagtgaatattcaatggattagggctaacccaacaggttagctatatagtgtttacatgggccacatgggccaagccttaacaggcctaacactctaacacccccccgcagtctggacgtccgacgcagcggagtacacagactggactcaaaaagaagtacatcacacaataagatccccccacagactcaactagccactactgatgtttaaggctggagcgaaactcggcgaag

SEQ ID NO: 6769 - DNA, 786 bp, Zea mays
aagtatgttgccattcattttattctggtggcttctattgaatattgcattgttgtgtgtattcatgttttttttctaggtcatccgtggatcagaaattataatgccattaggctgccgttggacattcttatattccgacttatcaaagcttatattcgttcctcatctttacggaaagccgctttgagggtgagtacttcaattttttgttctgatcttttatccttctcttcatggttataaatggctcttcagtttgggaattgtcacttaccttatctaacctcaagtttgttgtactgaaaggcttttaaaggttgtgctttatactgttttttttgctttgaagtaattgatgaatttcttgttaaatgttgttgagtaatgcatgctagtatagtttccttatggtaatctttgccaggaattttttattgcacacttgtggtttagctaggctggggcaacattttagggtaaattgtccttgatttattagttccaagaaaagaaaaaaggtgcctggatgaatctggtgccaatactttcgtttaaaatttaatgttgtgctaacaagctttactttgttacttcctccatcccaaatgaatgatcattctatttttgtgctaagtcaagctaccttaattttggccaagtttatacatgaaaaataccaattaatcgatatttatattaccatataagcatcattatattcatcatgaaaatatatttccatagtataccctttttggtgtcctaagtgttcataatcctccc

SEQ ID NO: 6770 - DNA, 789 bp, Zea mays
cagcttgcatgcctgcagaagtgctttgaccctctggcagttttggaagcttgcggttgtcttcatcaacaatagcagaacgcccaacaaagtatggctctatttcagtccgcacttcatctggaattcttgcaagcttcctagtgagtttgttcatcataacccatttactgcacaaagacacaaattagaaaataaaatgcaacatgatatatgtaagttacacggactttgagcagataaactataaatgcagggtcaatcgtaacatggcagttggtagaaataaatggctaataaaattgattaatgatatagatatatgagtgtggcagagattcgaaccttgtcgccttcagtattgtgtggcctgtcatagaatcacgtatatgccaatccctacgcattccatttttaccattagcactaacccatgtatttacttcaacagtatcacccctacagcagaatagaggagcgacttagaacgcataacagtagaacccagatgatgagggatcaacattcagttcaaagaaggtaaatgttctagtatatgttagttaacataggaaatgtatcaagacttcaagaggttcaatgagtgtatctgtgtcaataatagatgtctacaaactgcccagtgacatacaactatataggctccttatgctaaaaaaactatatagggctcctccaacaagttatttgtcaaacagttcaaaaaaagcactgggggaaactttcctttcacatttattgccgaacaactgaaaccatcattcaact

SEQ ID NO: 6771 - DNA, 867 bp, Zea mays
ttgcatgcctgcagtcaagcttacatatacagtcacactcgtactcccgtggcgacgtggtatacaatcagagatgtccagattaataaatagctaaacagacgattgactggtgagaacgaagctccaaggttgattttgacacaagcccattcacacagcacaagttgttattatctagttataccactacaattgcatagctagtatcagtagtgtgctgtgcagggtctgtacttttccatggatcgtcacagtatcaaccatagttcgtcttcttcatggaccccctcaacatcgtctggcgctatgcgtcatggaggaagaattgtcctgcgttgacgcttctcctcctgcgatgctgtccgtcttagcatgcatgcttcctcaccagcccgtgcttctgtcccgatccgatcctcaattagcgcgagaggcgagactttgaccatatacatgcacctgctaacaatcaacaatggtgggttgcattgtcggcaggtgtcaggaatccacgggcggacgtgtctgttttccttccttctcagttagcggcggcgggcacgcacgagcggcgtgtgctaccagccggtctcccggccggattgttattagctgacaatgagttgagaagcctcgccgaagtagctggcgcggcggcggcggcggctgcggcgatcgccgctggtgccagcgcgtccgcgacgaccttcgctacggtccttgaccggcctccttctcccaggtcacttaattagagaatcgaaccaatgggttttcagttacaaaccagaagtagtacctaatacccttttttcaatcttggaataatataaaagagctataagcccccaatatgagatgaaa

SEQ ID NO: 6772 - DNA, 822 bp, Zea mays
ctcgattctagtgacctgcaggcaatggaggtgctactcctgctgttaatgtagctgcacttgcagaagcaggagttagatttgatgcatactctgaagagctttctattttgcttatgcagttgctcaattccaaccacaaagcatccaatgctgtgttaatttcagaaatctgggaaactgcatctgaatggtccttctcagcaggctgttctggatcctttctatcttgaagagtactgacaagagaactcaaagcctgcacaactctaagaatcgcagttccattggctgatgtagaactaagaagagccttttcagaattctcgtacaaacgaagctccttcattgcacaaaatgtcaagctttgcattgatcgtgcaagctcatttatgaaatggcaacagaagaaaggggccagagccacaatctttttcaacacttcacctacaaggagataagcgctgtccgacaatctgaaaatgacaaaagggccatccaccatcacattaggtaaaagagaatacaagggaacaaaaaactgatgtaagataattcgatacagtataaaaaatgacaaaagaacagagcattgtcctcatgttttttcccttgaaccccaaagaaagtagagtggttttataacagccaaaatgatcatgaaagtagaatgaaccatcaaaaaggggtacaccagatgcagattatgaattagcaggcaagaaaatatttaactgtgttagagatagacacaggtttttggggcagattttactttttcatttgagccacaccacaaaccatgtcagaattgggtacata

SEQ ID NO: 6773 - DNA, 849 bp, Zea mays
cgccgaggagggagctccagctcgtcggcgtggcagcgttgctgatcgcctgcaaatacgaggagatctgggcaccggaggtaaggccaaagcccaaattaaagcgctccgttcatatcttgttgctcgaaccctgaaaaaaaaggcgtctgtcgcgcaggtaaatgacttaatccatatagccgatggcgcgtttaaccggagccagattcttgccgccgagaaggctattctgaacagcatggagtggaaccttacggtccccaccccgtaccacttcctgctgcggttcgcgaaggctgccggtagtgctgatgaacaggtaaagattgagctgctgttctgttcatacacgtcttctgttcctgttctgtcatcattctgaacacctacctgtgttacggcggatgcagcttcagcatacgataaacttctttggagagctcgcgctgatggactacggtatggtgatgaccaatccttcgacggtggctgcttgcgctgtgtacgctgctcgcctcacgttggggaagagtcctctctggacagagaccttgaagcaccacactggcctcaacgagcagcagatcatgtaagttgctctcctcctccactccatggatgttgtccatctgagtgagcttcgagtggcatgtatatataaggctttctgtacaatgatcgtcagggatggcgccaagacactggtcggctctcatgctgctagtgctagccctgatgcgaggctgaaagccgtctaccagaagtacgccacggagcagtttgggcgtgtggctctgcacccaccgggacccggctgctttttcccgactctgtctagagttttta

SEQ ID NO: 6774 - DNA, 852 bp, Zea mays
tgcggtgctcagcttggtgctgatctggggtcctcggaccaggccgtggatggaattctcgggttcagccagtcggattcgtcgatgctatcgcagctggctgctgctcgtagagtgagaaaggttttcgctcactgcttggacactgtgcgtggtggcggcatcttcgctatcggggatgtggtctctgtccccaagctgaagaagacgccgttggtgcccaacgtgtatgtgtggtctctgtttcccattcttatgattcatgtttcaccgtgtagtttctggaagaacctcattagaaatttaccacaggacgagctacaatgtcaatctgcaaggaatttctgttggcggtgctacactccagcttccaacaagtgcttctggttcgggtggcagtaaaggcactactatcatcgacagtgggacaacactggcatatcttccgagggaagtttacaggactttgttggctgcggtatggggatttctgtatcaaacaatcttttgtagtgaagaacaatttgtgcctgccatgccaatatgatgttctctgcttgaccaactttaggtatttgctaagcatcaagatctggccttacgtaattatcaagacctcgtgtgtttccagttttctggaaggtacataattatcaagactttttatactctcatgttttctcggtatatggacacgttatattgcttcatgcgtttgtacatttataattaatcaaagaccatcccatgcatggacttctttgcttgacaagttattgtttgtgtatatttctaactccacaccattcccttttgcagtgtagatgatggaattccccgtaatcaccttta

SEQ ID NO: 6775 - DNA, 765 bp, Zea mays
cagcagtcctgctcctctgccatggccgcgggactcgaaataccgtgtcgcagctcccacgtacccctgaagcgaattcatctcactctcgccgcccttctcttccgagcccgatgaagagtcgacgaggctgttgacgctgactctcttgaggtcccagggcttgaacacgcatttggtgatcccgcagaagaacagaagaagtgctggtgtgaagattctcccgtaagcctccatctcttcgttatgggcctggatggcatttaccttgtcaagggtggcttggttaactgcttggtgagcagtagtcaccagggatttcggccacgccttgacgaacacatagatcgcagcggcgacctgtcaaagcacggcaccagaccagatcgagtgagcatttgcagcactttaaaagcgatagtggaatggaacctcctcctctaatgttctctactctggtctctagctaagcatcgaaactgctaaggttaacaagtgcgacaataatctggtttgggtgatgattacattaatgtttatggcccagttcaacaagaccaggaggcaatggcagagttagggagggtaacggatcatgttccaaatgtttattcacaataaattaaggttcttaaataatttttagttcaaaaataaatataaatggagtctgatcataacttaattcgatccttaaattttatagcggaaaatttagagctcattatcaccctagataaagttttgttttttcttgaataagga

SEQ ID NO: 6776 - DNA, 789 bp, Zea mays
agatcagtagggtttgaaaagctcacaaatccatagcctttagttttgccagtcctcttatctctaacaacctgaaataaagagtacgaggcaaattaagaatgtatagaatcaaaaaatgcatgccaagtgctgcacgcaatgactgacataagcctcactacttatagatcagcatatggatttctttgagttgatctcttagctcctctctcaatcaggtagtatatgcttcttgaggtgaaaggttataacttataagcatcaaaggaagcagagaacaagttcaactaagtgtagattgttactacgaatttcttcagggatgcataagcttatatgagccctgttgcttttattttggttttcgctacttcatgtgacaagtcattaacaaacagtcatcaatgcaattatcagaactagctagcatgaagtagcatattaccatgaaaagatccataggaaatgctggttatctccaatgcatgcaaaaatgtatataggaaacaatatcagtatgtgcatcactgatgttatgtaaacagctaacagttgcagaaatcagttttatgatttgaatttatcatttctttatatagtcctttggcaacagtcaggcgctagagagatctaaatggaacagtgaaaatccattttaatgcttgtcaaccattttgatttcttccaagttccatacttaatatctacaccttactagtgactattaaggaacttagtagatctaaacgactaacagggttatgtagtccacgatacaaaaccctt

SEQ ID NO: 6777 - DNA, 807 bp, Zea mays
gattctctccgtaatgctccggcaagtgcttcttccagtgacctcaccttcaataaatttatgtatatataagcgaacaaatttctactttaatcgatctgcggcgatgcaaaaaaagaacaatatcatgtaacaagagatgtgcttgcatgtttatgctcaataatattaaaaaccttgtgaagctcaaaataaatgttcaaacctgaccggcactcaacatgtaaaactaagtcatgagatccaatggacagttatcaaatgaacatagcttacctgcttatttgaaaatcgtatatctttcaaaaagtgtccgttatgggctttattatcattcttgtcatccacactcatgttttcactaccatcatcaacatcacctccaaaaacatcagctgagaaggataaagatctagtgacatgttgacgcttgaggacagcaagctcctcctgatagaaggacattcttttagtttaggatcatgaaacaaacggtagatctagaattctccatgcatcacctttaggagacgtatctgatgttgtaaagctagcacatctcctgaagcgtcttcattaacaaccgccttaaaatttgaatgggaaagaaatgcttgtggttagtaactgaagatgttttagaagataaacatactgaaatggcatataccaacattgttctgaatgagccttgcacgctgagcaaacttcagggtgctgagtgtttcgttagcagaactgtatgaacacacaaaaaggatatcacaatatttacagtcacatctttgatctccaacataaatattc

SEQ ID NO: 6778 - DNA, 832 bp, Zea mays
tttctctctcctcttgacttgttgaggcatttatcgccacctccagttctcgacttgctgcatgcatcttgagaatgaggggatcagtaaatgcccaaaagtccatgccagcacctccccaccccccatgaacaatcatggacagatgctagagaacaaaagagaagcaaagccgctgctgtgactcttgttcaagatatgactactggactgtaactcctcttgaactcgtcttataaactaaaactgggagggactaccagcaaaagcaaacgctctttgcagagttggagtgatcgagagcaagatagcagattatttatttattcaactgctggagcctggtgagtggtgagtggagaacggagaggagaggagggggttgcgagaaaaggaagggacgacttgaggggggtcccggtgtctgttgcagatatgaagcgacgtctctaaaggctatctctactccctatagcagtagcagctcgacacagccaagactgttcttgtctgtttcttctctgcgtgtcacgcgtaggctttactacctgaatagctctgtcagcggcgacctttctgtgctgccgtctctcgttttctgctccttttgcctgggcccctggtctgaactgtaatactgatcgaaacattgtcatatgtaattcagattcagagttttttttttaaaaacaaaacaaaaagcagagcttcgcttaggttgaagttgaagctgagcgaaaagttacaccatcttttaccgaaacttgagtagaatctaagggagaaagacaagtagctccgttctgctaccatatattagtagagtaaaaca

SEQ ID NO: 6779 - DNA, 576 bp, Zea mays
tgcatgcctgcagtggtagcagcttcttcttctttgcacaaagcaaggaactgcacaattaagcgatctcgaggaaatacagagaactgggcggtgcatgtatgactaacccagttatcctgacgaggcagcagcagctgaggcggcaccagcagccctcccctagccctagcagtgtgacagatccgcagaggcagccgaggggcacatctgcttgttagaagagccattttcatgtcaagtgtacgtgttctggcacactcaaacgcagcaagccagtacttatataccagcactaagacgtatcactaaaggtaacgggaattactagtcttggtttagttagttcacgtcgtcggctgacgtgaattacttaatttttgtcggctatacagcagcccggcccacgaggattaattaattcatgtcgactctataattcctgccggcttggctcactctatggggatttaaacgttaatttccatcgggcatgactggcccataggaattaactgctaatccccgtcagctacttttggtcggcgataattatttggtccatgtgatgatgtg

SEQ ID NO: 6780 - DNA, 957 bp, Zea mays
aaaatactcttctgctttctggtggtgcctaatgtatgttcataatatatttgtttagaaaaaaaaaataagaatctcaacagttcgttgttgacattaaatggacaaacctgaatttctgaaagaatgcaaccatgtaatgccattactgcaaaggaacagtgcctcaatgctccactaactttggtgaagctcctccaaggatagttcattgttttgtaaggcccatggggtggctcccatatagcaaagccaagctgaaaacatactagaaattaactaatcaaattcatcaaaatacacatggcagactgttgattgttgaatatggaacaagcacaaaccagggtttcttcctgtgctgatgcctcaacagctgccctgtacccactatatacaggatcatcagatgcttgatacacaagtatttttgaaggaatcctttcatattccatgcatctcagatatccatcaacacaacctagagcaaatgttcaacgaaccatatcgagcatataagaccttgatgtcattagtttggtagatttggcaagaaataaacaaatcagatgcacgtataatcgatagccagttgaccaaggacacgaaaaaataacatttccaacattggaaatacttctgaattttgagcaggatgcaaggtcatacctttccaagggattttgcaacaccagtgaaaatttttttggttattcaaagtttatgccaaaatcctttttcccggcccaaaaattggggtaggaatgcccttaaaatttggatgtctcaaagaacttggaccaggccatgccaccccaattaggccaattccaatttataaaaatcttggctttgtaagccttgaattccaatggaaatttctcccagatgggtggtgaccccaggagaacccttttatccttacccaaaattggttccaaccaaggaaccacaccg

SEQ ID NO: 6781 - DNA, 788 bp, Zea mays
cagcttgcatgcctgcagcgatcgagcaaaagccagcatcagcgagcaactcggcgacgtcggcgtcgccaggggagcccgggcagagaagcacctgccctctgcatctggaaccccgcgcgggctccgccggccgcggcccgtgccgcgacgactcggcacgcgctagccagctataggtagctgtttcccttcccgccactatcctgccgcccgggctcgcgtggcggatgatgattcctagagagccacggcggccggagcacccttcctcctcctgaccccgagctgccccgcccatcgcagcgggcggctctgccctccgccgcagcgtctgtgtccaggtgaggttgttgcccccacggatttggagccggttgttgagttctcggatttggtagatgcgtggctattcgctgctggattgggtaggctcagtcgtggatctgggagttcgatttagctgcatgccttaactgtgaagtaaatagctttgagaatctgccagacttgattgaagtaagaatacttgaggagcaggaattcgagcctcgtgtcgcttaaatgaaatcaaacttagtccatcttgttggtgcaaaaattcccctctttccatgtgtatcgctcaccgcaactgctattctccccatctctggtcgttgtcgtagactggaggatggagactccgcaagtcgagatgggcggtttcaaggtcaacagcccgcaagtgcccaacggtggcttgcggcccaccgtgtcttcgtcctggaactcgcaagggacggtcg

SEQ ID NO: 6782 - DNA, 885 bp, Zea mays
agtttgagcatagaatcgcttacgctgtgctaagtatttgaggatggcagttgtactccttggcaaacacgaaggggacgatgccttgtggaagtgcagcctgttgatcaatcacacacacgtacgttccaacatttacagtaatcagtacgaccgtcacttttcccccctcattagaaaggcttgaaaattagtagagcacgatgtgtacggtgtcgatgccaacctgaacgatggcgacgtgcaggagcactccccggagcccaatggcgatggaggtggcggcgatcacggccgggccggtcaaaaacctcacggccatggcgaacgtggccaccctcttaccgcaggagatgagcttcggttgcagagccatgaacagacctgggtcagacgttgcacccgtcagaatttctcggctcaagtaaagaacgtacgtacgtctctaaacaagcatcaaaatgccaacggcgtacctaagctgaacatggccatgcctagccctgcgtcggataatatagatatcgatccctttataatcgagggcatctggatgttaaacctgagatttcatagagggaaaaattgttaatccaaccatgttaaccagtagtagtagtatagttagcaattcgcatgataaaagaatcaatgcattgcagatgcatgctggtgtatatttatatagtatatgtgccaccctctcttctagaaatgcctgctgtttttcagctcccctctagctagatgtgccatgccatgccttgtcaagcatctcgagtagtaaaatagtacaacgatcaacgacgacgacgagcgcatatgattgtactgtctcaggacacgacgcatcgtgcattttgtcccatgatgcatatgcatgga

SEQ ID NO: 6783 - DNA, 875 bp, Zea mays
agttttcgcttttcaaagatgctatcgacaaatgtttccttttaactctttccgtgctgcactctatgtgtgtgcgtgcgtgcgtgtgtgtatatatggctatcatttagcaatatttatctttttccacgagtggcaaatgttaaagcacacaccatgctttggctatggctctcatcaatcaattctcaaccggaagtgactcgcccacgcggtcgtgggtcccacacgcagggactcgcgtcactggtacgctcttcactatcggtagtgcaggcagtagccgcttgtatgtagtgtgtagccctttcctttccctcccgcgagcacgctacgaatcgccgtggtaaatgctcggccgcggcggccattagaaggcgctaatcacgcccaggattaaagagcccccctctccgccttggcctcggctcgcgcacctgcctgcctcactgcctgcctacctacctgcgttgttgccttcttcgcctcctccccctgtggccgcaccgcagcagctgcggcggcggcagaggtgaacagcttcccgcggccttgtcctgtccggactccggggccgggaccggcagcgcagcgggctcgcaggatctcccgagtcccgacccccatgcgtcggcctcggtgacaggtaacggaggatttcacccccccctgcccttgtatccggttcctggtgctgattgctacctactaagggcgcgctgctcggagtggaggaattggcggctgcttgtgtgaccaggaccggcctgtttgtagatgcgccgagtctgcattgcgagagcggtatgcggtcttggcttgctgcagctcgcgctcttcgttcaatcaggcccaatgaacttgagatcgtaagt

SEQ ID NO: 6784 - DNA, 805 bp, Zea mays
aaatatatgaggaagaagatggtttagatggtggtgtagccgtgtaggtagctaggcataagctttcttggaagatacagaaaagagtagatgtcgtgcaaatggattggattggaaagctatatattttcttcttctacctttctggcctgaagaagccgagaattggctggagccacatgactccgtacagcgccagccccactctctggtggctgttgctgaaggagttctcgaagttcatcagcgacagaacagcgccgccggtggcgaggaggacggccacagtctgcatgcaaaatcgaactcagttgggttaccttacctgacgtgttatcctctgacgcgctctataagaatataagaaacagtagaacagaaagctcgtcttccaaagcaccacaaggaaaacctgcgagatggcatggcagtagaagagggctctgacgcatctgccgccgcggcacttgctggacattctcaccaggattatccccagaggcatcaagaacccaaacgaagaccagtggaacagcgcgtgcagcctgagctggaacgacactcccggtgtcacctggaagaaaaaaggcaagcaacctgtgcgctcagtaaaaacggaaggtttgtttgtgtttcccagccagcatatggctcagtcagaatcagaaccagaaatccgagtgttactggaagacctaaagacggaggctggaaacggagctctgcttaatttaccttcagaggatggctgctggtcctgttgcggctctcgccgagattattccccggtgagttcgatgcgcca

SEQ ID NO: 6785 - DNA, 720 bp, Zea mays
  unsure (1)..(720): unsure at all n locations
atgttccagtttcctgtaccttgcttgaattatgtacactcttcacctcaataagttcattcagtatgcaccttaaatatttgctaatggtttaaggaactacatcagtgtatttttgcacaaagttctgtctgggactgcttgttttgggctcggagttgcaaaaagtgttaattgctttatagtgtcaacaattatgatttttattgtaaaacctcgcctagaacatgctagtacaagtacacacatttctaatttgtatgtccttggatgtgcaatggggttgttttgacttaatctgctgtacctgtttacttaccttttccctgctagctgaatcctccaccttcggaagctctgaaacgaatgcacatgcttgcatgcgaccctggtgtaattgcgatcatgaaaaaggtaattgccttaaagaagtgatcatatgcatactaagggaggtccatttttatttgactttgttgttgttttcagcataaatggagagtcggaatcatgactgagatggctcctgttggatatgtaggcatcagtccaaaatgtattttaggtttcaataaggtgaacataagctgtcacaatttatatgcaatagattgctagaaaaagtaacacattagtttctgaaatatacctgtgggtcatattattcatgcagaacatgggagaggagatatctcttcgcctgcgaactgatgatntgaa

SEQ ID NO: 6786 - DNA, 734 bp, Zea mays
accacctccaccgtggcgttgtacggcagcgtcctgaccctggtcgacttggccgtcgcgaggctcatgccgcgcggcggcctggtgtagtcgaactccaggggcggcgcgtcggggaagtcccgcgtgtagacgcccgccgtggcgttcctgaagtgcgcctccaggagggacatggcggcggggagcacgaaggaggcgttgttcatgctgccggcgaacacctgctgccggctgccgccgctgcaccgcgtctgctccggcctgcacgccgcgagccccagcccgatggtgacgagcatgcgcgtgtccacggcgagcggcacggcgggggcacgggcgcccgggcggacgagcgcggccaggctcgtgaagaagcggtgcgccgtcgccgtgtcgttgggcggcggcatgatgggcgcgagcaccggccgccgccgccgcggtccctgcttgttctgctggtggccgacgtcgacgtactccacgacggctgtggcggtgctgttcctgaacgggaggctcgggcgcgcgctgttgtagggggaggccatcatgtagtagcggcgccgcgacggcggcgcggcggccgtggccatgagcgcgtccacggtctgccccggcgccaccaccacgacgtcggtctcgtaccggcgccgtgtagccccgcgtcggcttccacgaccgtgaagctgtggccggcgaccttgaaaaacatgggcgtgttcaccgcc

SEQ ID NO: 6787 - DNA, 839 bp, Zea mays
tgattggagaaagaatttagcaaaaaggagaaaaaatcaatagaaatatatctagaaaatccctaggtctgttattaagttgagctttatgcatgctgagtgggacacaaaatagcagagtacagtagccctagctgtggttggccaatcctgacacattatcctctccacctcttcagaatccggacctcggcagagtccagtactccagtcccttgtgcatctcggcctctccactctcctttccacgcccgtccagtcctctaatctgacccctcttctccagccggccggagatggtctcgctgcgatgcacaaccgcgcaccactccctcctcggctcgccgacctgcctcgcgcgcccgcggcggcgggcgtgccccgtcgtgcgcgctgccgtcgccgtggaggccggcgcgcaggccaaggtctcactcatccgaattgggacgcgtgggaggtgatcaaattccaccctttctgcggtttctttggttgggatggcgatgaatgtgtggttttgttgctcaaaatcgtgtctttaggttttgttagcagttgcatttggggacggcggctatgcgttgcgagcgcctgagagatcctgtgtttagctctaccgccgggaatgtgagttttgagatgtggctctgaacctattgcgtctctattactaggtgttgaatattgtggataatttggtgaaatttaaaggaaaggagtgtcgagaatctttagcagaaagggtgcacttttttgttaagtaggatgcaatttccgatcagtagtaactgggcgttgaccttgataaagcttaataatggctcttaattagtcga

SEQ ID NO: 6788 - DNA, 815 bp, Zea mays
agccccctgaaacattgagctattaaaaattagaaaacgacacaccttcagatactttctgattctaaatctaaatatgaaacctcttggtccttacttgcaagtaaaagctacatattatacaagtaatttgatgacaatgagctatgcagtcagcatggaaatgtcaaaacctatctgtgagaaaatatcaggagacctagcattaggattcttttgttttatttttctactgattgaattcatgcatgacttacctagtgcaatctagatgaaaaggtctaacattttccccatcttaattaagcctgctacaattcacaactggggagatagaaactcaaactatggcagaggcataagtgtgtattagagtcaatccatctacaatgaaaagtatgctatattcataggtattggcatttcaattaatcagacaaacagtagttactgcacgataaaacaactgaacatcaactttctagcattttgctgagataggacccccgcagggtacatattacaagacaggatatgaaggatggagtagcatagcattattctagcataattatattaacataacatgattaggtcaggtcatactcatccggaagttgtgtttcgtcaccatagtaactttggcagcaaaacaaactagacagaactaagtagtgaaaaagaagcacagatcgcagagagcagttcacatattttactactaccaagtagcaagaaccatgtttcatcaccaccctacctttggtagcaaaacaatctacatagaactaattattagtataaaagaagttgaa

SEQ ID NO: 6789 - DNA, 796 bp, Zea mays
aagctcctgttgtgtttgcgaaggcatgcgaggtattcatattagagctgacattgaggtcatggatgcacacagaggagaacaagcgccggaccttgcagaagaacgacattgcagctgccatcaccaggactgatatatatgacttcctggtggacataatcccgagggatgaaatgaaagaggaggggctcggacataatcccatagttggcctgccgcctgctatgggggctccagctgatcatggttctcatccatattactatgtgccagctcagcaggtgcaaggagcaggtatgatgtatggtggccagcagggtcacccagtgacttatatgtggcagacgccgcaagggcaagcggcagagccccccgaagaggagcagcagcagtctgcctgaatgtagcaaatagacgataacagcaaagcaattacatcttgatctgaagttctgaacttagttctctaaacaaacaaatatgatttggttatgttaattgtgcagatgattgcaggctgaaacaattgtcgctaattaggtgtcatagcctcatagggtttcctaatggtagtttcgactcccgacgctgccacggcagcagtagaaaatgattgtaatttgcagactaatgtagtaagattagccttttctgtctaatccaatatacgattgaggccctcgtatgaactgagtgttggtttgccttatttttttaaccattgggcttctttgcttggctagaatattgcctgtcaccaaagtttcgtagttaattccaggctgaactgatt

SEQ ID NO: 6790 - DNA, 890 bp, Zea mays
accagcaataagagtctctgatattgtaaacatactgaagaccgaatatccaacatacacttaccctcaaaagtaagtctcttcctcgggtgacttttttctgtcccctctatgtctttgatggagttgactctacctgtggttttctaaaacatataaggtcttgttcggttattcccattccatggggactggatgggattgggagagactaggagaaattttgatttgctagagatttaaatttactcaatcctctccgtccacatggattagcatcaaattgaacaaggccgaacgcggatgcacggccagaattgagctggtgaaaaaaaatggaagtgaccccattttttcagttaaaatctcaacttttctgattgacaaacatctgagtgctctaactgcgtcattgctgtacagaaacgtaatcatatgcatttacccacgctgtttagcaggtcctatgcggttcagaactttgcaccgtgtttttccttcccatctgatttacccattgaggtttcttttgtatctgaaagatagttactaaaccttgggtgcgtcttttattcttctccatcgcaacacaatgacttgcagattcgttgaagcggaaggtagcaacacatacaacacggagaagcttcggaagctagggtggacctctaggcccatggaggaaaccctccgggacagcatcgaatgctacagagctttgggcatcctgaactgagcttcccttcagctttgggctttggctgctgctgctgctgctacttttcagcttctttcttcttcatggtaacagtgaaatagaaattcagaatacgctggtataggaactagagaagtggatcatggaagatgctgatgcctaaaatgaattt

SEQ ID NO: 6791 - DNA, 748 bp, Zea mays
tgacatccacggcagtgtcaaaggttcttgtgaacaacaattcgaagggctcctcaggatacagctctttccaaactttttctgactcaagtgtcgactttgtttgagtggacgacacaacgttgttattgttcagtattctgccatacactttcttgcagtcccttatgtactgaacctgaaagatatgtgctcgaataatcaggtccctcggttctctgaatagcatcatcaacaagggtacatgcatacaagatgcttatagatcatttccaaatatagtcatcatatgtatcagtaaaaaccatgcagttggcagtctgattcatcgttgagatcattcataacacaccgaagggtacgtgaattacagatgatcatggtgggtagggtgtgtaccgggttaagccgatggcagtgccatatccactcacaatcaagagggacaaccaatggaccatctacaaccacacccttagtgtgcttgtcaagaaggggaagccagcatgctttgtacctagaatatggcaacaaaacaatgggtattatatcgcaggacatgaatcagatggcatgcacatcattttcgagtaaatatctccgggtaaggccaaaaaaattagaggaagcctttgtacagttggtcctagctctgtgctgaattctacaccgaaaactgaatgaagtccaggcaccttcaccccttacttttcaactagagatttgttctacactgacttccatcaag

SEQ ID NO: 6792 - DNA, 595 bp, Zea mays
tgagtagtgtaaatatgtttgtggaactgtcgcagatacgcattcttcaagaaaatatgatcctatggttacaatacaaagttcatagatggcctttgacaagaacaacgtaccaaatgaggtggttcacaaagaaattaagcaagtgcaaacgacagcatcaaatggaaaatggggcgcccaggaaactgacaaaagccttaccgggacgactgtttcttgacaaccttctaaggccttgttcatttacaccaatccagctctggatgccttgttcatttacaccaatccagctctagattagcacggattagaattaaatccatatcataatctatgtctcaaaataatccaagcctacttaatttttttattcggttaaacccatcatggattattaccaaggattcgggaattttataaactatggaagacatagattctatccatagctcattaagtatggaacaaatccatgaagacattacataagtttatattagaattcatggatcaaaagaaaactatctttgagagatacatagattaaatggtggatttaatcccaccatcaaattgggtgtgacatatggat

SEQ ID NO: 6793 - DNA, 798 bp, Zea mays
acatttgtagccgcagctattatcaaaatcggcagccgaacagcttgaaggttcttaatgttccaattgtatatgattttatcaggttaatgtgaatggggggataaagaaagaagataaacaatggaaaacatcatataccttgtcattctgtaggctttgaaggtcccccagtgccttttgcctcgactgcgccatgaacaaaacagatgttcaagtaactaaaaaaggtgctctaggcttctagcgcaaagtagtgatatgagaactgcaatatcgaccaacagtccaccattttttttcatcctacagggtttaggcagacaagaacccaaatctcataaaaccacctaaggccttgctcgtttacaccaaaccagctctagattagcatggattagagttaaatccatgtcataatccatgccccaaaataatccaagccttctcaaaaaaatttattcggttaaacccatcatggattataatccaagggtttggaaaattttttaactatggaaggcattgattctatccatagctcattaggtatggaacaaatccatgaagataatgcacaagtttatattagaatccatggatcaaaagaataactagctttaaaagatacatggattaaatgatgaatttaatcccaccatgggattgagtgaggtatggattcacccaatccagacccggattaatggtgggatttcatccccttgtaaccgaacaaggcctaaatgcggaactcagctgtcatttctgtactgaaactattcaacattattttct

SEQ ID NO: 6794 - DNA, 774 bp, Zea mays
tttgagtagtgtaaatatgtttgtggaactgtcgcacatacgcattcttcaagaaaatatgatcctatggttacaatacaaagttcatagatggcctttgacaagaacaacgtaccaaatgaggtggttcacaaagaaattaagcaagtgcaaacgacagcatcaaatggaaaatggggcgcccaggaaactgacaaaagccttaccgggacgactgtttcttgacaaccttctaaggccttgttcatttacaccaatccagctctggatgccttgttcatttacaccaatccagctctagattagcacggattagaattaaatccatatcataatctatgtctcaaaataatccaaacctacttaatttttttattcggttaaacccatcatggattattaccaaggattcgggaattttgtaaactatggaagacatagattctatccatagctcattaagtatggaacaaatccatgaagacattacataagtttatattagaattcatggatcaaaagaaaactatctttgagagatacatagattaaatggtggatttaatcccaccatcaaattgggtgtgacatatggattcttcaatccaaacccggattaaatccatggtgggatttattctcttgtaaccgaacataaaagattttatcaatcatctcccagtatctggtatcgctgatcgttgttgatgagcattcgacaggcacctagttaccttaaccgagataaggtacgcaaacgcaagtgaaaactac

SEQ ID NO: 6795 - DNA, 831 bp, Zea mays
attaaaatgaatgtgtaaattaagatagcacttgacaaaaacaaactgtgttccactgttactggtatgtcaccaaataacttgaattgctagtgctacttaaagaaaacaaacaggcacgcattacagaactagtcaacaaaatagtaagagtcagtctgcttatatacaagtatacattaagcaagacagcaattgaaagatttatagtaactaatatatgaatccatggagttgaagtaggtagcacatatagggtttactaatcttccaatatatgtggtatacgtgttcaagtattcaaagagaaggtcaagatctaatatatataaagcctcataaaaatattcttgtataaaacatttccaagggcataccttcccgaaacagtctgagaagttccaggtcctctcaaattaccaagccgttcttgttcaaggcacaccgcggcaaattttttctccaaagcagctatctcttgcctcttctttttagcctccacttcctttgctttatgtaatgtatctactttctttgctagcatctgtaggcaacagttgataagctaaaccatagaaccacagtcatgtttcctcacatacaatatccactatgtccaatctaattcaatactagttttgaacactgacatggcctctaattattgtcggcaaacagattaacaatctcactaccacactactccctctgtttcagaaaaggttgtcttagttgtccaaagtcttaccaaaccaacaaattctagaaatttgtattggttatcatcatcagatctatgtttctaggatcacgatgagaaatactttcata

SEQ ID NO: 6796 - DNA, 806 bp, Zea mays
agtcggtatggttcagaaatagacctgtgatgcaccatttttacaagtttagggatgtgaggtatatcacttaacaagtttaaggatctaaaaatgcatttttaaagtttatggatctaagtgacattccttgacaagttcaggggctaccgatgcatttaactcattgcaaaatgcagatcccttactccctttggcaactggtagctcattttttttagagggagggagagagagagataaagaaaaaggaaattgcattaggctcagttcctagaagtcagtattataaacatgttgctgcaaactatccaattcagcatgtttctgcatggtgtaatttgccagcatgcaatagagctccacttttactagtatatatactttgacaggtagttttgcaaaccgggtgtcctaaactaaagggaagcacaatttcagagatgttacaagaggaaagttagttgagatatgtgaatgacatgaaaagttgctagtaattctcaccagccaattgtccggtagagttgatgacccctgatatttcactgtcgccatttttcaagcaccagagatctgttggataataaataggaatattcctatccctagcaacttgaataatttgtagtacttccttaactgcatttctttctatgaattgagagggcactgtcattccaaaaccattcattatttgaaatgataattttccaacaaagaacaacccatcgcatagaaagggtaacgtctgaaaagcaggtcgctttttttaaaaaaaattactgcgctccaaatctgcaaat

SEQ ID NO: 6797 - DNA, 771 bp, Zea mays
atgaaaaagatgattcttcttcgaattcccaagaatcttcagataaagaggatcccttggaatcttcagaatgttcttcttatacttctatggatgacacagaagttgagagttctacagcatgtgaaaacttgtctagttccatgttctcattatactgtacaagcacaggtgaagcaaaaggctccttggtaaccagtaagctgctttctccccaatccagttcagttgactatggaataaattgtgcaatccctattgagtgtgagaaagatgacaggttgagttgcaaacatgtccttgtgcacccacagaatactaagcatactgcggtgcctgatggttcagaactggattatcagtatagccagttttcaccatttgacaggtttatgaagagagccagttgctcatttgaaagcatgaattcagttggggagtttttgtattctgatcataaaaggtcagtagagaaagtatcacatggtaatgcagtttatccattacattctgaatcagggactactaaactatcaaacagtaaaaactatgaaaagtttggtactataaatcagccatggaataccagtattccttacaatctcagtttgaaccccatactgaaaaatgcagcttgttaccatacagagagtgacatgcaacagaaaagcaagaaccaatcacttgccagttttgattttgagtcagtcatggatccatgtgaagtatattgtgcaaggagccccttccttcttgttgagtctgtaaatg

SEQ ID NO: 6798 - DNA, 767 bp, Zea mays
agcgccgcgttgctgcgccgaagccgttcgttctcctccatcagcacggccgcgcgccccgcgccgccgccggcatcggccgcggcggcgggcagcggcgccggcgccggcgcctgaggggcgcccagggctaggagccgcgtagacaccggcgcggcggcgtgcgggtgcggctccctccaatgcgggtgcgggtgcgggaacgcgaggccaacgccgtgcgcggcggccgccgccgccacaaccccgtcgtctccccccgcgaacgggtggtggttgtggtggtggtggtgcgggccgcccgggtggaagacggggaagtgtggcgaagcgaagaagggcggaggcgatggcgacgccgtgcacgccgacgacgtcttgcgccggtggatctcgcagagcagctgcttctcccccttgcggaagaactcgttcgcgaactcccaccgctccgggacgaccttccggaatccctgcattgtgtggcgttgcagcgttaccgaccgtcaccatccgtacgtacgtggtccacgcgactcagtcagagcggaagtgcaagcaacgcaactcatactcacgtaggtgtttagctgccggaccaaggaggagaagttgttgtgcttgaagtagttggggaggatgtcgcgtgcgaaactcggccggccggaataccccaatggtggagggcccggtcggccttcccaggtagacgatggtggttccggggggcccggttcggtcccaccccaccctgggttaccgctcct

SEQ ID NO: 6799 - DNA, 793 bp, Zea mays
ctccagacggacctgaacagtatgcacgcatcgtcatcaatgcagtttctagtttttttttcaggacctagttttcacttcatcaaatttatgtgcagatatgtggcagtgatgaattcaatattttctgctcaacgttccatggtatcacatcaattgcttaatccattttagtcccattgagatttattgatcttttcgtttcaccagccagtcactatgttgttacttattacttcttctgtcccagtatataaggcgtaaccacctctggctcaaagaccaagaaatgtatttaattctctctatacttttgcatcgatgtacgcatgtctagagataatacgccttgtattatgggactagaataaaaagtagttacaccttatacactaagatagagtaagtacttaatatccaaatttgacacatgtagtgggttcagaaagagcaagacattggaatgtgcctatgtagatatgcatccataattgttccaaaactttagctacggtggcttaatgactggcaacattcttactaatctcttaggtaccaattgactcttgtattgtgggaacccaggattctgctttcttgcagcaggtaatgctctttagtactcatcaaattcatccacatgttatactgtcacaacatcctcttgctgactagttaccgatatttcattatgcagggcttcgtacataacaggaggagtttattttggaagcccaccaagaaacctaaatgggcctggtttcaatacccttgccgtaagttattccaggct

SEQ ID NO: 6800 - DNA, 829 bp, Zea mays
tgcatgcctgcaggtaccgtgctatcacgagcgcgtactaccgcggagcagtaggggcgctcgtcgtctacgacgtcacgcggcacgtcaccttcgagaacgtggagaggtggatgagggagctcagggaccacacggacgccaacatcgtgatcatgctggttgggaacaaggtggacctgcgccacctcagggctgtcccgaccgaggacgccaaggcctttgccgagagggagaacgccttcttcatggagacgtcggccctggaggcgatgaacgtggagggcgccttcaccgaggtgctcacccagatctaccacgtcgtgagcaagaaggccctcgacatcggcgatgaccccgcagcgcctcccaggggccagaccatcagtgtcggcggcaaggacgatgtgtccgcagtgaagaagtctgcctgctgttcgtcttagcttggaagggggtaggacatgtacttgggttggttggttacttgtgcagtagagagcgcaggacgttatttgcagtcatggtccttgagctgtattcatgtgttaccagctgtctcgttgatttttgccatttgatacatttaattcattcaagaattcagcctgcgggtatagcttagggacatggaagtgtgcggctatcgattttttttcatataacagagccttcctctgcattgtggctttcatttcttgggtatatctggatgaaggcgcttctctttatcaacctaactgcattggtttaacaggctgtttgttttgtaaaactgttgttttgttgcaaaagcactccttttgatcacttccaaaaactcggggga

SEQ ID NO: 6801 - DNA, 880 bp, Zea mays
aaattcatcattatttattcatttaactgttagaatatttctctcatgattttgaagggcgtttaaaactttggtaaaagtattcgaatgtgatagaccaggaagctgcaattattatttctgctggcaaagtcaaagatcatctcagcaagccaaataattagtagtaagacacataactattgcagactcgagaacacttttttcagctcattaaagcaaaggcaaatcaagagtagttaaaccggcgacagatttagattcttttgaagatttatggcacaaactttagtgggtaaaggaaaagctacaaagaaagaaatggaccgcatgctgatctttgtagtggaataggacgcgcttcacgtcctcgatatgaatatcaggtacaaagtcaaccataagatttcctgtgtagagagaaatgaggaaagtggatactgttgagcatacggaaagtcaaccatcagatttcttcttctcaattttaatgtatatttggtcatagacatagaaagaaactgaaaaggaacatatcagatgaagaggtaaaacagtaacgcttggatcaccagagaaacgagaagacaacaggatatgcaacatgtttgtactcagcaaggtgccataaaaggtaagcagaaagtaccataccaaacatttggatttatgaggacaaacaacaaacattctaaatgatataataaatttagtatatcaaagtactggtccataggtgcccaaatgctcttaagactgtaaaaaaattctagcacgaagactcagatcattaagaattttgctagcatgcataatttcgtaaatgataacttagcaaagtaaagcatggcatggctagaaagtaacaaaaacaataacc

SEQ ID NO: 6802 - DNA, 853 bp, Zea mays
tcttgcatgcctgcaggccggcaaaactgtgtctagtgcatctgttgctcaagacgggaagtttgttctcaaggtggagaagcgtactgccgatcttgttgattatatcaacgctaattacatcttggttgctacaggtagcagccaacatgtacgtaaattcttttttgcccctctcgttgcaaattcatatcttttcaccatatcatagggcaaaatggtacgcccttaacgtcttgcttacctgtagggctattcaatcgctgcacaactcggtcattccattattgcaccagttcccagcttgttcacatttaaaatcgcagacaagcggctggctgatctcgccggggtatgcatccacataaactgtttcaaatcccatgctaagagataagaattactctatccagtaatagaatagtgataatttataagtcgtgcagccaaattacatgagtttcctctgtttacctgcctactagtatccataatttaattgctactgaggaggaacatgattaaacatcaagacatgcgtcttacagaaggaagcctcaccgcacagctgatttttgttcataacaggagtactgagcggcaatgacttttacccctgtgttttctgctatgtaggttacatttccaatagtcaaagcaaaactgaagctagatggtgttcaaaaaagtgttcccgagttaactcaggtgaacatgccatttcttttcagcaattgactggctcttaaataggtagtcaactagttatacacatcgcttacaccaagtgacttgtctttacagactgggcctatgttaagtaacacactgggggccttatgggcctgttgtc

SEQ ID NO: 6803 - DNA, 775 bp, Zea mays
gatcctctgtgtcgacctgcaggctgctgctgcccgcgccggcccgggcccccctcttctatactataccgtgatctctggtcgcctgaccgcgcgcagagaaagtcgccgcgtgagaagacgagcggtactctttttcttttcattttttttgcagtcatgcatgctgccgcggccagtacgtgtgatccggccggcccaacgtttccttgcgccacgaggcacttcatggccgcccgactgactggctaaccaccatacctaaatggtcaacgatccagaggtaccaacagtactgctgatgggacacaggcttttgggacggcaacgggagagctgcacctgcatgggcgccggtgtacatgggttgtacttgtagatctcgtctcgtggtgcgccttgctcggtttcaccatggtctaccaggatccgtgggctcgtacagtcgtacagccgacgaagctacagttgctgccagcagcgtcaccgtaggatcctcgaaatcttttttggggtgatgaatagtcccagattctcagtcccgtcgaaactttctttgacctgcacagcacggctgcaactgcacgctgtgcatcgtcaaattcaaacgtggcttcccccaccacccaccccccccttcaacaatatggcctcatagataacacctgtttgcgattcagccggatagtttcctcgagcaagttttggcacggcatttatgtcaaaggtttggcctacccctagcccgctgatacaaacgaggtaactatcgatc

SEQ ID NO: 6804 - DNA, 785 bp, Zea mays
cccgtttatcctttagagtcgacctgcagctattttgctgagggattattcattatttggatagaaatcgtgtaggaatttaatattttgctgagggatcatttggatagatagaaatcgtgtaggaatttaataggaatcagttcgattaatagcgcagattttccacgtttcaagcaggccatcaaagaaaattaagcatgtttggtttgctgtctaacttatcacactttgcttaacttttctgattaaggttagttttttaatttgaacgactaactttaggcaaagtatggtacagttaaccacgaatcaaacaggtccttcatccttgcaaaagaaaatataatttccgtaggcgtcggtcatttcgactgatttgttgttgccgacgtttcgtcccatgataaaggaaaggcacgagttgaccactagaatagtagagaagtagttcagtttagtagtagttttgattatgacgaaatgtttcgctattttttttacgagtgttagttagcgctgggcctgggaaagagaagaaaagggaagggccccatctacgcccgccctcgtgtacctggagccgtcggcttccgccagcgcccagctggaggtctcgctgttcccttcacgatacgcccccccaaagcggatcaaaccctagatctcgtcttgtcgccccgttcctccgatcccatcctatccgatcctcatggattcctcctcgtccagcctcagccagcagccccgagttcgactacctctttaagctactccttatcggc

SEQ ID NO: 6805 - DNA, 799 bp, Zea mays
tccaatgcggcgccgggcccccacgccagaaatatacacggcgcggtgcaaatgcctggtgcatgcgcatacacgagaacggcagccaagcggcgcgagctacccatgccatggagagagaacctcctaggcctaacccaaaccatgcatctcgcgcgccatgcacgacctcatgcaccacctactagggtcccagccctgcgccgttgctttcgccttggacgaccacgccgcctcagatacgacgatccaaccccatccgcccggctggtggaggctgcccaaaaatatagaggcaggccaagggagactgggagaggtaggagtagcttaatttaaccgggtggcgggtgtgcgaagatccatccgttggattgcattggtgctagtaattgtgtactactgcctgtacgcagcgtatacatacgtgagccaatttctgtatgggacgacgacgacgacatgcacccacctccacctggccacccacccgcgccagcgccaccccatgactgatatctgtgatccatgctgctgctagagcgtgtttgattgccgggcttttaggacatgcagctccacttgtctgtttgcctggacgtacggcgccgcacgaaatccaaagcatcctggagccaggccacggcggagcaagtacaaagctcgctcgggctccgccggcatatattatgccagtagccttatattatgcgcggatggtgggtgggggtgcctaacgtgtcaagtggggctgtggcctgggggctcttcagcgtagagcagccacaaaccaattaac

SEQ ID NO: 6806 - DNA, 975 bp, Zea mays
  unsure (1)..(975): unsure at all n locations
tctttacgcggtacttgtttggctcacttgccgttgttgaacgttcgagtgagccgtactagctagacgccattacattagctgtttcaacgttgtcgccgttagattaggtgttttaactgcgttgctagagtaatcagggattcaggggggagataatccaatccaaggcagtacggcactgttttgttttactgccgggttctagtggacgcactgttgttgtgttcgtggtgtatgctttgtttccaaggcaggggaaatgatgtctttgtgctccatggttctcgccctccttgacagaaatgatataacaaaaaagaatgaaaagattccggaccaagtttttgtttaatcatttggtattctacagtagtactccgtagtagttttctttttgttggatatcagcgtcaggttacctactgctcgttatttcttaaagaaaacagtttctgtttacatacctgttgtctctttgtaccagtaggattcagctattttgttttgtactagtgaatacagagttttataacagtaataacaagcactggcagcttcggttagttttgcctgcattcccgttggggatcgagtggcagagtgattcacttggcaccggtaaaaaaagagagcaggctggtgagtttcacaacacaagcatgattcgtccagttnagagagagagagattgagaaagagagagcggtgcataacaaccagccctttgtaagctgtgggtctgcccggacaaggcgaccaccttgcagcttcctggccgggcagcaatttctcggctagatacacagaaacaaactagatagacaagactgtaggggtgctttgcgcttcataaaccctgattgtgaagccttgctttccccctaaattttgtgccccgatccgctggcttcctctcgctggagttggttcgcggagccctcccgcgtggtggccacacccaaacccccaccc

SEQ ID NO: 6807 - DNA, 764 bp, Zea mays
  unsure (1)..(764): unsure at all n locations
gacttctgcttccggttccgagaccgccccgcctctttcaggagctccgccagccgcttcttctcgtcatccacgtctgggttcgccgtgccaagcttctcttccctcaccttcagcacatgctccaggatctcgattgcatcctccactctgaacatatatacatagtggggaatgtatgcagaggcgtgttagtagctatagtgcgacacaaatgtaccatcccaataagaatagctaacctgtaatctgtgctattttcagagatataagannggtctacatctaaatacaagcatggtggagcctcaactccactgccctgctgcaaatttttctctgttactagtttcggaagcatcatggacgatgggtacagcgatgtctacttcagagagcacgaagctctaaaggatcgataaatgggcataggactctctagtttggaaagcaagaataaatgggcaactgtaccaaagttgggtacagaacatgtgggcaactacaccatggaccatagatcatgacattgcatgccagaaatgatcatctggtaactaactcatcaaccaatctaggtactaggttctcctaatcaaaatcaaagcaattttcttacacaggataatctaaagaaggagctcaacccacagcaccatccagaacccacaaacccccacagccattcagcaaaaaattagatctaacaaatttacccacttcaggtagcaggaaaaaatctcaacgccccttcttactctcct

SEQ ID NO: 6808 - DNA, 845 bp, Zea mays
cagggttctggattggattggattggattggagaaagaagctcttggagccggccggggcctgcatgagtataaacccaaacgtgtcacgcctccagtccagtccagcggcggccattctggaatgattcatatcacatggaaacgcctgttttgcaggtgaaaaaaaaaacaacaacaacaaaaaagggcagacctcgactcgacgtccctgcttgccgcctgcctttacacttgtcaagcaggagccatccgtgcgtttccttccagctccaacatttctccagcccagtctccagtctaccaccagaagcgcctgatgacttttttttttgtgctatcacttcacaaatccatcttcttctccaaagactgcggggaaatacctgtactgcatacattatatacaagaaagaataagggatacaggcagatcagtcaagtttatttgaggagatcatgcatctcaagcaaccgtttgctacaacatcattcagaaaaatcctttcttctgggttctatattccaaggccagatttctcaacaagcctaggaataaaacaactcatcaactggacaaacagctcaattgaactaatagtcttactacaaaatctccaagcctcaaggcaaaccagtctaggaatgggattgatccactggacaggtcctcaaaaagcggacctttacataaccagctaaacttaacctcctggcacctttcatgtacaaagacaagaacggcgcgattgcctgcatcagttacacatatcatgtttagcaatgaaccagtgtgccaagtaccgtggtatcaaaaggatgaaaagtcaccactgccaacttgta

SEQ ID NO: 6809 - DNA, 848 bp, Zea mays
gtttgctgatttttatgtccattttgtggatgtgttggtccagagcttggaagttgcctcctcggcacagttggcggcagcacttaagactaacctgcaagttctatcactgcaaaatttggggctccatgcagcttctgttggagctttgcttgacttcagttcaattttatctaagtcacgtcttcatccaaaccacagcgtggttgcaaactcagcagctacctacattttttgcttacagcatggattggaagatgtagttgatcaagcaattgcatcagtgatgaatgagttggagctgataaaatctctgctagcggaagggcaagcaagttgccctgatatccatagtccccccttagaattgaacagtgaaaggaaaaacgagtcgaactcaggtgtgcattgttggccacaatattcagaggatcagttgctttgcctaatgaaatttgatctcaagattcttctggcgactattgcactggatacaaaaaagagaaatgagagaacaactaacttgatacaattcatcttaaagaagcttgacccatttggtgcccctttccataatttccttgagatgcagtttcagattttctctacactacacaaactgagcaacatggaactctcaagcaatatgccagcatctgaaccatttgaaagagactctggaggttataaaacacagccggttgtgttagaaaagaagatttcttgtgaatgtaaaaagaagtttgtgcataaatatggcaaatacatagttcagggccttaatgcatcatcatctttgacactgaaattagaggctctagattggataggttcatttgaaaaaattc

SEQ ID NO: 6810 - DNA, 766 bp, Zea mays
agtatgccactgtgcctgttatacataactgtattttgctattacctgatcgtgtcttgtgatgacccctctttgaattttgcagaccatcttccgacattgatggtccgatttcaccctctccgatgcaaagggctgaactttggactgcctcaccttttctgacttgtgaatgggtgatatgtggatctgcgctcatgggccatgagaaggtaattgctattttgatatgatcttcataaaaaaaaggtactttagagcttattcaaatatgtaatgtgccctgaaatatccataaactacgcaggaaatcttggatcagtttgagtgtcacactggcatcacagtaaccaacacctggagttcagatgtgactcatgtgattgctaatacggatgaacgtggggcatgtgcacggacactcaaggtcctcatggctattttagctgggaagtgggttctcaatgtgaattgtaagtccattttccctgtagaccagtaagcaaacttagggaacgataattcaaccaagtgctgtatctagtatactgcctgcatctgccaggttgatttcgcttagatgccttattctaacgcaaatacccatttgatatctagggctgaaagcctgtatggaggctagggaaccagtcccagaagagccctacgagataaggtgtgatgttcatggctctgtcgacggccctcgctcaggaaggctccgagcgatgcagcaggtttgcaagtgaactccgggagtaaataa

SEQ ID NO: 6811 - DNA, 908 bp, Zea mays
ggaacccgccgatcctctacatgggaccaacagcaggcatgcatgcatatgcagcaaattaaaatcgagttaagcatgcgccatcctccgcctcctcctgaaatgggcctgcacgatttattaaatatggcgacgctgcctgcctataattaaagcaacaatatatgcgtgcgccattgctttccctggaacttttcaggtgatatagtagcttaggttgacttgcgtcaacgacctgcatccgtttttaatgcaccctaaacagtaacgcgcaaaaaaaataaacaaaaccccccagcaactttttatgtacaagctagaccacctttaattgtgtacatgtacataaaattattctgtattcttggtctaattaacaaccttcggataagcacgcgcgcggaagatttttcgcaaaccacgtcagccgaagacataggacaaaaggatatatagattgatcttgtgttgcatatatgcacgaaggtgatcttgtgcgtagcatatctttctcaaattagtgagcaatgcaaatttgtctctgtagaccgattgtgtgtgcgcgcacgtgtacgtggagcctgttcatccgtgttccgtgtctttgactcactattgtcactgaaatttatagctaatatttttagggcttttgtttgagagagggtaatagatgagctaaaattcctttactatttaaaattgaatagtaaatgaattttagccccttcattcccccggtctccgaagcatgcccttattaagtgttagatgtgtgaccccaaaaggcctagcataaggcgactttggatctcaagatctgtctaactagtctcttggattgtgctaccagactatatctatctatcctagacttcactgagtttattagagactagtgtcgaaat

SEQ ID NO: 6812 - DNA, 721 bp, Zea mays
atccagctctctagatgatcgatcttttgccgctctcggccctttcctcgatctccacatacaccctagctggctagctgccagctcaacgtgcgcccggcatgctagctagctgctggcctgctgctgctgctgctgctaccgtacgtacgtgcatcagtgcatgtggcacgattgttgttcttctgattgttgtcgcatggtttgcttgatcgatcgggcggggtttgtgactcggcagcgcgtccgtggagaagtaccccgacaaccagatgctgggtcgccggagagtcgtcgacggcaaggtaagaacaaaattgacttgtttgtttcctcttccttcttccacccaacaacccacttgctgctgggagaattaatttacccggtccattgcttcttcgccgccctctctagctagtcgtcgtctagaaggtaaaacaagtagcattaataatataaataacaatatcactactactactactactaatcttgtgcttacgtataatattggttttgtaaataaaactgcatgcatgcaggcgggcgagtacacctggtggacttacaaggaagtctacgacgtggtgatgaagctcgctgcatccatggacaagtccgggatcaaacaggtactgcacgcacgcaatagtcacaggcattgcttctcatcttcgatgatgatctgcaccagctggcgcgtaataaacacacacac

SEQ ID NO: 6813 - DNA, 827 bp, Zea mays
tatagcctgctatagccgactatttgttgtttctggaggtagatcgttaaatgtcttagctggcgattagcgcgctatagctgggtatttgctatttctggaggtagagcgctaaaggtcttagggctaatttgggagacaaaaaaccggatgggattagaggggctaaaatccccttcttattcacctccaatcctctccggttttgaggctaccaaactagcccttagctggcaatttaaaacactgttctcaactaaactcttctaagttcactacagtaagcacatcaaaagaaacgtatgtgttgtatctgagtaaatactcagaaacaaaaccaacatgctagatgaaattcctgaattgataactgaacatgcttaatgtcttgagcacatcaaaattcacaactaataaaaggcgtgccttttaaaagtttctaagtcaatgtgtatgaagaaaaccaaagcacttctgaagaaagtacagaatgtgcttacagagatttcatttgcataagctttccaagctctggagacaaaacgccctttagaccaagatttgctaagctcctgcataattgcatactcaaatttaggagaacacatcagaataggaatgatcaatcagaatagacacacggtgttatgctctaattataaaataataaaacaatcactgctactttgcactatagaaaacaggaacgcataaggattatgtacaatccttaacagcacgtgcacacataatgttacagcagaaccaatcatgttgcactcctaattcttgaaataacaagttagcttgatatgatgcggatccat

SEQ ID NO: 6814 - DNA, 780 bp, Zea mays
agaattaatggcgatccaattgtaagaggacgcgcaccgtgtggcaatcctcggggcggaggacagcgggcacgatcgcagagacattttccccctcgccttcctccccacgcgcagcctcttcgccctccgccgcggaggactccgcttccgagccgctatcgtcggcggcagcggagcataagcacactctcctccccggcaccgggactcgcccacacctgagaagtggcgacctcacctcggtactcgtaagcgcaaccctcgccgccacagttaccgcctgtggcctcttggtggcgagccgtgccggcaaccctgcaacgatcgcggcacgcagcatttggtgctcgtgcttgggccttggggctgagaagtgagaactgagaagacgaggaaggcgaaaccttctggcgcggcgaattgtacatttggtttgtgcctccttctggtcggttttgctttttttttttttagttgcgggcttgcaggaggtttttagaatgtctccaacagaattctaaagacccgttttgttttgtctgcgggactaaagatagaacatcttaggaacaatcttttcagtaattataaatgagaggttttttgggctctgcaggaacaatctaccgctttaagagatctgttggaaaaaagattaaaatttactccactagtttttttatatgtcccttaaaactgattttgaggagtcattttttagaatctcttggagatgctattagtccctccattttagtctcattaagttctaaatac

SEQ ID NO: 6815 - DNA, 823 bp, Zea mays
  unsure (1)..(823): unsure at all n locations
gcaggaccaaagtctcatgaggctatccttaaagttctgaatctggaaagggtggataggttggtcttgaactatgtagttagtatgttctcggcaatattttacattgctttttgccagaaactaatttatttataacatttccagcattgcccgagagccgaagttagacgaatgggttgcaagagctgctatatttgatacccttcatgacactgttagtgtttctcctcagtcagacccttgctagtgggaaaattttcatccttagttccatgcaactaacggtgattattttaggtgaggattgctatggttgggaagtacactggcttatcagattcatacctctctgtgttgaaagtgagcttgccaacttgttcagtgcagtgatgtttttttctgtttccaaatgtgaatattgttgtataactaacgtgtcatgcaaaaaaattgcaggccctcttgcatgcatctgttgattgccgtaggaaacttgttgttgattgggttgcttcgacggatcttgaggattccacagcaattgaggtttggcacagtagcctattattcagtgtgctaagtcttgaggcgaatcgttttttacttgtctctttttaaactttctaggcacccgatgcatataaaacatcatggaatttattgaaggtgggttattatcaaatggactacttttaggatacataaaattggaatcgtgtcacattttttatttctgagtatcatggttacnaagaagagttttcattacaagggggcagatgggaattttggtaccctgttggctttgggtgaacagagg

SEQ ID NO: 6816 - DNA, 793 bp, Zea mays
agaatgaaagcaggaaaaggtcaagttagtttgcagccacaataaatgacaatggtctataattgtacacacaataaacagtgggaaaacatgtacagtagcaggctatcatccactgataatggctttgttgagatgcacaaaaataaaatcaacactataaatgaagagatgctaacatgactagcactgtttaatccaatagttcacagttgccaaccagtttaacccgaagaaggaaaaaatataagaaaataaagttcagtctaactgagattaagtggaggatattaaagtgagtgattctgatgtgactctgaagagtgaagacatctataactgaaaacacaagtttcaaaactatgcagagaaattagagtattcacatggttcaaaaaagttagtaaatgcaggcaaagggcaacaaataccttagtataaaattggatctacacagaatttgtaggggggcattctacaaaaggagactttagaacagaatgatggtaggcttgggagcaaccatgctatagataacatttagtatcatttaaaacaattagctaaagccatgttaacatccatgcaggtgacgatgagcaggacacaaatagctagtacaggtagcgactgactcaaccacagagtgttgataaaataagttatccatggtatcaagcaccggaatcaataaaataagttggatcagacccttgtagagatgtacagttatccacagtttggcttctttggtgcactaatagatgttgcgtgctggtatatctaagggacc

SEQ ID NO: 6817 - DNA, 779 bp, Zea mays
actacaagacaaaatttgtggatcacttctttcttttacagagtgtctttgtgtccgcgggtagactattttcagctgactactgataagtagaccatttttcttaacttttttatttctttttctttggtgtcacgataaatctgatataacatttcttgcagcccgactagaccactttgttatagttgcttttaaattcactagtgctaatatttagttagctagtatgtaaataattattagcaaagtgttgtttgattcacgtatatgaaccattagcacatcttcaccaactaatgaatttagattcgcctctctatttgctaagggcaatatatatttttttcagttactgtagcagtcatttaatatgtgtcactgacatggcaaattatttgccacacacctccaaatagtgagaaatatttattttttcctatttgttaataatgttagttttacagcctatttgtttggttttaatccgtaccggcttctacagcttctacaatatttttatctctatgcattacagttacagcagagtaggctttaattcgaatcggacagctactaacaatattggcaagattagatccaaacatgtccaaagtagagtggcatattaattattttgaatagggagactagatctctaaataaaagtagaaatggtttggtttgacctgttatattattggttaattatgatagatccaaagaagccaaacaaactgcacaaacatccaaagacccccaagggttccggaaagttt

SEQ ID NO: 6818 - DNA, 823 bp, Zea mays
tatagtggatccatcatgtcctacgtatgttaccctttgcatccagccttgttattctgccttcaggagaattctccatttcttcatatataagaattaaagcacgatgaacagggacaatgggtgaactcacaggtgtattcctaaagacgaccacatttcttaacagccaaaggcccaaacttatacatcccagcaagcatgccaaaacatcttctcttactagaactagaatgtaatatgctcaattgaaactcctctatactcattgggatggagttccatcccagcacttctttgaaggaccaccagacacaatgtgcaatggtgcattgaaaaacaatatggtcacaagtctctctcaaccctcataacttgcaattttcctcgcccggccagttgtggctaaccagttgaactgttgattgtaagcgatcaaggaatactcttacttttaactatgggaaactagttgaattgaaccaggggaagtagggaacaggtacctgtgacccgaaaaacaatacatcaaatgcactgcgatattgacagcttgggttgcctgggatcttttatagtcttgatcttgagaacagggctttgacttccaatgcaaaatatgaaaacgcttattgctaagaatttgccgtggggaatggtaatcgtatctttgctcactaaggggtgtttgaatgcactacagctaacagttagtggctaaaaatagttagagacatccaaacaacctaggctaatatttgatttttttctcgaatgcgcaggggaactgcgccttaaattatattaagaaaaggaaaagggt

SEQ ID NO: 6819 - DNA, 817 bp, Zea mays
aagcaaccacttaacttcctcatttttctgctcacatgcattgcttgatacattaatttggggaaggaattttacagttaaaccagacatgttcattcatgtgttcaaggatactctactaccaaacaatcagaatgacaaccaaagttggcgaagcacacatgtcaatgttcactacagggaggaatatatgtgtagtgcctaccaaaagctgcatggggcagtaagccaggaagcaatgatgagggaaatcataaataaaccaactcaatcaatgtcttttccttctagatggatggatctcagtactcaccaatgaactgaaagccatttaatgtggcagatcaccaggctaatttctttttgaaccagtagcaaagtaggtggtctagtgggtagtggctaacagggctagatccatacatcagaatgcctacttttttggtccttagtatgcattgcattatcatgatttcgaagtccagtgcagttcattcagaatttctttgcatgaaatatctagtcataatcaccagtaatcaccacatgaacaagaaccatctctaaaatggtgaaaccggttggaatcccgcagtatgatcagtcttccctcaatcgcagagatacacttgaaagcagtgtgacagtctctgcatactctcaggttctttatcacccggatgggcctcccaggaggaatttttagaataccataagcaacagcaagcttctcgctatgatactttagcatgtgctctttctcttcctcctcaacatcatgcaaaaccatatctgtagctgatacatatccagcctt

SEQ ID NO: 6820 - DNA, 677 bp, Zea mays
cttggacaggatttccatagcttgcgaattcgatatctgttatgtgtttgcctttctcgcatcggaggtgaacagctggatgattttcgcgtgacaagagagatggtgtagagaactcgctgacagtaccatagattctggtaatggacattgtgtttactgttatctgtagtgggtcgccaccagtttcctccatgaggactaggaggttctctccagtcttcagaaaatatcgaggtatatgataccttagaaaagagagccaaacaatacattttacattggtctgtcatgattgtacaaaaagaatttgctttgcactagaactagtttgagtactgacatggattgagaagattgcccactgggggttttgaaggagacccagtaccgtccaatgctctgtccattaatccacacttcaccctttcccatactagttaggttcaatgtcacaggatcatttccccatggtgcgtcaaatgttgtctgttaaacaacagtaattttcccaagctgttaatccaaacactaagagtaaatatatgcaagtcaagtacatcagcacaggtttacgtcttgtataccttataccagataagtggcagatgtatggatttgctaaatgcagtccattctgcatgagatgatccttcagatgtgtagaatttaatttg

SEQ ID NO: 6821 - DNA, 796 bp, Zea mays
  unsure (1)..(796): unsure at all n locations
ataagtttcggaaatgggcatctaaatattgtcctgatgccaagtacatgaatgtgaatagcgatattcaaattcgccaacttctctttggtggcattgaaaataggtattgcctttcactgttttctttattaaggtttgaaagccttctttgtttccatataccttttcgctgtggtatcttcctcagcacacttcatatttggatctttatgaaaagacgccagtaattatggtagtggtttggtgtagaacacattagtttgatcgcaagtcatgcacaatgggactgtgatatcctggtccaaggcttaatagaattaatagggtatccatatcaacaaggtgtatcttctttttcggaagcctatctcgaaagaacctctaagttaagcgtgcttgacttggagcaatttgggatgggtgaccgaccgggaagttttctcgggtgcgcatgaggacaaagtgcacacaaaagacttgtgttggtctgtggggacgatatatgatcctagagagctgccaggagtaagtaccgccggtccagggattggacggggtgttatagggacaaatggcccaaagccctaaacttgataagaatttacttttatcttttataagcaagagataagggcagacctggtgctgtggtgagaggtgcctcactgagttaccaggtcacgtgttcgaagcggactctccgtatttgcaggaggaaagcttgcctcagtttatcccttcctagactgcattcatgtgggagcctcggacactgggtgntgcccttttataa

SEQ ID NO: 6822 - DNA, 872 bp, Zea mays
ctgtaccataatccccgtgacagtgttggcttattcatgacacaataattttcagaaaaggaaagatgaagaaagcattacttctgcatcagcttcgaaggggcccatgggacctgtgtttagcagtttgatgtatgaggaagacgaagggaatgattcgtaagtggtgtttacctcatggatgtcttctccagaagtttttattctataaattgttgcccgccttggaccgctgcttgtaattggaacaaactttaatgtatatgcagagaacttgctgacatccatgttttagcgagggaaggagcaactgaggatatagtgaagtttctggcagcgggtgtggaagtcaacatgagaggtttgtgtttgcaaactctaaaccatctaatgcttatgttatgtttataagaataacccattcaaacatggttcctatattgtatttttcagatactgaaggtagaactccgctgcactgggctgttgaccgtggccatcttagtgctgttgaggttcttgcaaaagcaaatgcggacctgaatgccaaggtaagctggaactactgtatacttattgtgtgctactattcgtggcagatatcatctatttgatgagtaacatggagaaataggtgctagtccaatcatatagctgaatgaagcgcatttgattgtttgcatcttgaactacattaaaatagaaaacatgttgtttatgctcattatgacacttgattgctgtcagtagttcagcatacaatggtaatggcaccatggagcttcaaagttggaccacggtccccttgggccatttaagtttgtgggcataatgaactgaacctaacttgtctttctttgtcaggacaacaa

SEQ ID NO: 6823 - DNA, 783 bp, Zea mays
aagtgcaaatatagaactattaataagcatgaatcaaatgcaagaagaattacagtaaaaccatcaggcctacctcgcatattgggatctaaaccttgagacttctcccttgaaattggagaacttactgaagcatcagtgatcaatcgcagggatttattatctatgacactggtaaggtaaatattatccaatggtgaaaaggaaatgggcatgcgatgaggataaagttaacatggctctaataattgaaattaattatcttattagttggaagggcaggtctggtgcagtggggtaagctgtctcacttgagtccccttttgttagctcccacacatgtgggagccttcgacactgtgtctgttcttttgttttgttttttttttattctagggcacgagataatacacaatgcaatactgccaaattctacaacatcaatactttcggtgtccaagtatatcatacaaaagaatatgatcatttctttgataagactcagcagcatgtcttaaaggtacatagaatagattaacttttaagtgttatttacaatgtttttcgccccacttctagctccagtttctcttgctaaaagctaaagagagaccaaacagctggctcctattgatttttaaggaacctgaggctgacaccaaaaaagccaatagtttttccttcctagcttttgtctaactttcccactattgcccacacaccaacctactggatttcttccacaaaacagtttggagtgccttctaataataagctagcatc

SEQ ID NO: 6824 - DNA, 793 bp, Zea mays
tgcatgcctgcagggacttgacttggacttcgtaatcctgagaacaacgaaaaagtaagggcatgttaacttaatgtgtcaacaattaattcaggagtaatcttagaagagctgcatagtacctttgtagctggaaacgacatgagccccatcgagaatgcgaacttgtgagtcaccagatgtcaccatcagtttctttggatcagatgggcaatactgttcatgcaagaaataaaaaaaaggctataagaatcggtggccataaagatactccgaaatcctgaataagaaatttgagtttataagagtcgacaaggtcaatagatctatacctggaatccaactattcttttaagtggagatttctttctgccatacagggggacttgtgactccagtgctagatggttttctgaataatccgatagacaatgaattagaaatttgatatgcataggctttgataagcatcatatttcagccaactaaacaaatcagctaagttagttatgattctcatagtgcacacaaaaaaaagaacagtttaaccttggctatgatttatgactattaaggggccttaaatagtattgccttgcatttaattttatccaaaaatatcatacgaacttttcactaatgagttgcacattcatatttctggcattgatacagggatatcaatttctaaataaacaggttttacaattttatcgtagctgttatatctgaacatttaaaaaaaatgccctcaacgctaatatttttccagtaggatgaaaactgcaaccat

SEQ ID NO: 6825 - DNA, 882 bp, Zea mays
  unsure (1)..(882): unsure at all n locations
ttttgcgccaggctgctgcactcctcttcctgacggaactgcctgcggagcgacgagcccccgaggttcgaggtccgtagcagtgagtccgggaggggtttcctcccgcaggagttctccgctgtggcggcgagaccgctcctcgccgcggagctagtaggatacggtggagcgcagctgctgagatggtcggcgagttcccttgagcctggaggagactcgtcgtacagtaagggttccacctcgggcgcagaccgccagctgaaacagtgctcgttttgcaacaccactagtacttcaaccttcaaaaaacacaaagtaacgtcagtttctcatgtactgaaactgatcatagaaatgttcctggtgtttctattgcaaaaaaaaatatgcggaaggcagaataactaatcctgaaataatgtcaccaaatgagctttccatttctcaacgagattcagttccttcaccttgtcggatggttcctttttgttccctccaaaagcaacaagcacgatcttgtccctgtagtacaatggaaccatgctgaaaccctgcaaaaagttttgggttcaattgtggagcaagtagagaaatcgttaacatataaataaataaacataaatctcgtggattcttcctatggggactcttttttcctgctataatgggcagcatattgaagctatagtagttcaaatgtccaccattgaagtacaattccaatgaaaaactattacaaagatagatgtttgaaaagtaatgtgaagctttattacatatttggagggatcttatattatgcactatccagtgctcaaggttntcaggatggcataaatcttaaataaaagaaactgtatcgacttcccacatgagtgg

SEQ ID NO: 6826 - DNA, 834 bp, Zea mays
atggaccttcaatacagagagtgagctctggtcttatatggaagcgaagggtgacattccggtatatatttgactgttgatctgaatgccacttaaaatacattttgtaaatgatggataccgtacactgattattaatctcaggtgtctcgaagtggtcatacggtgattagagccggtcctgttttaattctctttggaggtgaagatgccaaagggaagaaactacatgaccttcatatgtttgatctgaagtcattaacatggcttcctctgaactataagtaagttattctagtctagaattcaatgatagtgtgatatcattactaaagaaagaaaagaaagcatggaggctaattagtttcctcttggtcttttcactgtgctttaaaatacaacaaaaatatagttatatacctattgaatgcattttgagacattcctggttcttggtactaaaacccctcaaggatagaatccttaacttaattatgcacatttctttcattaattcagagttcattgttttaggggtgctggaccttctccaagatcaaatcatgtagccgccctttacgatgatagagtcctattgatttttggaggtcagtcgaagtccaagaccctgaatgatattcatgctctagattttgaaacagtaagtactgtcgtgttactttattggttttgcttgttaacagattgctgaaaaatttgatatctttatacaattagatggtatggtcaagggtcaaaaaacccatgggcatcatccatcacctcgagcaggttgctgcggagctctttgtggaactaaatggtatattgcag

SEQ ID NO: 6827 - DNA, 755 bp, Zea mays
agtatgaattcatcaagggcaagggtgcagatgtcattccagcatttgtccaaagacaaacctttctttctttaaccatcaatttctagaaattcgtagtttattatcgtatgatttaagttcctagattaaccatgagaaatactttcatagcatataatttgcatgttgttaagctgtatgaacttgtaggaattgttggtcaaagatgtaaatgtttgaataaggacaatgccaaaatgacaattaaattgaaacaagagtatattataagcttaaacctatgtggccatcatggttcttaaagcggtaaggcgacgtcttatctatctaagaaccagcaagactaacatggagaggaagaaaaagaaaaaagaaaaagaaaaaaaggggtagcaggcccagcccaccatctagcccacatatcctccctgttgccctcctcctgccgatggggccgcccctgccctcgaagcagccgtcagcaccctagatttggcgttgccgacctcgattcgggctgccgccgccccgattcgagccaccgttgagctgatttggtcgtcgacgccccgattcaacgtgccccatctcctccctcttgctggttcttcgctgggcgatggggacacctagccactttggggcgcctggacgcctaggcgacacctttaaaaccatggtggccatagaagatccctcttagtgttgtatgcaaggaactaaagaaggtcctcatcaagttgcaaaagctg

SEQ ID NO: 6828 - DNA, 783 bp, Zea mays
ctcgcacaagagcaagtccaagaagacgcatatggatatcagttgtcgtagtatttgtcgccattactgtgctgtgggcttatctctaccctccccaggattacacctatcctgtcagggactggtttccctcggaacctatgcgggaacttactgatgcagagactgctgcacgtgttgttttcagacagatactctccacgcctcctttcatatcaaggaacccaaagattgcctttatgttcctgaccccgggcaagcttccattcgaaaaattgtgggagttgttctttaaggtatccaatgtcactttcccttatgtgtattcatgcatacctagcaattaagatgtgcagcaattagtagttcgtaggctacatctttctatcttccatttcatgaaatgtgttcttcattggccatttttttattaaatgtgcttagatataagctagaatcaggttttgttatattattgggtttgtccctcgtatcaaaccacaagtgtactttgttttgaacctaattttctatttactttccttatggcaccgtctgaacaaaaaaaaaaaaccaagggatacatcttactccatttgtgatctctctagggtcatgatgggagatacactatatatgtgcatgcttcacgggagaagcacgaacatgtcagtcccatatttattggtcgagacatacacagtgagaaggtaatgctattaaggatgaagccatgctgaacatttaaaacatgtgtatttataagatcataaatcagagatt

SEQ ID NO: 6829 - DNA, 838 bp, Zea mays
cttgcatgcctgcagacgttcagtttaggtacagttcagttcaacggcaactgcaaacttaacaacgtgaagcagttaggcgagaatatgaccgccccgattgcttgctaggctgcattagatcagcgacaaattttttttttgagttactccgctacagtatatgagtccatccaatattatactatatacattttaaattttaagggctccatgggatcgagagctgtaggtggctttacactgtatattaggagtgaagtttaaaataagagacgatagaatagctgctagagagagtatagactggagtggattaggagttcgcgcagaggggatcagtggtgctggacagtggagacgccggtgatctggatctctagcagccgccggcacagagacacatgtaggatttaggcagccttagggtttcggcggaggagaggagaggagaggcggaacttaatattcttgtggatgggccgaaaacattggtcaaaaatcctagcgccaatgaccataagttagaaaagtggacaactaatcacccttgtcattaactaatcggacggtcaagacgaccaggcttcctaatcgagttgtccgcccaatcggctgttaataggtgaccaacccgttagtcggatgacttgcaattaatcattggtttttggagtttggtgctcataaccgtttaggctagcgcctctgaggcagtatgcagcaggtcgtgtaaaatagaggatttacattgtatattagaagtgaagtttaaaataagagatgatagaatagctgctagagagtatagactggagtgcacgagaaaaggcgcatg

SEQ ID NO: 6830 - DNA, 792 bp, Zea mays
aggattgaagagattaaatatctttctatccaattttgaataagaaaaaatttaatccctccgatcttcctcaatctacccttaaccgaatagccaacaatcagctggcctgttattacttagcaatcagtcgatgcaactttaacatttgaaggcatatcctttcagcttacacacaactggcttacacacaacctaagcacaaagtcttcttttggctatagcttaagaacagacttagtaccaggggtatgctgagaaggaaaaacatgatcctagaatcatactcatgtgagaactgttcatggcaaagagaggagactctgtatcacctgtttctcagatgtaactttgcaaaagcttgttgcaactcaattggaataaccccacccagaattgctcattcagaggaagccgcggaaaacctcagacaacaacttcacgtcccttttttatggagatcattattctcatgacatggagcatttggaaaaaccgtaacgaatggctttttcaaaataaagacccctctgttcatcactgtactcatgaatttagtaaggagcttcggttggttatgctcagagcgcgtgggaaattcgacatcttcatcctaagctggttgggcttgtggcagtcataagatttattttgcgcaagcctttgcatgtaacagttcacttaaatctttcaacctgactcttgtaatctagctttggtgttcttttttccatattcaataaaaaatctcagtagggggtctccccttctgaactttcaaaaaactctagt

SEQ ID NO: 6831 - DNA, 781 bp, Zea mays
atgaacctggaagtacttttggcttttccttattctggtcacctgtggcctctaattgcaatggaacttgaagccatgagttcagtttaaaaaactatttactgtgctgcctagggtacatgttgcaattggtttatgatgcagatggtgggttgcagtacccttccaatactctgatgttcgtaattagtattcctctgtgatataagattacttgcatcgtagacacaatgttactctgttcaatattgatgtcttttctgttcgcatagtgttaaccttagtcgaaatttctagctcatgacaaatatttattgtacctttaaatggttatttaagcaagattgcaagaatatatgaccttactgtcctagtatgacctacattccatccactttggtcctccagattcagctctgatgatgctaaggaggtagtccattaccaaacaatctcaccaaagagcttagctaaatctgttctcgaggaaggtggctggtcaaacttcatggtaagtatcacattggtgaagtggaacttaagctctcatgcaacttcttttgaaattatcaactcttgcattgaaacaagttcactgaccgatgtcatgattttcttttattagtgctcaagggaggatactcagaataatgttgatgttgccattgtttttattggctcaaaggtacttaatactgatctaatatctactgttttgaaataaatctgttcctgttaaatattgtttgaacgaaaatcctttcttaaactgaaacaatgg

SEQ ID NO: 6832 - DNA, 841 bp, Zea mays
atttgttccagatcgaaatatctatataacatttgttcctgacgaggagattggtgggcatggcggtgttgaaccatttgtttcatccaaggagttcaaagatatgaacgtggcattagtccttgatgaagggcttgcctctccaggggaggagtaccgtgtgttctatgcagagcgtagcccttggtggcttactataaaagcaacaggcgcaccagggcacggtgcgaagttgtatgatggtagtgcaatggagaatttgatgaagagcgtggaggctattaggagattcaggacatcacagtttgatctagtgaaatctggagagaaggctgaaggagatgttgtatcggtgaattttgcgtacctgaaggctggcacacctacaccaacggttagttgatatatttttgtgttacttatgtgctgagatgcagtttatctttcgagaatttagttggtcttaactagatcttattcaattgtattggtagcttgatcatctgatcccatatgagttactaatgtattggtgtagttcttaatatcctgtgatattattgaaaatcagagcaatcatcggttattatttggtatttactaagatggaccaattaatatctttgattacgaattcttgttcaatacataatatctgttctttgcactggttttgtttaacttttggtatttaagagtctttggtgtactgagttcattttcaaccaataggccaaccaaccaacaaaatgaaatatgaaatcatacatctttctcaaaaaaatattgacccttaatccttggcaatattcccagttaatttgtattcgtttgccatttt

SEQ ID NO: 6833 - DNA, 827 bp, Zea mays
aacgatggaagttttttccctcaatttacaagtggaaaagcaagagcgttacattaaataagcttgttaaacttcagctttaccataaactcagtatattactaaaagattgttgaatcgactacgcattagtgaatccatgtatattcaaaatttggaatggtatgttaaataagcttccaaagttactttggcgaatcatccctcaacctgcggggaaagaaaaaaactcaaccacaagggggaagacgcccccctgggcattgtaataagttgtaccagaattcgaactgagaagctggtgcctgcccctgcggcattgcattaagaagaaacttctcacatgtaggccgagaaacaccccaaagactagccgtcctaggcatgccaccgagcgcccaggacacatacctacagccatgtgtgtctcactaaaagcggcacagattgttacacatataactcataaacatagccaatgaggggtgtttttttaaccccaagcctgtttaaattcgctcctatgggatagtcattttggctaaaaaaaggtgctaaacaacacagaggtcgggcccaggattgatgcaagcggtgctactaaggctcctattaccattaagctaagcatgtaatgatgtaatataacttagatttaacatttagagttgagagccaaattatcaatctacaaaacaaaacacgggagctcacaatcaattttctcatcaaggggagcattaggatgaaatactgagagagcacgagcaaattcttcaaatcccaaaattccactgggctttgtgtcaaataaattaaatacctac

SEQ ID NO: 6834 - DNA, 747 bp, Zea mays
aggggcggagacagcagccagcagccaggcagcttccccatccggtcccggtccctgtcccggcaggcagcccaagtgctccacggcctgctgggcggcatttgctgcggcacccggtgaccttcctgtttctccattagagccttgcccgtgtaaaccgttgacccttgcgcccatgcatactagcacgcacgcaccgcaggatctttcctgggatacggagtacagcactgcacaggacaggacacactcggggtctgaacagcgccaacacagtgtcacagtgtgtaggctatcggctatccagctagcagctagagtcccccgacggcggcggttcctggagcggagcgggctctgtactgtattcaggagcaggagcagggacaatgtagcggcagcgcaggatgtaatgtactgtacgtacgctctctgccagcagcaacggcatatgcaaatgcatgggatgctctgcttccgcttgaacttgaacgggagtttactgatccgtcattatttagctgactccctatttcataccatactttgtacacatatataggtgcacatgtgcatttcattaccggataggaaaagggaattcacggtcaaaggctgtacaactgaacagtgagagcacgtaaaactagagcgagtgagagagagagcatgcacggatctatacatcgacaaaccgtcggcaagcaccaccgccgtatgctgctggcacgctactaggactgtact

SEQ ID NO: 6835 - DNA, 745 bp, Zea mays
acacactccctgtgcatggagatggtgcagatggtatcttgtgagtgggagtgagaaatagaaacgagagatgagatagacaagaggctcctagagtcctagtgtttgatgtttgttgtatggataacgatatgtgaggctgatatgggagagattttttagcttgttattggaccgtgacataccgacatggcagcccaacatggcaagtcgggaggggagggtcatgcttggatcaggccaaaataccagggcctcatgtgacccatttggcctggtccatctggccatctatagacatacaaaaaaatgctacaagaaacgaaaatcatctcttgacaggatctattgcatctagtgaatctcatggtaatttggcaacaaagtcttgttgattatgatgtggtacagaggatttagggatgtgttggcaacatcactcttgttgtttcagagatctagctgtgtttgtctaacatgatatgcttgaaaagaggtactactgcaacagaaaaaggtctgaagcttttcaattctcattaagatcacagagtagtcaattgacaatcgagattaccacagaatagcgaaatttccaccaccagattaaaccacctccttggacaacaagagggagcaatttataagctaacccagccccaaaatcgagtccaaatcccgtttttgtgaataaatacaacgtgccacctaaacccaaatattgaggcaaagaagataaaggtgt

SEQ ID NO: 6836 - DNA, 802 bp, Zea mays
cgttggtgacgagcatggcgagggccatcaaggccagagcttcctgcgtcttggacgacgtggccatattgctgcatgcaagtgccctttaataacgcaacagaacagaacagaagtgagcttatataagaacatgtggtcattaatttgctccaaaccagaagtacactgattggctggggtctcgatttcgtggcggctggtggttgggctgaagcctgggagaagagggagttgccagttgcctgtggcaactgccaactgatagtccccttggtgcactacatgtatgtgtattcggccccggaggttacggcacaattactttcttgatagaaacactagtacgactcgattagccttttttctttgtatttgttttttttttctaaaacaaacaggataggagagctacctgtttcactcaaaagatatgtacaaagcctcttaaaaatacatctagaaaggagcgtgcctaaaatcaaagaactcaaaaaaaaggggacaaaataacataataaatgctttgaattgtatggcagcgacaaaatctctactatatttttaagggggtgtctaggattggttcaggtttcagctccagtgtggagctgtagtttataatataaatttattttttttaattatttttaatttaaataattagcaaaacgaggtttataactccatttccatgattttcctggagtatctaatgatctattccacccaaattttttagagctgaaaagcagtcccaaacatcctatttatgagctttttcgtatgtcgcccctccaac

SEQ ID NO: 6837 - DNA, 817 bp, Zea mays
atcttgcatgcctgcagcatgaggagacaagacaatgttttcgttcaataagcttcaagctggaggaagcgacgctggagctctttgccaaatttggatggaaatttaataatagactttgtcctcttgattattgtttgccctttcaagcaagccggtaacccgattttggaatatgtggacgctatgtgcggaaacgcagaggcgggaaccttgtcccattgtctaaaaaatgatcagtaggaggcaactcatgctggtccctagaaaaatcagtaacagaaccaaaattacatatttattttgctctaaagtatggtaattggtaaattggtaatataacaagctatcagtttagtttcctcattcaaagatgtacaaagagctcaattgaagtgtgatctaagaagttctactgaaagattgtaacagcttttctattcttgaaggccatgttttgtgaattcgaacgtgtgttcacctgaacagagctactgcatcttcagcaatcccaaacaaaaacacacaaaaaaatgtttcatgtggctgtcgatttggtatctaatagattctcatcggcgctgatcagctctggtactttatcaagtagccggttcatctcttcagaaaattcaagtttggctcgatttgtctttcctccaacaaccactgtacttccatcttgcaatgcccatatctagtgcagcaggtaccaaaccataaattcgtataggtgcaaggcaattacaattcggctgtcaataagaatcatgacaaacaatcacacatacctgagagtgtgaaagatagctaatgc

SEQ ID NO: 6838 - DNA, 820 bp, Zea mays
ccagcccatgctctagagccgagctgcagactccgcgagcaggcggtggagggcgtccacgatgcctgcggctagaagcgccggcacgctggcctggtggctcgacaggttgtacagcgtgtacagggcgtcgtgcttgctggagctgctgttcgtgtcgctggcgtcttggatatacagacagtcgactaggaatggcaccgcctggcttgaaccgatggcggcctttgcatcaggaaggcaggaaaggttaaggtagagtgctgtggcaggaccagataggcgtggattcgatatcatctgctcaagtagaccggctactccggcagataacaggagtcccttgttcctgaaataaaacagggttttgataagctaaaatgctaggcaaaaaaatacttcactaagtttaagttataattagcatttcaaactagcagcaatcaacgagcaccatgcagctaggaaacaatacctgttattgttgactgcgagattgaaaagagccattgcaccgacttcctgtgccttctcatttccatcatccacagcattcctcaagaactcaaccagtgcctcggcaaagccatttgagcccagctggatccttgcttcctcgtcgtctttcagaagataccttatctgctccaccagcctgcactgcttgtccatgttacttctttcatgaagcaagagcagcaggctcccatagccctcgttcagatcgaaatcgttacaagaaccgtcatccagtgttccagatacgctgtttgctgactcctcctttctagcatcctccatcgggacaatcttgacgctc

SEQ ID NO: 6839 - DNA, 771 bp, Zea mays
aacagaaggcgtacgtgcgtgtgttgtgtcaattatggcacttgaacagctacaaacaagtactataaaagttcagactttcggtgactgaacagctaccaagaaacgacgtctgcaagggtgaccgtcttcgcgaggctggcgaacatcaaagatggggtgaacacagtaaaaacaacctgccagcaatttaactgagattaggtttcgtcaaactatgaaaagctcgtgtttctttgctattgatacatggacagcagatttctttcttggtgatgcgttttggagagagagaaaaaaaagatgtgtggaaaactgaatgacagagctcaccttgttcatatcccttcgagcactcgtcgtcagaacgttgctgaaaccagaggccaggtaagctccaatgacacctatgagcaggacctggatgatcggcatagacgccaccagaaatagagagaagaaacccatcctctcttgtcttgtgaattaagcccttgttgatctgcttgatgtatgtatatgataagcgctgaaggacgatctcaaacgtttcctggatacgaatccgttcaaccctggtaaaacaattcagaaaaaaagagcgaataagcatctggtatctagaaagtgaagagagaaaaagaagaggagctggtaatttacattagtggcacctcacaatgatgaggccttccctactctctagcacattctagttggggatttgaaaaaggacaactccccattacttggaccgcatgcatatttcgt

SEQ ID NO: 6840 - DNA, 825 bp, Zea mays
gaaagagcttcacatacaacagtaacatcaacattgcagtggctgtggcaattgatggtggccttattacacctgttcttcaggatgctgacaaggtacgtacaatctttgtgataaattcggcttcaattcgcagttttagcaaacaagttcatcaaacagcttgttgaatgttacactgtagctggatatatatttgctctcgcaaaattggaaggatctagtgaagaaagcacgagcaaaacagctccaaccaaatgagtacagctctggtatggaattcatggcattgcatagtgtattagattgcctttgcaaatcttctatgaacatgcttacctgaagattatttgcagggacttttacactgtccaacctgggtatgtttggtgtagatcggtttgatgcaatccttccacctggccaggtgggcttacttccttttcttcctagtctatgtaaactgtaatatgtatacaaagattaatattcgagtatcaatgagtgcagggagctattatggctgttggagcctcgaaacctacagttgtggctgataaagatggtttctttagcgtcaagagcaaaatgctggttagttgtgtacctgattgtaatagacatctgttatttgcatataatgtatcagtatggtgaaatgtttatagttttacttctacatcctaccaattttttaaaatgtattcatgacatgtagttattatgtcgtagaggtttgtcagatatatcatctgaagtgtttttcatggtttaatgcccttagttaattatgatgattagatgtccaatagtattgcataatta

SEQ ID NO: 6841 - DNA, 922 bp, Zea mays
  unsure (1)..(922): unsure at all n locations
cttgcatgcctgcagaactatctacagcttataatttattgctctccaataattccacaatatcaatggtacagggcaggcctagtcaccgtggtgagagctatctcactcactcactcaccaggtcacgggttttcgaaacagcctccccgtatttacagggagaaggcttgtctcagtttatccctttcgcaaaccctacttatctaggagcctttggcactgggtctaccctttttatcaacggtatactaacaagatccacaacaatgagagatagaaaccagtacaaaaagatcagataaatcatgccgaatgttcaaagatacaaaaactggagatcaacaacagaactccaactgcaaccagactatttatgggcatatagataagatcataactcttcaagagatctcacaaagttaagctctcaggatcctcaataacctttgcaaaagtttgtaggaatgctgccaaatcagccccatatacaatcctgtgatcagcagtgacattgacctaaaaaaatgttcaaacagcttagttaaatacaaatgccctgatgctgtaatttcattgtttcatactctatgtccactatgccatagccacaattctggcgaaatattgccagtatagtccagaacaatctgttcaacacaagaattattactaacacattcctaatggcaatcaaccaaagaagtcccaactcctagctggcaatgatacttccacacaataaaaccaccaatatacaactcaaacagactttgactacaagttgtggtgcttggtaccaccgtactagtgaattgtatatttttcattgcaaaattacttatcttaggccagcanatctatttctatgatttagacagaagcatagaataaaatctactcctgtttcaaaaatgcagtc

SEQ ID NO: 6842 - DNA, 723 bp, Zea mays
atcttgcatgcctgcagacatgatatctgtacaagcgtagttggaaaagtccagttattgcagctgcactcgacggccaaattggacccggctgacgctgacttcagacctgatggtggctaaacccgtaaaccgacacggaatgggtgagggagtaaaaaaacaatcggacgcacacaggctttgccttccttataaacgacaagaccaaactagcaagagcagcagcgttcagagtttggaaaattcagacttgagctagaaccagaggaacaccaaacacgcacgcgcccaccccccgaaacggagagaactgaccccgcagagaagatggccggcgagatgagctgggtgggcaagaagatccacctctacaacgtcaccatgggcctctacatgctcgattggtgggagcggtgcctattcagtatccttccgctgcgtctccatccggctcagtttcttcgttaatattccacttgcttgcgaatttctccgacctcgcgttgctcgacaccgtcatcagctagggctagggcttacgttagatccgcgtttgattttgggtatctctatcccgacaagacttaggttttgggtaggcatttgttcgattcgttcttggtgggaagcgttttgttttaccggccaggcaatccgtcgattttgcgcgtgtcttccaatttgctgcgcgaggtttctcatccggtgttgctttgcatg

SEQ ID NO: 6843 - DNA, 750 bp, Zea mays
acaggtctgaggaatattttcgaagcgatggagaacttcacctctgcatctgcaaatacgtacagggagctccatcttcgcgccgaagaagagaaagcccgggttgcgcaggagagcggcagcgtttcctagttccacatgaggacatgagcatttgtcggtggaaagaagggggactaacgccagtggcagcgtttctacggcacagtggcacaaccaacccctagtggcagctgatgcaccttgctcgccaggtgcctcagttttttgggttccaggctctctctgatgtagaggcctgtggtacttggtggagttaacaggttgtgacatgggggtgctgcatttctttgatcgggatgaacaggcattctcctcagaccgtaattgggaagcgcagttgtgaaattaggtaatcgccagacacatcctggtagttgggagaccccgcctgaagggaccgagtgaagagcagatgcccttgtgcatctgagaagccgcagatgatctcttagttcagatgctgttatcatgaacccaagattcatggaacgctcccaatcccatgcatgtcagcgcccaacacacagggaagaggccaggctaccaggtttatcagaagctgtttcaataaccgcagaattttttttcccatgccaatgcacactgtacagaggtgatgcgggacgaatcgagctggagcccttgtgtccgctgccgagaagcccgagacgatgtcgctttgagctt

SEQ ID NO: 6844 - DNA, 793 bp, Zea mays
tgcctgctttgctgcctggactgccagcgccgctgcttcctctgcagccttcaggcgtgcagcccggctggagaagtcgcccagctctccttcgctggttcccttggccttgagcctggcagcgcgctcagcagaggtcgacatgagtagagaagagaggagtcggccttgaggctctcaggtgtctaacctaagctctgataccaaatgttagaggtagacagagtgttttgccgggactactaacctcagctatcattgcttgattatatagaaagatgagtcacattgattacataacagctcattagagcttagctaatctgataggagccttggcagccgcacacacctgttgagctgctcaaggtctttaatgactataattaactagcacaagtaactaggagaatgcttaggaaacaggacatgcttaggaaacaggacttaataacaacaccgaatggattgcctaatttatgcatacaaccattgcatgtttgaatcttgttttattctctctacacttctgtgaattagattctggaaggtgctaattagttcgttgtgatgttctgtagtgcggatggcaaatatttgttatcaggtggtgaagatgatcttgtgcaagtatggagcatggatgatagaaagatagttgcatggggtgaagggcataattcatgggtgacattatcgttacaattgtctttgcttttatcacatagcatttttaattgaaacctccattttgagtcgaattaatttgcaattatacaggttagtgcagtta

SEQ ID NO: 6845 - DNA, 869 bp, Zea mays
gcatgcctgcagaacacgcagccgacgcccaccaacgccgacttcggcgaggacaactacttcgtggcggaccagcgggggtacgagtccatcatacactccatcggcagctcctacctctccaccgacggcaacggcaagctcaaggaccgcaggatcctgctcaacaaggtgcttgctgatatgcatgatctatcagcttatttctcgttcgttttctacgtgtatgcaatatatgagaggataggaaaaggccgatccactactcgtagagataagtttttttcccacaccttacttaaaagaaatcaatgctttgaaaataaaaacattataaatttgtaagtagagttagattcagaatacatacaaaaaagattgtagtcagcaattatatacaaatctcttttctaatatataaagtacgagtctcaatggtcatcctacatcattcttcatcttccagcataatacaaaaataaagtaaaactataaacaaaaaccttagtagttgcctccacattcacactcatctaaccagtagaacatatacatttttttaatttattaaaataaagtctacacatatgattgatatatagaaaccgcagcaataacgtattggtaactgactagtatatatactatatacacctcactttgttctgtgtcggtccactaattaaaagccatgtttattgcaataaagctaatagttagctgactaaaaactattagtaaaagctagattatttggatgtatgcatttaattttaacagctaaatatatattagctttagtgcattcaaaaaaaaacctaaccccggccccgtgcaatattcacacccatcatggaaaaaaagaaaac

SEQ ID NO: 6846 - DNA, 794 bp, Zea mays
atcatgtcgctgagaactgctctagcgacagcgtagtccgttctcttctgccgattaactcagtggagaatcgcgtgctgataacgtgttataactcggtggtaacgagacacgaaaatgtagagagaaagtgacagttatcctttattattgcagggagtcctgattatatacatgtgaaggggtgtatcccaagggatatgtcccttagggagaatctgtcgtaccctttggattggtcacatatacaatatacaatattttgtaacagctttgacaagacactccaaagatagatgaggacgaaaattatgttttattttttttttatttactgatttgtcgttatacacacaaatgtgaaggtatgtttctatagatgtacatatttagagagcagttgctcattgataaagtggtctataacacttcttgatcaacgacgtcatccatcacttagatcagtatactaagtatcagatattttggactctagatataatcttttcgtatattaagtatatttgtattttagacactaaaaactcgaataatctaatgtattcaaaattagacttttaaatatcaattaaactttatcattgtatatcactagtaatgtaagattaacacagtcgtttatttatgatatgaatattttttacattttaaatggtgtataacagtttttagtacattatttaaagtttaaaattacttgtaattagtaataaaataagtttaaattgattttatcgaatactttttacttttggatacaaatagtatcggat

SEQ ID NO: 6847 - DNA, 779 bp, Zea mays
ataatttaatttacctttgctggatatcgttcattcattctctctctgctttttcatctttgtattttttttcactacagtgaaggccggagagagcgaaagagatagagaggaaaaaaggtggactcggtactcatggccagcagcagctgctttagtggcctatatatagagatgtatctggtggctcgtggctcggcacgcactcgctcgctcgctctcatacccagctgacaacgaagaggtttagagagagagagctgagagaatggccgacagcaggagaagtgtagtgtacgatgctgaaggcggcgacgatcatgagaggcaaggtatgcatgcatgcatgaacgaccatgacatgtactagctagctcgctctagcagttgttgcgatcctctcatctcatgcatgaacgaaatagggacggcgtggacggcgacgtcgcacatcgtggcggcggtggtgggctccggcgtgctggcgctggcgtggacggtggcgcagctggggtgggtggtgggtcccctcgtgctggtgggcttctcctgcgtgacctactacacgtcggcgctgctcgcagactgctaccgctacccggaccccgtccacggcgccgtcaaccgcgagtacatcgacgccgtccgatgctacctgggtatattatatttctagatatatatatcttgatgcatttgttctgaaatctgacaccgtcgacgacatacacatgcatagaccggaagaaacgtgtgctgtgcgggtgcgcccagtacgt

SEQ ID NO: 6848 - DNA, 729 bp, Zea mays
gcgcttgcaccatggcgtagcgctgtggctcctaggctggtggccaccgaaggatcagctccatggtcgagaagatacttgacagtgtccagatggccctggcgtgtcgcatggatgagcggagtttcgcctggggaggatgaggagtatacagatgagatggtacaacgcatgatactacactaggcatatcgcatactgatggtgtttgtgttgtattggccattgggatgcagtttagtgcagtatatacagacattatagatgaaaagcaaagcaaagtgcaaatgtggtattagtctggtactctggaaggtaccaaccatcatcgtcctttgggtcgacagggaggccgagctcgccgatgaggaattcacagacgtcggtgcgacatccgatcgccgcgaagtggagggcggtgcgcttgttggcgtcacgcacggcggcggcgacggaggcggcgcccgtgccgtcctcgtcgagcgccgcgacgaggtctgcaaatcagcaccgggtgcgaagatggcaaatacggtggcggtgaggagttgatttaatggaggagaacaatcgaatcttgaaatcggaccgggacgtactcttgagggattggaggtcgccggcgcgcgcagccttcaagaaagcctgcaccttgctccgagctgccaaggtatccaatttccaagagggggaggggggagttaaccaaactgtgagagagcgagaagc

SEQ ID NO: 6849 - DNA, 734 bp, Zea mays
tcatcgccaagtacaggcccaccatgcctgttctttctgttgtcattcctcgtctgaagacaaaccaactgagatggagtttcactggtgcttttgaggtacgtgaaccccaatattctttgtgatctttcctgttagatgttttctttttatgcaacactgacattatctattattagcatgttgatcatttcttttgtgaatggtaacattggtctttgaagtttctcttgtagatattgaacatgtgtcatgcaatgcttaagagagattactttatttgagaagaattaagaaccttgattgccttctcttgtactgatacttggcaccatgcaactcatttgttgtttctttttcttgcaggcaagacagtcgctgatagttagaggcctctttccgatgcttgctgatcctcggcatccagtaagttaactgaagtctttcagttcactactttgtataagcaacacatactggctgcactgctcacttgtacacatgagcaactcatttctagcatcgttggggatggaaagattttgcaaacacatccccattgcctttgtattcttggacaagcattttttttattcatctattttggtaagatatccgatgaaaacttgatggcttttggtaagcagtatgatactgctaggagcctaggacccagatatctttctttattaacataacaatattatcatattatagatttatagtgtacttgc

SEQ ID NO: 6850 - DNA, 828 bp, Zea mays
ggtggtggccgaggaggaggatgacgccacgagcaagatggtcgagcagcagcagcagcagcccccacctccgctcccagctaaccggagccaggggcacgcgcatgttgtgtgccagggcatgaagccggagccgcgcgaggaagcagttgacgtcgctgtggaccagccgcagctgctgagtcagggggttctgcctaatggtgctgctaccgcgtctgcgatgttccatgatcaggttttcattactccttgtttcctgtatgcaagtttgaacattttttttttcttattttggtggaatgactgacaggcagaggtacgacctttatgaagaagatttatggtccgcagactaggatttatcgcctgactgtgatcatgtgttagtcctagagtcttcaaatgatccagttagatttatctagcctggacatatatgttcatgtgatctgcctcatttttagtttggaattttggattggtgtgatctacaagtaacctaaccctcattagaacctttcttggtagtttctgcatcttttgggacaaatttactgggtagagcctctgctctctgttttagagtatatatttagtagtctagatattatgtctagtagtctttggtctcataaggacttgcaatttggggagaagagagtaattctttggtcctagatattgcaacattttagatgctatatgtactgatttatatgtaattatggcatgcatgtaattgacatgtcagtgactttagctttgtgccaatttcaaaaaagttgaagtccaatggagttgtgccaattttcttgcagctgtact

SEQ ID NO: 6851 - DNA, 810 bp, Zea mays
attaacctctggaattataataatcgagagctggtgcatgatattgacactggccattctgcaaatatcttttgcaccaagtttgtccctgaaacatgtgatgaagtagtagtttctggagcaggagatgcagaggtacacctacttcctacatttttcttttctttttaataatattgtatttcctgttatattgggcctttttcaactccgttactatttcttttccaggttcgtgttttcaatatgtctcgattaagtggcagaaggcctagagaaatttctatggaaccaacaatggtttaccagtgtcactcaaaaagggtcaagaaactagctgtaagttagcatgctgatgggctgtcaattcgtattcgaaattctagagcatgacaaaatttgcatttaattttgacaaaattctgaaaaagtcctggatgaactgccttttggagaacttgaagttactctttaggtgaacagctgacagcctgacatattgcactgctctaaatttgttctccttatctgcatgtttagacattgatgtgttgcattttctgccttatcatttgagatgtgttctgctcaccatgcacttacgtttttttgagccgctgcatggtccattcagtgatacttttgtttgttgcaacatgtaggttgaacttggcaatcctaacgtagtgtggagtgcaagcgaggatggtactctgagacaacatgattttcgggagtgtagttcctgtcctcgtgcaggatccgctaatcaggaatgtcacaatgtgcttgtgagcattctgcactcct

SEQ ID NO: 6852 - DNA, 963 bp, Zea mays
aactttgatcggttaaataaatttcctttgtcagatttactgtgacatacacatggctcagtggtttatgttagttgcatggtgtacaattctcgggaacctttttttttttgcattttccaattactttagaacatgtgtgtactacattcacactttttcataatgctctgaattttttaccttaagcaactaagaccaaaacatgactccatgccaagtttcactattttttgaccatatttactatttatttattttttctggctagggaaggcaattaaaccacagaaactagtaaataatcctaaaaatggacacctatgcatgaagtaagtttgtaaaggttagatgaacaaaaggtatacttttcaagggaaaaaaacaaaaaaagtaagaaatgtagctcaaactttggagttgtagttcaatgtcacgaaacttagtgagagatgtgtccgtttgtgaaggacctaaattcacactttttcataatcctctgaattttttaccttaagcaactaagaccaaaacatgactccatgccaagtttcactattttttgaccatatttactatttatttattttttctggctagggaaggcaattaaaccacagaaactagtaaataatcctaaaaatggacacctatgcatgaagtaagtttgtaaaggttagatgaacaaaaagtatacttttcaagggaaaaaacaaaaaaagtaagaaatgtagctcaaactttggagttggagttcaatgtcacgaaacttagtgagagatgtgtccgtctgtgaaggacctacattcacacttttgcataatcctctgaattttctatcttaagcaactaagaccaaaacatgactccatgccaagtttcactatttttttgactatatctactatttatatattttttctgcctagggaaggcaattaaaccacagaaactagatattat

SEQ ID NO: 6853 - DNA, 870 bp, Zea mays
agcttgcatgcctgcagcgcgtcggatcccaccattctgggctggcttctgggaagagaaccgcctggatcgggggaagggaaagtataggttcgcggggatttcaggtggcagtgggcagtggcacagagggggttcgtaataagtgaggtgcgctgtgcctttgttcgtttgcctcgggatggacgtggacgtggctaggctgggcgaagaagaatgtcccgccactttgcgttaaggccctcggtcaaattttatttgcgcgtgctcaggggaagttgacggaactgaacagggtcggtgtgagtgtgacgtgttgcatgataaatttgctagaacgaataaaaatcgaattccttttttttcaaaatgatggaatttctttgtacaggagaaacatggagtttggaatgttttagaggaaaataaatatatatacatcatgcaacggaaacatcatacgaattagtatctccatttattatttaaagctgaacagtacaaatttacaattacaaacatcaaataagaaaattaaagagagtataaagtagtctgtagatgacgtgcaaacggaggcggtagggaagagcaggttgtttgactttctacgagatcatagttaatagaaatggcttcgagtttgtgaatgaagggaaaattcatgccgtgcaaacagaggcggcagcatgagtcatgctattccacgcgttcaatatgtgagtatttagatggccgatgtgcaaaatgcgaacggatccaaaaggtagtggagagaggaatctttctttgatcacttgagccatcacagtgaaagaaatcggcttgcatttgtttatttggcctgcataagtgaacacgtgaaatctt

SEQ ID NO: 6854 - DNA, 755 bp, Zea mays
aaaaattcgcacgcacaaataaataacccaaaacaacagctctgtatcacagatataatataacaatcccacgtcggccaagcgactctgagttcctaataaataaattgatgcttagggttctaagctgtctccgttctttgacaataaaaataatatatctaaagtttttatttagagcaataagagagacagataagatgttatacctcttgcaccgaagtgaaacgttggccataatcgtaaaatggtcaacgttgtctagaagattggtgtacctgctgtgttttccctccccctgagtcatcatgcggctcatgccatgagtagggtttgaaaagattttatctaaacggtttgaaaagaaattatctttaaaaagacagaaaagaaattatcttaacgaggtaaaatggaccttttatctttcccggtgagctgcaagcctgcaatgcaacccagcccatcccgtacacccaagtggcccaactacccacgcacgaaatagcagcagccaccgaccaccaaaccaaaccctaacaacgcatttcgctccccacagcggctcggccacaacccacagccagacggtctcgagctggatctctaccgttcgtccgttccagcagacagcagtgcgcgctctctctctccctcgtggcgacgactgggcgaccgctgccgctgcccttgtgccccggtctccgtcggtccgttcgccaagtctcctgcgggctctttgtcgtcgacaagct

SEQ ID NO: 6855 - DNA, 771 bp, Zea mays
cattccctccgtgcttctgcaaccagttcacttatatggtgattagcgccaggatttgtgtaccttattttcttagcaattcccctacaagttatcagccatgacctgtaacaaaagaagcatattggtgcttgtttgtcccagaagtacttccacaagataatttgaagacaaacatgctcagatacttaaaatttatgtatttttttagctacactagtagtctatgtgtaacaaaaacatgagttatttgatgccccgttattgataataaaacaccggcaagaccaattggtggctggactccagtggtacagcatagactgaagaacgcaacatcaacactactaaacattatcgtacatgttgtgaccgcaggaagcaagcaagccgagcaaaaatgcttgtcacacatcagggcagggcaatagggcatatgctctgtttgtctgcttcttttcttgtgtttcttatccccaatccgggcatggatggcaaactgatcatgataaaatctggctcggagcagtgtgctagtgagtgctaccagaagtaatcgtaatccacgatcttttgaagctacacatcggtactacactgttgaagacggaaccctcgcatcactaaacccgcgcccaaccaaacctgaatcccgaatgcgccgcgtgatcgaggcaagccctaacgacgatgtcgaccgaaagaaaaaaagaaaaaaaaaagaagaagcggacgatgactagtaccttgccatggtggcgcgcggactcc

SEQ ID NO: 6856 - DNA, 923 bp, Zea mays
agtttagtatggtgcgaacttgttggcttcttcgtggtgaatccgtgaatggcatttcgaacagtccatacctcacccaaggagccatgacacgaaatcatttttgaaccatgaatggaacgaagtcactttggaactaagaacgaaatgaaataatgcagcatcaggaaacgcatacagaacgaaagagacgaggctgtgtcgttgcaaataatgttgagatatagatggcattgccattgtgttaccgtactatgcaggtataatgaagcattatcaacatgtattgatgaacagataattaaaactaatttaaaagcaacaacacaaaagcaccagtggtctagtggtagaatagtaccctgccacggtacagacccgggttcgattcccggctggtgcaatttttaattttttttatttcgtttgctttttcccattatttttttaatcattgttgttaattgatgaccaatccacagtttactacaagattgtttactaccagaacagtctcatatatatatacatcgatcgaatgatcgatgaaatgctaacccagaagtgtatccaatccacatcacataaaatagttgaatggttattcatatttgcatattgcagttcagatcagctttgggtatttaaaagcaatatcacaaaagcaccagtggtctagtggtagaatagtaccctgccacgggtacaaaccccggggttcgaattccccggactggggggcaatattttttaatttcgtattggccctttttccccaatttattttttttaaatcccatttattgggtaaatattgaatggacccaatccccccaggttttaccttacaaaaaaatgggttttacctacccccaaaaccagaagcttgaaataatttaataaccaatcgaatggaaaagggg

SEQ ID NO: 6857 - DNA, 769 bp, Zea mays
atcacttgcatcccgtttcctacaaaagcatgccattttgcgttaatttggaatctgataatgtgcttcttgcatttgtatgttgcctagctacctgtatgactttccattccttggagatgacagcactatcaccgtggatgacaaccgtgtcgatccactatacaagcatatttttccacccgaagtggcacctcatttgtccttcatcggattgccttggaaagtcagttttgctgcaaattgatgccccagttaagatgcacctgtaacctaccctgtgaagctcaaagatcttgaacattccaacctctgttctttccaggttatccccttcccactgtttgaactccaaagtaagtgggttgctagagttctatcaggacggattaatcttccatccgaagacaggatgatggaagatgtgaaggctttctatttgaaactagaagcacatggatggcctaagagatacacacataattttgcaaattaccaggtagcctggagatgtctgtcaatacttagttaagatttatcagctgaccgcagtcgtctaatattaagttttcactgttgatacaactgaatttttcgtcgtatatatgcatatctttatgtgcagtttgagtatgatgattggctcgctgagcaatgtggcccatccaccagtcgaagaatggaggaagcagatgtatgctgtaacttcaatgaacaaggcagctcgtcctgagagttaccgtgatgaatgggatgacgagcatctggg

SEQ ID NO: 6858 - DNA, 816 bp, Zea mays
aagctcacgtatctctcctcccttcacttcgcccccatcgcctcccacccgctcgccttcctcgccatcgagcttctggcctcgccgcacctcccccacaagcgcctcgcctacctcgccgcgtctctctcgctccacccggtctcgctctcgctgctcccgctcgccacacaccagctccacaaggacctctccccctccgctggcgtccaccatcacgtctccgcgctcgcgctccagctcctcgcctcgcccgccgcggctgccgcgcccgacctcccggtccacctcgcgcaagacctcgtgccacacctcgcccggggctgcccccgcgccatcgccgccgccgcgcgcgtcatagctgcatcgccatccgcggccgtgccggtcctcttcaagccgctggcagcgtgtctcgcctctcccgatcctcgggcgtccacggcggctgtggcagccttctgtgatctatcggcgccccctgctgacgcaactcctttcctgccactcgcgcccgacctatacaacctgctcaccacttcccgatccaactgggctctcatcaaggtgctcaagctgtttgcacgactggctcctctcgagtcccgcctggcagccagaattgtcgacccggtctgccagctcctcacccgatccgcggccatgtcactgacctttgagtgcatccgcacggtggctcactgcactgccagcacatgatgccgcagtacgcccttgccattgggaaagccatggagttcattgctgctgctgatgaatccaaccttcggtacctagggcttttggctcttggta

SEQ ID NO: 6859 - DNA, 827 bp, Zea mays
tttgcatgcctgcagctgcacatgcatgaacgaacgtacgtgtcagtcagtcactcatgcaatgctatataatatggaacgtgcagcagtggatggatgcatggaccagcgaaaggaatgcaacgcatcgatgtgtggcgtggtggtgaccgatcacctacctgctccttcatgacctccacctcgtgtatggacgtgatgggcctcccggtcacgacctcgagcaggatcacgccgaaatcgtagatgtcgatcttgtcgccattggggggcaccctacaggatggaatggcaacaagatcccatcatgtgttccgccatgggcgttagaaatcccataacagcagctagtaaccttcgccgccgtaccgcacgtacgtacctgctgtcagatggatacttgcttcctcctcctcctcctcctcctccctacaccgatgcagcaaacaggtgggcgcgcaaacagaaaggaagaaagaaagaaagaacgagagcagcaccgttgagattgagaatgtagaagaaatggctggcgccggctgcgtgcgtcatggttttacctcggatttggcggtctcagcgaggatggggatgttgtagctgccgatcttggcgacgaggttctggtccaggaggatgttggtgatcttgaggttgttggcgaagaggcccggcatgatgcccccgtgcaggaactggatgcccttggccacgccgatggccgccgagatcctctgcacccatggcagcttcctcccttcggttccctctgaaccaagaacacaagcagcgtcagcctcagcgcgcctcagctatgtatgatgatt

SEQ ID NO: 6860 - DNA, 772 bp, Zea mays
agcttgcatgcctgcaggcggtggacctctccaacaactcgcttggcccggcgttcccgcgcctggggcggaaggtggccagcgtcgtgctcagcggcaaccgcttcggcaacggggtccccgccgaggaggtcgcctcgctctacctcctggagcgcctggacgtgtcgaggaaccggttcgtcggcccgctcccgccggcgctgctcgcgctcccgtccatcgagtacctcagcgtcgcagggaaccgcttcacgggcctgctcgccgccaacatgtcctgcggcgagaacctccggttcgtggacgtgtcttcgaacctcctcacggggacgctcccgtcgtgcctgaagacgctcccgtcgtcctccaactccaagcaggtgacggtcctggcggcgtccaactgcctgtccggcggcgccggcagcacgcagcacccggccctgttctgccagaaccaggcgctggccgtgggcatcgtgcccgtgcaggcgcggggcggcggcaaggccaagggcaaggccggagccgtggccggcgccgtggcggccgcgctggccgccgcgctgctcgccggcgtggccgcgttcctcttcgcgcggagggcggccgtgaggcgcgccaaggccaggccgccccggcggctggtggagcacgcggcgtcgtccatgtcggtcggcggcggcggcgcgtacccgtcgcagctgttcgccgacgcgcggtacatcttgcaaacggtgaaactgggcgcgctgggagttcccgcgta

SEQ ID NO: 6861 - DNA, 732 bp, Zea mays
aactagacagagaactagacaggggacaaccatgacagcacttgcgaacaaaaaaggctactgtagcaagttttaaacacttggcaacgctactgctgcttcgagccatcagacgtttctactcctgtagtactgtactacaagggagccgtggcagggacctgtgaaagtcagatcacaaggaaagaactcgattccgagatgtagtgtaggttctctctccaatgcagtagagggcaactacggtgttatgagagttttgatgacaggtttctccgtaggggccacataaactattagtggaacaatgaaaccacaaacacacggcagcaactactactactacgttaattttttcgttccaggatttccaaatctagcactagcagtgtgattagctaggtagacaattcagctaattacaatcaaattcgaacccagtgggcagtggacacgtatatggtagcacccacattattgcaggagccggaggacatacatacggatcgtcatcagatagatcatccgaggtcttcttccttcttccacgacaacatgtgcatgatgggatgccccttggttctatggcgtactgccatttgttccagcgtgcagtgtctggcccccatctgcatgtcatattggcaccgcgcgcaaaacaaaaaacaaacagtagagcatgattaattggagacaaccaccgcgcgcgcgccggtttacgttatggaacca

SEQ ID NO: 6862 - DNA, 758 bp, Zea mays
  unsure (1)..(758): unsure at all n locations
tgatattccagaaactgcaatggaagaaattgtaaagatgtgcggaggtgtacctttggcccttaaatctgttgcgtcacaactgagaccagaaagaagcgttaaagagctgttgagtttaataagagctatctctccgcccaaatcagattatggaacaacggatatccaggaccgtgttcttgcatcccttaagctgacatatcacttaatgtccccgagtctcaagttatgctttgcttactgtgcaattttcgctaaaggcgatgaaattgatcgggaaggcttatgccaccaatggatcgctcttggactaactgaaaagatgtatgcagaggacagagtccgtgacttattgaccatgtcatttcttcgggatccagagccacctgcggtgagttatacaccctcgagttacatgattgtagaactcaatgaaatagttttcatcctttcttccatcggtttaaagtagccattggttaaaacttaaaagtatctaatacttcgattttctctaggactttttatacaaagacaaactgacccactaactaattactccttactacaaacacttgagttctcaacccatcttatactgctcaagttctgtattcagaaaaggcattgcttaatccatttttttggtattaattttttgaggagtagacagttaaaattaaaaatcttatcttaatgctgaaactgcaccttttctcgactgcgaacccttttaaatttgngcacttctatct

SEQ ID NO: 6863 - DNA, 779 bp, Zea mays
tacagtatatacacagttgcaaaaacacagtagaaacagtagaagccaatacagtaaacagcgcgaaaccttttattattgtaatcagacacatacaaacagcttgctcgcgtcgctctcgtcactagagccatggcctgcgggctgcggcgcacaactgccaacagattcactagtcagcgtgcgacccaggcgcacaaaacgctaggagtccgttcatttttacagcaggggctcgaggaggaagcgccagtggcggtctcggaagatttacacagccccggtcgtcaaggtgagaggcttcagaatgtggcgagcttttccgttcaggtacctgtggtggtggccgcggcccgcagcgttcggtcaccgagctagccttcttctcgcttggttacggttccaggagccttgaaactgtctctacgttactgcaaaaggttgagaaaaccactggagtcagcttcaggtgaggcatggtagtatgtgactgttttcagaaactctagtttactgatagcttgatgctagaggggaaaaaaggttgcaaaaggcagttccaggtatcatagattctgactatgcaaatgttgccgcttactcaggggctgcggtggtctcgctgggtggtctcacattggaatggttcttcttgtagaacctgatggagatcagactgctgtgtgccctgactgaggactcgggcgatccatggaaactcaccgccgactcgtgtcccgagaagaaacctgcaaaaacccagatagacgctgttttct

SEQ ID NO: 6864 - DNA, 888 bp, Zea mays
actgcgtccgtcacttgaagatggatattgcaaacatacctattgagaatgtgatcgatgagcacaaaaaagataaatgtagaaaaggtagtcaacattattttgcagaattacagcatgcaggcggcaatatgatctataacattgaacacagaacattctgcataaaggccttgtttcatttcgaccatttagaaattaaggggtcagaaaagccatattttatggagatgttcttaaaagaagaatttagaactatagcagtccctagggtataagatcagagaaagaacaacttccaacacttacacgctgcggcatgtacttgaatcaaacccaggaggcaggtttccactgactatgggctctatctgcaaagacatacaagtgtaagcaaaaggttctatgaagaacagagataacatctatgatttcataacgcagttcgcatttgtcttaaatgaagaaaactggagccaggcaaacagataagtgaaactatacccacaaataacccagtgaaatcataaagataagggtgcacatggatcggacacaaacggatatcgctaatattacatttgtttccagatttctattcggattcgaatatggatagtatcaactagctatgtcggataggatacaaatggatatcgacatcataaatatgtgatttatttgttctgatatggatgcggtatcggatgttaaacatcagactcaaatacgaacggatctgaactcctctaaacatattctatgttcaaaaaatatacgtaccatttgcacccctgatacaggaaacacaaattcaccggacaagtacacttctttatgatatgattgattgatagagcaaaatattttaaaacataggggggcaga

SEQ ID NO: 6865 - DNA, 850 bp, Zea mays
gcgtgggatagacagcagcatgtagaatggcgcccatgattcgatattctgaaagtttggacgtatgcgttgttcttgacttcttgttgcgattttgcaacagaaacagaacaggacatggcagcacatgtcagaaatcttgaccgttttgctgctgctcgtttctgttcatcgtcatcatcctacgggcgcggccgcggccgctgaaatgccagcgtccgttccttcgctccatggagcaagaagataccagcgtatcgttcgttacttacccgacggatagggaagcttgctgggggaccatgggcgcaggccgttggcgcagtatgtctccatctgcgccctgacggcgtccacgtcgcggcacttgcgccaccgcgccgtcgcgatggcctcctccatggtgtgccggttgaaggggtgcctggacacggccacgtcggcgcgctcgcggaccaggagcgcgtgcaccagcagcaccgggtccaccgtgagctgcaccttgccgtccacccacacgctgaacctggcgcccgggaacagccggtgcagcaggtgcttggccacgacgccgttcatcgcggggtcctcgtaggggagcccgccgccgccggcgcgacgacgacccactagtgtcaccacgcgccacgcgccgaccgtggtgtgggccgccgccgccgcgcgccggcaggacgccctgccgcgcgagggccgcgcgggtggcgtcgtcgatgaacaggaagaagcacgccgcgcgtagcgtctcggcgcccaatcccctgggctgacggaccttgtcgtggtcgttcatgatcgccgacgccaccaccacgcccctgaacttttccat

SEQ ID NO: 6866 - DNA, 753 bp, Zea mays
gcaggaatggcacctgagggttctcagttcgatgctaagcactatgattctaagatgcaggagctgctgtaagtaatatgaacctttctttttaaatttttttacctacttgtgtttatcatctttgacttgagagccaagtgatacctaataacctttacttctatatgtttatgtaatacaggagcaccggtgagactgaggagttcttcacttcatatgatgaagtttttgagagttttgatgatatgggcctccaagagaatcttctgagaggcatttatgcttatggtaggctgggagtcgcttgttttagcatgttgccttttacatggtatttctcttactgcccattccttgtggtgtaggttttgagaagccctctgcaattcagcagagaggaattgttcccttctgcaagggtcttgatgtcattcagcaagcacaatctggtacaggaaagacagcaaccttctgttctgggatcttgcagcagctggactatggcctggttgaatgccaggccctggtccttgctcccacccgtgagcttgcacagcaaatcgagaaagtcatgcgcgcgcttggtgattaccttggtgttaaggtccatgcatgtgtgggaggaacatccgtccgtgagggaccaaaggattcttggcagtggtgtgcatgttgttgttggtacacctggtcgtgtgtttgatatgctgcgcagacagtccctccgccctgataccatcaagatgtttg

SEQ ID NO: 6867 - DNA, 908 bp, Zea mays
gttttacgcggcgggggagggagagagagatccagggagggggggccgtagaagatctggctgctgctgctgccctgcccagaaggataaacaactaggataccaccgccaccggcccccggcaggcggcaggcggcaggcgggcgggagagacgaaatctagggaggactgactggacggaggaggaggaggaggaggagcggggagatctctcgctcttccgcccatggaggagctgggagacgccggccagggaccgcaaggcgacgcctccggggcccttgtcaggtgagttgtcctgtcctgtcctccggttctcccatcgcgcgcgccgccggctcgcggtccgtccttgctcgtgctcggtgctcgtcgagcattgcggcggctgtgcgcctgcgtgcctgccgatgcgcttctgtctggtgggctgggttgggttgggctgcgtttgggtagcgttgacgagtctcctgctgctgacctggagcttctccctctcgctgctgtgctcgtttggcggctgattcgttaggacaagtcttccacggctaggagaatttttgttcacgacactatttcttcatccgatcttcgtttccaaatacagttctttttttttttgtttttattgttagcttcaagctttctcggtggagaattttgtaagataaacatctcgggctgaattgggcgagacggctcaaaattatttcatactggaattgccttggagaaatcagcagggctcgtttttaactctttcctcttgacgcggattagatatatgaccttgtatatatcttatgacgatggattgccttgttgggtcaggaagaagaggatgcggaagaagagcactggccctgactccattgccgagaccaacaagtggtggaaagagcca

SEQ ID NO: 6868 - DNA, 958 bp, Zea mays
cttgcatgcctgcagtgaccttctttgattttggttctaacgcggcgttgacatttttctgtacgtcctcactaaaaccgacatatattatccttagcgacaagaattcgaaaaagccagaaagggatgggcgatgagttagaagagtcaggtcaactaaaaagacaaaagaagaaggtgagatgtcccagtctcaataatgaattgggtgaaacgacaccgtgttaatttaagacaaataacaaattgaagaattcaaccacaaccagcgtatgtgctcggttggtgcaaattcttgtttgtttccagagtggggtgacgagagctgaaaatacaggcgccgctctcctcctgcctctccagcaatagcgccacagagcatccagcaatacgtacgtgcatgtcaacgtcgaacacgttaaccgttcatccctaggactgcttctgcttgaggacgtttccacgaacaggctgtgggcacgactgcgttcgttacatgccatggcaccacactcgcacacacagctccggcagtaaccgagaccgtctcgagcacgcacgcaccaggcaccatacaagaaattaaacagaaagcactcacctttgcttgacaggtgcagtcggccttgatgcaacgcgtgccgggccagggactgtcgctgtccaccatccctggcgaagaggtagagcaactggagccagaacggtcggcgaggcagcggcggccggcgggattcggcctttctgatgtggaatctaacgtctgacgacgaggaagttctgtgcgacgagcatgtggtgccgtctcagtccgtcggcctactcaagaaccgtgatcgagttggcgcaaaccataaaagaagacaaaaacgcccaggccatctgaatgcttggatgaaccgaccaaattcatgggacccggactgccttactgaaaccttttttgggagcaacccaa

SEQ ID NO: 6869 - DNA, 820 bp, Zea mays
atggagctccatgtcttgccgagatcatccgtaagatgggtagcgggctcctgtgtgcgtcgtcagttataggatgggaagattgtaagaagtctgacgtagtaatttagtttggttgttggagaagggattaaatataatcatgcttcatgcatgtgagcgaacacttctgtattacctgatgatcacggcaatgctggagccaggaagggaggctggacgacgacgagacgaacggcgtccgaggcagcgccgccttcgtcgtctcgatcctcgcggcggagcagtcgccgccgcagcatctggagatcagcttgctgccggccaaaagcggccagcaagacgctggtccgttcccatccgtgtcagatgagcccgctttcatggactgattgaccgtgcctagacctagagcactgcggcagaaagaacaaacgggacggaataagattccagtgtcattccacgactccacatatccatagaatcagctagctgatatgctagctttgccggtgtacgtccagtaccacacgcattgcctttggagttttgtactttttggctatagtaataaaccagtttcttctttttttttggtatcggtaaaaccatagagctgacaatatagtaagcaaagtgaaggcaatatatgcctggcttgtatacaattttgaacccaacccaaggggagtgcagtagaagagggaatgtgaaggcgacgagcgagcgagctagctaaagctgtccagaaaagcacgcaaaagctgcaagctttcactcacacagtcacactcatggagtcatggtagggaaaagg

SEQ ID NO: 6870 - DNA, 752 bp, Zea mays
gcaaggcgctggagctgtgcttcaacgtggcgctgaaccgcctccccgcgtcggccgcggtcgcctcgtcgccgctgctcggcgggcacggccaccaccaccaccaccactactacccgccgtccctgtccaacgcgctcgtggcggcgttcaagcgcgcgcaggcgcaccagcggcgcgggtccgtggagagccagcagcagccggtgctcgccgtcaagatcgagctggagcagctcgtggtgtccatcctcgacgaccccagcgtcagccgcgtgatgcgcgaggctggcttctccagcacccaggtgaaggccaacgtggagcaggccgtgtgcagcagcaccaccacaacaagcaccgcggccgcggccaccgctcccagcaaaaaccctaatcctagcagctctgctgccaccgcaagcccacctcaggaagccgccaaaggcaacaagctgccgctccaccaagcgcgggacgaggacgtcgccgccgtcctggactgcctggcctcgcggagcaagaggagggtggtcgtcatcgcggagagcgcggcggcggccgaggccacggcgcatgcggccatggacaagatcaagagcgccgaggcgaagcacgacgcgctgcgaggcgcgcaggtcgtcagcgtccgcgtgtcgtcgttccgcgagatggcgagggaggagaccgagcggcggcttggcgagctgcggtgccctcgtcaggggcaggagggggcaggtcgtcgtgct

SEQ ID NO: 6871 - DNA, 825 bp, Zea mays
tctgaaaacaactccattttctaagaaaaagaaacatcgcgccttgcaaaaatcaagtataaacttacggtatataattagccactaatgcatgcatggttgggcaaaaacacgcaaaggagacttgctggaactagtgatgaggcgtgctaaaagcatgcaatacacacttgctagtgtcgtagtagtagcatagacgacgttgcaaccacgcactgacggctctcgcccagcttccctgtccgttgaacgccttttaactatgtggaaaactgacccctcttcttggtttcgattcttcgcacgcatggaccatggggagaatttactacgaccaccggggcgggccgggccgggagagcgcgctgggctagccggcggcggcggcgtgcgtggccgctcaggagtgggcgcgccgccgcgctagctagtggggcggcaccgccgcaaagaccgtgcctcgtggccgtcgccgtcgagaccgcgacggaggacgtacgcacgcggtcgatcgtgccaatacacggcggccgcccggctgtggctgtggctctgggcggccaccgccatatctcgcgtcgcgcgggcgcacgcgttgacacgacgaacactgtggagtgtggaccgtgggctgcttatctgcaaaccttgggccaagtgggtgatggcccatgcattattgccggtcggcaagggtaccacacccggttccggcccgtgcaggggcgagtctagaccgggaagtatcggtaaggacactggccttttcttttttttttaaggaggatgcaagttgttccagcttaaacttgaccagtgacaggg

SEQ ID NO: 6872 - DNA, 788 bp, Zea mays
tcatgttcctcaggttatagtcatacctggagcagagaaaagtctgtggctaattgagatagcactccagcaacaaaggcatcgccagcaccagttgtgtcaacagcacttaccttaagtccaccaactctaccactaaaatcctgttattccacaaaaatgtactgtaaacaacattttacagacctatgtgcataaggcattgttagcaagtaaatgtagttaagatttaagaaaagtttgttcactagaaataaatagttaattccattaatataatatccaacgccatgtaaatttttattggacaaaaatcatgtttatggtcatggagaaaaaaaagtaaattccgtaaccaagcaagaaataaaaatagtaccctctacatcataactgtaggattaccttagagtaatacctacagccgtctggaccttcagtgacaagaagcaacttcaggtttgagtgcataagtttctttacaacggcatcatcataaggatcctctccatttgtgagaaaggaaacctcctcttcacttacctttttgaaaagagaagcaaaatgcacaaattaacacaagatttgcctctacagctgaaccataatttacagaatagcaaccttgaaaatatcagcagttctccatacgctcaggataccatctctagcatcctcaggtgatgaccacaatgaaagcctcaaatttggatcatatgaaacaagtactccagcatctttagcagctctggcagctgcaatatgtgccgttttacagggctcagtta

SEQ ID NO: 6873 - DNA, 793 bp, Zea mays
aaactaactatgaatatatcaatttatgaatagtgtaaaagcactttttcctaacaatatgttatttcccagactactatgattcgttggcatgcccctcacttttaacattctttcaggctgcaattgagtacattcattctttatcaagggcacagcctgctcgttctctcaatggtgctggcctttgtcctgctagtagatcacttagcacccaggccgccactacgtcaagcacaccacaacctccgcctcccccaccccctccagagaagactcactttggtggcctcaaagatgaggatcgcattttcaccaacctctatggtctgcatgacccttttctgaaaggcgcgatgaagagaggtgactggtataggaccaaggatttggtgatcaagggggcagactggatagttaatgaaatgaagaaatcaggtcttcggggtcgtggaggtgcaggttttccttctggtctcaaatggtcctttatgcccaaggtttcagatggacgcccttcttatcttgtcgttaatgctgatgagagtgagcctggaacttgcaaagatagagaaatcatgcgccatgacccccacaagcttctggaaggatgccttattgctggagttggaatgagggcatcagctgcttacatctacattagaggtgaatacgtgaatgagcgtctcaaccttgagaaagctcggcaggaagcgtatgcagctggacttctgggtaagaatgcttgtggctctggttatgattttgatgtgcatattcattttggtgctgg

SEQ ID NO: 6874 - DNA, 742 bp, Zea mays
aacttttgagtttcagactttcagtaatgggagagaaatgcaaatgcggctgttcgcgtatagccaaacatttatgacacatgtatagtacaactaatatgttgttcatgagtactggttcaaactgaagatgttgcagcttcagatgtaaactatggatattttatatttacatgaactgtgcatattagacaggaagaagaaagtaacaccatccttttttacagcatgaaatggatgcgactcttttgtgtgtaacaagttttttttagggttcctctaaaaaaatattttggaacatatgcaattgtagaaatataataaagctgcctcattctccagaaattttagctatttttagtcaggattcataattcgcctctttatattggatacattacctatcagggtggaggggaaggtcaacatttctattttgtatttcaatcatatcaacagattacttttgcactgctattcatttttatatctttccttaaattgtctattccaggttgttatttttattgaagtatccaattcagagaccctgaacacagtggagatgcagcagactatctctgataggcttaatttgccatggaatgaatcagagacagttgagaaacgggccagattcctattgaaggcactggccaggaaaagatttctattgctacttgatgacgtaaggaagagattccgactggaggatgtcggtatcccaactccggacacaaaa

SEQ ID NO: 6875 - DNA, 794 bp, Zea mays
gacctgcaggcctgaatctgatgcagtcagctcggtatcagcaacaagagtgtttagattatagcatgattcgacatacagctcctcgagttgcaccaagtggtcgagatcggagattttgatcgactgcatttctctacagtacttaagatgcagacgatatgttgactttgccaaaggactagtcttgttcagtttctttaacaccttctctgtataaatagtgattccaaggaacatcagtgccttcagggaatccagattcaggtcgttgacgtcactaataccatagtgactgcgaaagagattaagaactcttaaattgagtaaccttgagcagttgttcaaggtatcttcgagttcagcagtcacgctgagatccagatgcctcaactctttcaataaccacagccgctcaggtaataacctaatacgtgtgtgtgacaaattgagatgctgtaatgcaaccaatgtctcacattctgggagtgttgttattgcagtgtgagaaagatccagcactttcaaggagggcataaacttgaaaaaccctgaactcagcttgttcaaatttgggttattttggatcaacaacgtagtgaggttttcacattccggtgagaaaggaagctctttgatatcattagacatgatggagatccttgtcgattcctttcactcttttgctggtggagcactatccaaagccatccctgcttgaacaagaaacttttgatctgtcttggtaacccaaccaaattccccttatggcctgaatacatgggggcattttt

SEQ ID NO: 6876 - DNA, 524 bp, Zea mays
agagatccaaaatatgttatatcctgaaagtactgatgcagaagaaatattccatattaagattgaagaaactaataggcgctaccaaactacgaagacaaaaacaaagtattaaacctgatttaggaagataggggcttacacaacctaagtactcagtagatctaaaactgaatatatgagatgtgacttcggcactactacacatgaggaaagagatgttaatttggaagatcatgtagtccctaggaaggatacctttttcggtgtttaggatcaatgctatagagagacggggatattgatgaagacgttagccatagaatcaaagcagtgtggatgaagtggcatcaaacatctaacgttctatgtgacaagaggttaccatagaagctaaaaagcaagtttatataggacagcgattagacatactatgttgtatgatgcataatgttggcctacaaaaacatgacatcttcagcagataagtgttgtggaaacacatatgttgcgttgatgttggt

SEQ ID NO: 6877 - DNA, 1421 bp, Zea mays
tgcatgcctgcagcatgagcctcctggttctggagcatataaactgcatgcggagagtagagacaaaaaaattatttatgagagggagaatcacaacaagttttttcattcattcatttcagcaaacgaatgcacatatcagtagcagatgatctacatttttatcctagcattccactctaaacatacaaacaaaacaattgtagaatgtttgagagatgtattttcctatatatttgttcgaagagaatcccacgaatgaaattacactaaatcaaagtctacagaccaatacttctttattttcaaagcctttgaaatttgaatgatgccaatgtaatgcaatattcggagaagcattttctaagagacatttcaacaaacactaagagggatgtccaagatatggaagtgctgacattctcaagacgctgatcatagaggaagacctggtaacctgcgcaaaatcaaatagaaataaggcaccgcgagtgctcgagtgccccaaccagacttcgctatcgtcgtcgcacaaccactgtgcaccgctcgctgcacaacacccgcgcaccgcccgctggacagcccacgagcactgtccacagctcgctcttgcgtaggtcgtaggcgcgtcctcgcccttgcgtcctcgcctgctccgccaattcgctctcgcgcgcaactcgctcctgccatcacgctcaacatcaccctcgctcgtgccatcgtgcgtagcctcgcccctgcgccccatcccgtgacgcactgcccaccccttcgaccctttctatctcactctctattcattttccccaccacacgctcgtttgtcgtatagaactctcgcaactgttcagcgaggcagatcattttgtgaccgtccaaagatgatagagtggttgaaaatttaaaatagagaactcgaagggttcaagctgccagcatgggcatatcagaatcagtatgtggttttatttgccttatttctttccaattatgacgttgtttttaccaaaagatcatatgttcatgttttgtaatttgtagagacaaaagcaagtctaccttatttcactgataaacaaaggcagagttgtggccaaagggaagttagtgactacagatagccatagagaaatattaggagcaaagcttggaccagaatactgtggggctcttgttgaaggccttgtcaaatattgaacttggcaatattatatatgaggaggtacctagaccatctaatcagattcgtacactaattgatgctattggctatgttattccttggccaattacacatgtaagtttcttttttatttgaaatagtacatgtgtccccataacaacttgagttattgatctaacacatgtttcataccccaagcaagctagaagctcatcttgtacccgcagcaagt

SEQ ID NO: 6878 - DNA, 861 bp, Zea mays
aatcttgcatgcctgcagaggtaccacaatggacttcttaagaagaataggaatcgtgtacataagcttttttgctctaataaaataagagtggtaatggaagctctttgtcagaacctattttatcaaatgtattacacatgtgttgatgtctcaccattgttgtcttcctccctgtgactaaaggttgttgcaacaatggcattcagaatgggtcttgataagagtgacgttgaaccggtatgaccatttgactagcatacaaagttcaaatgtgacagcctatagctttaagcaatgttacactgcttatcacctggactgattcaagcatttgttcttttaaaggtggttcattgtatcttgccagaaatcgtagaagaatacatacatgtatattccatgcagattccccccaccctcccattttcttctcttttctagacatcttactatgctctttctaggaaactggtcgtgctgattcaacaaaagtcaaagtcttttgcacaaatgaatcttatcgtcttgtcctttttttcttgtaatttacatttccaacctgctctaagtttcctacataatgacttcaatcaaccctttttacagtgaagttcacgaatatgctatgagaaaattctttgccagatattttcttgtgaaaattcagttggatgcatttgctccttggttaaagagtcgacttcagacaagttcgatataaaagaagaggttgcctctgccttaatgcacctaatttatttttccacatattcatgttgcatgttgcgcagctgtattgccatattgtacctaatctttaaattccatgctacaaatttattaatcggatcataccta

SEQ ID NO: 6879 - DNA, 858 bp, Zea mays
  unsure (1)..(858): unsure at all n locations
aggtacgggctcaaccctgataaggagacactggagatcctgcgagctgtatccaagtccaagcaggtaatacttcaagggttctgctagatagttaagctagaggatgaaaactgtattgttgcaatgttgcataacaacagaacacatagtttgcaactgatacaatccaaagtttttttttgcatttaaaaaaaggcagcacaatagctaggtgtccaacaagaaaaaaaaatccactcaaatcctcatataatctgtgttatcggaagtcaggtcaaacatcatgaaaccataacctcaaatttgatcaagtttagggtagctggccagccaggaacaaaaacaatggaccgaacacttcccaactactgtatcaaacaacctgaagaattagtaagggtactgaccagcggacatatgaaaacatacacccaatagttctcctgatttttatatttgggtaaggctggctaaggcaacagcaacaatgtagaaggcacttttgaaggttacctgcaacctgcctttcatggatccaactatctacagaattatttaattttgaaggcaaaaaataaaataatattgtatcaaatatactatttagtaaaaatgttgcttctatgtcggcttgatcaggtggaagtactagcaaaggtttactggggcgatgcaagggagaaactctgtgaggcggtagatgatctcaaggtggactcctttgtgcttggttgcaggggcttnagggccactgaaaaggtgaacatttctaacctcttcgtgggtaaactacgagtgcttaatctttggctaacatagctccctaatattttacatttaaatggatcttcatgc

SEQ ID NO: 6880 - DNA, 832 bp, Zea mays
agcttgcatgcctgcaggtaggacccgcccgtgccgccagctgctgcctggcctaccttctgcacccaaataacatcacgattaccactttgcccccctccccccaaatctggcagtagcattgttaattgttactactcccgaggaagaggatgggaggagtgcctttaccgcattgtagctcaggtccgcgacgtaattcggggcgtacctgaacggaacagcacagatcgatcgatcagtacgagtggggtgggggaggggcacgtaacagtggcgcgccgcgcacagtacaacccgataaaaaaatggcagagaacagggacagataactagatcagtcgtctactacttttatagtagtaattgtttataactagggtaattaatgtgccgagtcttaacacatggccatgtccagtacgtagcattgaaatgtccacctcctctctctttttttttgtgccgccgtgcaggccggcacgtgggcacgtgcgagcacgacgaggcagcgcggtccggtccaggtccagcctgtgcgcggctgtgcctgcgccagtgcctcccgccagtcccgcctcgcgtgctcggctgctccaattccaaaccaaagcagccgctctgccacgcatgtgtgcgcgcgcccactggactggtgactggtccccctccccgcccgccgcaagctcgcaaggagccagccaacccgaagccaacgagcagaggacacgaaatcctcgtagcctcgcgcgacgtgcagtgcaaatagtttggcggcgctcgaggtgcgcgaacgccgtgccgtgccgtgccgtgcgccccgtgccgtttt

SEQ ID NO: 6881 - DNA, 773 bp, Zea mays
ggccgtctttggttacgcggtgcttgcttcgtggagtaaacccggtggccggtatatgaccattgaaaaaaccggtatatgaccattgaaataaaaactattttgtgctaactctgtcctcgaatatttgtcgacgactagtttcactaagtacacagaagctctatagtggtggttgtaaaccttttttcacttgcgtttttagaaccgccaatattagaactcattataaatcatcatttttacatacggacaactaaagaccgccggtgtaataaaatttattttatttaaggagaggcgtctcgacccactccacccgcccgtctcgctacacggttgctagaaatcgaaccccgacctcaccctcgcatgtaacctattctaccacttcgtctatggcagcatttgtatgtagtttgtagttttgttgtcgacatattacaaccaactaagtgtaaattacttgtttgagacagtaaatgaattcaaataaaaaagttgtcaactacaaagttgaataactttttaagttctacaacttttattttgacacttttttcatctgaggtcgttcgcaaaatttaaattttaaatttaacaaatttagatctaactttttagagttgaaataatttcaaataaaaaaagttatcaactaaaaagttttataacttttagaggtctaaaacttttattttggtgatttcatcatacgagatcgtttgaaaaacacaaaaaatttcgggtaaaaaaaatttctagtggccgtt

SEQ ID NO: 6882 - DNA, 755 bp, Zea mays
agaattctgtaccaccaggaacacctcatcccatttatacctcacagggagttgcttgaagaaattattcccaacagcagagatttggagtgggcggtaagtgattgtgagaactcatggaataaaatgagatgtagctttgcactggtttattatgactaatgagagttacatgtcctgccgttaacttcaattttgtcatgactagaatctcaccagaatagttctcttgctccagaaaccataggagtttgaatctaaagtaatggatttcgatatataagtacatctaaatcttgtatgatgctgttttctatgaacctataattaccttttgaaaatattgacttaataattatttacaacacttattattctgtcgccagtttgtggatattatttgacttggtggtgatattgttgtttcacatttaactgatttacattttacctttaggttcctactgtgtcatatccacgattggtgaaacttcttcaggttagctattatagcaagtctgtgctctcagggctcgtgatttctacaggtggattgcaggagtctttgaagaaagcttcaatgtcagctttggtagggtatctccaagattcagacatcaatactaattgtgaagggaaaagtagagagtatctattgagttgtgatcttctatggggcccttcagcactaccaagaaatgtgacccgtgtaattactcccatgttcaaggtcataaaggcttatctacactgtc

SEQ ID NO: 6883 - DNA, 828 bp, Zea mays
cagcttgcatgcctgcagtgttgcttatgctaaagttttacagatgctgtgtaaaaggttcccttttggagatcaatgaaagattgatcaaacaaccagatcttcttaataccgctgtgagtacaatcctgttgtctgtcaaattttctctgtttcctttactctttgtgtgcttactatattgtttggtctccttttatgttctagttgtgccctgagtttttgtttaatatagaatattgattcaagacttctactgcttttctcgttgctatgtttgttttctttaccatatagggggcaacacactcctttactcattttttttcttccttttttgcatttaggctgacagggaaggatatatagcagtcttccagccgaaaccagctgactggctcaaaattaaggataaatttcttagttatgaggactacaagaacttgagaggagtatgctgacacccaaaaggtatctagtgctgtaatttttgcccttttggcttctgctttccaaactttgaatacgaagaaacatgttttccaacatcggtatctgagaccattccgtatgtagacctcatgtctcataagaccaacttaaatatgctagcttcaatttgaatcatgagtgtcccacaatatctaaggcataacatgaactttatttgtattatttcttgtacttgaactagattgctcttacattaacacatttgttggccttttatttcaacacggtgtggaacaacattaagtttgcctttgtattaaactattgttacactaaatgatacaacatacattatccaagtgtatgtaatataat

SEQ ID NO: 6884 - DNA, 831 bp, Zea mays
atcttgcatgcctgcagttacagcacagaaacattatttagatagcaacacaactgatgtggataaatcatctgaatctagcaatggagtttcgtcaacggagctgtctgatactgacagcagttctgggtgtagagaaaaccagcttgactttgtttctaaagaacaacagcaaaatagttcttgtgataaagaacagagtaattttaaaagagaaatagtcacttgttctgatgcttccgaagtgtctgatcattttgttccagaagatacatcatttgatcagtctggagttaagcaccatgaacttcattctgcaccaagtatcccggatgaatctggtgcaaggaactgtgatgattccccgaaggaaaatgtggatgatgaggagcttgatctcttcattacagatactattttaccacttatgcgatctcgcctttgtgaagattgtgaatcatctccaaggtatgttatacccataaatcagtcttagtatgttgcaggtgacgcacgagaaacttatcatgtatgagtttattttttcattcatgtttgtggtaaatacaacaacagtaacaataaagccttgggggtaggctggagctttaacccaacagaagccgcaggtcaaggttcagacatgtagataactgttttccatgcactcccattcaaggctaaatttttgggaatatctcatcctttcaagtcaccttttactgcattttttcatgtcaacttccgccttctcctgcctttcttcccactactatcacgttttaggatcccactatacattggtgcctctgaagttctcctttgacatgt

SEQ ID NO: 6885 - DNA, 815 bp, Zea mays
aaaagatggtaactattttgtgactctaatcagacactggtgttcgtgtatagtaagtgctacaaatgatgattgtgtttagctgtggtcaacagtcaacatcaaaagtaaagtaaaaggagtgaggaaaaagacaaaacatttatcaaatctccgttcgaacaatatgcttggcgggtggagaagtatattggtaccgatatacaagaataagggagatattcaaagttgtaccaattaccggagaattcagttgatgagacatactatgaagccatgggagaaaattattgagcatcgtctaagaggaataacgacgagttctatgaaccaatttggtttcatacccagaaggtcaaccatggaagccaatttcttaatctgacaagtggatgtagtagaatagggagctgaaaggccctacatatgattttcatcgacttagagaaggctcatggtaaaatagcaagacatgttatatggtcatggcgggctttggacaaacataaagttctaacgaagtacattggacttattaaggacatatacaacaatattgtgataagtgttcgaataagtgatggagacacagatgacttcccaattagaacagaattgcatcaagggtcagctctaagcccttatctttttgccttggtgatggatgacatcacaaggaacatacaaggggatatcccttgatgcatgctttctatggatggtttaatgttagctgataaaagttgggcagaaataaataggaaactggagttggcgggagactgtagagtccaacttccaaaagttttaaactc

SEQ ID NO: 6886 - DNA, 799 bp, Zea mays
tgtgcagccctttcctccacaaatgcacggaatggtgcacaccctgttcctggtccaatcaacacgagaggaaccaatggacgtggaggaggcagggacccttggtgtatccaacacgggataagattgtctgcacacaagcataatgtgagagaaggtagatggttgtgttttgatcagcactgagcagcgtagctacaacagctaactgaagttaagaagagaggatactaattgcagctaactgaagcagaacatacctttatttggattgagcccggccagccatgtagagcagagtccacgccgggttctcttgaatggagtaacccatgctacgacgctaacggtcaaatggatttgatttgggtgtgccagtggggatgatgagatagaaaaggctcttttcttcagtggaggcgttagttgcaccagccattcaaaaggcatttgcactgaaggaaaatcctccaacacctaaaaatgacactatatcatgtaactactgtgaaccatggaaattaactgaagagaaaaatgggaatattactaccaaaagttattctgcatggcaagccatctatggaaacaatgttgttatgaaaagattcagtgaagccttcctcacctctagaacagtcctactctccttctgattgtactggtaaagatcatctctttccttctggtgaaacaaaatactgaagcctctccttttcacgttcacttgttgcaaaaaagctcatgacctaccaaagacattgtgttattttagcattcgcagctttgcattaccaat

SEQ ID NO: 6887 - DNA, 780 bp, Zea mays
tgcacctcttggattaaatcccagaccaacgagaactcaaacagcacctgcgccggaaggctcccagagagatcatgcacccatccgtttgctgttaaggctccttggactgatctgctcttcctagttctcatggaaacacgatttgctagagcaggagcaatctgtaacaaagactggacatgtatccatttatctgtccagaagagagtgtttgcccaatttccaacaatagaacaaaaagaggctgcgaagagggctgtaccaaatctgtgtacctttatttcaaaatcagcccaaggcctatctggttcagttttctggagccaaagccatctcaaatttgaagaccaacccatcacttccaaattataatagttatccacttgtaactgtgtttttggtatcctgatacatcaactttctttattttccaatacttgtcatatccccacaccccattagtgtagctgtaaatacggctggcttaacaacatttttgttttacaagcagtttatcagatggtttagacaattgcacctttctttcctgaaatgataagtttatctggtagaatggataattaggatcagtttggtaaagctctaatacaacatcctttcgctctagttcctgctcccagtcgctctaggttcctgcataaaccgtttggtagagcttctcattgctccatgtcaggcgacggcagagtcagcatgtggttgggccagggttggtgtaggcgaattgaactcacatggatcgagggtgccctctgc

SEQ ID NO: 6888 - DNA, 859 bp, Zea mays
gatcccctatagtcgacctgcagcttgccactttgacagggcacacgtaccgagtattgtatttagctatttcccctgacggccaggtgagtcttggcgatctgtttctgagttgtgtttaatatgtatacctgcgcatatctgttcttactgcctttcctgctgctggtatcaacagaccatagttactggtgccggtgacgaaacactccgtttttggaacgtgttcccctctccaaagtcccaggtgcgtaaatcaacctggaaaacacgatttcgttgtgtatggttgtttggcttctcatgtggcaacccttctcacgttagcttcctaagtctggttcatcctctgtcttgcagagctctgatagtctaagttgcatcgggggtacatcgtttgttagaagctacatccggtgacccgcagaaacgtagtttgaactgagctcataaggtaattgcagcatatgtggatgatcatcagcatcatcccattcatgacaaccatgccatcaggtcgtcaaccatccaaggtagctgaatttttgagatgccacggcgcagcccgatggaagaagtggcttgcgaatccgggcatggctcttttggccgagagtgtacatatttatcagagcaacaacggcgcgcatgttacaggagtgcagcatagcggaggcctcaagcatcggcattgttcccagctgataagaatacgccccctttttttggtgttattttttttgcccattttgcgggtcaaacgtcgacctggtatgtgtgtctagtgcgctagcagttaacctatttccaaacgcttactgacctgtgacccccatttctcattcatgctggcccggtg

SEQ ID NO: 6889 - DNA, 769 bp, Zea mays
tacctaaaagaagaaaccattcccaccaattgctctggatgggctgaggtcatcgtcaaggagatgtcctctgcttcggatttgaccgatgccaagaaccgcgccttcaagatactcaaactgtttgagaaatcggctgacaggagcagtagcccagatgaaaagagagaagggaacaaggtaccaagattgtctaaagttagacacttgtttattatatcaccaaccatacttaacagttaacaatgcttagttcttccttcttcctctcaagctgacctgaatagttgtcgtcaatccaggagcacaagatagtgaagcagatgctaggatccctgctccaccagaacggcgttctgaagcgcgcgttcctcatacagcacaaccgactcaaggagtaccaggagatggtgcaggagcggtctcagttcaaccagattctcgagaagtaccgggagcagatcaaggcgttagaggtaggttctgtgaaaatgttgctataatgcttaaactgtattttatgtatctggtactaaccttgtcgtccttacccttcaggagaagaacagtgccttgtcattccatcttcaaaatatgaaccagtgcagaaacacctattggcatcacaacccagatgtcttctaatcatacagcatggacattctgctaatccctacatgctgctacatctgcatgttacaacatatctgtcgagcttgcgagacagatagggactgcaaaatcctgaactgcaaaatatctgttctct

SEQ ID NO: 6890 - DNA, 754 bp, Zea mays
cacgggtcgtcggagccgcgcgtccgcgggggccgggacggggtcgtcggagccgcgcgcccgcgcccgcggcggcgccatgatggaccggttcctgccggccgcgcacgccgtggccgccgccgggtccccgcagaacgccttccgccgcaaggccgcccggacggcgccggccgccggcgacaggaggttgtacttgttgccagcgcagccgcagaggcgggtgcccctccaccacattgcggcgtgccacctgccgccgcccgtccctcccgctcccatgagcagcccccgtggcaagaacgacggctacgacggcgccagttccgacgcgcgcagcacgccgggcttcgcgtccaggagcaggaggtgcggcctgctctccgtccggtgcgtgaggagcgccttgcggcgacgtgcgggcagaccgttccggtccaacggcggcggcagaagccgaagagaaaagaagccacttctgccgcataccggagacgatcacggcatggtactccctgttgctgttgtacatatatatatcctcgtgcatgtgcatgtgcatgcatgaacttcactcgcatgctaaattaacgaaatcactactgcctcatgcggaacaaacaactcccgtcttctctcgcgcataaataaatctctcgcagcaatgctgggaggaagtgtacatcaagtcgctgctccggtcaggccgcggcagcctgatgggaccggcggccgccgtggcctccgagctgga

SEQ ID NO: 6891 - DNA, 768 bp, Zea mays
tgcatgcctgcagctatatgttatgtttgatttaatttggtatggacatgtactaagctaatatatttaagacatttaaagtgagcaactcacaaagagttgccatctatggagtgaatgagatatattagtttgacctggttttatatgtcttaaatatctttagttctttcgaaatttgaaatttaagttggatctttactagtgcataaagattataatatcgccatgacactttgcgtttagtgtccatcaagcttactagtcttataatttgtgcccttgtgctttgcaagttgatacattgtattttgcagttgcttaaacagagtagagcagtactaaatctttaattttctcccctttatgtacaaccttgcatacagtatttctgggagcaagatgagtttgatatcatcagtcgccaaacaaggatcagtctccactttcaaggcggaaagaaacagatgatgcgatatgctttcacataccattggcgcctgtaagtagcttgaacattacttgtcaaaacttcacttcagaatcatcgcttattattcccattcacaatttcacatggtgcaatcttacagaggcggctgtaagtgtgtaactctttcagctacttcactaattcattagcattagaactcaaacattagcatagaaactctaggtatagttttaacagtattttggttgcagaattgcaccattggcatgagggttggcttgcaaaaatttaactggaatttttttttggcttgg

SEQ ID NO: 6892 - DNA, 747 bp, Zea mays
accccacggcgccggacctcctcccgctgctaccctacgcgccgctccgctgcgcctccccgggttgtggcgccgcgctcaacccgttctcgcgcgtgcaccacggctccgcgcgctggtcctgcgccttctgtggcgccgccgccaacccgttcccccgcctactggcccccgacgcgctccccgccgaactcttccccacccactccagcgtcgagtacttgctgcccccggaccccgctgagcccgggggaccggggccacctgcgctcgtgttcgtgatcgatgcggccacggcggccgaggagctcaccgtgctcaaggacgaggtgcgcaggctcatgcaggggctgcctgaggggatcagggtggcgctcgtcactttcgctgcgtctgtgtgggtgcacgatcttggatttgagggttgcgctcgggtggttgtgcttaatggcgagcgtgagctcgagtctgacaaggtttgtgaatttgtaatataatccttaggacaccgaatttgtaatttggttctgcgccaatctatgtgacatgatcagcattctagtttcacgagtatccacaatctgttcctgccgcagtcagccttgaaatttgaatgtaagtatcttgttattaatgcttagttcagggggcaatggttttaaactttttggcccttttattaaccatggacttcattcttaaatcccctttttaacggctaaaaccctgcttttaaagaaccttggc

SEQ ID NO: 6893 - DNA, 812 bp, Zea mays
acaaaactcaaaagcaagctgctgcatcagtttatcttttagcggtccgctgaagtggtccaaagcggcgtccagccttttaaccaaacgaagagtctgccgcgtctggaacggacccggagacacctatagcacggacgatgagatgaaaatgacagcacaagtaaaaaggagaagatggtagccaccactaattagacatggtacaataggctgaaaggctttttatagcgggaaagttccgtttggtagaaagatgtatgaccgatcgccaaccggacgatcaatcgcccaaacacgaatcacataccaacccctaatgcatatgaagctatcatgaaaggtagtatcggtatccgtcgaagcacccatcatatcctacacatcgtatccgtaagaaatacattcaaaggcatgtcacgttgccagcatttcattttgaaaacagaaacatcactgaggccgtgttctggagtaaaagttctctgggtccggtaatagccaccctgatgcatacttcctccgcagcaacgcgatgcagaagttgtgatcaaagcggaagcgtccacgaaacattaattggcctgggaaactgagagccaccatcacatttttgtagcagatttcagcacgtaccggctagacatttgctactccaacgacataggcgttccaagcatctccttggttgaaatgctgcgattcttcgtacttcacgtcccggttggcgttatactccttggcgtttccacctgactgggtatttggcatctccctcatccaaacgtggacccacttgaatcagcctcctc

SEQ ID NO: 6894 - DNA, 864 bp, Zea mays
gtatcagcacaagaaaagaaatcagaattatccatagcatatacataaaagtctaaaagagttacatcattaagaaagcattaagagttatgatcttgtgaagctcaacttgaacaacactatacattatcagtggtttgtcctgattaaatagctgttatgatgcctcaataaaacaaagcttagaagaggcacaacctgcacgcaccccattatccccagccttcttcaatccaactttcttgatcacaaagctagaaccaatgaatgcactagatgacatggctaaagtcaagcccctcacattgtctaaagacgccaccatgcctggaatatatttatttctgtcaagtactaaaagaaccaattcctacaatccaagggacaagaataagtaaataaaataaaataggaaaaaaaaccatctagataacaattaaagaaccacaactcattgtcccaatgttccatatgagaaaaaatgaatatttgattataacatacattatttttattcattctgctggaaaccataacaacctaactctaaccagcgtgggttgagtgtatatatattggaaaaggggtacatggtctgggccaaggtccataacccttagactgattacaataagacacaagcatctaacaccactgctatcctccacaaggcccgtgacgaggccttcgtaagggccatcctccacaaggctctgactacctcggagcagctctttcacgacgccgacagatacatcgcccgcatacgagcgggctcgtgaccttgtcgagcaacgaaaggacaggccccgagaaaaagaagacgaggtgggcaaaggggccattgccccacctcaattttta

SEQ ID NO: 6895 - DNA, 770 bp, Zea mays
ttagcattatggatcctgtgatagtcataccctcttcctctcaggcagcatgactgtataatcacaagacaattgaaaaatatcaagctgaatctaagcaaagctcgcatttggttaacaattagtacctaaatagaatccctgagacaaggacaaactttgtccttaaagaaactcagggaatgctactcaacaccacaaatcattcaaatcatatttatacagtttgtgttagaatgcatctgaggtgtaaaaggggacattgaaaatgctaattattgacaaagctgttaagtcaggggagggtaaagatcatcttgtgcatcctcaaagttcaaacttcttgacatttcaaggcaaccgtagcatgccatataacattatccagagtgggtagatttgtggggtagtgtaatcatatcacatactcatacttgtttctagttctgttggttagacttcatgatgttaacattcaggtcctagagccctctgaggtctgagcacctgtttccataattttgctgagtgtatgcacatactccttaagaatccagaaattaccaaagctatccacccgataaaaaacttgaccaacctaagttactaggttgaattgtaaataaatagacagcccaaattgagtttgaggactcaaacctgggttgtggctatgtacaggcgtctatggaccacaatgggaggcaacatgctcatcgctactggatgtcttcaattccttgtaagtgtgttaaggtctagcgactctt

SEQ ID NO: 6896 - DNA, 811 bp, Zea mays
tcagttgctgatcacatattctccctgctgaatgatccctccgctgcgcaacagatggttgccatgtggtcatccttgggctcatctccgcgtgcttcagctgtgagagaagacatgtcgtttgacacctttcctgggcctgtggacgggacatcatcacttgctcaaaggttcaactcagcagcagcatcgagtccaactggagtcgacagagggctaaaagagtcagatgggcttgttcttccaagtaatggctcacagcaagggagtagcatcattccgaggtctgttggcaacgctcttgcagacaggatgctcatggcgctatctttgttcaggaagtcattgagtgatggtgttcttgcccaagtctggatgcctgttgagcacaatggtcgtgtcgtgttgagtacatctgagcagccctatttacttgaccaggatcttgcaggttacagagaagtttctagaaatttcctgttttcagttaaggaggagcctggtctgcacctagggcttccagggagggtcttcatatccggggtgccagagtggacgtcaagtgttatctattacagtaagccagagtatttgagaatggagcatgctcttcttcatgaaatacaagggtcacttgctatgccagtttacgatcccagcaagggctcttgttgtgcagttcttgaacttgtcacaaacaaggagaaacctaattttgatgcagagatggacattgtttgcgatgccttgcaggccaagtctaacttgtttagacttgggatatttatttagtgacatcagtgcttaatgt

SEQ ID NO: 6897 - DNA, 868 bp, Zea mays
  unsure (1)..(868): unsure at all n locations
atagatttttgaattgtggtgatatggttatgctacagcgcgttgcttctagctggtgtggtgaaggtgcagcggctagggggcttacacaatcgatcattcgatctagagtactgcaaattatctctcgggacatatttaaatggatgaacaaggcaatgatgtgctacttttgtggttcaattaatgctaaggtggggttgtggtttcaaagatgaaagttataggggctgtttggtttgacgcctaaggcgccacacctaagcttagcaggttgccacatgtgtggcgtggctaagcaactacacttagatatgcatttggtttgctactgcgtctaaggttaggcatgacgaaaaaagtgtggtagggttgggtgctagattctgacgccacaggtgtggcgattatttttttggtgtggcgagtggctagaatcatgcctaaggaatcgtggcagactaactttagaacaccaaacacatgcctaagccagtgtggtacgcctaacattaggctgtggcgtcttaggtgaaccacatatagcttttttgggctaaattacatgatttaagaaaacaatcgaacacttcttttatttatccatcttttttatgctctaaaattagtacttgtcagtttaaaaccagcagtaacagccctttccaagcaagttggggtaggatagagttgaaacacaagatgagccaccaacaagaaggacaaatttctataaatataaaagtattgaaaggcatcaataatagcaaggagaaataataaagtttgctagactcgatcatgctggtcctgtgtggacccaagtatgagcatgcatgctttaccatactgnctggggtactgacca

SEQ ID NO: 6898 - DNA, 777 bp, Zea mays
tttttggtgccttcagctctattgactggcgatagggaaggggtcacctcctcgatggggacggagttcttttgagccgcgagcttatcctcacgggcagcgattgcaaatgctgctgctgcaattgtggctgcgaacgcagcatcgtactccccgctgctgttcatttccgctggacgtcacattgccattctgttagtctgttttttccgctgcgtttcatgtttgtgaaagcctagctactaatcattgtatatttgatcagttacctattccaataggcctgctttcttgaggtggtatcgctgaaccctggcgtccacctctacctccctttcctactccagaaaaccgaaccctgccacacacaaaaaaaaaaactgtcaaatctgaatctgctcgtacccgatgatcgcaagaatgcaacgtccttccgattctaaatctccaaaactaaaattctggtggcacaaataaccttttttcacctcagcttttacggagaaaaaaagaagacaacccgaagccctgccagacacatagatgaaatcaggatcaaacccttcagcagacggaggctctaggccctgctgcgtgcaccgcttctacctcagcttcttcgagtcgccatccatggcgcgcaacgtatttgtagagaagaagccccaacggcaggttgcaaggcacaagaagccgcggcttcagtgacaagcgagggcctctcgtatttaaaactgctcgctttaccccatggaatagaggcggtgaacgtgaacc

SEQ ID NO: 6899 - DNA, 705 bp, Zea mays
ttggttacgctagctaggcgctagcttcaactgatggctcatgatcctgcttctgttcgatctgcgttctgcccggccagtccccatcgaccagatcttatattatcagtgttgctagctcgctcatgcgtgcatgattcttgatcttgatcccgatgaaactgccgatcgatccgtgtcttctttgtccttttgtttccccaggcttctcttctaccttgttttagggctttgcagaaacaatcagttactgaccttttggattttttcccttgttttttctggctcaagggttcactagggcaagattggaaacttaaacccctttgggattcccggagattgaggagaaaactaaactaatttttcccttgatccccgaaaatccggaggggatatatgttttcaaaactagtgcgcaaatcgattctagcatggttttccctttttttttctttagtgcttagtatgtacaaaataaatccccaaatcttctttgctgagttgcaaagaatccgtggccgaaataggcacaggtttagttattagactgacgacgacgatgcatcatgcatccccttctgttggttgtagtttcttgagaagtacttgtgcacttgccccccccccccccccccctgagcctctttttttaagtttttaaccgaaaaataaatttgggggattaaaaaaataaagaatctg

SEQ ID NO: 6900 - DNA, 908 bp, Zea mays
aggagattgctaaaaggcttggacaatgtcctttagcagcaaaagttatgggttcccgattgtgcaggaaaaaggatattgctgaatggaaagctgctctaaagcttggagatttgagtcatcccttcacatctctgttgtggagttatgagaagttagatccacgtttgcagagatgcttcttgtattgcagcttgtttccaaaaggtcatagatatgaatctgatgaattggttcacctctgggtggcagaaggatttgttggttcatgcaatttgagtaggagaacattggaagagattgggatggattacttcaatgatatggtctctgtatctttcttccaattggtttctcaaatgtattgtggttcgtactatgtcatgcatgatatccttcatgattttgcagagtcactctctagggaagactgctttagattagaagatgataatgtgacagaaataccatgcactgttcgacatctatccgttcatgttcaaagtatgcaaaagcataagcaaattatctgcaagctatatcatttacgcactattatctgcatcgatccgctaatggatggtccaagtgatatttttgatggcatgctacggaaccaaagaaaactgcgtgtattgtctctgtcattttacagcagcagcaagttgccagaatctattggtgagctgaagcacctccggtatttgaacctcatcaggacgttagtttctgaattgcctacatcattatgtactctctaccacttacaattactttggttaaaccacatggtggagaatttgcctgacaaactatgcaatttaagaaagctacgacatctaggagcgtactcatgttacccttatgattaacttgatgaaaagcctatttgccaaaattcttgaata

SEQ ID NO: 6901 - DNA, 798 bp, Zea mays
aaaacccagccaacatgacgaggtaaagggggtaaaaaaaggtaaagggaaaaaagaaaaacgaacactgcttacccagccaacaatgttcagtcccttcttgatgaagcaagaatcggtcggcctctttccggtcactagctccagcataagcactccaaagctatacacgtctgatttctcagtagcatgcccgttttgcaagtactctgttgccaccaaagtcaaaagaccaacatcatcaaccggaggtagctagatgatcggcattatgtcatcagagatacatgtttcactttgtgctgctgccaagagatgtacctggtgctaggtatccaaaggtgcccgcgacgacggtggtaacgtgggcagcactgtctacaagcagcctcgcgaggccaaaatcggagacacgaggctccaagcttctatccagcaggatgttactggctttgatgtccctatgcacgatcccgggcgagcaatcgtggtgcagatatgccaggcctcgagccgagccaagcgcgattttcatccgcgcgttccagttcaatggctgctcctcttgttcatctcctgcattcgtaggcaccacaacatgtaatgcaagcagcaggtatagcaaggcatcacatcggtgtaaaatgcaagaaagaatgtaggcatccttaccatgaaggtagcaatccaagctgcccagctcaacgaaaatcatatacgagtagcttcgctgtggggagccggcagtagcctcgcagattgacaaggtttatgtgcctgatgctggcccaaaaatct

SEQ ID NO: 6902 - DNA, 775 bp, Zea mays
tgaaacaatagggttttccttttgtggagcaagctcttaaagaggccagcaagcaacttttttttctcgaacatgtgggagaaccacgtatcaatatattaagaagataagaaaaaaaaaggtctagaaaagacccagtacaaaggtgccaagaaagcacccacggaaataaaaaccaaaaatcaaaaatcaaaaatcaaaaacttaaaaagggatttaattccttggttattctggttgcttgggagttacaaaaatactgcaacaaagcacagaaaaaaatactgcaacgaaggcacctactatagtgcctctagatgtgaacagagttggcgtgtttttttgcggtccatcaaaaggagctcttttgccacccaggtcagatagtcacttttttttatagaacgcgcaggagaactgcgcatcttatatattagagaggaaaagaaaacattacaataaaggagatgttgctgagcaactctcccaaaaacccttataaacccgaaggtgattacagattgttgctgaaacttgacccgacctcgcccaggtcagcaactaagcccaagctcccaaactccttagctcctgctattacccagcaaacgtactcatccgggaaacacctgaaaatcctgggtagtgagggagactccccatggaacactgctctgtttctctgaagccatagacaccaagcccccaggatgatcagagagttaaaccccttttttctggtcttgacaaccctaaaggcttggcctttctccac

SEQ ID NO: 6903 - DNA, 844 bp, Zea mays
gggaaaccctgcagagttaacctgttagccgctccaaaccgaacccatggccgacgcgaatagtaacgaaatccaaatatttcatcaacacgcggggctctcttcgctgatcttggaaagactgagaggaacaaatccaaaaataaaggggggcaaatcgacagaactgggtgaaaattgcgcttccagatggattggagaggcgtggcggggagtgaccgcgaaaagagaggaggcatggcaagcagaggggaggggtagagtggatgaggggattagggacgggtgtactaaatgggcttcttttttcttaatgggcctaaatagttggtttggcacagcggaaatcctagtccgttcagactccaaatcggcccagtagtgtcaagccagttttgatggatataatagttccttttttttgaaaaataggattagtggcattttgatgtagtctaactgtctaaggctctgtttgatttttgtggtcactaaattttggaccactttaactcttaacacttcaaatatgatatctaaattgttatcttatctaagtgttattacacaactttacaactgaaagtttagaccatatgatccaactgaagtgaagtctaactttatccaaagacagatcggtgatacaacaatgccactccttgtggcttggcaatatgaaataaatactccgtgctaaatgaagactgattccgagtgacgacgatctgtgaacatcgatatgtcaaaagagaacaaaatcttgctagttactcctgcgagaactaaatcttggagtaaatgacccagtatctcttgctagtgcagagcatagacaaaaaaa

SEQ ID NO: 6904 - DNA, 838 bp, Zea mays
cttgcatgcctgcagccagctgaattggattctccttagaagcaactccacacaagggtcgctcattctcactggacttaagttcaccttctgcactaatattcatggaagcaaacacttctttttgttgatgattatcattcttatgagattcatcatgcaaaaattgaacatgatgtcgaatcaagtcatgtgataactgcaaagcacatgaatcaaccatctcatcccaattagagtggttgtcaatattcacagaaaatctaggtattgtatgttctgaagaaacaaggcactgatccacaacatgtgtgctgaagaaacctcttactccactgggaagatcttgaaacctcatgtcactggtggactataaaacaaaatgttagcttgtcatccgatgttatcttttcttttcttttttttggaaatgtaggtatcaatgctgccatagaggtgagaaaacagaatttgttcaaaaagaaaatatgcacagcctgtttggcagagcttgatagttatagttacaactttacatagaagtaaagtgattctaggctgattctgaaatgaactaagggcgcgggaaccgaaaaaaattagcttatcctgattcacttcttccatagaatcacttccacaatagagtttttcctagagaatcactaaccatctctctcataaaatcactttccacagaatcaaaagcccttagtattcatgagaaacaatccatgatcacatgtcatcagtattacaataggtaccaaaatttgcctaaaacaagaagataaaacatttgcatagataccttttaagtgctgtttggttcaaatgg

SEQ ID NO: 6905 - DNA, 1073 bp, Zea mays
tggctagacgtggatcctagccacaataatctatgggcttatttgggacaacttttttttgaggagttttttctgagaatctagattcctagataatttagttgtcataagaatctggatatcgcagaacttgcgtgcggatgaagatgaaggggtctacacggtttagggtttaggaagcgacagattccccccatcgtgacaattcggcggattttgcattcgtgttgatttgggtgattttcacagaagtgattatcacataagcgcactgagaagtgagaagtgagtgtttggcagccagaagccgaaacaaacagacccatatgaatgccaataagcaaaagctattgaatccatgattaaaggccacctaaggggttgtttggcatagctctgctccactcgagagcaactctgctccagagtctagattgccttggccggtatatacattcaaacttcatgtctaggttgtgcaacattgtttgcttgagctctaggtgaactagtttattgcataataagcatgtcatgaggttgcaaaaatggttgataaatgatgagatgacggcatgtgcaacatggaatggccatggaaatcgatcatttcagagttttttttttggtttgtgcaggtgattgctgaaagtctatctgaggaggagattgggggtttgaaggagttgttcaaaatgatcgatactgacaacagcgggacgatacctatgatgaactgaggatggcttaaagggttggtcggccctgaggacctgaaatcagctttaaggagcagtagggttttttcccaatgaatgtttatgggcatcttggtgccaaccataaattgaaccgggctggccttggtcagcttttttcaacacggtgacctttttctttggggtcttggggccaccttccaccgaaaaaacgggaggggggaagtttgtttcccgtttttttttttatagggcgaggggttttatatataagatgctttaagagtgttaacattggttttttgtgcctctcgggtggataaaaaggatgcacaacgtatggtccttttaccc

SEQ ID NO: 6906 - DNA, 931 bp, Zea mays
aggaattgattctgcaaattcttgggctgaactgtaatgcaacagtattcttatgaaattctaccgtttcagcgcctccattgtgggtgtgttgcttcaaagaactcttatgatctacttgacagtggaggagttcattgtgtcacttgcatgaaaaattcattagcccagtccgtaagttctgtttttggtcagattatccacctttcctttttaaatcatctgactgtagtttttgcaggcttctggtcaagtggttccaaagctttttccatctccaatcaatctacgttttttcggtaaaagtgacgagttattgtcaagtagaaattttgaacagccaccctctcttacattggattccagaaatgatgatattgcttttgtaaataagagcaatcacctgttcatggtaaaaggcatagaggctggacaaagcagtaacatcttgagacaaaaagagatagagaatggttcaaggcagattaaatgggaacaaccaacccttagtattggggacatgggaaggcctttcctaactaggtctcaaagtgcattagagtcacctcaatgtactcgaagagatgacaataaggatccaactacagatagcacaagtgagtcattttcagaagcatgtctgagcatgagcctaggtattgcaaacaatgtaaacaggatggaggctacttcaacagcggaaaggcctgtgctattgtcaacaacagccattgctgaaggaagagaacttgccactacactatctccctttcaacacgcacaaagggcacgacatttcctgaccagacctccaaggattggtgaaggtgctgcttttgatccaacaagagacatgtttccacatcttcgtgttgctagaccacctgctgatggaaggggacgcaatcaattacttcctcgttattggcca

SEQ ID NO: 6907 - DNA, 837 bp, Zea mays
tgcatgcctgcagttgcatcactgtacacccccacgctaaacctaccaactagctagtgtattgttacataaacacgttgcaaatttatcaagtagcttttactgatggatataatgataatttatagtttaaatggctcgtaatattgagtgacgattctatattttatatttatagactattagttcaatatataatgcaatattaattataaaggtgtagctcgtgagccaagtcaagcctccatctgtatctcgttaagtgggcaagtagagctgagctctagcgagcgagctgcacctggtcgagcttggctcgtttcctgccctacttcaaagcatccaaaataggtgtgtgcgctagccacaccgagctaagctcggctggtttacagcccttatctagcacatccaaatatgtgtgtgcgtcgaaggagggccatttttagatcaatcatcaactagttgttagccaactggctagctaatcttggctaatttgagctgattttttttttagcttagctagtaagtaactctagcttattcccttacgtacgtagtcgtctaggtgtgtgaaaaaaaagagaaaagaaaagaaggaacgcacgcagcagtttcattgtggggccgccggccgcagcatgtcacaggcgacgcagacgctgtttaggtttaggcgaacaaagaacaatgcttcaccgagtcaagacgttcagcatagaataataataacgttccaacaggcccgtttctgggccccttttgtccgtttcatctccatttcgtcaaactattgctgcgtacgtcttaccgacaccagccttcaatgctcat

SEQ ID NO: 6908 - DNA, 797 bp, Zea mays
cttgcatgcctgcaggccggccgggcggcgaggagtgtattccaagacacaatgattgtgtcgcgcggggaggcgtggattcgtaaagtggacgacgggtgctggttctcgctcgctcgctcgctctgctgcataacatgggccttgaccggcaggcgttcagtcaggcatccacacatacacccacgcatgcatatgcatggcactagttctttcttctctcccgtagtacgtcctggccaccctccgtcgggtcgaacgcgtcccctttttggtcccgttccaggcctgaatgcctgatcgaccagctccatttacacgcccttttccctctcatgtctccgttgctccagcctatagtaattatattaccctactagcctttgccccccacagggccatcgaaaggcgtggcagccaagtaatggtatcgcaggtcaggtcgtctggagggccatcggcaccgggagcgaattcaagcgagagaaccacaaaaaaaaaagcgaggccttttgctctatgtctctgtgtgatcacaggccagggggaggtcgccatgattcttgcgaggccgggcgagatcataagcgaaagacaaaaaggccgaaaggcgcatcatgctgccacatgacacaaccctatacaaaagctagccctaccagtaccaggagaagcatccgtccatctcgctttcacgccaattaaacgtagtcctacgttgtatacgttggagcacgccgcaaccttatttcccctagcccagcagcagctgctagctagctcctcttctccaatcg

SEQ ID NO: 6909 - DNA, 919 bp, Zea mays
gagggaacgagtagattagatgccaaccattagatttatggcagaatgtaatcagggaaagaaatcaaccaatatacacgatcatctaggtcaaactcagcttgttccacttttatctcattcattgaaactcctgtccacaaaaccagacggacaataaagcaaccactaccaatctgtaactgtatcccagaaaccacagtaccataccttgtatattagcctctacttccttctcctccaactgttcttgtcgcagttctctcatccagggaagcagcatggttacaatatgaaaagcatagcgaatttcattttctttagagatctccttttttggaggctggtaagaggaatggggcaagacattaacaatgggcactagaagataattatttgaaatttgaaagcatacatataagtagaacaacgtaaaaactgtaaacggacaatgagttgctaagtctgtacctcttcaactcccctcatccttaggcatgccttgcaattacagttcttgcgacaatatgggcacttcacagcaaattcatcttctggcaaattaggatacctatttacaataaaatatttgggtcacttgaacattgggcaacacacatggtgagacaacatgactcttgcatatgtcaatagccagtgaaataaaactattggaaagaacaagcttcaaattttatgtagcatattagactaaaacagttcagtggacacagaaaattagtcaatgattaggaaacggcgatcaactaaaactgtgcaagtcgtatttgtaactactgtatcagaagaaacagttgataaagagaaatccaattggtatgaaacgagaatgaaataacttgacacaccattgttctatgcattgcaagacgaaatcgcttttttttgcatgactgac

SEQ ID NO: 6910 - DNA, 848 bp, Zea mays
aaggaacacctggagtagagtagagtagagcacatcactggtttgaccatgtctggacaaacgctctgtacatggtacgtagattctgaacccctgtcaatgcatgttcctccaccacacgaaaagtactgcaaaccatacacatgattcgcatccgaaacgcctttccacatcagtgtcggggggaaaaaagcacacaataaatcatcattaagaaatggtttcatgcatgagaacgtgtttacaaatccgtttgatataattcaaatggaggagacctaggtgcctacctcatgggacaacagcgcattttacaacaaagatcagtaatagtacaaacctgaaatcaacaacaacaagaagaagaagaagacaacaggactccggagtagcatagcacgtcgtcttcagcgcctaaaatctctcactggcaccacaggatgctattttcccctcactactagtaccactgagaaaatcttaaactgcttttggcgctgctactagagatcaactaatcgatctgtgaaagcggatgaggcacacggtaggtaagcttcagatggggcgcatctgggaagcaggatcctctggttaaaaaaaaaactaggtctcggtgggcttcaggagctcgccaagattcacatgcaagctgttcctcatggtccgccgtcctgctcccgccagcattgccctttctcatcatcgcggcaaactcactataatcaatctgaccgtcctggaaaacgatgcataatttgatagcactagatgagaggacagaaggagagataaagtcccggagaatggattccggaaaaaaaagggttaacaagggcttacatttg

SEQ ID NO: 6911 - DNA, 784 bp, Zea mays
atacctccaactccgctgagcaaatgtgagatggttccagattagtttatacataatggtattatggttggcaattgaaaacagggactaggaaatcaattcctttcaaacattcgtgaagtggattccatacttcaggttggtttcttgtacccgtactcttaagctctcatatatttgccaagttccagtgtctgtcaattactgtgcgccatcctgctggcatctttatactttacaggctgatacaattctccatcagatatccctttttcgtccaattttattgatatgcgacatgtgaagtaaaattgggagccactctgttatccttatccagcactgcaactcactgctgatgcttcattgtcatttcttatgtgttggagatagcaaaatcttataggatgagcttcttataagatattagctgttgaggttctaggaataactaattatctgtttttttactggattctcaggttgtgcgatgctttgaggatgacgatatagttcatgtcaatggcaaggtcgatcccagatcagacattgatgtcattaacctagagctgatattttcagatcttgaacaggtaatttggtgaactgatttccctttgtcatgctatcacgcattttcaaaagaaacttctttgctatctgtgatcctgtccaactgctgacatttgcataataccgtagatagagaagaggctagataagcttaacaagagtaaaaacgaaagataccccaagtaaaagtgaaggtaatacataccaattt

SEQ ID NO: 6912 - DNA, 802 bp, Zea mays
tgaattgttcaggctgaattgatcggtggaagctgtgcattgactatttttttaatctcagaatcaaagagagaaattgaactgggaggctgggaatcgcgagagaagtgatgtctttcgttaggcaagcagacccatcagtgtcctgtgcggagaccacttacatccacaaatttgtgccaccaggatcagttttcccagcacagagatttgtctctggcaccgacttgcttcaccacgggcctcaaccatataatgctgagggctacaagcagtctggtttcaatggcacagcgcctcatgcatttcagagcttttacaatactgatagctatgctgaatctcactttaatgaagcaccatattctcctgcaatcttcgatatatctcagcagaactctcaatctttatcggataaccaggcctctgatcttgtagagttcgatgaggatgagatgagagtaaagcttcaggagcttgagcatgctttacttgacgatggtgatgagatcttttttgacttgtcagggagcattaacgatgagtggaatgataacattaagacaaacaatgaatgggtcaatacaatgaagaatattgtgagccccgactctccaaaagaggcatcacctgagtcaagcatctgctgtcttgacaacaatgttggagaagcacggaacccgaaacagttgctttttgactgcgcagaagcgatatccgaaaatagcatcgatgaagcacagtcaatcatagcagaactacggcagaaggtggcaattcaaggagaaccttctcagagact

SEQ ID NO: 6913 - DNA, 776 bp, Zea mays
agggatgatagggtgcctgacaagtggacccaccttactcacaaggacagtactattgttgcctcaccaaatatgctagtattaggcgggggctcatcgatcgaaccaaccgttcgttattattattattattattggtgttattaatctattcctccattatccgtggagctccatggattacagcgagactatgcacttgtttagaccgtataattggaccagtacaccaatacacgtaccgtgtgtgactactagatgtatgcatgcatgatcaacaaatcatatcatcagggagtgagcctgtgtctgtccagctccagtaggtgtggaagcttgcggccgattaggtttcagctgaagcttaacgaataacgacggcacgcatcatatgggcaaagccgaggcgtgaacagtggacgtggttcctttccttggcgatccaggatgtctcgcacccaccactgatcggtgaccgatgcagcagcagcactgggctgggctgggctgggctgggctgggctgggcaggttcttgaggtgacgttttccaccagggcttgtacatagtagtacatacatggggaaaagccggaagcttcagcgggcagcggacatgtcaggttgccgctgccgagctctggtcagctcaaatcaagaaaaaaggtcctgatgaccggtcgcttgctcgctcaccgcatgccgcagcagtgaaaaaataacatcgagatttaaccagtatggttactgctactagtaccatagttacggcgactg

SEQ ID NO: 6914 - DNA, 1026 bp, Zea mays
tctgctgcctcgctcctccagctagctcctgcatgcttatcgatcacaatggagtatatatataatataatccatctctctctctctgtgtctcttcctgatcgagtcccactcattcatcatctggtatcgagatatatagctcgcagctacctttcggctctcgatcgatcgcacgcacaatatatatgcgtacgctacgatgaccgctgggcggcatgcgccatgtgcacgcagatgcaggtgcagcgcagcatgcaccgaggtgctgcgtgccagctagtgctgggaattgggccgggccgggccagtccatcgtgcttcgtgctaaacgggttcgggccaggaaagcccaaacaatttttggaccgtgccgtgccagcccgaagtgtaaaaacagtggcccagcctggccctaaactacgtcgtgccttcgttgggccgtgccggcccaagcccgacccgtatatttgaccacataaaatcaaaatattataaccatataaagtttatagcttactaaattaaagatattaaacaattctagcatcatataaccacataaactccaactataacaacaatataaagtcgatatcttactaaattaaaggaattaaacagattgggcttaattgggccgtgccggcccaagcccggcccatctatgcgtgccgtgccgggggcccgacgggtcggaatttgaggcccggtccaagcccgccttcgtgccgtgctagcccggtccatattatttcgtgctggaccatgctttggcttttattttcgtgccgtgctcgtgctggccctgcccagattcccagcactatatatgaacacgtcgcgcatgcaggcagagcggttgatatggaaacgtacgtgtggtcagctgactcagctggctttggttacgacaggcggccgggcaggtaaggcgtggtggacacgtacggatctattcagcgtacgtatggtttttgccatatagacgttcctgcaggtcgactttaaaggatgtcccggggt

SEQ ID NO: 6915 - DNA, 826 bp, Zea mays
aaatagtgtaaggtacccattaataactcatttcaaaaaaataataacaagctagcataatgaatggatttgatagcacaagattaatgcacgtaccttccctgtgagtagttcccacatcaaaattccaaaactaaaaacatcagccttgtgatcatagggtttgtgctcaatgacctgcaaaagtatgtaagattttattacacgacataccacttgtgggaaaaaattagtaaactggacagctatatttcttgagtccactggtgtgtggtccaagcttgtgattatttggaagacaccctataccgctaaaacctactgtaacaaaaaactatgtcatggcctggtccagagccagctccacttgccataagatagcagtgcgaagctaccagggtacaatagcatggaagtcctcacatttcttctttcaccaattactttactgcaagtcatttttttttaggttgaggttgtggatttatgctcagatggtacaatcaatttattcttatatgatggtacaatcaattagtaataaggaatttccatttctctcatgttacaatgaaatccatcgatttcattcacaccttccacggcaggcaccaaaatcctgctaaaatggaaggccagacaggattagctgtcatgcgtaagggctgaggcagagcagaggtggaacctctatcacacatgctgtttgttttggccatggaggtattgaacgggcgcttgggctcgctgatcggctggatttcttcacgccattgggccagcaggcaattcgctgccacacaccactttatgcggatgatcttgt

SEQ ID NO: 6916 - DNA, 775 bp, Zea mays
aatagcaaaaaaaaaatgagctggtgtataaacattaattggagtttgcaacgtgcatgagaccaggactcatcgaaaagtgctgttaagaatttacctttccacacggtcagggccttcacaagctaagatgttgacgatttcccgtgcgaggcactggcgctccacgttcattctatctgggctttcccttggaagggtggcatccagtgaatcaaaaagtgccgaatagtagtcatagacctcccggaacctgcataccaaagggcaacatgaggaacggcagagatataactatatgatagtgtaaggctggcacaaagttcaaaaaaaccacatttctttcacaaggtcagcatcgtgaagcacacatgtttgctaaaatgggtagttaaacagcatgtatatcatcggtttagacaactctgtgtaccaaccagatgcagtaaaaatgttcacgagagaaccaacctggaagggaatggggtagtgttagtatttgcgtcctgctccaccaacgtcactagttttggtcggagacccttcaccatacggagaagccgatccctttggttcataattgagacactttcatcaggaaggtggtgcagcaggaatgcaaagttaacaatgagggcctctccgggacggcgacctagcattccagcagtcaaatcttcaatgttagcagccactgccctgaactcaaaccgtacctcacagtcctctgcaagcttctctagtcgctgcccaacaacattcagtcctgcaacag

SEQ ID NO: 6917 - DNA, 798 bp, Zea mays
ggggggagattatgtgggacacacccctggcacccagttctcatcattactgcaagattttatgtgtcaaacctgttgctgcaccttattctgcaacaataaatttcagagtcgaaggatctaatctactcagtacttcctcaaggtgtttaattttgattaacttattcgtgaagtatatacaaataaaccttaatgcttccttcagcttatcgatttacatctaaataccacattctcatgttcgcaggctaatttgttcatttgaaggacgttgtatattccaggaagacacagactctgtagcagaaaatgatgagtatgaggatagggccatcgaatgcctcagtttttgttgttccgttcctggtccaagaggaagaggatttatagaggtacaaatagttgtacttatatagcttcggttcgaggacaaaatatacttatatagcttctgtacgagaacaaaatatataaaaaaaactcggctggggagggtatgaccgccctcccggtataatgctaagaaggacccgaaccaccggtcccaactaagaaaaccccgaaccctgcccccatcactaatgggccgagtacaactgtccactttgcaacggctcagccggagggtgacgcacaggacatcgattcccgagagcggacgggacacaacgaggggatttatttaagggtgcggaactaggggtcgaagtcgaacccctgacctggtgaaagggacaacgccgccttcacctctaggctatcaaccccaccgtgggaacaaaatatacttgtata

SEQ ID NO: 6918 - DNA, 783 bp, Zea mays
aagcggatgatgacgcccaggcgcccagctcgctcatcctcgacgtcagtatgtacgccgacattgtacgtgcgctcgaccggaccgcgatcccgtaccgtagatatatactcctccactcatgtgccataggtttcaattcgatcgtgatggtgcaggtggtcaccgtggtgctggccagcggcgtgggcgcgggcttcggcgccaccgacgacgtcttggagtacgtcgagcatggctcgcggtgggcggaagaggccacgcaagatctcgtcaagtactaccacaaggggctcatcgccatcgtcttcctcctcatcggcatggtcctgtccgtgtgcgccactgtcgtctccaccaggctccgggtcagggcagcaagcaacgacgacatcgccgacgacgtctgaccagtggatccgggcgcgcgcgagagagattaagcaaactcaacctgtgcgttagttcagaatgcatgccatgcatgaccctcctatgtgtggtaaattggtaatcagctggggacaagaggctccccctcttgccttgcctcagaatcttgttaacaatgttgcacgatatatatatatatatatgtccatttgtgtgattaagttatttctgaaatcctctcgattttttaatcgaagacctgagatgccatgccttcctagctagtttactagtagcaccgaattttagttgttgctacatgagactaaatttcataataatgtttccttccatgatctactaccccggttgctgatacatttgtaattt

SEQ ID NO: 6919 - DNA, 793 bp, Zea mays
  unsure (1)..(793): unsure at all n locations
acggcgctcaggtccagtgttgctggccgcttggatgattgacttccagctcagcagtcgcagctgcgagggaggttgcgacgactagtagtttattacacattcgtgccccatacatgtaatgtaatgtaatgtgtgcgtggcacaaactactctgctcggtgggaggaatgcatgcatgcatgtaacggcgagcagcagagcagctatactggtccaaaactactctgctcggtcgtggcaaaagtacaggatttttgaaggttgattgagcttccaacacggcataatctacatattaattagccgtggcgtatttggatagaaccagtggcccgctggttagtactccctccgtccacaacaacttgtcaattttagtttatcctaattcaatcactgtcaactttgaccagttatttttagatttttcataagattttataacataaaagtaaaaaaattactagattcatcgtgacttaaacttttataataactttttttagtttaaaataatttagtcttatatatattgttggttaaagtttaaatattttaatttaggataaatcttactccgtaaaagacaaaactcacgtgaacagaacagtaacaatctgtctatgtaatgtacatgtactaccagagtagccagagacatgcctatgcatgcagcagctagcaggtgcatcgatttcagcttcggtaccacccgccccgccgacgaagaagattctttgcaggatggacggcaaaatggctagctggacaggacggaaggcngcaggtt

SEQ ID NO: 6920 - DNA, 753 bp, Zea mays
gcgcgcactcgtttgcttgttcagccgtacgtgcaacattggggtgggtagctgggtcgtacggaccacggtagtgacctcctcttttcgacgtactcctgccgtcatgctgtgtgctatagctagaccgctaggagagtatggacacacaccagtacaccacacagctatcggttggcaaacggtatcaacagatgggacgatggggaaaggcagcgcggcaatctagtagcagctgcatgcacacgaattcctcgtcatcatgatggcccgccccgcccgcctttcatgtcatcgtcggcactcagactcagctccgcagcagggacgaaacgacggcacgccggcagatctctgtctgatctcggtgaccgcacgcacgtcaaatacgctatgagaccacagcaagacgacacgcccacaagatcatgagacatgagctaggactctactacagatctacgtacgtaccactagcttgatcgatgaattccattatattctagcttatctcgttagaataatccatatacgggagattgggagtctaatcaggagacgggagtgttcattggttattacttccaagcaataatatatatacacattggtccgatccttggcgaaggaaacaagaatggaagcatatcaacaattgttcatcactttctcactgccaccagagcgtatcagctgagcacaggccctcatgcagatgcaggcatatgcagcgatatgcatacatgatcggcg

SEQ ID NO: 6921 - DNA, 768 bp, Zea mays
acccatctcacaatctcctggcactgccagactccacatcgtttagagtatctcttagggtgatgatcccaccgtgcccaggaatatcgactgtttcgatttcggttggtctcacgctgtatgagttcgcatttctgctgttcccctcctcggctaaccggaccgcgtatgcgtgaggccacaaagctgcaaagtagattgtgcaatattctgtgacatgttgaacataacctgagaactcaatagttagtaaaaaaaaagtgaatagtatgtaccatcgccatcgaaaggatatgggaaaaactgtaggtagcaaaacgaagcaactgtaagacctgcaaaaccaagtggccatgacgagaaatatgatcaattatgtatgttcagaacatctagaaaaatctgcattctcttttgaaaagatctatcaaaattttacggacctataagaccccctgcaaatacatcttgccaatgatgccagtagtcgtccactcgagaaacagccacaagtgcggcagtaagaagaggcagaaacacaatgcatagcttcgcaatatgccctttgcgatcaaaagccgtgagtttcccagctaagtaccatgcaaggaagcctagaccagcaaaagaccctgaggtagtgtaaataggaaatgacaacacaaagtttagatgatacggccatcacaatgtaaaaaaaaatgaggtaccgagttgaaagttagcttcattaataatttacagagtattgggaatattacaaaagtt

SEQ ID NO: 6922 - DNA, 759 bp, Zea mays
gcgtccctgatggacggcctcttgctcggcaccatggcgcagcacgcggcgcccagccggaggcagctcgccaccgcttcctcctcctcctcccgcccttccacctcgcggcgcagcgtggggtccaccaccccgagcgcctgcgcctgcgccttcccctccgccgcagcgcactggcacagctccaggctcgtcagcgcgcgcccggccaccagctccagcaggagcacgccgaacgagtacacgtcccacttgccgctcgccctggggctcctcacggcctccggcgcccggtagtgcgccgccgtgtcgacggccgggctcgccggttgcgcggccgtgccgcctacgtggctgggcggcggcgacaggtcggggaggctcttggccgaacgtttgctcccgccgaaccgacccgccagcgccgccgacgacggcttcgtcagcccgccgccgtccgcgctgcggaccagccggtccacgccgaggtccgccagcagcggctccatgtccgcgtccagcaggatgttgcttggcttcacgttgccgtgcacccacttcttgtcgtggaggtacgccaggcctctcgccacgccgcgcgcgatgcggagccgcgcgctccacccgaggttgatcggcgacgacccctgcttccctgcatgcggccatttattgtcattttgggcaacggcccggggtgggtgatgatgatggaccgaattccgaatagataacgtacttttaacggagtggttggcg

SEQ ID NO: 6923 - DNA, 762 bp, Zea mays
cttgcatgcctgcagcgcgtccttgatggacggcctcttgctcggcgccatggcgcagcaggcggcgctcagccggaggcagctcgccaccgcctcctcccgcccttccatctcgccgcgcagcgcgggatccaccacccggagcgcctgcgccatatcctccgctgcgcactggcatagctccaggctcgtcagcgcgcgcccggcaaccagctccagcagcagcacgccgaacgagtacacgtcccacttgccgctcgccttggtgcttctcacggcctccggcgcccggtagtgcgccgcagtgtcggcgggagcgctggcgaccgggctcgctgacggcgcggtgcctacgtggctgcgcggcggcgacagatctgggaggctcttggccgaacgcttgctcccgaaccgaactgccgccgccgacggcctcatcaacccgccgtccgcgcggcggatcagccggtccactccgaggtcggcgagcagcggctccatgtctgcgttcagtaggatgttggttggcttcacgttgccgtgcacccacttcttatcgtggaggtacgcgaggcctctcgccacgccgcgcgcgatgcggacacgagcgctccacccgaggttgatcggtgacgaccctggcttccctgcggatcgatgatgaattgatgatgatgggttgattagtattattagccaactagcattttggccaacgggcatgataatggatggattataacatacttttgacggagagga

SEQ ID NO: 6924 - DNA, 845 bp, Zea mays
cttgcatgcctgcagtgattactgatgcaattaaggatggtgttggacggcctcgtccagattttttctggcgctgtttccctaatggaaatgatgtaagatgaaaataaaaacttatattcctgtagcaagttcatgttggtatgtatatggttcaaaattgcataaaatctggctaattacattatctttaaggtttatgataacattactactggtgttatatgcaatggagtgaagagcgtaatcaaggaaggccacaagagctttcccagtggacacagttcatgtaagtaatgtcataaccacataagtactcaaatagtctgtaaccacgtatgttctttgttatattgatccctttggtacacttgttgcccaactatggacaactttacagttggaaaacctatatgcttttcaaagttaattgctacctgtgcatattcaatacaattagattggtctactacaatttgatgatatgtctaaaataccattgcaaggtcatacttgaggaaatagattctttcagcactggtcgtcttttttttttgggagaaaaggaaatgggtctacctttggggtgtgtgctatgtggtatgccttgggcatgctagttctaatcataagaggaagtggatgtctttgtggggtgggtgctagttgctaagacctcagttgggcatgatgacaatctgcattgtggacagtatttgtggctttgcatgattctgcattggtgatagggacaagagagttgcaaacaagtggtgtgctgtcagtgagactatctgggctgtctgctactttgtgcctgagaagttaggccacaggagtgacaa

SEQ ID NO: 6925 - DNA, 923 bp, Zea mays
acggtcatgaagtctacacggcgtcagctagaaagggagctgttaattgaagatattcagaggattgaggacatgccatcatacaggcttctggcccggtagctagaagaaactgaaaccttaacatggctacatattgcaaggcggcttgagatgctaatggatcgcaacttatgtgtccacgtcgggcgacaatcttgaaatgtagatgacatgtatccttgtgtgttaggtacttgtggtctctggtaacctgatctctgaagattacaaggtagggttttttttcctggtgatagaatgccacgtagggtaactgaagtgtctgatcagctcccatggcaaaaaaaaaaaaaaaaatgtagggtgtgttattacaatctggtcgttgtccatcataccacgaaaggaagtattcctagggttgttgttgtaaacaggaggatttgggaaagatgatctgtgttgtctcccatttgcttgaagatataagaggctagttctttttaagtgggcagctactctgctgtgccgctccccaagatctgtttgcgctgttcgtgccaagcctgcctacaccattttattcccgctggtgtgttccttttacgaatcgtgcttgcagttttctgtatttacctgatggttcatggcaaagagaatgctgcgtcatcataatatagctacagtactttgtaagccgttcttcaactgttctctattataattggaagaagcaaaatatgtgcacgcttcattggtttcccatttaaaatgtgttttttcagtggagcgtcggccaagaccgcagatgcagtgccaggcctcatgttgacagcacagctcatatggatccactgttgtggccagaagcgcccataaacatgactgttccgtgtcttgtcctgtggaaactcccgagt

SEQ ID NO: 6926 - DNA, 768 bp, Zea mays
cttgcatgcctgcagcatgtggcagcatgattttattttgaccaacctgtggcttcttctcttatatccaggacgccgggcctatggcacatcctatccgcccccattcttatatcaaggtgctaatgctcaattattctgtgatttaaattcatttactctatgttgctttgaatcagaaataaatttatggtttgtaaccttttaaatttcactggcagatggacaacttctatactggtgagtttttgttgtctcaaaaattggctgcatacagcgaaatgcagaaaaccatcaactgatttattattcatcccctgttgaacaattgaaatcttatctgatgaatctaccattctatccctggtgactttggttatgaataacttggcagttacggtatgtgtttttcatcttgtcccctgttaagcaaatactctgatagttaatggttaaagctctgacattctttttttgttgctttctttgttctttcatccaaccattatgggattcatatcaggtttacgagaaggtttgttcatgtaactatctttaatttccatgcatttatagaaaatggcaaatgatatgtgacctggacatgtgtttggtatagggtgctgaagttgtcagaatgtacaagaccatgtttggagcatcagggttccgaaaggtaaatttagtgctttgacctaaaatgtgagggtacaagtgtagggatgaaccgtagttcattttgggataaccattttcatgaggatatcc

SEQ ID NO: 6927 - DNA, 1106 bp, Zea mays
tcctcctgcacgccggcattcggcttcgggctcgctgccggcagcacgaaccgcacccgcttcttggggccaaccaccgggggaggagtgggcgacggcgaccgtatctccctgctggcctgggacgggccgacggtcttctccactgtagcctcttcctcgagcatgcggatgctgttggagcggactaccgccatgcgctgctcctcctcgtcgaactcctcgggcatgccgttcaacttggacgaccctgaccggatgaactccgcgacgctgcacaccagctccttctcgaactcaatgtcgtccttgtggaagtcgtggtagccgtacctgacgatgcaccggtacattctgtactgcttcgggccgatcctcccaacgaggaacctctcttcaggacggacatgtggtattggtacgttcttgatgcacatgaatatgagtacctggtcatgaccaacaatggtcaatagcagggtaaaagtacttctgaaaccatgtctgaactttggacaaaatggaatcatcgatcgattgaacaaaaaggactgaggctacctggtggaaggctggtaagttggtgacaaaatgcgagaagattgccgggacgccagtttcgagctcggtgtggatgaggccaatgccgcggacacgaactatgccgaggttcgggctgagaccaaggagccagtttgatggaaaccttgctctggacgtcaaactcatacctcttgatggtgccatagtgccagatgcacattattaaaatgaagataaaagcaagggcgattgggacccaggccccctccctggacttgatgagtgccccttaagaatacaatgccttaatggttccaagaacaccatggaagccattggccgaaatatgctttatgccgccccagaattttaccaggggcatcggacccttggcccagctgacggtttcaaccaacctggtaaaaaacctgccggggaaggcgctttctctatttttttttccccaaaatgggttaaagttatcaaaataaatgggtccgggttcccagtttgttttaacaggggcgttgccatttaaaacatttcgggggttttcccccttc

SEQ ID NO: 6928 - DNA, 829 bp, Zea mays
tcctcctgcgcgccggcgtccggcttcgggctcgctgccggcagcacgaaccgcacccgcttcttgttcttgggcccaaccccagtcgccggggccggggccggcgacggcgactgtatctccctgctggcccgcgacgacgggccgaccccgacggtgttctgcaccgtggcctcttcctccagcatgcggacgctgttggagcggacgaccgccatgcgctgctcctcctcctcgtcgacctcctcggcctcggccgtgccgttcagcttggacgaccctgaccggatgaactcggccacgctgcacaccagctccttctcgaactccacgtcgtccttgtggaagtcttggtagccgtacctgacgatgcaccggtagattctgtactgcttggggccgatccttccgacgaggaaccgctcttcaggccggacatgtggtatcggcacgttcttgatgcacataaatatgagtacctggccatgaccaacaattctcaatactcaatagcagggcaaacgtacttctgaatccatgtctcaactttggacaattgaagtatggaaccatcaattggacaaggaagaatcgagactacctggtgaaaggcaggcaaattggtgacgaaatgcgagaagatagctgggatgccggtttcgagctcggtgtggatgaggccgatgccacggacgcggacaatgccaaggttcgggctgagaccaaggagccagttgatggagaccttgctctggacgtcaaacttgtacttttttgatggtgcccataatgccccgacgcacatttatcaagatgaagaataagagca

SEQ ID NO: 6929 - DNA, 854 bp, Zea mays
atcttgcatgcctgcagatgtatggtcctgtggcataatcttgtttgttcttatggccggatacttaccctttgatgatgtcaatctgatgagactgtacaaactggtaaattcggctaatacacttatatcttggtttccctatgaaatgcaagggtaattttgatgaacttttctttgacttccttttgtagatctgccatgcaactttttcttgcccaccatggttttcttctggagcaaggaagtttattaagcgcattctcgatcctaaccctgatactgtacgtttgaattaagatgtgccttttcattatctgtctcatctctttcatttatctgttgtattgttgtcaccagattacaaccagtgtcactgttatcactgttggataaatgggtgatgtattcttgcagaggataaaaattgcagaaatgttggaagatgaatggttcaaaaaaggctataaaccaccacattttgaacaaggcgaagatgttaaccttgacgacgttgatgctgcattcaatgattcagaggtattatatagaccaaatgttcattttgaatctacgactatcttgaaaatctttccagctttccagaaatattatgtgctttaaaagcatttttacattctattttatgttcacattatcgttcaggttcatagctgctataatatgaacttttttgtttcttcttttttggaagaccaagttgagaaattctaaagacttgatgacacaatagatttcttgttctttttctggctactcaaatgtctcattgtttttatagtgtatataggattcccttgaatatctgattggtgaacattgagttaaccgat

SEQ ID NO: 6930 - DNA, 785 bp, Zea mays
attgcactgtttacagagtgaagtttaaaatagatgggatgagtaaggctgctggagatagccttatagcaaattcctggtgtcctaattatgaacaagaaaggagccacaaatgaggtactatggcttagcaggaagaattggggtagcggttcttgaacattgtctccataaaccctgctttttttaacctcaaattatagagtagctctagctcatagcttaattctctctctttctctaacggcagcagatatgaataattctcgtgtcaacacttttttacattctattacaaagtatctctcaagtaaacaaaaagaacacacttctggaagtatagagccaataaaaaaatgatggcagcatggtaaagcatgaaccttagataaggaaagaaaataaagcctaagaaaactaaagcaatagtgataacaataaaatattgaagcttttatcagcagaactggaattttcagataatatgatactgataaaaaaagtttatatcaagtctaatgagttgaatggtataagtcagaaaaccataagaacaaatttcctcaaagtgcaaaaacttgcaactcacctggttttgattttgctgacgatggttgaacaacaacatgcatcgtgatagcactactgggaagatcaccaaaaggagctctgcactgtgcaacattcttgtcattttctagaattttgcctccacttattagtttcacatcactagcagtctttgggataattgatttatctgcaacacaaagaaatcgtggcat

SEQ ID NO: 6931 - DNA, 807 bp, Zea mays
aaaaagataactaggaattggtttttccctacctctaagcttggtagatgaatggaagatttgagcttaattaattgttttgtggcctaacctcagtgttaaactatcctggtatttatgatggctataccaactagcttctcaaccagttataccgatcagaacattttttttgggaggggggagggcttgctttgctggtccgcgtttgaatcctggtacagcttcttaaggcaaaaacccaggggtgtctccccactgtggtccagttttttttatgatgattgtgcctgaatatacttatataacctatctagatgcaactagggatgaaaacagttggaaacgatattatctatacgaaaacgattaccggttggtcggaattttacccggtttcataattagtctacttattaacgactacaatatgatgttgacagaaatttaaaattcaaaatttttaatacagtatttttcggaaacagtattgtatttactgaaacgataccgttacgaggccctgattacggaattttttgtttcggttttcatccctagatgcaatcactaagagtcattaatttctatttatctgcatccacgaagctacatcatccgatttgttctaagccacatcatatttgaagaaatgtcaaaccatatgttgcctttggttcaaacattaatagtgtaacttcctcttttttaaagaaaagcagaaataatgagttgatctttaacgatgtccacagcgctatgatttcaaaagaaatgttatcaaattttacagaaaaattacttatg

SEQ ID NO: 6932 - DNA, 788 bp, Zea mays
agtccttgggccttttttcagaacttccaacatcatcttgctcgtttcctttgcatatagctggacagcagaactcccatcaccatctggctcctctctgaaatgctcatcagccaaggcaaagcaaagttcttcaatcgtttttgcattctcatgagcctcttgctttcccaaaaggcgatatttgcgagagaaaatggactctgtggacagattgtttgtcatcctgtcaacaagcatgatccgtgtgctttcacttggtggccacaactttatagagaatgtcctgggttggaaatcttgtgctgaatccatgtgacaaccttggacttcacacagcaacctgtaatagtagaacatgatttactagccttgccttgataacataagatatcacagaaaaaaataaaaaaacaacaataacccaacaatatgaaccaattaaattgtatcttccggtctcttgggggaacaaaacattagtacaatggtaacagaaaaaaaaaactaagtatgctgacgactaaagtctaccactaaaatactaacattgattatttgattcactaaacaaagatataggccgagagccatttcacaagttttttttattataaccttctatataggaatgcaacacatcatttactctgattagcatgtataggatttggcgagttcaaaccaaagaagaagaagaaaactcttatgctactgtcacaggttcatgggggcttcgactgctaatctagatgttcgacatacattgcttgaaacgttagaaatct

SEQ ID NO: 6933 - DNA, 787 bp, Zea mays
aaaaaaaatctctattttgaccacctacacgtatgtagaagttttctggtgtggttgtgcgggatggcgagagctatgggtgtccttctcggcctctgaagttactggttttagacagcgtgtggacagaggcaggcaggcaggtgagcccttcgatcggctctgataattttgtttgcccatatgtggaaaaggttatcgtagtacagtagcagtgtaataatcaaccgcaaatacgatcgagctagggctggatctaccagtctgctagcaatatggtagttatatttatttattcagatccaaaacgtcagtaaaagtaggttgaaaatcgccagtcagtagcaatgttttatgtaatactctctgtcctaaattaaaatcaattcattatcgtcgatttgaatatagctgtaagaaccgagagcgaaaacgattactatttctgggacgtagtgaataaatagcagtggaaggattgctctatctgatgaaacgcattcacgtacagtttccttttgcatgaagggtcatccagctcattccggggagagcaggactcgccatgctacactacacatacagtactactctcgtcgcagctagtactcttttatattcgatgaagggaaaaaaaacacctccactatcattgttggccttttacggttttcgaggtgccatcatcctgccaaggtggagagagtattttaagacctctactggactaatgaatgatgctttaaatgttaccattggatctttgatcaaatcatgtctgggataa

SEQ ID NO: 6934 - DNA, 893 bp, Zea mays
agagatgaaaaaagaacagcaaccaagtgtagcgttacacttgcacctgctgtgttgttgctcttcgcgaaactactgtcttgactctagactacgcctggtaattagtgcactgatagcgacgcaaatcctttcacattcttttctctccctcgacatgagatgagaattgagacactccattcatccaggaaaataggaccgattatggagaaaagacaaaatttaaccaacaattactcaatgtatgtgtaagtttaggatacaacttatattagtagatttattatattcaattgactccgagattatattactaatttcttttagaaattgaaaacactccattcattccaaaatagtagtaattttagggaatcagtaggttcatatactttttgatgcatgtgttttatatatgtgtctagattcattatcatctattctaatatagaaaaaaaatcaaaagttaaaataactaatatttttttgacggaggaagtatattgtatgacagattaatgggtaaattctactccatcttaagatatactccttccattttaaaatactatttgttttagctctagattttaatgtctatatttaaatatatgatgatgaatctagatatatatatatatatatatatatatatatatatatatatatatatatatatatatatatatatataaagcatatgccttaacatacattaagtgtgggttgaatatattaaaaatttttaaaatgtaattttaatttccggacgcgtctcctttaaatcattcttttttggtggtagaaaaaaattattatattacattgatatccttttacctaaataaaatatttaggtaatggttttaattccatacaaataaatttct

SEQ ID NO: 6935 - DNA, 817 bp, Zea mays
tcttgcatgcctgcagccaaatggactccaagccctactgcctcaatggtaacacttctaataaaagcaactgcgcctgtcaaacaagaaatgaaactgtcgttgttagtggtatggatgatggtgtcaccatcaaacagttcatagtaccactgcataatcacaattccagcagaaatgctagctgacataatttgtatattttctacactatatatctatctttacctctttgcattcccttgagcaatttccgatccttcttgtagcttttgatgggcaacgagaccaactttctggtccctgaaccaacagcaactagtgatcttattggaggaagcccttttagcaatttgtgcacctagacaacagatacttcagttcagactaaggggggattaattcataaatcaagtggaaatatagtattttctctgtatttgcacaagcaaatcaaaaaattatatatatatttcttttatactttttctgctatcaagtttttacatgttccgtgtccctcatgcaaaagcatacatgtctgagagtacaggtgcacaaggggagataaggacctgatttttagaaatgtcttccaaccattccgctgctaccgtatcacctatgctgttccatccgtaaatgcccattgcagaaacatgcttaagcttcaaatcaattccctgtgcaataaatctcatatcagggttgttatacataatcgtcagaaagtttctttgctactaaaatgtgtttttttcactagaatttaccttccatggaagaatgttgagaagttctgcatgattttccttgc

SEQ ID NO: 6936 - DNA, 800 bp, Zea mays
ccttgggccctgacaggtcctgacagggagggagggtaataggcatttgagggtgtagggagcctttgggagacttttattgcttactctacaagtttgttgtagcttaaaaagggagaaaataaggagacatctgaaattgcttgaaaggttgacaaaaggccacccaaaagacggctctcaaatgtaccggtgggttgttgccagttgccacaagctggatcttaatccatacttaacagttgccaatgttcaagccctggttcgtagcctcacgactggagaacttaaccaccatcctacaagcatgttttcagtgtgcttatttaagagagttcttcatagaaacaatatgaaataacctttctcacttttgtgctctcttgatattacaattacaatcaactctcttctattgcactatcctaattttttcaggctccatcttgagattttgcctctacagttgcatcttgatcaagagcaacttaacttcctaataaatttcttcaagaatgattcatgtaacaatgatcctcatttgcattgcgaaaatgatactgttgatgtgaagagcacaagcaatggaagcaatatggttgtggatgaggcattacttcctttctttcaggtatttccatgttcatcaccacatattttaacagactgtcaagtgaactacaaacacaatcgttagattttgtcgtatttgttatggtctctttgaattaatctaggccatttagtgatcttaaagtctaacagtgttggagttctggctggccatgtgaggcgcacaa

SEQ ID NO: 6937 - DNA, 788 bp, Zea mays
ggcccgggggccctctagagtttacctgcagcacggcctggagctccgtcatgtgcttggtgtcgtcttctagccaccgggcgtactccatgtcgaaaatcacagcgcctgtaacaacagcacacatatagtccagattgaagaccctctggccggttgattgactttgatccggccgccagatgacttggttacctgaactcaagtctccagccgcaccacctcctcccgggaacagaccctgaaacatgcatggtgatggtggtaataacgctattcaaacactagatcagatgttctatatatgtccccctgtctcctgatgcgtctagagaactttgaacctgtgagcgtgctccatgcagctcctgctcgatttgctgaagcctgatccgactcgtctctagctgctgtacgtaggcctgaagttgaacagtttttatatcgacttcgttagatgtgtggtaccggttgatctaagcgtttttctctactatatgcttcgcaccttttttctcagcctgctcttcctcgcagcttctctgttctgggccaatcgcctctcggtctgaattttagagtaatgtaggagattaatagtacggcgaaactgtagcgccatgcaactatgcaagcaataacaaaacgttcgcaaatgctaccgaaccttggcgtctaacagcctgccgtcttttccttgtggatccatgctttccctgcacggccggagcaccaaaaaggtagcttaaaacagtgtgtaataatgctggttctatagtaagatacca

SEQ ID NO: 6938 - DNA, 841 bp, Zea mays
cggtacccggtgatccggtagaaccgacctgcagcagccgctgaagcagacggaatcggtgagcgcatgagcagcatagcaccttttgagaatagatgtatcaaggaaccagagaagttcattgaagcagggactgcatcagccttgcttgatgatgcatggaatgataagcattgcaatgatcagcacagcacaaactgtgagtgtgatgggggggaggaaaaatgggtttggaacccagtgaatgagtccagattggctttcaggcaggaagtggaagttggatgtttggaaaggtttgaggtcgttaaccactactgtccaagtcatttatcccccttgcacaaacacagagaatctggcgaggagatggggggatctccacagttcacagtaggtccaggtggcagtatcttgtgtgtatcagaggatgaggtatccagtataatatcccgagctcttgctgtatccgaggaacgtcggcacttactgatggatgctatcgctgagactgaaccagcagatagcaccaggggtaaaacaatggacaagtcttacagctctttatctgaaagttcatctgcttctctgtggtcttcggattctgaggcaagcatttcgtctgacgacctctccagctatgatacctcgcttcttctatcgtcctctctccatccagaaatagctgtcaacgggacaacagctctcaaagggaggtactcggtcatctgtgtacactctaaccaattttacaacctccgaaggaaatgctgcccatcggagccttgcatacgttggcctatttgagcccgtgcaagaagtgggatgctcagggccggga

SEQ ID NO: 6939 - DNA, 717 bp, Zea mays
acggcatccatggagaacgacgcgaaggaggcgaggcaggggcagcacagggtgttcccgtgggggatgctcaaggtgttcctgctgctcggcttggggctgtccgcggccggcgtgctcatggcgcgtcatgggcacgaggtggcggcggccacgctgttccggccgtggctgagcgtctcccccgccgccgccgccgcggaggggctggagcactcgatgacggacgaggagctgctctggcgcgcgtcgttcgccccgggggtgcggcggtacccgttccggcgcgtgcccaaggtggccttcatgttcctcacgcgcggcccgctgccgctggcgccgctctgggagcgcttcttccgggggaacgaggggcgctactccatctacgtccacgcgctgccgtcgtaccgggccaactttacctccgaatccgtcttctatcgacgccaaatccccagtaaggttagcccacatccctctagcttcatctggatgagttatcagcagaaacaaaaccatacatctcattttagtgccaggattgcacatcgagctaaactgtactcttcgatagattccaaagcaacattagtgccatgagaagtatcaatgtaagtatcagcggtgatgtaccgaaactatttaacggcctttccacaaactcgggtaatcttgttttctgaaaaaaaaaaacagggcaccactgtactgaat

SEQ ID NO: 6940 - DNA, 941 bp, Zea mays
aactccttgaacttggggtaatagaccgtgtccttcacaatttcgatgccaacttccctgtttacttcaaaccactgcgatcctttgcgccattgtgtgacatcaacctcaggggtcatgttccagtcataccgtccccgtccatatggtccagggtcatcaatagccatgacaaagctctggctcgagttgagaaagtattggtacgtcgtgttgaaatcaaatataggaatgcatgactcggacacaagcacaaaccattcgttggatatatccagcaaagcgttggcaagtatacgtctctcagcatcgcacatggtcatctgaccccattcagcaacctgttaccaacagtacaaaaatcaaacagaagccggcgtatctgaataccaataagagacagagatgactcttctagatgatcaaataatagtaagcacaatttaggcatatgaagtaggttgtcccataaagctcgaataacatacagtcacagctcacagcaagtagtagaattcaaatccgtaattactatgagactggcgagaaacatctataaacaggcaataaagatacgtgctcccattcttcattttaaagagttggttttctcaaaagtcaaaatcacaacattttcaaggctaccaaacaataaccgtatatagttggtgactcagcatttggaagttacgaaaactatatgctcataaaggaaatagtgaaaaatcgatatatgttctaaaaagtaagtaccgcaagatgagaggcggtgatgtgaattaggttaacatcacatattcgtcaagggtaagcaatgttacttaccacctacagatgtaaaagcatgcaattttcttgcaagttaaaaaaactggggaaccgcaatcattaaagaacttggatcaagaaaccttcagcttgttaagggaaatattgtgaaa

SEQ ID NO: 6941 - DNA, 837 bp, Zea mays
tgagtttgctttctcgctgcagcgccttgcgaagcagcatgtgcagcgggaggagggctgcggcggcgagtacctggagctaaggagccggaggctcgagaagttgccgccgcaggtggcgtccgtgaggaggtgcggcgggaggaaggtggcggccgcggcccccgccgctatggaggaggcggaagcatcgtacggggagaacatgctcgagtcggaggccatggggaggtgagttcttggattgaaatttctgttgcgttcttgggttgcttgcacgggttttgggtttagtggattccgattgtgtggtaccaagattttttttttgggacagaaagttggaattttagcgctatgcgtttctatttgaatgctttcgtttttttcctttttcgcgcagtgtgttcgacttcaaattgggagtcatgcgaatccccccagcacgcttgtacagctcctatgctttcttgcggatttttctacgccaggaacccctttgctaattcttgccgtgctctccttccgcttaattttttcggcggtgtatcttccattctcttttgaaatcaaaagtcaccccatattttaatgccaaaaccattgtcgctgccttgtgtccgagaaattagtctctaattcttgcaataatcggttgacgccgtccaaactccaacatcaccccataaaagccccaattccccctctggcttgggctttgattctctgaagcaccgagtaagttgtgctcaatcttgtaccagagcggcagagcccaattaatccgctagcttagtggagtctcttgcagtggccaaccatggcgttcttcttttt

SEQ ID NO: 6942 - DNA, 828 bp, Zea mays
  unsure (1)..(828): unsure at all n locations
tttgagccagatgatcttgctgtggtggtgctgaggtgaaagttgtcttcaatccctggtcgtttgtacactttgcaaagagaaatttcctgtatatgatacgaagatgagttaaccaagactaataacaaagttaaattggtgttcctaatagacgttataaaggaaaataactcatgcaattagaagaggcactgaaatttttcttataggcaaatgatttaagtacatatatatatgcaccatgcatggttatatattgaaagagaggaagtttgtatctagaataatagtgcaacttgaaaaaatgttttgttttgaaggaggttgtgtgtttcttcatgccagggacgacgccagggaggtgtagagggggacaatgtgcccgggcccctaatcttcccttaattccataagagccactaaattttctagctaatcaccatgtaaataatgaaaaatatttattagtagcctcccttaatctgatttaatttgtccctgtcaaacctaaatcatggctttgcccctgcttcatgctacactggcacataacagttctccaaaatgttaattaattaaactttgatctgatgttgtgtcgtttctacagttcgactactatatatataattgtttgagaaccatgaagtacgtagatttcccttctgagtagctattatcatcccagatatgtgcagatcttgaaaagtaagttgcaaaaactctttacatatatatgaacggtgtagtgatccatcatacatncaaaacggaggggaccagtctttgcaaagaaaaagcgtanaaaagagtatctgatctgtt

SEQ ID NO: 6943 - DNA, 822 bp, Zea mays
agaaaattgattttataatataataagcttgagtttcataaaatatatagttagtcagatttaactttttttgacttaggacaggcgtagatggtcttacatttgtgaccaaaataaatatgttataattttattggtggcaatgttatattttgaatattgtatttgtgctcaaaattatacttaatttctaatgaagagggcattcaatactgaaatggtttgtgcatgattaataatttcaacaacacaatattcaagtcaagtttgcatacgaaaacaacggttcagtaagccttagccttacagttctgaaagtgaattgaggcttccaaatagttcaccaatttcctgaaataacgagttgtggctgagattgctgcacccaatggttccttgcagttagattgtgttaactaaaaagatcatcacagaaagaattacatctttgcagcggatagaaacttacaggtactcaagtgaaaccaagttggatatagagtatggaagattaccggagaagttattttttgccagattcctgtattcgctttgaatcaaatttcaagaatcgaatagcatgaataatatgtacaggttgggagacattacagataggtaaggtttgatggcaactggtaagggattgaatcatgcaagtggttgttgcttaagtccctgcatgtttagaaacagaagatataaattatgaaaaggacacacataactgaagaactatagtaccaactaccaactgttagcttatatttgtcagtgttggctaaatgggggcaccttggcgattttatagcaaaacccttg

SEQ ID NO: 6944 - DNA, 823 bp, Zea mays
aagaaacaattattttgtgcaaacagttattaattgcatatacaagtaactaagttctcaacagagacgcaaatgattggatcctaatccatcgtaaagaatacatatgctaaagaactaactacagtatccataggttggcacacaaacatgagatgaacattccttctaatccaacaagagtaaatatatcccacattattataaatagatcataatcccttatttcatgctatcataagattaattccctttgcccaacccttgtgtttcttctttatatatgccaacccgtcttttgccacgaatgactctcctcgactcctcccatgccaatggtagtaagaaataatttggtacaataaatacttgatgacagggcaacatatatgtagtgaaactgtgaaaagaaagaaacactaaaatagtatagcctgaaaaaatatttaatttgcctatcacctctgaaaaatcaattgtctgttgctgaagtggcgagttggcaaaatgcacttgatccatcaccttattatcagggaactgcattacagtttttgttacactctacatataaacactgagattattgtgtaggaacagatatattagacagcaaataacaagaatcaaaaggtcaaacatacagccatcatggaaaaaatcagaattgccactaaaatatcatgcagaaccctttaccttttcaatcattaaaggcttcactaggagcagcctttgcttcaagtgcttgtagtcttgaatcaagttcatatattttttttaccaacatctgattttcctcagaagtatttgttgaagcttc

SEQ ID NO: 6945 - DNA, 788 bp, Zea mays
aaacgggccgacaagcagcaacgggctaccatcaggtgaagacgaccctgatcacggacggctgccttcttgcattgcattcatcagaacggacggcaaggggacagcgggtgttccaaatgacgtcagccatcggctaccaacctcagcaatggcgaaaatcaaagaagaaacacgatgtttgtgcgtagcaggaggcaacacgtttggcaattactgtctttccgcgcgcctgatgcgcgtacacttgtttttctttaacattttggcctaggccttattaactcttccccccctgcataaatttataataaaatggaagttctctgctttcaaaagaagaagaaaaaaaagaatacagaccattaggcaaggaggaccactactccctgtgattctgacacacagcgcaaggtaaaaactgctatgagagcaaaactgaagtagacgaaacgaaagagaacgaacgaacgaacgaacatgagatgtagaacaagattagcaaatgaatctacagctcgtctctagacttgcggcgcttcttcttccgtggcttacggagaacttggtccaagggtgggtctccaggcctgcggaaaacttgatcgccgatcctgaactcgtaggcctcagcctgactcaggacaaactccttcagctgaaaccaggggaggggggaggaaaagagagaagaattacaaacatttcagcagactggaatggctacacaagttctgaaccacatgtggaccctgatctcatagaacgatgaggaagtgtgatatcta

SEQ ID NO: 6946 - DNA, 1098 bp, Zea mays
ttgtagctagctggattctcacacactccccagctcccacacgtcctccgatccgatccgatcccgatcctccagaagaggggcgagctgcaagcgtagggcggcagcatgatgcactcgcaccaccctcactaccatccgcgtttccacccgccgtcgtcctcctcgtctgaggaagtggacatggacccccgcgtgtggagccggctgccgcagccgctggtggaccgcgtgctggcgtgcctaccgacgccatccttcctccgtctccgggccgcctgccgccgcttcggcaacctcatctactcgtcgccgttcctccactcccacctcctcctctccccgcacctccccttcttcgccttcgccgtcccttccgcggggtacccgtacctcctcctgctcgaccccaccacgcaggcgcccgcgccctcctggtcccgcctcccgctgccgctgccggccgcgcccggcgccgtgcaggcggcgttctccccggcggccgcgtcggcgggcctgctcgcgttcctgtcggacgcgtccggccacaagacgctgctcctcgccaaccccatcacgcgcctcctcgcgccgatgccgctctgccccacagcgcgcctctcccccaccgtcggcctcgccgcgggacccacctctttcatcgccgtcgttgccggcgatgaccttgtgtcccccttcgcggtcaagaacatctccgcggacacattcgtcgccgatgccgcctacatcccgccctccggtttctgggccccaagttccatcctgccccgcctctcctacctcgacccccgcgccggcatggctttcacgtccggaaggtgaagtcacaagtctcaactctcaagtgcacgtgtgtgcagaatgtgtaacactatgcatacacatgagcacacggcttgagatcaaactgattacatgtaagttctactggtttatttactgttgcaggttctactgcatgagctcgtcgccgttcgcggtgcttgtgttcgacgtggctgccaacgtctggagcatggtgcagccgtcgatgaagaggtttcctgcggtcgccggctctcgtggagttcggcggcg

SEQ ID NO: 6947 - DNA, 864 bp, Zea mays
tttgcatgcctgcagacaagacttcactcttgcatgcatggtccattttagattgcaaatacttatgcagaaagcaagtttaaatgttcatataactaataatccggccccgtacacataaattatcatgagatacttaatagtactaatatattaaagacacgcctcagaccagtagtagagttcttaccagcagccttcgctaacagacgctcaagaaaaacaccagatttcatggtgcacctcacaacgcagagaccggaacgatttccgttacgtagatgatgcgtacacgtcaatgagctgagcgcctgagcctagcacctagctagccctgcatcccatgcaaaaaggccgccggcgccgtggcgtccaggagaccgatggccggcgtcgcaaggcggggctcgtaggcgaacaccctgaaccccgcgcctcccgcggcgtacgggtacgggtacgggcacggcggcgcccaccgccactcgtcgtggcgcgagtcgaacacgagcacggggctcgcgggcccgcgtggcgccagcaccacgaagtcgccgtgcgccgcgcactcgaacccgcgcccgccctcggccgccgcgaactgcgcgtgcacgtcgggtggcatccgcgccacctcagtccacgctccgccgccgttgcttccgccggcagcagctccgtgctcgcctcgcagcgtacacacgcgcacgcttcgcgggacgctgaggcggctcttttcgacggcggagaccagcgccaccaccggcttgcgctccctcccgccgccgagctccacgagcgccggcgaccggaggaacctcctcattgggggctgcaccttgctccacacgttggttgcacgtc

SEQ ID NO: 6948 - DNA, 836 bp, Zea mays
tgcaaatacaatacgctacaagatggccgtcacatgcatatacatgtaactaggccacgcgtgtgtgccacgcatgatgatgctgacatgcatgacggtaatgaacaattgtaggatggcttcaactgcgaggtttctgcatcgtggccttaaaataataaagaaacaaacacatacacacacacactgaactattatattgtaaagaaaaaaaagatattgcattcccatcagatgagactcttatatatttgcgcacttattgttgctacaaatgttagcagaaatagaatccatgcatcagacttgcaagaaaattaccaataagagagagtagggatgaaaaggggtatctgaacagttaggataaatttaatattttaaaatatatatgtatgaattttgatgctaatcttttcttacatgttatgaagcacattgttatcgacaagaataaatttttgcataactgtttttacattatgtactccaaaaaaagtgaaaatatctgtatattcggattttatatctatcatctaagaagatatacgatagatttgaagtttacattttatgaatcttaacaagctcaatgctaaaaaacaagaatatgaatttgcgcagccaattctatatcctatttaattattcacagtcaaaggaaaaaagagaacaaagtaacaggtacgcggagaagtatttgttttcatccctaaccattaggatggattagttagagaaatatttatggacgtataaggaaatttaaattaaaaaaggattaaggaaccctaccatgtgttaagtaaaaggaaatatatttccttattgaaaga

SEQ ID NO: 6949 - DNA, 739 bp, Zea mays
ataagcctactgaacctgaagaatcttcagcggtagaagaggttcttgtaactgcaagcagcgaggcggggaaagaaccagctgctgacactgaggctgtaccagccttgagtgagaaaactggtgccgaggttgctgctgctgctggagttgcacaagcaagcaccacgacaggtctgtagtaattttatcagtgagtcagcgatggtgtcccctaaaagctttcacatgcgataatctgataagccatgacttatctgcaaaagcctcttgaagaagcaactctgcctaattagaatagaatagggggtgctataaatagattgcaagaaacctgttacaagctactgttttttcccagttatttttattcgaattttttgttacatggatgatggatgtttcacacattggtaccaatcactgagttctgcccctggtagccagaagggtggatcctgcatagatcatgaaactcaccttctaatgtattattttgatcaatcatttatccacatttgcaaatattttttctttgatttatgtttcttgtgacatgtcagctgcatagttttgctcaaactatttttatatgacaaaaaaacatgttacttgtctgctggcacttcgaatggatgaaacaagactgacttcctgatggtatacgaagtccgatagcttggttcaaaattttattcctgtctttttttgttaattggacaatgtaaccctgaaacat

SEQ ID NO: 6950 - DNA, 1408 bp, Zea mays
cattttgcatgcctgcagcccaagtcgtgaatgtttccacgtcgatctagggggtcccggcgaaagcaaccatcttggtatgccggaaaacggcgatccccctaggcctgcgccacgcgttgacatccttcgggagctagctgtggtcccagtccctgcggggggtcaggacgcacagctcgagcaaatccgcgaggtgcaggccaggctcgacgagggagcaggaacacttgagcagttccggcggaacatcgggcaggagtgggcagaccgagctccagccggagaagcgcgtcatctgccccagggcatccagcatcgcattgccgacgatgccagggcaaggccgccaccggcttccagtggggtcggccaggacctggctgcagcagcaatactactccgggcgatgccggagccatccaccaccgaagggcggcgtatccagggagaactcaagaatctcctggaggatgccgcggtccgacgggccgaaagctctgcctcccgaaggcaagggtaccccccggagcatcacaccgcgacttcccgattcatgcgggaagcctcggtccacaccgggcgcacgcgcaacacggcgcctgcggccccgggtcgcctcggcaacgagcaccaccgccgcaaccgtcgagcccacctcgatgagaaggtgcgctgaggctaccaccctaggcgtgggggacgctacgacagcgaggaggatcggagcccctcgcccgaaccacccggtccacaagccttcagccgggccatacgacgggcgccgttcccagctcggttccgggccccgactaccatcactaagtactcgggggaaacaaggccggagttgtagcttgcggactaccggctggcctgccagctaggtggaacggacgatgacaacctcatcatccacaacctccccctgttcctctccgacaccgcccgggcctggctggagcatctgcctccggggcagatctccaactgggacgatctggtcaaggccttcgctggaaacttccagggcacatacgtgcgccctgggaactcctgggatctccgaagctgccgccagcagccaggggaatccctgcgagagtacatccggcggttttcgaagcagcgcactgagctgcccaatatcaccgactcggatgtcatcggggcattcctcgccggcaccacctgccgcgacctggtgagcaagctgggtcgcaagacccccaccagggcgagcgagctgatggacatcaccaccaagttcgcctctggtcaggaggcggtcgaagccatcttccggaaggacaagcagcctcagggacgacagcaggaagacgtcccccgaggcgtcggcccagcgggggcgcgaaagaagaaggccaaagaagaaagccccaagcaa

SEQ ID NO: 6951 - DNA, 809 bp, Zea mays
agctgggatacaagcaggagctgaagcgcggtctctcgtacgttccgcatgcatgcatgccattaatttccaaacccaccagctctcagtgattcactttctctctgcgtagcgtcgtctccaacttcgccttctccttctccatgatctccgtgctggcgggcgtgacgacgacctacaacaccgggctgcgctacggcgggccggcgtccatgacgctgggctggctcgtcgtggcgctcttcaacggctgcgtggcgctgtccatggcggagatctgctcggcttacccgaccaccggcggcctctactactggagcgccaagctcgccggcaaggactggggtccactcgcctgctgggtcaccggatggtacgcactacatgcttccgcttttttttttttaatttcgcttctcctttaattttttgaatcagaaaatacctttcattcggcgtattattcatgctcatgcatgtcactttacggagtagacaaaactggagcctggaatcctggatgacgacgtttttgtcccatcatgctgccggtctatctagttaccctatttttttaaaaaaaaaatctctgtcatgtttcacaggtttaacatcgtgggccaggtacgctttggctccatcacagagcccatcaccatcagatcatgaactgcacactactacacgcctgctaaccttcaattcgtcatcatcctgcgcagtgggcttgcaccacgagcgtggacttctcgctggcgcagttccgtcaagtcatcgtcctgctcggcaacgggggagccagcggcggc

SEQ ID NO: 6952 - DNA, 789 bp, Zea mays
cagagtgccagattaaatgataacaagacagaaaaaaaagatatttttaactgcatgtttcaaatcactgaatgtaaggtgtagcaacgcaaatatctttaccagccctttctcccttgctactccaagagaaccagctgcaacaaaatcatcataggatacctgaggtatggtagtattcattgtacaattagtaaatatcaaacaaaaaaaacatttaacggtatatccaaattccatagaggtgaatcattgccatttgtatctaagatatatcatagcatgtaaactgaaatctgaaatttggtcattcaattctcatcgttttgtacataagcttacagtttcagctctgatgaatcctttctggaagtcactatgaataactccagctgcttgtggcgcagtcatgcctacatgtagaatcacatgcagtaataatgataacgaaaacctcttcaaatattacagtacaaataattgtgaggaagaaggaaacctgaaagaatagtccaagcttttgtttcctaaaaggacacagttataggtctgtcagtttcagttaactgctttgaaaaaactttgacagcacgaaagatgcaccttgtctccggttgtgaaataagttcttaaccccaatagattatatgttgcttttaccaaatttcctagtccactttcagcaacaccaagagattttaaatattctactctctcttctagaggtagctcggcgagttcagcttcaacctgtttatgcattccatgattttgttagcataggtggaa

SEQ ID NO: 6953 - DNA, 745 bp, Zea mays
cgtccaagttcaaggagatgatccagcgggcgtcggcggccgagagcggcaccaccaccgtcaccaccacgtcgtcgtcgtcgtcgcagccgcccacgccgacgccgacgccgtcgccatcgccacctccgacgccgccagtgcagccggccagggacgcctcgccacagtgcagcttccccgaggacatacagaccttcttcggctgcgaggacgtcgcgggcgtcggcgccggcgtcgacgtggacgccctcttcttcggcgacctcgccgcgtacgcgtcgccggcgttccacttcgagatggacttgtagctcatcacacgccattactcgttaatcactatctgggttttttttttgtcgataggagaatggagctctctcgccatttgagaaccaagaaaatggtgagacacacaaaacaagagaggcagcagaacagacagacggcgcctagtctgttttgagagatttatttacagtggtaactagtgacatttactgaacggttaagattgtattattcaaatttttttcacattggtaacaagggattgtttcatttgtttcattcctcagttctgataaaagaaaagaagcaaccaatcaatatatagtatattgtacatatatgagaatttctttttttcacgaaactaattaagaggtaccgtttcaattcacaggtgttctaagaatctagacaggaaaaacatcggaatcctgcaatctcattaaaacac

SEQ ID NO: 6954 - DNA, 868 bp, Zea mays
aatgtaagtcttcgataaatgtactggccttgttgcttacaaaatacaaatcatgctattgctaaaagtcatttgctgatgccgtatttgtaccgcgtctgcgaagtggagtgcagtttccttcattattttgtaccttaaattttgtactgtactagcagtgcatgactttcgaaagtcgatagtgccaggctgccagcaaattaatgccgatgagatgttaaggtccacattatgctgttattcggggctggtgcatgcaacacacactgaaacctgttgtccatgtgatgatggtgttgaatctatttaatatttgacccctgggataatagtgcctaccggagtattctatccctgcaatgtcctgatatcttccattgattgggtacagacttcattggccaatgacacaagctgtgaatcaaatgtcactacccctccaaaccctataagggacgcaagtaacccttctgggtaagtgaatcattctggccatctggagaaggattcttgttgcgtaaccttgccatttcaagactatcctaatcataataccattccaattcttgtttcagactccttgcgattgcagaggagaccttcacagagttcctctcaaaggctactgggacagctattgattgggtccagatgcctgggatgaaggttatatgtcaactctcaatccctgttctttggcttaagttacattttttttccagaaaactggctaggtggctaactacattctgttttctgaagcctggtccggattcagttggtatcgtggccatttcgcatgtttgccgggcgtgctgcccggcatgtggttgtgaattagaccaccaaagtagtttaaatgttg

SEQ ID NO: 6955 - DNA, 778 bp, Zea mays
gacctcccggctgccgtatccgccttcgccgacgcgttcgtggactttgccgtgtccggcatcttcttcccgaccttcccgtcctcctcctcgccccctcctcgcccgaagactccgaccaccttcctcccttccccatcccggctcgtcgccatcggagatctccacggggacctgcccaagtccctctccgcgctccgcctcgccggcctcgtgcccccgtcttgcacccccgactccccctccgcctcctcctcatgggccgcggggcccaccctcgccgtccagctcggcgacatcctcgaccgcggcggcgacgagctccgcctcctatacctacttcgccgcctctccctctccgcagagagccgcggaggcgcgttcctccccatcctcggcaaccacgaggtcatgaacgtctccggcgacttccgcttcgccacgccgcagggttttcaggaattctccgcctgggcagggtggtaccgcgcggggctcgccatcaagcgccgctgcggcgagcacctcgacccgcagccgaggaacccctttctcggcgtgcccaagtccttccccggcgtcaagccggagttctgggacgggatgcggtcccgcctcgccgccctccgacccgacgggcccattgcgcgccggttcctggccgacctccctaccgtgcttgtagtgggcgactcggtattcgtccatggagggctcctcgaggcccacgtcgagtacggcctggagcggatcaatgcggaggtcagcgagtggatcc

SEQ ID NO: 6956 - DNA, 786 bp, Zea mays
aaatttgcacatctcaacttctacacatcaatcagcattggtagtgtgacgttgaacaataaatatggagaatggggagataatgaccattacctccatttcagaagtacctcaacaactctctatcttgctataaattccctcaacttcatcaacttgtcagtaagtgttgccatgatcactacgagaagactatttccttgatgcttctcataattaccaaacttctgttgtgttatactcgtttcagctggtctgtcacttcagcactccaactggttatttgcttgtgcaatcatcaatcattgattatggtgtttgtacaaatgaaaacttaacattgatgtcaaatccatgggctccaaagaatcaaatgatagtttcaactcacaatttccaaacagtgagcttaattagaaaggatccgtagtaaaatcttcagtaggaacttggctactaaatgatatgacaaaaacagagccgaactgtagccaatcagccataaaagtgttctagagactgttgattctctacaccaaatcagaccaaaatcgttcatgatcagcattaacagaaaagtaacattggggaaatatactacacaaaagttcaaaaacaactgcacaattggatcgttaattgtaggtatatatatcagcaatgcactattgtatcttgaaaaataaaacataatggtagatcttcctttcttttgtggataccaacccactaacaggtaatgattcctacaaacaatctctctcataactagtcttctttaccaaa

SEQ ID NO: 6957 - DNA, 806 bp, Zea mays
ccgctatgtcgacctgcagaataatggacagcagatcgacatcaaacgactagctagctagtagccacccatgcatgcatgcatcatcaaatttcagaacatgcatgcacgcacgcaccacttgcaatgcaccattgtagttcccagccacgccggttgatagcacctccagcgtcgcggctctcgacacgatactcgagaacacggccgcatactggttctgcgcagaagaaaatcgaattaaaagttgagaagccagcaatcataatcagctgctgatcgatcaaatgtatgtgcatggatcataccacgtccatgaggatttcgacgaggttggcatgggtcatgatgacgacggcgctgtcacgcgacgcctccgagttgagcccgtacggcttgggcccgagcccgccggggaacaagcgcgcgtactcctcctcgttaagcgtctcctcctcagcggacccatcgagccccgcgggcgcgttccacagcggctcgtccagctgcgccatccgaaccagctcctccatggccgccacggccagctccacgatcataggcttgtcggcgtccgactgcacggcggcgcccctcagcagcaggtccccggcaccggcagcaccagcagcagcgacgacaccgccgccgccgaacatgtcagcggcagcgccatacggcggcgccatgtccagcggcggcaacgcgggggcgcgtgccccggccccgggccagcgggctggacagcacggggaagggcaccatgggcctgcccacgtacttggcggcgatggaggagatcctgt

SEQ ID NO: 6958 - DNA, 813 bp, Zea mays
ttgggtcacccgcagatcaaggagtactggtgttggccttctgatggccgtgcgagggtccacatacatgatcaggcaatatataaaggagccaggattcaatgcagcgaatgagatggcatccatcaaccaggagataagacagattggtagaatgatggtcatatcaggcaatatattggagccgccggaatggattctgcaagcccaagacctggcctgtgatgtgcaggatttcacggatatctacacatggctgcaaagcaaatcgcggaggcgtgcccttgcacatataggctacatagcgcagctgaaggatcggatcagcagccttcgagagtggcaacagagaggaggcagcagcagcagcagcagccagcaggagcgtgctgctgccttgtccttctcgcggcgatcatgcgggccttgcgcccctgacgatgtgctagttggcattgatcagcccagaaaagaactttcggacctcattttcgaaagggaggatgttgtgcatatcgtgcaacagaagcccagggtggtctctgtcgttgggtatagtggcattggcaagacagccctggcaagagcagtctactacgaccctagtgtccgttctgcctttaacggcgttgcttgggttgtggcatctgagtgcagccatgggtgcgaccttgtaagtaagatctgccagcaggtcaaggacgaacaagcagggaacggtgctgtcgtcgtccctgattgttataggttaaaagagatcatgcgggataaagggcatatatatatatatatatatatatatatatatatata

SEQ ID NO: 6959 - DNA, 791 bp, Zea mays
ctcctcctcctccttgcggttcgatgaccatgcttgagctgtggaggtagctcaaacttgccaaacagatgggccaaccgtgggagcatcaagacttggatgggcagttcttccacccgtgtgtccctgaggtccagcgtctccaaacgctggagcttttttactttcttgggtattccgtaaacatcggtgcccctaaggctcaggtacttgagaaacaccagcttgcatatgctgccaaggatgctcttgtcgatcccctggcaagcctccaggtccaagagccgcagcaaccagcagccctggaagtcaaagggcacagcattgcagattgtcagcgacctgacctgatccagtccgatcgcctttgcaacagcttcacttttctttgttgtgcctccatgaacaagcagtcgacgaacagggcgatgggcgaccagcatcctgttgggaaggagaagctcatcgttctggattatagctacagtctcatttgagactgccgttttgttgatgaagtccttgatcacaccaagaactaagcatgccttgaccttactactagaaccgtggccagcagtcagcacaggctcagtaacgttcctgtcaatcaacacatcaaatatgttaccggcaacttgttcagcactgagctcacagtctccgacgacagccaatccttcagctatccatcttctaattagcctcttcctcttcatcacatgacccctgagggaatgtgctcagggacagcaagcacatcctgtgagcattgtcaggcaagcttgcat

SEQ ID NO: 6960 - DNA, 784 bp, Zea mays
ggaggaaaggtggcatggcagtggcagccggcggcgtcagcaacagcagcaggcacaaggatacgggaatcagcaccaggtttgggttcctctcatttttttacttctcttacaagaattaggcaattcacccgctcatctttcattagactctgcttcaaatggtacgcacagacgatggaaatggtaaatgctggatctgtattttaatcatacaggaataatgtggtatgtttacgttcggattgaacgaatggttctctgatgcactaatgagctgatagctggagaatcaatgatataatattcaagaattttcttcccatatagaatgttccgaagtacaaaattgcaataacactatagctttcttggttaaatttgaaagttttgtcatactcgttttacgcttttcatagaagaattacaagcccaaatgattggcttcctgttagagtgtgagtgtctcatcaagtttataatttggactattttaggaagaagaaaggataaacgatggaggctggcagaccgtcggtgagaaaaagcgccatggaagaccacagcaggtttgatttcagtcttccaaagatcagaaattacatttctttttcgttattctgtttcctcattgaacatatttaagctcttgctttagttttcaggtccttttacttctattttactatttatacagacagtcaatcaacatttagccatggagccaatgccttagtgagttatttgtacaaacccgtgcaagaatgtgggtctgttagtgtta

SEQ ID NO: 6961 - DNA, 772 bp, Zea mays
aagcatagcaccagataatcagttctctacaatgggaaaggctgatccaattttgttgttccccaatcggtagcacttgacgttcacactatacgggccaatatcgacgcggttatcttcccctccaacaaaaaagcacaacgtgtagagtgcaacctcaaactcaggactgacgccaatcaacgtgctggataccgatttcagcacgccatgccactcaaactgaacagtcagcagctgtatctctgaatcaggctgccaagaccagggtagaacattttagctaacattattcgtatgcacagcagcgttgcatcaattcttagctacatagtaatatactcaccgattcaccacggcgccttggaaatatataaccttggtaatccacatttcccttggcttcttccaggtaaaactgcaaattaatcacggaatacctgttagaaatgtccaaatgaggaaattagatttcattaataacacgagaacttgcctgaatccagttatggaagcctgatacctcactctccccttgtccccgtcctttgatctcaccaacaaacacatgctcaaaggcagaagagcagctagagttgccacctctttcatacaaatcaaaccatagggatgccagcattctcttgaagtctcgtagcctgagcacagccccttctgactagtaccgtgcaagactaattgcgctgtctgcgactctcacgaagtattctctgctatctgtggtacactcttgaccctgtgggtgagtatc

SEQ ID NO: 6962 - DNA, 822 bp, Zea mays
ttaacaacccgccgatcctttagtgtcgacctgcagtacacttgcagtctctaactacactataagaaggcaacatttaagaaaattccaaagacacgtcatccttcatatgaacaacaagctcatatgccttcttttattttagcattgttaaatctgaaattttaatagtaatacacgcaaaaccaacttttcaagaagtagctgttttggtcacactaaggctctgttccaaacctctaaaactaatagttagcagctaaaattagctgagactgagagttttagaacggatcagctaatagactagctaatgtttagttatacctctcaaatagctattaattgttagcagcttcaacccaactaaaaccaactaacaacttattagctgactaataattagctctagaggtttggaacaaggcctaatgagcgcttggcatgatccttaacttggccatgccaatccatctggagtgactcaagacgagtcacaccaggatgaacggagtaattgtcatgcaaagtatcacgacagactcacctcttgggtcacaccaagcagcttggcagttggaggagtcatgccaagctcattggcgtgacctaaatgtctagatcttgaaattcattttgcacatgtaagtgttaaatttaaattaagaaaggctaaaataaacagatggcatcaaaatccaattataacaggcttatgtggataacataactcttaacatctatgccttaaggtttacaagtgaaaaactgcaaagcaagcaacatccacattaatgattccaaacaaatgcttatgtgaat

SEQ ID NO: 6963 - DNA, 885 bp, Zea mays
tgcatgcctgcaggaaacttttcttgagaatcttttgccactggggttgcttctactggtttatcttctttcgctttcttagaatccaaggtcccttcagcaatatctggaactgtcaaagctttcttatccgaagaactcgcatcaatatttgtagcttttgttccattgaggctctcagcatctggagactcttctacaagtgtggatgctttagcctcttcctttgaagcagcagaaacagcaggagacctatgcttaggttgtacaggtagagctgactccatgtctacaaagcatacatcatcattttccaattgcgaacaaagcaaatccaatgacagacatatatacaaacataccctgtacttgcaccatgcttcccacattttctgtactgctagttggtggtgcctctaatatgcgactgatggtttctcttagagttttattagggagaagatcatcagctaatatgcttgtggcaccacagacacacattgacttgttaattatgtagtccctgatgcctgccagaaaaatacaactagcacttaactcctcgaatagctccatatttttaatgagaaaagggaaaggacacattctgtggtataaaaaaatatataagaaaacaacaaaggacagtcatattatatgatatcagtatgaatagttgtgcaacacacaatcaggaattcgaagacatcttacatttatcacagaaactcctaaagcagcatttactagttagaacagcatccttcattacttctttgcacaatgggcagcgtagctctggtggaagatccaccaccggacgtgtggtaggtaggccccctatcttccttctaaaaacaactcttacaccaagaaaaaaaaatc

SEQ ID NO: 6964 - DNA, 773 bp, Zea mays
cctgtcttccggcggcaaggtcctcagcgaggaggagaaggccgcggagaaagtgtacatcaaggtccagatttctcccctatttctctcgcccttccttccttgctctgttcaggtagagccttcggttcctgatcgagacgcgattgtgggtatgcgaccggtgatacgattttaggactctcttctagttccgcaagtgttggagcagagttgtgatgcggtgtttctgtgtgaccgcgtccttgcggcgacctccgtgcttgctgggacatggagaatggaggtttttttccccctggggttccttgttgtagtaagagcatctctaaatctcagtttaaggagttattaggaaaaaaaacacgtctctaatagtaccctaaacaatgttgctaaatttaagaagttgctgctgctctgatagatgtactgcatgaaatacttgagtcttgatatgacctatctaccatctatacaagcctggtgctcatagtgggtccgcaagtgttgtggcttggggaattttatgggggcatttgtgattatacccctgtatagccttgcaattgttattttacccctcgcttttcaactttatgattttaccccttcgttttgaaaactaagctctgtcatacctctgcgccgttacgtgcaattaacggtgttaaatctgatgtggaaagacaaaaatgcctatgccaattttgtgtgattttaccccctggtggggttggcccaatcagaataggaaggtggttcggaccttt

SEQ ID NO: 6965 - DNA, 776 bp, Zea mays
cagcttgcatgcctgcagtttttaccggaatgctccaaggtgaggagctctcacaagcgtacgccagtggagatgtatttgcaatgccttcagaatccgagaccctcgggcaagtagtgctggagtccatggcttctggagtcccagtcgttgctgctcgtgctggagggatacctgatataatacccaaggacaaggagggtaagacaagctttctgtttacacccggagatctcgatgagtgtgtgaggaagatagagcagctcctcagttcaaaagatctcagggaaaccattggaatggctgccagagaagagatggagaagtgtgactggaggacagcctcgaagaaaatccgcaacgagcactacagcaccgcgatatcgtactggcggaagaagatgggcaagactaaccagacctccttgtttcaggattcttctgtcgctgccctctccaactagttgctgttaataactaaagaatttgtacattgtacccaaacagcttgcgagttttgtgtggctagctgcattcaaatgtccacagtctgactgactacggcttgtattcgattcatgtacatttagacagcacttaagattgccgatctgctaactcagaaagtttggcacaaatgctccgataattttgacgtacttgtctcgtgctgatgtgcagtgtagaggcttgttgctgtcagtggcttcggccatgttctaatgtaccagaactaatagttagctgctaaaaataattaaaacatttaaacagtc

SEQ ID NO: 6966 - DNA, 790 bp, Zea mays
gcagcagtcactgcgtgtggccctgagcacccccgtctgtccactcaccagccatgcagtcgaccgcagaggatccgaatccatccgagactggaagcgagcatggttcggtcaaagccttgaaggtgaggcgtcaaataatggcggtgtgcggtgtccgagagtgacgcgtccgggcacgtccactcctcgcttgaagacgtgtccagccgacatgtatggtcaggcggaagattctattctatctctatacgatgcacaggtgttggtatgggtgcggtgtagaactttcccagacccatacagagaaagagcagagacgtcagagagccatacatgtgcggtgcaagttgcgggcttgtgtgtctggtggaggtcgatctcctcccccatgaccaattcctcgcctcacctggtcacggctcagcgcacgcgttgagtacgcgagaggggtatcgcttgccgtcaaccgccgccggactggcggatggcgttgtgtgggtgaggcagcggttccttgggcacttcgtcacccgtttatctgcgcgcctctagctttggacatatggtggatagatgggaagattgatgcctcctcgtccatcattccatcctttgccttttggccgctactatgccgcccgtcaaatcaaacgagccggcaggaagggacaggcgcagaaaccgagacgatttacgaatcagatgccatctttaaaacaataaataaactagaggaaaattttctctaggaagcatactccatttcttggtaggtgtccctaccgca

SEQ ID NO: 6967 - DNA, 847 bp, Zea mays
atcgttccacttctatagttctgagacttaatcaacttatgatgatgaacaggctgctttagaagcattttcaagagttgttgcatctgttccaaaggaacagctcccaacacacataaaactagtgcgcgatgctgtctctacagccagagataaagagcgtagaaggcgaaaggtactactttgaactgaactactgaaatttgtgctatgcgttgctattacttactaaagtagccactaatatttaagctgaaatctttgaggtggctcctgtactagtctaaaacttctctttccattttcagggtgtgcctattcttctgcctggcttatgtctttctaaagcactgcaaccttttcttcctatatttcagcaggtatttatttgtgaattttcatttattatggtgtcgacatatttaaaatttgagcgtaagaaagtgcagcacaagattaatttcaggcatgaggacatctgacacatttctattgaactccagggtttaattagtgggtcggccgaaacaaaggagcaggcggctgaaggtctaggagagttaattgatgtaacaagcgagaagactcttaaggaagttgtagtgccaattacagggtacaatttttgtcttgttgaaattgcttcagttttatgtttgcctttttgaatgcttcacatatgaggattttgctgtctgaggaaagctcgatggcattgcaaccatgaggcatcccacgacatgtccagctgacagccaaacagatccttagcattttacattcttttaagctagcccctaaaaattttttgctggcataaaatgaatagttataggtttcataagcc

SEQ ID NO: 6968 - DNA, 786 bp, Zea mays
gaggaagaagacaaggaggaggaaaaggcgtcggctgcgactgcgagcgactcaggacgcggctgccgacgaacgacgccgcggctttataccgcttcctcctcctcctcctccgtctccccttgagcactactacggttggggttgacgaagtgtttaatgtactggcttcgccgccaattaatcatcgagcttttcttcgtctcttctccctttttttgtagtatttcgcagcaaccatttgctggcccgagctcgtcccaacccgccagaacccacctacccggatacccggagattaaacagcgggcgcccaccagcagcagcttacgcacaggatgacacgcgggccacacgctgctacctccggcggctctgtgctggactctgtttttttttccgttaggcgacctctaaagttaggcgcgttcctacgtgcgacgacgaggacgccgagaccgcggcgacctggtggtctgtctggctctggcactaccgattcctctctctctcgagcgcgcgcgcgtgcgctttggcccgtgctttaggtgggcgcccgggctcgatgaccaatgggcccgtccggcccgtatttcacggccgtgtttatcggcggcacgccacctcgtcgttcgtcaagccacgtacgtgcgacgcgcgcgttcgtcttcgcgccctggcttgttcgtcttccatttcctttcctttttttcttcttattattcgatgaaagaagacttcatacgagtttactttttatttatacggtattgaaagtgtgttcca

SEQ ID NO: 6969 - DNA, 802 bp, Zea mays
ggtgccgccagcaagacatccggaccggacggatggcccctgcggccctgcccgtgggcggctggcctctgagtggttgagtcccttcactatgctagtataaaattgacaagagacaaaaactaatagcctctcaagtagtcttggcccctaatccaatccagcttccaccattgcgagagatcatcagaggatcgtctccagtcgaagcgaaaagcgaaaaggaggagaaggggcgggggattgcgagcctgtgctgatggcggcggcggcggtggccgcggcggggagcagcaatgtcgagttcatccgcgcgcgcagcgacaagcgggagtaccgccgcgtggtgctcgccaacgcgctcgagatcctactaatcagcgaccccgacaccgacaaggtccgtcccctcctccggccgctgttcgcttgttctgctcctctcccgcggagcgccgcgatagcgaggaatgctcgtgggcttgccttatcgatcatctggtttccgggactgatttggttgttaatctctctctctctctctctctgcttctcgtgatgctcaggcggcggcgtgcatggaggtcgaggtgggctcgttcagcgatccggagggacttgagggcctcgcgcacttcctcggtgagttcagtacttcactcctggtctcctcagcctccccatcccctctctcatctcgctttgctcgtgtccaacgctttgatttctccttcgatttgttgcgtgctcgtgctgatcgaatcatcagtcgaattcgtgttgattcgtggagtgaggatct

SEQ ID NO: 6970 - DNA, 911 bp, Zea mays
atcttgcatgcctgcagtcagcacataaaggtctgcacggactgttgtaaccgtccccgtccatcacataaggccataagggggtgtttagtttataagaactaatttttagttacttcgttttattctattctaatttctaaattattaaatataaaaaactaaaatagagtttttgtttctatatttaataatttagaaactaaaatagaataaattggagggactaaaattagtccttaaaaaccaaatactcgctgccaagatccaaccaggcaggaaggtttaggagcaatttttggatttatttggagaacacggtcctgtgctgagtaaacaattttttaattgctccatacatgcgattcaacaatgtccccgtggctcgccctggcacccgagccaaccaagaaaaaaataatgcagagcgagcacggaacccacgccattctgctctagaaattttagactaacaatcagaccacatatactttagtgtttagaaataaacaataattatatttgaataaatatctcaataactatttatatgatatatataacaatcgtagcaaagcatagttaactggctagtgactcattaagatttgagaaaagtgatgcattaccattgggccatgaaccaaaaaaaagcttgggacacaagggatgcatgtacgtacagtacaggccgtaagaatgtaggatcaatcatcatgggtggacgctctcaaaaacaaccacagctctctagctctgattatatcattactacactgtacatcccaaacccgtcaattgtttgatcccacggacagaacacgccgagttacaaaaagaacatccatagacttggactgaaaatacgcaacgtcattatttgacccgagaaagcgcacgaacaaagcaac

SEQ ID NO: 6971 - DNA, 828 bp, Zea mays
tctttttaatatgtacaatcacacttatagttgttttaggaagtaggaactgaagaacagaaggcattgatacataattccatctctctctctctctctctctctctctcataatgtcccttctattttgaacgttcaggcaactattatattgccttttgccatggtagctgcccatacacctgcattgaaatgtttagcataatgtggatttttttctgagttcatttaaaccttcaagaagaccttctcacgcaggtcgagaaaatccccgacacctgccccacccatacacaacaggcatggggcagacgaggagatgttttttaaccccagcctgaaattcgcccccacggggagtcgaactcgggacccgaggagtgctacttaaaccacataacaaacttagctagatgccctttcactatactatattattttatatactgatatatctatgtttgtggtaatggtctggcatcggtaaatctacttctattcttatgtttgatgcacaaagcttcattttctaattgaaagattactttgaattttcagggaagcacttttggatccactcttatctaagtacagtgttatagttgttgatgaggctcatgaaagaactgttcatactgatgtcttgttgggtttgttgaaaaaagtgcaacattcccgagctaataccaataaaaatgggaagaccttgcttgggcattctcaaaatgtaactattaaggaatgccaaggaataagatgtgctccactaaagctgataattatgtctgctagtttggatgctaagtgtttttctgattattttggagg

SEQ ID NO: 6972 - DNA, 1166 bp, Zea mays
  unsure (1)..(1166): unsure at all n locations
gattgtgggctaactaggcaatgagctgtaagtatatgctacgtaacgtacatatttttgtcgttcttgccaaaatcaagcctcagcttaaattcgtttctagcagtacttttgattgatataataagttctaacgattttgcgtatgtgtatgttgaagatttgtttgattttgttgccacatgcttgtccgaaactagtttttttttaaacgcagcacctgaaatctgatgcaaattcaagtgccatataaatgacggataaaattaaggacaccaggaaatatatgattggctcaaaaactgaatgtaacgctgtcagttatcgcttcttggagcaaagcaagtacaataatatgctgtaaaataactaattgttgaggtaaaagagagataaaaagaaagagaagagagagatagagctgtaaaaactaataatacatattaggaaaaatattatatacacccaggatgtaaaaccactactttgcagcttttcatatccacaccaatagaaaaaaaattaggcttgctagtaaaatctcacatgttcatgttgctacgactttccactgatggtggcatggtgctactttttttttttcaagggcgccttaaattggtttaaagccagggaggggggagggatgccaaaaatggcctttggaaattcgggctctttggttccttcaaggcgaggagatgatttccgggtcgcggtttgtgaggtttaaccaaccctacctccgttttttggccctttttttgggaaccggaaaccgaaaaagtggcttcgtattttctaaaaactttggttacacccccaccctcatttttctatttttttgggggcgttttctcttttttttctttaaacgctgtttttacgtttgggcccctttgcgggggatatattttttttccccgccccctctttcatttttttgtgaccaccccttgtgttctttttttttattattgaagacccggccccgggaaaatgatatcccttttttatattttcctctccttcaaaaaaaaaagctggagcattttttttttgtttgttcaccgccccatcaaccttatttcttctgtacggagggagattattttatttaatanaaaaaggaggtttcttttttttcacccaatttctcttttttt

SEQ ID NO: 6973 - DNA, 807 bp, Zea mays
ttgcagatgattgtgggctaactaggcaatgagctgtaagtatatgctacgtaacgtacatatttttgtcgttcttgccaaaatcaagcctcagcttaaattcgtttctagcagtatttttgattgatataataagctctaacgaatttgcgtatctgtatgttgaagatttgtttgattttgttgccacatgcttgtccgaaactagtttttttttaaacgcagcacctgaaatctgatgcaaattcaagtgccatataaatgacggataaaattaaggacaccaggaaatatatgattggctcaaaaactgaatgtaacgctgtcagttatcgcttcttggagcaaagcaagtacaataatatgctgtaaaataactaattgttgaggtaaaagagagataaaaagaaagagaagagagagatagagctgtaaaaactaatactacatattaggaaaaatattatatacacccaggatgtaaaaccactactttgcagcttttcatatccacgccaatagaaaaaaataaattaggcttgctagtaaaatctcacatgttcatgttgctacgtctttccactgatggtggcatggtgctacttttttttttcagtgcgctgaaaatgatagaagcaggaagggagaggatgcgaaattggcattgtaatttggtctccttgctacctccaagcgagaagataattacaggtcgcgtctcgtagcgtccacccacgccgacgccggactgtgcgcattcttcgggaacgggacagaggaaagaggcgagcgagcaacaagacgctg

SEQ ID NO: 6974 - DNA, 767 bp, Zea mays
ttgatatcgtgattattcacggcattgtcttattggatgttcttgacaaggagctcatcacttatgccattagagttcgctaatggtatggctggcactttccaaagctcatcaaaatagttttagataatatttagtatgccaaagctgtgaaggtgatgggcaacagagctaatgcaatcaaccttgacttctcagatgtaattgttgacatctatgtatgatctccttgactactatgggaactgtttagtgagaaactatattgttttcagatattgtctgatgaagagctagaaacatatctaaaggtgattgcagtaatatccatgggaacagaagttattgaacatgacttgttaaatatcagagagctatatgatcatgtgttggccctactatatgactatttaagaagcaagatgaacactatcaccccaattctaacagcactggtgggtgaatcagttggtgccatattgtgcatggtggaagtttggtaaacttggccaagcaacctggtagcataatttaaatacttggtgtagagaaggtttgttattgcttatggataattctggaatcttgtaatttttagctctttttttggtgtgtatctgaaccttatgtgcatcaatgcttagtatgacataagtaaacattacttatttgcttatgttgtctgctaaaacagtctaacatcttgtaaatcatgtggatttcatatttgttacttatttcttttaaattgggtggttactaataat

SEQ ID NO: 6975 - DNA, 800 bp, Zea mays
gagcaggccgatgctgggttcattactaccacagtgaagcgtcaaaacggcaaggctggatggatccactgaacctgtgccgcgcaagcatgctgcaatgcgagacgaccagcagtgagcatcgcaggccgcagagggctgctcgcttcttcagttcgagcgctgggtgcaagtcggagtcgaaagacatggacggatcgatgggtggactggaactggaatggcactacactgcactacacctcacggtaggcttgcggcacgggcagctcggccatcacctccctcccggcctcccgtacgcgcgcttttcggccgacttcgtggggcgtcactttcttatctgcacggagatctcctccgcccggcgagatcggaccggacgcacgaccgccgatcccgtatcgcccctgttcgttgctcgtcaaccctccatcgaccagcggtgttgtggtcaacggggcaaactcggtaagctccgcaagtacaccggcaccccccttttttttctgggacagagaccaatggggaagtgtcaaactcacaagggttgacctgctacacatagccttcacaagtggagctggtccagcacgcagcgaaaaaaaaaggagccgttcgttctccttgcggagcctgcctgatagcctggctgccattggcgcgggaggaggactaaaaaaccacacggaatgcgcagtggagcaaagcaacggatgccgagcccaatcatggaagattcgtctttagtgccatgattggacgaagttgggttttttttttaaaaaagtcctgtaaac

SEQ ID NO: 6976 - DNA, 902 bp, Zea mays
acaaactattttactaaattaaaatctaacacctagtttggttacaaatatttgagctaaactcaatttattatcatatgtgcttaaagaaactcgacctgcaggggatatgacagctcccgagtatattaagaagaggaccttctttcacgcagctcaagaaaacccccgaactctgccccacccatacacaacaacattgtagcccatgtgagaacaaccgggaccgggccttagacctatgcttcggccatagttgttaaggcggtaaggcgaagtaaggcggatgaccccctttttatctttaagcgataaggcgtaaagcaaggcgacaccttaaatgtagttaaaaatagaaaaatattaatatttaagaaagcatttaggatacaaaaattaataaagaagagaaaaagaaaaggtagtctcgccctacaaatcagccccctagtccattaaatctagagtaagcccactacctctccctctctcctaaacctctccatctgtctccttagtccacagccacaagactcagccgcacaactccatcctcccagccgtcgctccctctctccccactagtatttctctctctctccacgttggctccctctctcttctgtatcggcgccacagctgtgctggagccgccgcacgccgctgtcacgccatggaggagccaccacgccgctgctagagcagccgcggcaccgctggtagagccaccggcggcctctcccactcaccttaggtgtcggaataaggcgagcaggacggcttacgccgccggggcgccttaccgtctagggcgcgccttaacaactatggcttcgacgtgggacagatgaggggattttttaaccacaggctgaaattcgctcccacgaggattcgaactc

SEQ ID NO: 6977 - DNA, 502 bp, Zea mays
cacagcgcagggaacggaggatcatccgggggcgagaataagcaagcatctggggccccgcgtagctgctgaaattcgcatttagggaggaaaaaaagggaaataggagcaggaaatggaaagaatcagaacagaggaagtggagaaagtgggcagcttgctttagaagggggatgcacgagcacaacgaaatcacttagtccacctggaaaaacagcacctttctttgtttgtttctttgacctcgcaaccttctctttccttccaaaagacaagtttggttttcgcagccgtaaatactaagtcaagtttggtttaaaaagctccaacacaaacacatatgaattgaataatatgttaaggaaatctagggtacatgtgtggcggatgggggtgctcagtaattgatgttgacccaacccatttaatacgcacagtaacgtccttcattcaattcacccagccgaccacttgccaacctgtgtggcggttgtttgagctc

SEQ ID NO: 6978 - DNA, 855 bp, Zea mays
atggaatctggggagatgtcctcccatccagcacaacaaaaaaccatgtcgagtctgaccaacgttggtgaggccctttcatttgaccaagtgaattttcggcctaactggggaattgccttgatacatgaattgttatattgatgctatgttaaacatgccctaatatgattgaatattctcacctattgcatttgagaatataggatgtgttatttactaatagtaataataacctaggcatcaatatatcttgcatttaggttcatctgcatgagtcccattccactgaatggttagactgaatgagtgaatggttaggttatctacttatctccagcagcttacccatccccatacccatattcaaactccactctgcgaacaatgcaatctacagtgtaaaacaatgcaaagcagcgttttggttaaccatatgagtgaaccgctggacacggtcttacgagtattgttaaataagatatcaaattccatctgttgcatttggggtttttggaaagaggataccttatttatagtagttactacaatacaactcttctagaaatttgtggtttaacactagaagtaatatccgttttctgaaatttgtggcttcttttcttcagtgctcatctgaataaactaacatccatatttatcatggacagattgcaactcagcccagtatttatgtgcttgatacacctggtgttcttgtgccaagcataccagatatggagacagggttaaagcttgctttaacaggtaaagcattagggtatgtttttttttgtgtcaactactcagttttctgtgatttgggcatagaaaaccctttgcgtgtctactaaa

SEQ ID NO: 6979 - DNA, 827 bp, Zea mays
aggcacagctgggtgaagcaacaggtcttatacttcagcttaaactattttgatgtctgacaaccacataagcacactgcaatctggaatctgcattgattgtaataaccattgtttccaggaaacaggcactatccttactcatcaccagaagacagtgatcttggatgctgatgctgggaatcatagaaggaagattgttgctttcatgggaggacttgatctatgtggaggccgatatgatacaccaaagcacactctatttcgaactcttcagacatttcacaaggaagactactacaacccaaattttgcggtgagcgtagttttccacatttaccgtatcaaactgaatttactaagaaccttatgcaatggccacaaaaagaattccatccttgttgttctggaactttgttccattttgtttttcctttatcaggagacaggaagcttgttgcgattttgttagatcctcatgtgccgataatttactctcaggttgaagatgctcgcggcccaagagaaccatggcatgacttgcattccaagatcgacggtccagaagcatacgatgtcctgaaaaactttgaggagcgctggttaaaggcatcaaagcgcagtgcccgctaagaaactgtcaaaattgtcgaggtcgcataatgattcgctgctgtggatcaacaagatacctgatattattgctattgacgacaaaatctattcaaatgaccatgatcccgagagatgggacgtgcaggtaagtctacccaaagggctccataaaatcaatggcaaaaataaataatttctgaccatttatggtc

SEQ ID NO: 6980 - DNA, 818 bp, Zea mays
ttgcatgcctgcagctcggggacaggttctacgtggtagggtgctccgtgggcggctacccagcatggagctgcctcaaatacattcccaacaggtcgtaccactaccaccaccgtctcagtagaaaaaacaaaacgcagcaggtgtggtatcgatcagctcgtgtatatatatgcatgttctgaatgggtgggctctcggtctcgtcgcaggctggccggagtggccctggccgcgccggcggtgaactactggtggccgctgcctgctaacgtgtccagggccgcgtacgggaggctccacgcccgggaccgtaggaccttctggatcgcgcaccacgcgccggcgctgctccacgcctggctcgcgcagaagtggttccgggtgtcgccgatcgtcagggccgagcgcgacgcgttcaccgccaaggactgggagatcctcaccgcgctctggaggaagcagcgcgagagcggccaggtggacccggccaaagcgacgcagcaggggacctacgagtcgctgtgccgcgacgcgacgatcctgttcggcacgtgggagttcgaccccacggagatcgagaacccgttccccgacggggagggcggcgtcagcatctggcaggggcgccaggacaagatcgtccaggtggagatccagcggtacgtggcgcaaaagctgccgtgggtgcggtaccacgagcaccccgaggccgggcacgcgctcccggacatggacgggatcggggacgagatcatcagggagctcctgctcggcgagagcgagctgcaccaggaagccccaggcgcaggatgcct

SEQ ID NO: 6981 - DNA, 850 bp, Zea mays
caattgccgttgcattcaaaattatgcgggcctgccagttcaaaaatgtcattgtgagatctcttctttttgggtaatgatactagagatgttaggtttgtagtcccagcaatgtacaacacgggtccacttttaggtgaccgagcaaatcagttgttccgtgcagagacaggaaaactcgtcttccattttgtccatctgttgaacgtggccccctgttttttggcattgtggaagacctggtgatagagcggcttttgacattgctgaagaccgggtggtagatggattaagaaatgatgcttgcgtagtttatgctgttggctggcatattttatttcaaacctgtgtgcagtgggatgtgtaacttttaaactacatttataatgatgatggaccacaacttcttaaaaatttaggccagatgcttcttgagacatcttcaaagtccaaaccatcataccttaaactttaattcagtcacaatttcttattaaagaatgggtatcatcaaagttatttggaaaccctttttgtgtaggtctaatgtaagagctcagaaaacaatggctactcaaatggactaaagaaataaattttggatgaaaaatgtaagattggttgttaaacgttgtaggttgtttctgtgatgcaaaaagtttaaaaaaacatagacaattgcttgtttttatgtgccactaaggaagctgtcctttttttatacctttcgttttgtcactggtctattaaggcaccttgcttttttttttgtttttggttagcacctactacttaaaccccttacaccagtagtttttcaaactggagaagaagaattccttttgctggc

SEQ ID NO: 6982 - DNA, 829 bp, Zea mays
cttgcatgcctgcagctttgggtttatgaccccgggccccgcgccacttagaccagtacgagtagcgagtaggcgtgccagccgagccgatcggacgcggcaggacagtcaaagctctgtacgtaccgtactagtacggacgagccgcgaggtgctgctgccgccgtgtccctccgtcccgccctcccaggcaggctccgagcaacacgcagagcgccaggccagtggcacaagtgcggcagggaggtgggggcccgccacccgggcgcgaggccgggatcaggggacccgcatggtcacgtcacgggacggcgtcccgaggcagccaggcaggggacggacggacgagtagggatggattcggatcgaatacggattcgaatgtcactatttaccatattttaatccgaatacggatacggatacgaatattgtcgaatactaatacaaaacggatagttcgaattcggatttacattcggatacttacttgatttagaacatagcatcataacaagtattaatttgttttatcgatggatttatagttgataaaaatcacattacaagcaaattatgaacaatagtacatatacattatttagttgaaacttagttgaatatgatatttttaaataaaatatttatatatggtatacttatattttagactctaattataatctttttgtatattaagtatatttgtattttggactcaaactccaataatctaatgtattcaaaattatactttttaatattattaaaatttatcattgtatatcactagtattggaagattaacacagtcatttggttatgaaaa

SEQ ID NO: 6983 - DNA, 755 bp, Zea mays
acagcacgaagtcaagtagcccctagcgccagacacctgcactggccacgaccaccgtcggtgccgcccgagccggccgccgccgctgcccggcgtcctgccgccccacgcacatcacacacctctcgtcgcacggccaccggatccagccgagggaatatcggatctggtggccctatcctcctccaccgccagcccgtcatcgccgacgaggaggtccgggggaccaggcagccgcgtccgccccaatccagcggagaagagaagagagggccccgccgccgccttccccgcaggccgcacgagcagccggcatcctgctcgggcagcggtgcggcgagaagaggcgaggtgaggatggcggcgccgcggcggctaggattaggtgtccgctcggtcgcccgcgcggggggcgacgcgagcgtctccttctctctgatgtatagaaataaaaccatctcagagcaaatcgattcgcgcggacacatgccggtcagataagcaaaatcgcttgactttcatgtaagaaaaacatgtcatttactattttgtttatttattacatacacatcaacctaggcatacaagcgagagtcgcgctgtcatgcggatcaagcacaacatgatcagaggcctgacgaccggagtgtagcatcagctctctctctcttgcatggcttagtgcagaagcactgcttgaacggcgggccgcccgttgcataagcctccggtgaagctttgtttgacgcagacgg

SEQ ID NO: 6984 - DNA, 813 bp, Zea mays
atcttgcatgcctgcagacagacctgaactttttccattgcagatacaagtgtggtttgtacatgactgggatattcttgacgtgctggggcaattcctagcttccccctctgttccgtgtcgttagctgttgtcgcagaatagttatctgccacaactcaaaaggtttaggctttagctaagcaaaaaaatgtctgacaaattaattataatctacaataacatacttcctgagactggtccttttatctgatgatttctctttggtctccatgacttggaaaatagcccacccagacttcccagaagcttctcactctgaagagaacaaaagttttgacatattgttgcaatgaattgaccaagaccaaacattatagcatgataataaatttttaaaaatagtaacatcccaactcatatttatatatgtagagcgcactcaaaaatttaaaatgaatctatgaatcatcaaggcaagagtgacaacaaaacaaaaggaaaaacatgtccggtaatacaatccaactaatgcttagctgtgataaatcataagattccgaagatagttatcactctgattgatagtgatcaagtatgatttggtcagtaattgttgattcacaacaaacaaaaagtggaagagagttacagatcgtatgtctggactgatcaacatgtatctgtacaacagttcggcacattttttcttataaaggagcatgctgatcaaaataagtccttatccaagtaatgtacacatctatgcatctccatcaaatatttagagaaaggccaaaattttgacaaggg

SEQ ID NO: 6985 - DNA, 785 bp, Zea mays
aggctcagaacgtggtgggaatcatcgatgatgactccgacatcatggagggcatcaacaagtcttcatccgcttgcaatactcattgatggacagatcgtcatagagtgaaactcatgactcacgaagaacgcccgtggaactttgttggcagtgaagaggctgtcgatggcaacccaaagctagcacacagtctgatcaacggctgtggcaagatcaaggaccttgtcggagacgaatccgtagatcgagctaagggtgcagcagtccatatgcagccaagatgggtctgtagggcgcgcgaccgtggtgccattaatgtgccccatgaggacaaatgtgtcccaaacctggtagatctattgtatagcataatccatgatcatcaagacactatggcccaaatctctataaaaacgtgtatatattaggctcttgatgtcataacctcgtagacatactatacaatgtcaaaattcactccctgctcccccaactattgtttctttggtaccctcggtacctggtgtcttcgctatgacaagggggcggtgtctggtgggctagagcagcaggacgaaaacctagaatattgataccatgtaaaagatagatggaaacaccacaccattaggtggggtgaccatatatatagcttggagtacaatgcaagccaatatggcttagagtacaagacaattacaaatataaaggacatgcctagatacaatttctaacaaggaagggggtactcactaagttgatttatttcatgtaatacagca

SEQ ID NO: 6986 - DNA, 771 bp, Zea mays
tcttcatcagagcaatgagtgggaattgcagaatcctgccaaattagttctcagatccaagacatgttcaatcctattcagaagcttgataacattgagataattgcaagacagccatacaaaaatgacagcgttgtcagcgtagaaagatacccagtgcttctagtgtttttctctcattcctcttttcttttggggtgggggatggggagcttgaggcttgacatttcaccattagtgaagtgaccaaccagtagtcatttgcaatgaggtttgcttgttaattaataattataataatctgccagcacatgcatatttgtttgtgaaacatttgcatctgatagtaaactattataagaaggtacattgaattttttgttactacggttacaaggtttatgagagacctatttctttctgaggtcatcatactttgctatgtggattgttatgcatgtaactgtaaatacttgggctgatagtgctccttgccttgaattttgaggtgatgcttatgaacgctaggaaatggtgcccaatgtgctgggtcttgaattgatagcttgctaattcttgtgctgtattaattgaatgcattatacttctaatctttttaatcctcaactcgtatgcctaaaaaatgtgtgcaggttcctcatgaaggacccatgtgtgatcttttgtggtctgacccacatgaccgatgtggatggggaatttcacccagaggagcaggttacacatttgggcaagacatttggccacagt

SEQ ID NO: 6987 - DNA, 841 bp, Zea mays
agcaaaatagggcagtaatgatagcagtggatcacctgcaaaatacaagtaacaaaaattaacgacaaaaaagaattttccaaaccaaaacgtagctagattatcttgtcggaagtttatagctccagaaaatctggaacaaggacgagaggaaatgcacaaaggaataaagaacatattatctcaaaggtagcaagttcaaacttcaaaaaaggaaatttgtgagaacagaaggccacagcaaaattggggatatgggcaaacaagaaactacacgtgtatggatctaggcccacctatcaccagtgggtatggcatggtatagatcaatgggtgaatgagaaaacatttatatcatgttaattattgagttatgactacaaaaaatagaagatcatagctatggattgactccggatcaagagttcaatgggactgcggcaaaaaaagacacaaaatatactagtccctgacatcagttgtatactcttagtgacaggaggcatgaacaaatgcatgtatagtgtactccccacaatagtaaaatagtgagcattatctagaagggcttgttccaaatgtcaccaggtgtatatcactcgtcatattcacaacaaaactaactaaacagcaactgggtttatgcagatgcagtgccagcaaaagcgatccatgcatgcatcgaccacatatggtaagtgtacactcagactaatggcataaaggttaaccaaacatctgttaacaaagccattaacttgtgaacgatggctgatgagctgcatatagatatcgagtctgatctgaacttacaggttaagtcagaaatctcagtgagcat

SEQ ID NO: 6988 - DNA, 807 bp, Zea mays
aatgaagatgtgagtgctcgtgtctcaccgctaacctataactttttgttgttccttgttacttgtatgccgcgccaacctgtgcatcgtctactgtacatatactttttttcctgagcaccactgtacatatttcgcaccatgcatttctttgaaaaaaaatgatccgacatgtgcttcagaagttgctgttggcctgggttcaaccaggctgccttggatgcgagtccttgattaatgatctttttcagttttgctggataattttctcgaactttaaccataaatgggtgatcaagtgtgaggccaaccatgtagattgttcaagtttatttctcaattttcataaagggttcggttaatggagcagcctgttttgagttccaaatgtgtcattcaatggtgtgaacgaacctatgtgtggaagactggagcgtgggtcttggatgtcctgcaaggtggtctcagccatcatgcggtttaaagcttggagtaaccaatgtccattgctgttatgcagacagaaagcaaatgcaggtgtccttacaaacttcgaagtccttgacttcttgcggtcaagaggtgccaaaattgacccaatgggatgtttgggggctgttgctgtatcatagtgtaaggtgatcactgatctgctgctgctcttttacccaatgccttatcgtctcgacttttttctagatgctgttttgagcctaaaatgacctaatagatgccattgtttcacttaggtgtatgagtatatcttaaaaacccctgcttgcaaccagacaggggaatcccattatg

SEQ ID NO: 6989 - DNA, 561 bp, Zea mays
tgaatgaatgaatgatgagataataccaacagtagtatcgggcgggaaaaaaaatctcttcgggttcctcgtcgctccctccatgctccatcgcagatccagagtcactctgaacgtgaatggactgaacctgatgaatgccgcgaagcagcaggcaggcaggcagcgtccttggagatcgacgcaatcttagccacaggccgcgtataggtgtgcgtaccgcatgcgtgatgcgtccgtggtggccgtgacccggtgactaagccccaggtcccccagctgagctctcctctcaggctgaagatcatgtgaccgcgcgagcgagcggcacggcaagcagccaagcaggggcccgagactgcggcggaaacgaaatgatgatgaagctgctgcctgctggcggcctgcgtctgcgtgcgtgactgatggatcgtgggagatggctggcccaaaccccaaaagctccgcgtgtagctagggccgcggcaccaccaccttttggctgtttgttttcgtcgtaaatctccgtcccgctgggcgcgctgccggagtcgccgtcgc

SEQ ID NO: 6990 - DNA, 898 bp, Zea mays
agcttgcatgcctgcagctactcatagaacatgaatgctacagctacgatggttgcgacggtggaccaggaccaccgcgcgctctggcaccacgggcccgacgtagccagccagctcctctagcctctaggctgctagcctttcgctctccgcgctgccctgtcccttccgctctcggctctccctgtggtccgggccacagttgacactgaatgactgcatctatatctatctatctatctatctatctatctatctatctatctatctatctatcttgtactgtctcacttcaagtgggctgctgcgcctggcaggacagccggatctctggtcctgcccacccctcatgcgcgcacacacagatttgacctttcagtactctcgttcgttcgtctggccttcttcctccactattccctcatcagctctagctagcatggaaaaaagaccactatctgcttaatctggaccatcacattactacttactaagtgagagattgcgtgtcgtcgttactgcttcaaattctacgcattaattcgctgtgtcatgcagagcagaggctccggccgggaggcgatcgagcagtctcctcatccgtcatatccagttcctgctcccaccccccacactggccactgcaatgcagaagcttgtcgctgcatgcatggttaccaatggtacgtacgtagtagtacacccatgtatgtacttggagctagctagctagcctgtaacttgaagcggcttggcaggatccccatgcatgtgtgcactgctcatctcactcgccctgcctgggccctgcttaattgcataatttggtctgggggtgccaggccaggcccttctgaccatgcatgacaaaattgacaagctcgcaccgcaatcgagc

SEQ ID NO: 6991 - DNA, 806 bp, Zea mays
aataaagaacttggttattgttggtaagcattgatatacatttgatgatatggaagtgattgtcatttcgctaccatgataattgaattctgtatgatatccttgttacttaataatcttattccttttccttgtgtcttccttttcaatacttcatttgtgattttaattttcttggccacatgatggaagcacccattcatatataggtgtgtcaatgggaataaacgtacaaattcttcattttttctacagtatagcaacctgtgcaccccaaaagggaaacttatttgaaacagagatgttatcatatcttttcttcttgagagaggttgtcagcagacaacacgtgagccaacatgttgaggaggatcagcagccggatagagttccgatgaagatggacaggatgcggagatgggccaagatgatgccgaagctggaattgtcagactgggctgtcgtgttcgcaggcccaatacacgatacccgtcgtctcgctggacgcgctgagtcagccgtcatgttaatggcagcttaaatactgcgaaccggagttagagagaactaagaaattaccaacagctattcctgttctttccactcatttcctttgtagttagccagtagacagttacagaggtcaagcatcacatcgtacatcatgctacttaaacatgtatttgttgattttcaggagttcagacaccaaattgcattcggcagactgtgttccatgctattacactggactatgagaaagttacggttctaattgatgcaacagctgctgcaagaccaaaatt

SEQ ID NO: 6992 - DNA, 753 bp, Zea mays
agctaggaaaataatgcagtgcgtcagtggcgcgcagtgcagggtgcttgcatcgcatataatatggcccgaggccccgagctagctagcaaggcgcgcaagcaaatacaatactgtatcgttctgtacttctgtatcattttttgctgctactcgaacaattggtgcatggaattcaaaaggtagctccatttttttaggaaaatgttttcgcacgtactacgcgcccattttgtgagagtggtttgggaaaaaagaggggccatactgaatgtttaggactaatttgttgatcagagaacgagattcataagaagcaatccctttgctttttaaagattcctcccaataaatccttcttaattatctggccatcaaaccagcctttagagcatcttccagagctcttcagaaaatgactcctgaaaattagttttaaaggacatctaaaaaattagtgaagtatgttttaatcttttctctaacagattctttaaaacgatatattatttctggagagcctaaaaatcccctcatttgtagctacaaatgagagagttttaaaggctataaaaaagttgggaacactttagaagaactgttggagacacaattttgtgtttttccttaaaaacttgatttaagggagacttctgaggagctcttgaagatgttcttagaaggcttttgattcacttctcacttaagccaggctttgagagccatgatcaccggagcctggctctaaatata

SEQ ID NO: 6993 - DNA, 770 bp, Zea mays
tgattaacggatacaggaagcaacatcaaggtccgaaacacaaaatatgtcatttccttcaaaataacaggaccagcatcaaaaacaaaaaataaggactgttgtgtataacactgaaccatggggaaaaaaatctacactccaataccaagtagtggaaccaaatgattgtacaaccaactataatggatatatatcccacaccaatattaacaccgtggtcacacctgaactcctgaaccaatgattaaccttttcacgactgggtgcaccgcaggacaaaccaaaagcatgtacagcaaaacagcgaacagggtgaaaaatcgcaatatctcccctgtggcttgtgctagcaacccacagccaacccttcttttggggcagaggtgacgcactcttttgtagtagtagaggtcacacgaagaatggcttgggcacttaatgcggagagcttggactggcagaaagcctcccatgattcagcatctggcgaggcagaggcctcgacctcgtgttcgtcagaagttgaggcctgagacttctcatagaatgcttgcagttccagtgccaggttgcgagcagcctcccttgattcaggaagctggtcgctaagttgggttgccgcaatttggatgagcttatccataccatattctttgattcccaccacatcctggacaaaaagaaaaacaccattattatttgttattatatacaaaaaaaaactcggccggagagggaaagaccgccctccaagtatttatattaag

SEQ ID NO: 6994 - DNA, 821 bp, Zea mays
catttttgcatgcctgcagaggcagctcttatatcgatgacaagttggatctcccctttactactcttgccaagaatgctgccttacctcaagaacaagaatccacggatccgagcaaaagcatcagtgtgtttcagcaagagtgtaccacgccttgtaagtgaagtttcttgcctgaacttttgtatagttgcagcttaccaagtgaccaatcaggtactcccttagtccacatgagtttgtcgttttgggtttgtcctaagtcaaactatttaaactttgaccaacaatatatataagattaaattatttcaaactaaaataattacatattatgatagttcaagtcatgacgaatctaataattttagttttatgttgtaaaatcttataaaatatctagtataacaggtcaaaattgatagtgattgactagtacaaacccaaacgacaaactcatgtggacggagggagtaggtgttaatgttttagtttccttgcatactacccttctccttccaatataattcagatctttttagtttattttttgaatactttgatgtatattcttaacattgaatctccttcaccataaggtggagctgggtggtagccaaataattagctagttgacatgttaggggtttgatggtttagaatattgtgatggcagatgcgtagttagctgtaggttgcatgtctacatgccctaactcatactttgctgtcaccttcaatagcacaagagtgatggaaggctgaatatacagttttgtgtactgtagatctacatgcgttagtcaatgtttttgttgtcc

SEQ ID NO: 6995 - DNA, 767 bp, Zea mays
atcaacatccatctcagtatcatcttcctgaaagaaattacatgtgaatattaggagttatgaatgtggtaaattttattaaaaaaaactcactcgtttatctcatacaaaacagagtgatagcactgtaggtttagataaactagaacaagaagcaggcgtagcaaaatctgcttaacagggcatgagcttcttcagttcttcacatacagaagattcagaccaactaagtctaccagatgtgaaaattcacaataccattttccaaagttttagtgtagttatctattacacaaacaaggaaaactaagctctgaagattcaactgtagtaatgactttttaattcatcctcagctagcatcgcccatctaatttcatttctcaagcccctaaatgtcatctgctaggcctagtatcaagccataaaaattgtcagatgaaaattggcccacctggaatgtacctctgcaagtattcaatgtctgctgtaaaaatattaagattgctataaaaaacatttcacaggctccagtttgtgatctttacaacagatgtcgcaagaaagtaaaccggtggtcaaggcatttgggctgcgcggatctgcacgcatgtacacacagctctgttgtcaagggcgtcgggacctagggtagctggcccttggctacagagttcgtagccacggtccgtcgtcgccggcgaggttttgcctctcagccgtcggcatgttgggagagagaaacaagagattagggatagtgatct

SEQ ID NO: 6996 - DNA, 774 bp, Zea mays
ctcttgctggatctacatttgacagcagccagcttgtattgacagcttgtatgggttttcaatcagttagagaaatgggattgcaagagttaaggaaaaagtacaggcctgaaattttaactgcaatggaggaaagatcgaaagaccgtggctcctggaaagataagaaggggttagcaaccaaactttatagctttaaacatgatccttcatatgtgtgctcaccagttaagtccaaggaagggctagatggttcaaaggtgaatggagagactgggccagcaaatcttgagacctaccttagtactagttctatactggataatgatttggatcagggtgttgatcttcaagatcaggtaacaactctgctagtatgttattttatttctgtgaacaatatgaaaagtatcatttttttctttgtgttaaaatatattagttaaactcctggttaaaaatctgccgattcataatggttccatgtcaatatcacaatcccttattctgtaagactgaatggttctgttcataatgttcatattttcttgcttagaattatatcctgacaactgacttatctttacaacccaaatatttgaagattattttcttatgcatatgtgatgaatttttacatgtgcaatgctgcaatgttcatacaggtgtcatggctaaaggttgaactatgcaagctgctcgaggagaaaagatcagctgatctcaggtttgggttatattttttcttgaatacataagagagtggtattttat

SEQ ID NO: 6997 - DNA, 846 bp, Zea mays
tcttgcatgcctgcagcacacgcgcgcacgtcactttagcttgcaggtagcactgctagttgccctcctaatcctctttcattcgtaaacgatcaatcaatcaatcaatcataaagttaattaacctggccgccgcatgcagcctatgtctcttctcttgccatgcatgcgtgcgtgggcgtgcaactgcaagcttattttccatctatatatgctgcccggcccgcgccgccggccgccagtcaaattcaatttcgtatataaatatatatgattcgattcgatgctgcggtctgacgatcgagctagagaagcagatggaacggatttggtgcaaccgctctcgtctagctagctaactagcaaccaagcgacgcaacaatccaacccgtcgctgcccaccacctggccgccggccagccatatcctccttttgcgttgcgtcttcctctccactccatcatcggtttttcgccggcaggccgtcgccacacaccggccggcgtcttagctgcccgtgtctacgtacgggtacgccggccggctggtggtgcaggacgatcatcgaccgatgcagcacaaacaaccgactcactagcattaaggattattagaggttagcgtacgttagctagctaacggctttggcgatccacatcgatcatacgtggactatccaacggtcgtggtgcggacgttggaccaagagctagctagctttatccccacaggccacagtacacacccctgtctctttctctagcaagcatcatgcatgtggaccctctacttctcccatttttccctctaagcatactgaatgttccatttcctaagttgactaat

SEQ ID NO: 6998 - DNA, 829 bp, Zea mays
atccttttatggatgttatctgccattcctattttttttttctcgaaaacgcatgaggactgcgtctcattatattaagtgccattccttttttaattgattggaaataatttattgactctatgttactcttatgctaaaattcttaatttcttatgagtttattgatattgtcttttgtttcccccttctcttgatcagtgaaatgtctaaaccttggaagatgcatcatctacatgcctagaattgatctgtgggcagttgataaggcccataatcaaatagaagataatatgctcaatactgggtcaggtcgtttagcatcctccaccgctgatcacaaaaaatgttcagaagtttggaatgcattgattgagcaaatggattcattgttagcttctgtatcaataagtgttctggtaagtctgatataccccacaccacatgtttcttcgttgtttttgtgtaatttagtgtccttttttccctgtaaaatgtaaaaaaagaattattcatggtgagctgataggaaaaatactttattaacatgttggtgattagcatcgactgaatattaccactgcaattttttttttgcaatataatcacctactacatcccgataaagatccgtttctagttcccttctcagtcaaagtatctaaaatttgaccaagtttatagaaaaagtatcaatatttatgacaccgaataattatattatgattgcatgaggaatttaatgacacttatttggtatcataaatattgatatttttttaatataaacttggtcaaactcaatgtttttactaggtgcttgctaggg

SEQ ID NO: 6999 - DNA, 1974 bp, Zea mays
  unsure (1)..(1974): unsure at all n locations
acaggagcaatagcagatccaccatgccatcctgtctgtctagtggcagcagtaggcagtagtactagtgtatgactgtatggccaggcgagtatggcctggtagttggtgatagtaggtagtcacctcatgtcacctcatgtacattgactttgatagatggagtagaaggggcaagatgcaccttagagcatctccaatagttacaagagaacaattggtaaatcattgagttttcatgtcaataaaaaaattagggagcatgctggctttctccaaccatttttttttctggaatacgcaggagagctgcacatctttgtattaatagaagaaaagaaagggggtagagaaccccaatacagcacacacaccactagagacaaactacggatcaccgactaaaacatggaggaaacacgacccacaccgttgttttaagccagcaactcatcgacgtggaggaaggacaaggccttggcaccagtcatggaccagagcaccgcctcttccctagccatcctaagggccgtgaccaagctgggattacaaccatcaaaaacacacctattcctatgcttccaaatggtccaagcacctaggatcactaaagaattgaaaccttttctcacaagatcagatgcccgagagctgctagacttccaccacgactcaaaggaatcctcatgagctggacacagatcctgcagccccactgaactaaggaaatgaaaccagaactgcttggcaaaaacacatttgaccagcaaatgatttatggtttcagcctcttggtcgcacagggggcactgctcaggtcggtctagtcctctttttataagcctgtcagcagtccagcacctattatattccacaagccatataaagaacttgcactttccaggagcccaagatttccacacacgttctgctggttcgaactgaaccgaaccaaggaagagagctttataagcagaactagttgtatactcccttgaagcgctgaatttccataaatgtcgatcccttattccaggctggagcacaactgcatcaagcacttcacaaagttccaagaattcagcaatgactctgactgaaattgccccattcacatcggagatccactggaaattagggagagcatctttgaccaaccgtctgttggcaagacgcgggggcaccaaatcaaacattgcaggagctatgtccttaatacatctcccatccaaccatctgtccttccagaaaagggtattggctccatcaccgagcttagtaataatggctgcaacgatcagatttttaaccaccttacatacatgagtggggaaatccgtccaaggcctactggggtctgttttctgtagccatggccaacgagctctcagagcccaacataggttctttagctcactaatcctaagaccacccagctccttgggacgggtaaccttaggccaagccaagaggcaatgaccaccacagaactctttcctgcccctccaaaggaagcccttcctcagcttatcaattgctttgatggcccaaacaggaaggtcaagtgccaaagctgcataaatcatctttgccgtcacgacaaactgcacatgaatagctctaccagccctggtcataagttcagctttccatcctagcagaaggctagttactctatcaacgatggcctgaacctggtcccttgtgaatttcttgggagacaaaggcagaccaaggtacttacatggaaaatctaaaatattacatgacaacaagtcttgtaaacaattcaaatcttcttccccacagcagattgggaacacactgctcttctggatattagtccttagacctgaagctgaaccaaataaatgaagaaatatccataccatactgatgtctggngcagtcggacatagaaataacactgcgtcatccgcgtacaacgagatacggtgctgcatattccttgaa

SEQ ID NO: 7000 - DNA, 749 bp, Zea mays
tgcatcgtcatctcccctccccgcctcaccacatcccaccgcgtctcctccttgtcccgcaccttctccatctccatcgccggcctccatttcttgcctatcccgtgccagccagtcactctcgtccgccgcagatcgagaagccaccaccaccaccaccaccaccgcatggccatggcagcccagcagcaccggcaccacaagcgccgccgcatcgccctctccccctccccgtccccgtccctcgcgcccatccccggcgcccccacgccgccgctcgactcgctggccgacgagctcctcttcctggtcctggaccgcgtggcccaggccgacccgcgggcgctcaagtccttcgcgctggcctcccgcgcctgccacgccgcggagtcacggcaccgccggacgctccgcccgctccgcgcggacctcctgcccgccgcgctggcgcggtacccgtccgcgacccgcctcgacctcaccctctgcgcgcgcgtccccgacgccgccctcgcctccgccgccgtctccggctcctccgccctccgcgccgtcgacctctcccgctcccgcgggttcggcgccgcgggcgtcgccgcgctcgccgccgcgtgcccggacctcgccgacctcgacctctccaatggggtccacctcggggacgccgcggcggccgaggtagcgcgggccagggcgctgcggaggctctcgctggtccgctggaaagccgctcaccgacatgggcctcg

SEQ ID NO: 7001 - DNA, 837 bp, Zea mays
acaaaaccggaagcttgttttccacatttcactagtcgattggcacttccacctccatcttaaggccaggatggtcgatgatctgaaacaacagccacaagaacacattctcagacgtgctaccgacatataagacggccacaaggtttgtagatggatatggaaccgcaatagacatcgaagaatatgcaaatagcctatgatatgatacagcggtggattttggctttactaacgcctttgcttcccctcttaatagaaaaaaacgtgctttttgcgtggattatttctacctaggctatcaatacagcaacacgcaattctcttgcatgtgttcagagggagggaaaacagatatatggacacggaaaaggatttctgcacctggataaaatcttcaagcgagaatgcgtaatccctcgtgtaccctgcttcttccagaacttcagttaccacttgctgcaagacgtcaatatgatatgtctcacgctgatattgcacaattccgtataaaaaccacacggccaatttagatatataataagcacctctctttgttcctcggacatgaatgaccctgttaggtcccgtaaaacctctagcagatccttgaaggtaatttttcccttgccatcgatgtcataaaccttgaatataactgcttcaccaaacagacaaagaaaaacgttgaggaagtgagtaatcatgagaacttcatcatgcaacacctacgtgcttttgatataagtaggaagaaaacaacgaaatgcaaacgctatggcagtcaggtataacactcgatcttctgacgaaggttggcttttgcactgaatgtag

SEQ ID NO: 7002 - DNA, 796 bp, Zea mays
aacataataatcaaggaagatgtaaatctgaaacaccttcatcggcaaaggaaaaaatatttctttactgacagcttatagtaagcactaggcacagcagatttcaaatggtactgcaacatataagccatattcctatgtaaaaacaataaagtaactcaaaataatccaataaaagagatactagtgctttgcagtgcaataacttgtaagaaatatgaccagcgacatcatacctgcaacagcggcacctcctcaatgggcagctcagctccaaggtcacccctggcaaccatagcctatagtgttcgatattatattagtccgttacccccaaaatgtcaaacaagcaataattgacagtggtgaaatttatgtgcctgcccttaaactaaagtcagaatgaggaaagcagatactagattcatgatttcccgtacaactcaagttcattcatgcaaagataatagataaacattttgatggcatttcactagaccaaagcatataattaagataatatattttttaccccatcaaatgctgtgatgattgaatgtaagttggggatggagtctgcactttctatttttacgaatacatgtatgtcagcattgccacctgagaatagaatagaatgagcctcaataattggaaaaaaggtgcataatatgatttttttaccaagttgggttgaagaatactttttaaataattcttgaggtcgtggacaacttgagcattcttccaaaagaaacagcctagtaatcaacttgattattccaccaaacttaat

SEQ ID NO: 7003 - DNA, 826 bp, Zea mays
catgcctgcaggcgccgttgtagacggccttgcggcatgcctggcggttggcgacgtcggcggggagcatgaggatggagaggacggcgacggtgaggccgagcacgacgacgagcttggggaagtaggcctggttgacgtcgtcggggtgctggtagttgacgagaaggtagacgctgacgagcagcaccagcacgctgaccaccgccgccacgatcaccagtgccacattgaagtcccccatcggggcggcctccgccggatctcgcccctccgcctcctactgctcgtcctagtagggtatgggcactccccctcgctctggcggcgccagcggcgggagagtgaggactgaggagggcaccaccggcgagcgggatctgggtaggcaggtagcgccgcggggatgtgggtgcaggaagcgagggagttgcgggctagcagcagcgggtgcggtgattgacgacaccgaggggagggagacacggtggggcgaggcgactgagagaggagaacaacagcgtgggctaggctggcgcctgtgagtgtgcggtggggtgcgttgggttcgccgctgttggagcggacggagttggggggccagcgcacgccgttttggcgttaatgactggaaaatcgttttacgggttctacagaaaatcccttttgtatcatttgatacgatttcttcctcttctatgtcattatcagcggcatagaaagattagaacatgcaaatttcgtactcttaaatactaccaacgataacacagaggataagaaaatactttccagtggcattgaaggtatcaacaatgacgatttg

SEQ ID NO: 7004 - DNA, 802 bp, Zea mays
tacccaaaaaaaaatacaacactacacatgtaaacttgggtagcaatggcactacaagaacactcttatttggcacatcatgcatctcaaaagtcactctacaaaaccgagtaaactatacgatatgccttctacacgagaaaatgactgcttgagcttaataagaaacatggaaccccccgagtttgtggagaaggtttcctatcagcctatttgtgatcccagaaaatgtgaacctatccattatttattagtggtgtctgccatggactgcaccaaaccgtttgtttacaattgccatgctctgtgacttgtttgctaaaagaaaacccaggtgacttaccgtttttgctactaactatgcaagtcaagccatgcaagaaacgccttatctaccgatgatctgaatcactgtgttctcacaagcttaggcgtccacctttgccatgcaaaccatctcccttccccagctttaatatctgcaatccttcttttcaagccaaggcgtttccgcttcctttcgtcactaactaactcctctgaattgctgattaggggatgctccggcgttccggtttcgctgttctcaacgatcttccgcaccatctccagtacctcgctcatcttgggacggtgcctggcatggcgcaccaggcacttattcgccaccgacgcaagctgggcagctgatcttttgcagtagttcccctggagccttgggtcaattgcagcctcgagcttcttggcgtcggaagagtagggcttcatccaattcacgagattctgctcgcctcttggcctg

SEQ ID NO: 7005 - DNA, 792 bp, Zea mays
aacataatgcaacaaacgttaaaaaactacagagatggaaaaaaaaacagtcaccataaaagatgacttgtacaacaagttcatgcaaaaaaattattattactattaatgagctaactataaacaaacaccccaaatataacatcatgacatcaaaaggaagacatgtaccttgagggcaccaaagacacggttcccagttgtagtcctaataaggccaacatccaagagagcacggaaaggcctcctctcatcagctggctcaacagagaaatcctcaccagtggcctgatgaatgaaaagaaacaatataaatgcccaaccaatgtgacatcagcaaaaaataagatcaaaatttagccaaattttacctcaacattgccctcatattccttatctaaaccacgggtcttgagcacacggcgagccaacagaaggccagtgcagtaggctacaagatgagtgtaagcagttgaactagtgaatatataaattcattaaggtacaatatgcaatttacacaatatttccagaaggaaaattaccagctgcatagttggtcagaccaacttcaagaccatatcgtggcaactcatgcgagtaagcagaagcaagaaccatatcacctgctatactagcagagatgatttgtgctgtgatgtccttgttggtctaaggaggtctagttaagaggtacaatattatgctactggagctcaagtaccatagtaataagcagaaaccagatgattaaagaacaaagaaaacaaatgatgaaggaatcaaaggatc

SEQ ID NO: 7006 - DNA, 816 bp, Zea mays
cttgcatgcctgcagtgtccatagccaccgcaggagactgagatggtaagatcacgggctcttccgctatcattctgcttattgtttcgattgctgcgcctgtgattgtgcaactagcgtttacttgggtagatttcttcactagtggagggactggagtggcaagggcgtaagtagccgccgcgttcagttagcgcggtgatgggtcagcatgctggctggaggaagggtacacttgtggcaccgagcgattcgtgctcggatcgacgtttaggtagaagaagtatattggatgggcctttcggtattatttttttggatgtcgaccaaaaaatgtttgatcgaagggagggctccggacccttctgcccaattgactaagtggcctactgttcgtggctatagtcgtttagtttatcagttattgccatctgctatatagcgtatttgtgattgtatgttcacgcgaggatctattgttgaaagtctgtcatttggtcgtttcttaatctttccagggattacgattctccatttcttgaaaggtttcaattgttctggaaaaaaactctgttatgtttactagatctgtacactataatggatataactgtttttatgcctctgcaaaattttgcggattctttctattgatgttgatgtgtcatgagagctatcttaatttggtgtcacggttccttgacaagtattggactattggtagaatgttctcgccatatgtactgcatctatattattgactcagctgtgactcttgataaatatgcatttgcagcttttgtttgagtatgacac

SEQ ID NO: 7007 - DNA, 841 bp, Zea mays
tcgtccgcgagggcgctcgcctggtcagacgtctggccggtggcgatggctacaacgttgcctccttcggacttgacgatctcttcgaggacgaagtgcaggagggtcgtcctgccgtcggcgcccttcacgtcgaccagcttgaggagcgcgtccagcttgaaggcatgcgcgttcccgcggttcgtgcccgtgttcatgcggttgccggtcttcaggaccgcgtctagtatcttgtggaacagcctgctgccctgaagctcttcgcatgctgcctgaaatgaatgacaatgagtgtcagcgatttgtctatgctactttctttttcttccaaataaacaggatatcaggctgagctttgaacatgcatttcttgtattatgcaaatgagatttacaatttgttgataaattcctaagtacataattctgaaacacaaattggtttgctcattcataagactgtcaatctgtccccaaggcgttcatttacccatcaagacaaacatactgccatggctatatatatggggtagggaagtaagtgaactgaaagaatgccttacctcaagagttttgtaggaggctttgaggtagtcaacctctaaatcgaagttggcgatgtacagcatcgcttccactctcttgaaagcaaatggaatcgcgagcactgccttgaggaagctctcagcggggccaagcttagacacggcatcctccctgtactctttcaacctaatctcctcttccctgctaggcgccatcttcagcagcatctccaagagctcggtcccaggctctctgcctgccctgcttcccacagtggcagtacaagcaaatgc

SEQ ID NO: 7008 - DNA, 711 bp, Zea mays
cagtcttgcatgcctgcagtcaccatccatattccatccggactcccgcccgtctcggatccaggtccagggacgccgccctgcacccgcaccatgccgacgctcggcatcgcgcggctgctggacgcctccttccggcgccgcttcgccgcggcgggcctcgtcgaggcctccgtcccgctggacggcggcgcgaccacggtgcactgctggcgcttcccgccgagcgccgacgacggcggcggcgaggacgcccgccccgtcctggtgctcctgcacggctttgggcccccggcgacgtggcagtggcggcgccaggtgggcccgctctcgcgccggttccggctcatcgtcccggacctgctcttcttcggcggctcgtccacgtcgtcggcgcccggcgtctccgaggcccagcaggcggaggcggtggcgaaggtcgtggcggccgtggcgccggcgccgccggcgcgcgtgtcggtggccggcaccagctacggcgggttcgtggcgtaccacgtggcccggttgctgggccccgacgccgtggagcggggtggggtcgccatctccgacctgctcaaggccgacgccgacgaccaagccttgctccgacgcgccggcgccgagcgcgtctaggacgtcatgctgccgcgctccccggaccggctgctgcgactgggtgcaattggctaccagcgccgtgccgat

SEQ ID NO: 7009 - DNA, 754 bp, Zea mays
aacttactgcaatcaaatacgagccccgggtctaaagcagcggtagcgtttacaaaaccattccccatatcaaaagctgtcgctggagattgcgtcgagtctgggttgctgtatgttcgctgcgccatgattggtttcccttgcctgtcactaagagttgtggttgtagacaatgcagaagctatagctgctgggctaaaagaaggaaacttctgcttgattagagcagccaggccagcaacatggggtgcagccatacttgtgccagagagcatcgcgaaactttcacctacaagggagttttcacagattctatcagtgaaaggaaaatctgtagtgctggactctaatgcaaagacaattttgtttgagaaaactgaatattgcaaaatcttgttttgggcggctgggtagtccaacagcaatagctctctaatcatttttaaatgtttgaagaattaatcagtcaatacatgtaatgtaacaatttgtttcaacgttacagtttgtgattcttcatctgcaaaaggtgtgccattttaacaaggttaagaacacagaatgatcaaaactttacatgttggtacaattcacaaggccatttacaaaagtttcataaaacatttcgagaacagaagcaattaccagaaaattcagcagaatccaatccaagtgaactccaagcaccccaaatcgaatttccgggtgctactagattgggtttcaagatatcagcatttgacagtgtattgtc

SEQ ID NO: 7010 - DNA, 752 bp, Zea mays
gcttgcatgcctgcagcaaagattttcaggagactggaataaaatagaatatatacgaggcaaggctggatggaggattgatgtgtgttgtattgtaacgagccagcagccccatgtgtgtgtgcattcctacaactagatcgatgttgaacgtcaacaacgccccccaactgttctcgtgtagcaggtaggtagggtaggtacatggactggacgaccaatgcaagagggatcgcaacgaacggtggtctcgtcgtcttgacgtcttccgttgtcggtcacatcgtcgtcgtgagcgcgtggacggacgtacggtacgacggtgttttaatttctccttcgttccacactactccgatgcgtgtcgtcgtcgtctccttgccaccgcctgcatgctgcctatctatctatctgccctctgcgctgttgactgacgcgaagtgatggcagcaagggcactgggtgggaaaacctgtgctagcttgccggcaatggcgcgccgggtgctgccgctgcggtgcaagcgctgcaatgcattcacaactaggcacatgatgtgtttcacagagtctctctgtgagtagtgactaactagggaacccatacagctcgtcccatttcggaggggaaagtcaggcggcagcacatgggatgggcgtggcagaatcggccgcgggcggacaaggggagcagctagatagcgggcgggccagtgctctgctgccgccggagatggaaaggatattcgccgc

SEQ ID NO: 7011 - DNA, 827 bp, Zea mays
ttggtagatcatgttgaagtcgcctgccagcaaccaagggccaacacagagagctctgacctctcttagctcctgcaagaattgtagcttcagatcatcctcttgggggccatagacaccagtgaaccaccaattcctaccctcttgctcacaaactggacagaaaccgaaaatctgtccacacgggaagagattgcatgacagcaggcccctttccaagcaatgaacacgccacctcgagtaccatcagcggggagagccacgaacttgtcaaaagcagacccaagagcagagaggaggagctgtgacgacacgcttgcaatcttggtttcttgaagacacacgatgtcagcgctggaggaaaggacagtgttgcgtacagagtttcgcctggccgtcagattgaggccccccgggtgttccagactaggatggatgacagattcatgaggaacacgaggcacgaccaaaaggacaaaggttcctcagaaaccgatcagcagctccctctccaggacgtcctcatcatgatctgtctgccaaccgaaaatagcagcaagagcagcaagctccacatcagacagaggcgtctcgaataattactatatacaatgtcgtgcaacaaaacgttcacccgtaacgccacgtcgccttcttaatatcagccatctgatatgcatcacacggttgttcctactcttccgcttatctctgctaggctgccctcgctccttttggaagcggcttcgtcgctttttcaccgacgacgccattcttttttcgccgcggcaacatctgtgagactgtgaccgcgtaaggttcctgct

SEQ ID NO: 7012 - DNA, 763 bp, Zea mays
aattcacaggtagaaagcacacctgtgtcttggcattgatccaagactccccccatacatatattccgtggttccttacaagcacagcagttgcctttgggtatgctgcaatctgataaataattctgtatcaaaggcctacatacatctaaaatattcatggaaactctgttatcaagattcaagaatagtattgtaactatagataaaccaaatagtattgtaaaaacaaccaattgggctgataaatttatgatgactaaaccactacagtaactataatcagaggctctgaacaacatcaatcaatataccagcaatttccccatttatcatcaaataatttaaaattaatgtgctagagacatgataatccttgaatcagcttgttataacttataaggctatccctagaggcatgttgtgcagggaatttgtgttcaaatccttatgctcctcaaacccattgcttttttgtactggtctattttggaccaaacttcttcttaatttaatgatgtgcatatctcttgcgcgtccgagaagaaaaaaagatgattgaaagataggagtttgatagcataccgcctcacttagggagtcagtgagctcatactcataaggggtattctcaataataggcactgaccaattcatcatggtagccatgaccctttgattcctttggaacattttccatgtggggtcaacctggcattaagaatcagcattcaggttttctagttcacaaattgagggtttt

SEQ ID NO: 7013 - DNA, 804 bp, Zea mays
atgggaaagtgctttctgcgcctgtagcaaagccatggccaaacaagcctcctaagtgcacggactgtgctcctctgttcatgaaggtttgtgaatgctccctcctttttaatttttctgttgcttctgcttgttttgatctgaaaactctagtttcctttggtgttttgaaggcgtatctgatgagaggagctggggctgtcattcacagccatggaatagagacttgcatcgcaacaatgctcatccctggtgcaaaggagttcagagtaagtcccattccaagtgtattcgatctgatttttagatcaaacacattcacccgcctttattagaaaggttaacgaaagcccaggatccaccgctggggattccagcttacatgaagcaaggattacaggtctagtaacaaccagcaccgctcaactacaaccttgaacacaaaagaaaattctgcacaactaccaaaagttttgccaaaaccagctaactcagactaaactgatactgatcttgtctaacatttcattggccacttccatcgacttgggtttgagcaatggacgccaggtcgtcaacatcatcaccatcttgtgcatgattgttgttggggaggacagcagtttgttgttgaaggcaacgtcattcctggccttcaatctgattaaatttgtgaaatagggttattaacatttatgtgctgatcttttaggtggcattgaacagtccaatgatttttaaatcatattcacagcatacttgttttttgtttgatgcaatttatttcaacaacagcatggaatc

SEQ ID NO: 7014 - DNA, 885 bp, Zea mays
ctgttgcctgcagacaacgctggtatgaacaaggcggcgtccagcggcacatccctcaacaccaagcgcctcgacgacgacacagagaacctcgcccgtgagcaatcatctgtctcgggccatttttcccatgaacaatctgatcgacgtttttttgtgcctaggatcccagtagataaattcgggcacttgtccaccgttgatgtgataaatgatttatatatgttcatgttcacatctgtcgctgttgatgatgttttcttttaagatggattctatacccagtgctctaaggctctcactttattagtaacactagccaaaatttctcttcttaggatttagatgggaaagtaatatctcttgtttgcacaattgttaaattatcatcgtgcatccattgtttctttgtttctggccatttcgttatggcaaatcatggatgttttataaaatgatgctttcttggttggccacttgtttgaaagtctgtggataagttttgtatcctatgacattgatttacttgggggagtaagtttgaaatattgcagtgtttgtgtctataacaattttcttgttgcatcaatcaaccttgataacatttggtactttcaaccaactagccatttgcacaccatcatataatatatttgtttatgttagctgatgagtttccacagacttaattactaagtgggcactgggcatgccttgaacaagtgtcttggtgaattcattgaggctttagtggcattatatttggtggataagcatcttggatgagattctctttggcttggttagtgcacatgataattacaggatatgaatctggtgggaagtctggccaatctctccacggtgtgcatagcatgattcact

SEQ ID NO: 7015 - DNA, 750 bp, Zea mays
acctctgtcaacaaatggaagaatggtgggatagaatctccagtggggtggttgatcttaatcaaaatggctttgattcccttgttattttaggggcttggactgtctggaaacatcgcaataggtgtgtttctagaggggtttcccctactgcggcccgagctgtgttgctagctttagaggaattacattttgggggtttagccggagcacaaggtgttaactttcttttggcccttgtgcaggaggaaggttgaccgtcctgtgtattttttgtgatcttgatcagtcttgctgaaaagggcatgtttgttgtttttttatatctaggattttggttgttggtgtggattttgtgtggttcttttgtaagggagctttccctgtgttttgttctcttctaatataatgatacagagttctgcgtctcgagagaaaaagttcctactaaagtgggtatagttgacacaaatgatgggacaataaggcaatcgttaacatgacagacatgctgcatctacaataagctatttccaatactccgttctccaacaagtaaactatagattaaatgaactttgccaaagaaggccaagacaagggaaaccaggatgtagtcaacccaagtctacagaaaaggaaaagaaattagcccaaccactgtaaatgtaaatccaaaatgaagagctgcccaaaattaatccaaacaagaagcaaattgactggttgggcagcaaaggataaaagttc

SEQ ID NO: 7016 - DNA, 764 bp, Zea mays
aagatgtacaagggcctgcgcacgcgccgcagcctcgccgatggcgccatcatcgccgaggagctgtggtggaagacggtcgactcggtgtacctcaacatcaagtccatctccttcttcgacgaggacaagcaggagaccgccgcgtcccgctggtccagggccggcaagaggatcgccaaggtcggcaaggggctctccaaggacgacaaggcgcagaagctcgcgctccagcactggctcgaagctgtaagcatttcatcaagcgccctcgttcgtctttcttggatttggtagcaactacaatcgtctcatcctctgtttcttcttttcctcgtctcagattgacccgcgccaccgctacggccacaacctgcatctctactacgacatctggtccgccagctccagctgcgagcccttcttctactggctggacgtcggcaacggcagggacttgcatcaccacaagtgtccacggagcaagctcaactcgcagctcatcatgtacctcggaccagtacgtggccggtgcccttgaaataacctttcgttccgcagacttgctcgtctctagctatatatatgctgatctccattgttgttccatctcgagcagaacgagagggcggcgtacgaagtcgtcgtggaggaagggcggctcgtgtacaggcagagcggggacccggtgagcacgaacgaggagtccaagtggatcttcgtgctgagcaccaacaggtcgctgtacgtggggcagaagcgca

SEQ ID NO: 7017 - DNA, 870 bp, Zea mays
acgcggcttcctggcacggcgtcaagcacagcaagtggcaacggcggcgcggctgcaggctgcggtccgctgttccctggcacagcgacttgcatcgctattgcgcgttgaacaccatgtggcggcaaggccttcggcatggttggtcgatcctccactccagttcaccgtcctgatccatagccttcaggacagcaagaacacgtccggttgggtggcaccgtctccaatggaactcgtggcagctcaggccgtaggactggtgagctaccacgtcttggcctttgcaacctggacaaggttgttcacatgggatctatggggcaaccttggcatgataggttctttattttatttgcaaataaactaaagtcgagatgtaaaaggcttctagtagggttgcactttcacatgcagatcaagttagatagcaagggtgttgccatgcactatattacagctcaaggacgagctgtcttcgcagggtggaggatgtcatagggcggcagcccaaagcatgaaggccacaaggataagctcagggttaggattagtggataaagattagataagattgagttagttgggattagattagataagattgagttagttacttggaattagattagataagattgagttagttacttggattagattagataagattgagttagttacttggtggccaagtctttctatctatataaggatgggttgtacctccttaagggggaatcaatcaacgaagaagaattagtctcatatctctctaatagtctagtcccttccaaaccgacttcggccggctatcttcccgacgttgttaatccccctatgaactagggtcttcaacattgcatgtca

SEQ ID NO: 7018 - DNA, 770 bp, Zea mays
gctctgtggcctttcagcacgcttggttggcctgatctttccaaggaggattataagcatttttatccttcaactgttctggagacagggtatgttagttttggcaacattttgatttattttttcttctttcagtagattaatacttgtgttgttgccaagtttctgttctttacattgatgcctggcactttccttcacagccacgatattttgttcttctgggttgcacgaatggtcatgatgggaattgagttcacaggatcagtaccattttcttatgtctatctacatggtcttatccgggatgctgaggtgagatggggcacaatgatgcttatggttcgttgttttcaggggccaataatcatggctattttttttcttgtgatgcaaaagcaacatgatcaaatttctaaataagagttctcctgcgcgttcgagaaaaaaaaatctaaataagttatggttcctagttcataaggggataaacagcgcagggaagatagccggtggagtcggcttgggaggggggggggactagactactagagagattcaagactaattcttcttcattgattgattcctccttaaggaggtacaacccatccttatatagataggaagacttggcgccaagtaactaacacaatcttatctaatataatcccaagtaactaattcaatattatctaatctaattcctagtaactaactcaatcttatttaatctttatacactaatcctaaccctgagcctattcctg

SEQ ID NO: 7019 - DNA, 744 bp, Zea mays
tgcatgcctgcaggaggctgtgcatgggttcctggcgtgacgtccagtgtggcagcggcttgccgtcttcaggctacgacacgtggcttcctggcgcggcgtcaagcacagcaagcagcggcttgccctcttcaggttgcggcacttggcttcctgacgtggcgtcaagcacggcaagcggcgacacggttgcaggctacggtccgccgttccctggtgcagcgacttgcatcggtattgcgcgttgaacaacacgcggcacgtggggcgacaaggccttcagcagggttggccgatccttagccatgtggacagcaagaacaagtctggttgggtggtgctgtctccactggaactcgcggtagctcaggccgtaagactggtgagctgccacgtcttggcctttgcagcctggaagaggttgttcccatgggatccagggtggcatatgttaggttctttattttatttgttaataaattaaagcggagatgtaaaaggcttatagttagggttgcactttcacatgcatatcaagttagacagcaaggttgtttccatgcaccgagaacgagctgtcttcaaagggtgggggaatgtcatgtggtggcagcccagggcatggaggcccatagggataggctcagggttaggattagtgaataaagattagataagattgacttagatactggggatagattagataaaataagattgagttagttacttgagagccgagtc

SEQ ID NO: 7020 - DNA, 739 bp, Zea mays
gctagcttgcatgcctgcagtacatgcagctgtttgacagctgcctactgctgctagctagctgtcagcaacagctaattgtctagaagtctaaagactcatctatactattctagtacattaagcacaagagcacatacattaattctaacctagagccacaatgctattgaaacatttcctctgagatttatcaagtctcctagttgatctcctccaccactctgcgaagttcagctcttccctgctaggagacaattgatccaggcccaaaggggccaggggcccaggaggttatgccaaaactgacgagcaaacacgcaagttgttacaataagttgaattgtctcgtccccctggttacaaaaaaaaaacaccgctctggaagagagagtcctctttgtgccagtcgttcagttgtccaacacttgctcttaatagccaaccccaacataacattttgcattttggaggagcccaagtttttcatactctcttccagggctcaaaactgatcaaaccacaaatgaatgccttgtaacaagacttgaaagagaatctccctgatgcttcaagtttccaggagtgttcatctgtctcttgggttaaggttatatttgccagagcatcccaacgctgtaaatactgctgtaaaccttccaacgataaggctccctggatgttggaaacccagcacctattctcaagggccagggcgaccgtcctgttaaacaagaac

SEQ ID NO: 7021 - DNA, 737 bp, Zea mays
agcattttcccttatattcagtatctaagtttgactgcatagttattgcaggctatttaacatgtcctatatccagtctctttgaagttgaagagacagcacttggctatatcattaggataaagggcctgtttggttggttgtctaacttgccacactttgcctaacttttctgcctaaggttagttcttcaattcaaacgactaaccttaggcaaagtgtggcatagttggccacaaaccaaacagacccaaattatcctctggatgttcttagaagtatagcccttggaactttcaagggtatttaagtgtttggtgcggttgttgtggaagtctcgtttgcttgttatcaacattttccttgttatttgttaaggcaacaagataaaattgaatgttacaaataaagtcattttttcatgcaaccatatctatttaggattccacactgtaacacttgtgtgtatttttatggttgcacttgaaaagttgaaaataagaataatatggagtagcttacttgtacagctctattcatacacttgtcatttactcttccattttttatgtagtcttccatttttttttgtgcatacaatttacaaacaaaatctgtatacatgctactgctttttattcagttcttcagcattattgtttttcacagcttatgcatcttgattttttatggcttaaatactacagctggtaaccattgaatccctaatgtaaccc

SEQ ID NO: 7022 - DNA, 775 bp, Zea mays
acggacggactccggctgggctaggatttggaaggtgcgagcgagtagggagttgtggccagtggtggacacggagggcgacggagcgtgccggcccgcaaggtagccggaggcggtgaggaggcctcgcggactgcgcattggggacagtcggggtcgggagaacgagctttggtgccacttggtaggactctgatgtgtgccaactgcgaaaggacgtctttgagccctggccggtggatgcataatacacatatcttttttatactctatacttcatcgtagtaaaaatcgtaatattgtacgagaattttactagtacaatctggtcaactagtcgctatagtccaatttagtttactattacgagacgtttggatcccttcattttaaaggaattgaaatttactcaataaagtaacttatttagtttagaatttggcattccatcactttccaaagttcagatataagtctatctcaaattcatagggtagaggataggaaataattttatgcatgagtagaatttgtttctattctgtaacttagatgacactcttcgttctattcatctatagtaaaaatgtagcaaataaatatataggacatcttgctaataatagtacacaaatatattttatataaaagcgaattaacttaattaatatatgtctaaattactattattagaatggaattcaattctagtgatccaaaccgggcgtttagttgttttcgaaaagttcgaaaaagatgattgctaatagtttgt

SEQ ID NO: 7023 - DNA, 777 bp, Zea mays
agaaaaaggtttgtatatttattttccagtatcaggaagagcaactcaatacaatggtgtgaaacgtttttgagagctttgagtaatgttgtgtgtcttttagatatgttgtttgaggaagaataaattgggggcacacactacttggctccatgtataatatctggatttgaaaatttgtgctgaatatatccggttcagttaaataccagcagacgacccaaacttataggaaaataccactcatatctccattaaggcgatgctttatctcagtgccaattgttgctagtctactcctttgttccacccccttctctgttcaccaccgaagttgtgacccaattttgtggttatgcccatgtagctcctgttggtctgagtggctgagggtgagaggaatgctatgaaggattgcctactaagttgacaagcttttggaggttgtcaaagtacatatttttgttcatgtgttttgggtgaaaatatacataatagagaactgtttatggaaatcaacagggttccttgttctggtttttgcctcattctggtgggtttactgaagtcctgaatcctgaaccaatagttgccctccgaaatcctaatctaggaacaatttgattgcataaaaccaatttcgtcagcaacctccatatctcactccctattttaaactccactctgtaaacagtgtttccggagatggcctaagtagattccgtgtataccagaagctgctgtaaaagctttacaatcatggttggtaaagaatga

SEQ ID NO: 7024 - DNA, 784 bp, Zea mays
gcagccacggcggccgctacgaaccctgcggccccgacggcgagacgcgcgtcctcgtcgtgccgcgcgcggtgtcctttcgagacctgggggtgcggctgacggagatggccggcggctcggtggaggaggtgcgcgccatcaggccccgcctcgcggacgagggcctcaaccctcgaagacgtcatcgtgtcagtcaccagcgaccaggagatcgggctcatgcgcgacgagtacgacagcctgcgcgccacgcggccagccgcgaggttccgggtcttcgtcaccacctccgccggctcaaatagagcgacgacggtcggactcccacagtcccaccccttgcgccgtcgatgcgacgcgtacagagcgagcaggcaatcgccgcgcgagcgcagcagcaacaccgggcgacgcggcacgtccacagcgcgcaggagctcgcgggaggtgtccacatgcagcccctccttccaccaccaacgccaccagcactgctgctgctcctgccatcgccgtgaccggtacacgcccgcacgtccgacgtacgcagtgctaccctacatgtagccacaacgtcggtgtccgcgacgacggtggcagagcgggtggcggcggtttccactgaagcagcaaccgcgagggagaaggcggtgagcagagacgtcgatgcggtcgtggagagcaaaaaagcgtgatgtgggagttggagtgagacgtgacaagatcagggcttagatcttggtgatctcgttgagtttttatcaccattgactacatgtat

SEQ ID NO: 7025 - DNA, 777 bp, Zea mays
gatcatgctgctgctttggaaaattagtgagagtttacattgcttgaaacgtgtattcagctagatgatccttttcactttcttaatttctttccttagaaattttatttaggtccccttatcattgtatcagctatgcgtttcgccaaaaaaaaaagatgtgtcgtttatatactgtctccgccgtggtttcataaaatttacttgtattggtcaacgatacaagtgcggtgagttggcaattattattcgataaaaaaactgataaaatttactgcaacagtcacgcgagagcgcatggtctggttcgagtgcacaacctcactcttacccctaccacgttagctctcgacttcactcacccctaatattccagtgcacaagcttctatagccatatcagtttttttatttcagaactaagtaattcacgcgatttattcaacgttcagaaatcacacaacataattttttattgaattaaaaactacaaagtgcatgataattaaattaaaattacatgataattaaaaagtacataaatctaatcgaactgctcgatctaatcatcatcttcatgagaaatttgtgatgtatcatagagaaattggagatgaaatttgtgatttttttttgcatttctttgaatgttaaaaatagtgagttgcaacggctagcacatgtggaccaatcaaaagtttgttgcccacaacaaatatactttgccaagtgtcaagaaaaagacgctcgacaaaatataggtttgacgagtgtttgc

SEQ ID NO: 7026 - DNA, 843 bp, Zea mays
tttgcatgcctgcagccactgctgccctgcctgcctgctggagtccctcatgcgtggaatgagctgccttctttacgccttcgtccaaatgtccattccaatggcaaaggaggaagcttttcattcccaaatgtccatccaatggcaaagaaggaagcttttcattcccaaatgtccatccaatggcaggccttgtttatgaggttgagcttattggattccatgatgttaaagaggacaaagctaaatctgaatttggccagaaagaatcggcgagggaagatttcctaaaagtgaagtactgagatccatcgggagcttcgtttgctcgctgagaaagacaaggctctgtaccagaagcagatggagctctctacaaaggcaagcacaatatgattttggagaggcaagcacaaaccctcactatctcaacactatgcagtaagtagcctcttccccatttcacggaacagattgttagactcttctagcaacccttttgatgagaaataaaacaaaaaaaaacaggctcaggttaacaatagcaacggataaagggcacagtatgatttcattgttccatctgcccatttaggtggcacataatcgagttttaaatcgctaagcaagtcctatgatgtggcaccatagggaaaaactgctcatttgtaaagaaagctataggattatacatatagccaacaaattccggcctcgtcaaaaaaaaaaatcggcaaagtatgccctagtcgtccagctcaatgatcttcacaaccgatgaatctcccaccttctggcaaacgacaacacggtcatgggacttgatcacaccacatgccttgc

SEQ ID NO: 7027 - DNA, 788 bp, Zea mays
agaaatatacattaattagcttaaccttgccaactgcaagtgcactgtactattattaatgatagcgggaaaaaaggaaatataccagctcgccatcaaaatcatctgatatgaacactcttttgacatacaatcggatgtttttggtctttggattcattatctcctcattactaagaggcgccatccctgggacatagagaacactccgaaattccacctctccctgtttagaatatacattgtgttcatatgtttcatgtgcaaaagtaaaagaaaaagatgtgaacttcgaaaccccacacacctcagtggtgaagtgagtgtaagcaagcggatccagaaactcattaaatgtcttcttgtagaattcattgtactcagttttctcaacttcctttggattcctcatctgcatggaacaaagtaacaaacttcgatatctccaacagcaaatggaaaacctaagtttgtaaatgtacttctctgacatacttgacatgacttagctaggaatatagagatcatggtactacatcaattggggtcagcttacccatatgggcttcgtttcattagccaattcccagtcccagtacttctcagttatggttttcttctttttctgcttttcaccctataacagaagaggatacatgcaaggtgatacagcagtaacagagacaccaaactcgaactcaaataaaaaattgaactcacacagaactaacctcagtagcctcttcactttttgattcttcagtagcctcttcacccctttgattctt

SEQ ID NO: 7028 - DNA, 941 bp, Zea mays
ggttctggatcctaaaatggaactgtcaagcattcatcaatgctagttatttgaattttgttcatttagattcaagggttctggtacttttcatggtttagatcacaggttaaaatgtttttagagcctctcctttttgttataaggtcatcttctgtacttttactaatgtaaattagtaaatattctactttgcctttctgtactgttgattttgctcttcctatgtcgtctaatattttaattttgtgtcctatagcttaatacgggagacaacagtgtggctgaaagtactggtgttaagttaaagcctggaaatgcaggtttacttgggtaagctatctaacgtcttggctgccaaaaggaaataaataatgtttataatcagtgcctgttttggttgactgccacactttgccacagtttgattcaattgcttagttcactgccacacttggcgtgcctctgaaaatatttaccttccatcatagacatgttcttgtcacaccttgcgtaagccgtaaggtgtggtgagcaaattgtttgctacaccttagacaaagtttggcaagtggaaaaagtttggcaatgtagaggtagggaaccacagatcaaatcatctatctatgcttaatatttgtagctgaaagcttcagccaatgaataatggacttcagtatcagtaataaatttacccacatttgtgattttttttaaaaaaaatatgctgggtttaagcagtaaccacgtactgaatgataggatgttttaatttccctgtttctactggaatggttaattaaaactcctctggaataccaggggggcccatgaaattcctgttaccacaaaaagggttaaaacctttttgaccccatgcccccaatatatttacctgcaaaaggccccaaataatttttcaaagccattaacacaaacct

SEQ ID NO: 7029 - DNA, 773 bp, Zea mays
attttactgcacttttaggtggtgcagcagctataggaccccacaaaggatcgtcttctgactttggcgctttcagtgggtttggtttagatgagtttgcaactgcatttgagaaaatcaaaaggaaaaccggcaaaattaaatgatcatcttatcaatctagtttggtacgatcacaaacaaggacgtaaaagatggaaatgcgaacatatgtgaagttgacacgtgggtaaatttcatacttgattatgtttgcaatagtacaattgtaatgaaagatgaccatgcgactgcatgaaacaaaacaatacactcgacgaaagccagcttacccggttgctttggttgcaccactggacgtttttgagcagcatgtatgttggatagaagagatggggatggcttgtcctcaaatgggtctacatcatcccatccatctttatcgctactattctcctcatggatattaccatcctcaagctcaccccacccatctactgacgaccttgctgatgctgatgcagcttgatcaagcgaggtggatgtggatggtgcatacgctagtgtggaagcctgagtgtctggcaatcgaattgataatttgatatactcaattgcagatcttttaaagtgaacagaactagtatagttgcactcaattagtccacaaaaaaaaagctaggatagatgttgcaatggggcatgagagtactaataacaggatactacaaggttaggattcaaaacatataacaacacatggcattatcaac

SEQ ID NO: 7030 - DNA, 795 bp, Zea mays
cttgcatgcctgcagccgatcccgccgggagcacgaccgattacgatgaacggcgccgcggcaccggagcgctcgccctcaccctcgcccccgcctccggcccaggcccaggcccaggcgccgccgtcgccctctccggctcagccgctcgagtggaggttctcccaggtgttcggtgagcgcagcgccggggaggaagtccaggaaggtaccgatcgatcccttctactccatgtcctgcgcctttgtgtcactcgttgttgcttcctgctggatcttagtgcttctgtgctccggagctcggtcggaggctaggggccgttaatgggcggctgctgttgtgttggttggaggatcctgcttagatcggcccaggaattagtggtggcttcggatgggatgcgttaaatctccatgatgcggaatttactgccttccagatcagtgcaaatatagtcttgactggtaggtgcataccagtaccactgtgccattgagaggcgcagctgaggccttccataggtggcagaagggtagaatgcatacaccaaggagtattgcttagtgctgtagatgggattcttactactatgctattgaaattacatatttggctggctagccagacaatacttgctgtcattgactcattgtatatatgtggaacaaacaggagctatgtttttctagttctggcttggtgagatggggcgatgctgcacatgttagtgcttttgacacttaggattgttgaatgctccatgggacgtggtcactagctgaccagtttttgtt

SEQ ID NO: 7031 - DNA, 866 bp, Zea mays
  unsure (1)..(866): unsure at all n locations
cttgcatgcctgcagatcatatagagatatacatgaggttaatttccactgaactgcatccctgtataagcatgtccgtttctaccaaccttgcagccctcccagaagaggtgaagcaaatgatcaccgaagccttaactttgatagcagctcgcacctaagaaatagtaacacgactatcttagactacaaaaaattgtggtttgcaaacattaatagaaaaaagattcgaatctgaaaagcatgtagatgatagatcttacagctgaggaagcaatggactccaaatgggtcatgggttctccgacatatttcacagtttgcttgaagtataaatcttggttgaataccttctcagcctgtaagacaattgacaaacatgtataattaaatcaatgacggcaagtcagatgcagcgcccaaaaaaagacaccaaattcgcgtaaaatagcaataattgttgaaaatgcaaccctatctagaaaacataacagaaatttcacctcagcacaaattctgcccactgtcgaaatagtctcaactggatataaacctcgaagagtctcagcaccaaggagaatggcatcactccctgcaatcaaaatcaatcgtgagtcatgattgaacttccgttttttagtgcactaatgatcagctgcatatcaggctaaaagagcccaagtataaccaagatttttgaagaanaaaacaacagaaatcgttgacaacttaccatcaagtactgcatttgccacatcagttgcctccgctcgagtaggccctgaggttgtcagtcatactgtccacaacacgagtgacaacagcaggcttttcagccatgttgcacttgtgaagaacagattttt

SEQ ID NO: 7032 - DNA, 869 bp, Zea mays
tttgcatgcctgcagaaggaacttgaaggtgaggtgaagtttcttagagaatcgaatgcggacttaaccatacaactaaacaggactcaagagtcaaatatagagcttctttctattcttcaggaactggaggaaaccattgaagaacagagagttgaaatatctaagatttcgaaggtcaagcagactgctgatcctgagaatgggcttttagtaaaagaagacaaagaatgggctaagaaactgtcaatgaaagacgatgaaatcacagttctgagggagaaattggatcgggctctcaacattggaaatgcaggtggtgctggttccaatgccatttatcttgaattggagaaagaaaatgaaattttaagggctaaaatacaagagcttgagaaggactgctctgaactaacagatgaaaatttggagcttatatataagctgaaagaaaatgggctcacaaaaggtcaggttccacgtatttcaaacaacaatgagctgcaatttgaaaagcttacatcccggattcgtcaactggaggaggaacttaggaataaggaaatgttaagagacgacagtttttctgagtcatcaacgtctaatgcagatgagttacagagaaaatgtgctgaccttgagctgaagctgctaaattttaggtctcaaacctgtgagctggaagaaaagttccaaaaaagccaagaggaactggaacaaagaaatctcgagttatcccaactgagaaaaaagctaaaccggttacattctactggacctggaagttttttgaatctggtccgacatggtaagtacccattcttgaacaagcatatcttagaggatcctaaaccttgaaacagaatacc

SEQ ID NO: 7033 - DNA, 796 bp, Zea mays
agaccaaatctgaagagaatctgcatagcatagttccttctactaaatactaatgctcctatttagttaactgtcattaactaaagaaaaaatggcatgcaaggtttaaacgtaaatcgtctgcattcatcatctctgtcaatcagtcaacagaaagtgtacaacatgcgactggtctggaaattgttgtctgttctaaatgttgcttccgttgctaatatgccttgagagcatctccacatggaaaactcaacagctcaacaattatttgtcctcctgcacaggagtaaaaagaagcaagaaaactcttgcaaatattttgtcctcagctcgtggcatatgaaactctttggttcttcaactgtggtgttatttaatattctctctcgttatggggaacaccgtagaactctgccaggtactccaaagcttcatgattcccatcacaaaccttccaaagtgatgcaacttcgcccggagcaaccgtgccccactcctggcagtcattcagaaattccaaaagcttggagtaataagaatcgtagttgagaagcaagaccgggaccgggagcgctgacccgatcctctctagttgaatcagcgccaagatctcaaacagctcgtccagcgtcccaacccctcctggcagcgcaaccacagcggttctgtcagtagagctgctccgcaccgcagcatccaccaggccatgcttcctcgcagagaagaacctgaaattcagcttagcgcatagcgatcaccatgtctcataagctgtggtgaatcttattttgcatcc

SEQ ID NO: 7034 - DNA, 894 bp, Zea mays
agtttgcatgcctgcaggcacacggtgatgataaagaaaatgtacccaatggtaatacaaatttgcaagtcaaggaaacacacaatgatgaagacgatggaactggatctgatgggtttgaactgatagatgtgaaggaaaactttgactcagcaaaagtgggggaagaaatcgctgcttcaagaagtactacggttgatacatctcctgttacagaacaaagtgaaacacaagaagaaaaaataacagcacctgaagaacaatcagttgcagcaaacacaagacatgtagagtcctcaatgttgaaccaacaaacagaacagttggaaaagctgacaaggcgtattgaggagcttgaatctgaaaaagataaactagtaaaggacttgacagaagcagaaaacaaacagagcatgcactacagttctctacaagaagctcaaagctctctttctatgaaagataaggagctggctgaagcaacagagtcgctgaaggagctgggttctgagcttgaaacctcaaaaaagagggttcaagaaattgaagctgaattggattcatcagcagataagcttcgtaaacttgaagagctgaaggatgaaagaagcttgcatgctgcacaggaggcgaagagggcttcagaacttgataagatgctggaactggcacagtcaaacatgaaagaaatggaaaaacatattagcagtcttcaagaggaggtaaagggtcatcaagataaggccactgaccatcagcaaatagaagaatcgctgagaaacacaatctcagaactcaaggtggtacaagaggcactggagctgtcaaagtcacaagtggcagatttggaacaaaagcttgcctcccaggatgctgatatcagtaaactaactg

SEQ ID NO: 7035 - DNA, 896 bp, Zea mays
ctgacaaatatcttaatccatgtcatgattacagatggtctcatttaacgcagtgaaccttagacacttgactagttgactctgaatgaatggtgcctgaaacaagcaagtgttgcaggtaacaaagagttagtgacattcaggacaagacaaattataatggttaaacaaatgagttgcgacaataatgaaaaccacaaagataaaaaaaacctcaacttcatgcgacaggtatgaatggctcttccaatttccaaagccctgtacatgtttatctagacatgctagatttagcatggcgaatccatttccagatacatacatgtcacaatagcagatataagtgtagaccccagacatcttaaaatgaaaaccattaggaatagcactggggggatttttctatcaaaaaaagtgctgtaaacactttgcaacagcccaattcaccagtaatctccacatgaacagctgccactgttaaaatggtgaaatctgtacacatctcgtaatacaatttctcttcttgtgacttcagaggtaaatttcatccaactgtggcagtcatcacatacacgaaggttcttaatcactcgaagaggaatacaaggaggcaaagtcattaacccaaaagcaacagctaacttctcactatggacaaaagcagtagggtctttctgctcttgctctttttcatgaaacaaattagggttctcttgcttgtatcctattttggataacctatcatttagctcagacaaaaacttgtatatctgatcggacaaggggttgcacccgatcaccaacaaagaatgcatggactgcattctttacttcaaatcccacttcgaccttggttccttttctaattccctctggcttttcataaatctttctga

SEQ ID NO: 7036 - DNA, 801 bp, Zea mays
atcactcaccgctgcctccgtcgtggagcctcgacacgttcgacatacttgatgtcactcttggaacacacaactacgagtctgaggttgcgcttacgcttccaaagccgaccggcaatggcaatggcagtgccgctatcggcgtcggcgcgaggaaatgcgctaagagaggcgacagcatctggggtgcgtggttcttcttcaatcactacttcaagcctgcacttgtggagaagtcaaaggggaagatggtgcgagacgcatccaggaacatctcgggctttgacaagtctgatctacgtcttgatgtcttcctggtgcagcatgacatggagaacatgtacatgtgggttttcaaggagcggcccgacaatgcccttgggaagatgcagctccggagcttcatgaatgggcattccaagcatggggagccgtctttcccgttcagtgccgataagggctttgccaggtcacaccgcatgcagcgaaagcactaccgtgggctgtcaaacccgcagtgccttcatgggattgagatcgtggcctcgccaaatttgtccgcagttcttgagtctgacttgaagaggtgggctgaactgacaggcagggaacataatttttcagtaccatctgaagccagtgactttgagtcatggaggaatcttcccagcactgattttgaacttgacaggccacatccaccggccgcaaagagtgccactcatggccagaagaaggggattgaatggttcaggtctcaacctttcaactccaccatcatcagacgatgggatggacctt

SEQ ID NO: 7037 - DNA, 769 bp, Zea mays
ttcccaatttcactagaagttttggcaccgaaatgctccctgaagaaccgagacttccatcctggtaagcctagtcttatctgcaatagacatttaaagaattgtagctgggccacagtagaaatatttatccagcagaagggcatcactaacactgtcatatgggttttcttcattaaaaaggagatcatctaatttttgtctcagttctggtctttcgctttctggagcttcacgcaacatttcatgatatgtctccagcaacgaatcctacaggacagaaacaaatacactgagaatgacaataaattccaccttgcagcttagggctggtaatggatcacgattcaaatgattcttcacgattgatttgaggcattaattaattttagttaatataatgaatagaaataaagctcgatccaaataatccgatccttgaattttatagcgtaaaatttaccccctacttgcagcacaacactattgactagagcgtcaacgtacctgtttcagatcatatcttttgaggaaaattttatcttcatacatggagagttcatgaaaaaatgtttccagccttgagacttccagatatgcaccatacttatctttgacctgttttcagtgtcaacgaacctaggtcaccgggtaattcaatgggtaatcattgatgaaataaaagactagagctggaattcttcaggtactttgtctgtgttggtaatataccctcccatttttgtgaaggttgttttgacacttcgat

SEQ ID NO: 7038 - DNA, 788 bp, Zea mays
cgcgcctataaggctatatccagcaccatccttatttttatattcaaacttcactctacagtataaaaactgcaaaacaatattttagatgatcatataggtaaactaatggagacgtctaatgcataggccaatacaagtgtgacatacatgtacaatcgtgaaactttacaccatagggttcaataataaagagaaaataagggcatctcggtgcaacgcagcgggcagtaggcgtacaggaatgtggcagggcactggaacaaggccaatgaccgacctacggatcgcacaacttgcatgaagctgttagttgttgtagacacagaacggtcagcatgggtgtgttgcaataaggaatgggcgtcagaaagtataacggtgctagcaaaagcaagttttaggtaatcttacctactatccatgtctgattatacgctcattggtccatcaactccagccagccagtccacgagggagctttagagaaagactgtttcctcctgattccttctatagcagagaagttgccgctggcctgataccataaatcaaagtattcagtcaagatgtcagctactgaaatgctttaaacgaccatatacgataaagttcataactgaaatatgaaaggtaacataataaataaagaacaaaactagcttagaaaagtttagaacaaacactagaaaacttcgatgccaggtcagtggcctcacaaacatggctaaagttcaaatagattacacaaatgtcaagcaaacaaaccttgagacactgcccgcgat

SEQ ID NO: 7039 - DNA, 809 bp, Zea mays
aaaaatagaaaaagctattattcgtaatattatgtaatacgtacacgcaagggcctcctcgaaatcttgtttggaaatgtagtagagtagtcgaagtagtagtaggaatgtaggatcacctagtaggaaagatgcttggcacaagtctgatctgctttggtatagacttgtgtctagttttatttttctgttgaagcaccttttaatgatacttttcctttgaatgttggtattaatttgatacctctttgcaattattgtatgtgccacaatttaatgtctgttgatttctttgcggttcaggagcttgttggagtttttccgcaacaggtgctatggaaggaataaacaaaataaagacaggctctctggtcagtctttctgaacaggaactaattgactgtgacagatcttataatagtggctgtggtggtggcctcatggattatgcttataagtttgtgataaaaaatggtggaattgacacagaggaggactacccctatcgtgaagcagatgggacatgtaacaagaacaaggtaacatggggttgtataaaagtagcttcacaaactgtttaatgcaccatgccatgtttatgtgatgtgtttgcttatattacagctgaaaaagcgagttgtgactattgatggttacactgatgtaccttccaacaaagaagatttgttacttcaggctgttgcccagcaacctgttagtgtaggaatatgtggtagcgctagagcatttcagttattctaccaggttgcagatacataattaagtttctcctgtcactaaacatgtga

SEQ ID NO: 7040 - DNA, 774 bp, Zea mays
atcttcgcaacacaaaagacgagtggaattaacccctggggggtgtgttaagtgaatggtcattcgaaataagttttcacggacggtttcttaacacgatcgtgagttcttcctcccaacaggaacggtagctcgcaactaactcgcattggaggcgattttagaggtcagattttatatttcgcagattcgagtggtggaaattgaactctctcttcgatgaaaaacttctaagtgatatatctgatcccgatatggtgtcaagtaacttttataaactgcataacaaacatccatcagataatatctcactatacacaaacaaataaactcagaaaaacatttactataacacaataaagacaatgtatggaatgccaataatatatatatatatatatatatatatatatatatatatatatatatatatataatgtggataattcgcttctcctatgcaattcctgagtgacattcgcactatctgtggcaagagctataacctatttatatatattgcgctgaactgtataatctcgatgccatatgtcccaacgttaaccctaggatccaaatgatgatcgtgaaattttaataaaaagctaaaatataaaacgggcggcagggcgccaatcattcaacgcattctagaacgaaaggcgtattttgaattttctacacgacagggacatccgcatccggcccggcctttcggctttccgctgatcgctgtcacgggtaatccacccagtctcatctcgtcagtcgctt

SEQ ID NO: 7041 - DNA, 794 bp, Zea mays
aagggaatcaggatcgcactgggcctcttctcaagagaaaatcaaatgattttggatgggagtgggggaaggctatgtgatccaaatgacaagactaaagtcaagtgccttatttgtggccatgagagctcaggaggcattcatcaattcaagcaacaccttgcacacaaagtgactgatgtgaagtattgtgcaaaggtatcgccatatgttaaagagaagtgcaaagaagatcttgagggaacttaaaaaagaaaagggacaagctgattgaaaagggaacactaaaatagaaaatgaacattaacaaagagaagaggacaaaaggcaaggaattgttgctgtaagacccctttaaaacccatcttttagctatataattgaatttttacaatatttgcagttgcaagaactcttaattgcgcttaagctttttcacccatcaagcgctcgcttagcgcttagggcttttttgaaccttgtcctcagttaacaagaagtgaaactggcaaatgaaaattgtatgactaagaaagtaaacacacgacaattactataactatatgagattagagtcttgatcaacttcaatgaaatcaaggcattcagcattttcacctcacaatcaatgaatttagaattattagccgagcttagcctccttagaactggaacttaaagttctcccatttagctctttatctatatactataggtcacttttagaaagattgaagagatatagtaaccaagagaaaataataattgtgcatgggtatagtttttttttgtct

SEQ ID NO: 7042 - DNA, 832 bp, Zea mays
agcctgcacattgatgaccaaacatcagttctcataaacaaaaaacgctaactgaaactgagtggtacactggcatggcataaaaaatttatcatacatttatcatcaattctcgagcttctcgcagctcatcactgatcttgctttccctactgattatatcttggttgtagttttccgcatcgttcagttcttcgatcttctctttgagctcctcctttagtttagccattttctctctcgatatcgggtcttcatcacctggcttgagctccatcaggtgcagtttcccgctcaagtgctttatttccagttcaagtttctgcctcatctccaactgagtgttcaacctcaaaaaatcgtctagaatagtttttgtttctctctacagtttccacagtaaaaccaaacaagacaaatgtcattcaaaagaaaaccgcatgcaagcacatcaagggaacagggctaaccgtttgtttatccacaagcttttgaacattttcaccagctttctcttgctccaatgcagccaacctaagatgactggtcctcattgcattctgtacagcagaagtcaaaagtatgttatacaagctgtacaatctctgcatatgagtggcataatttccattcagctttcttctgctattattttgactgacaagaacaataaaatgattggttaatccattctatataataacacaaacaatagggggttatttcgattaagatacaaagtcttgaaaatttaaaaaaaggtttgaaacaaaaaaaaaagttttagaccggattgaacccttttgcaaaaatcaccccttaataaaaattg

SEQ ID NO: 7043 - DNA, 825 bp, Zea mays
ttttattcgagtttgtctccgttctcgcttcctctcctctcctttggatttgtggaagaaccatcgagttctttagttgtgtttgctgtttcggtttgttgggtggagagatacactctttgaatcactgcatacgccatgttggtgcagtttttgatcgtgatccgagttgatctcagtttgcgttcatttgagaaaactccatccttctcgggaaatctgatctgcgcatagagttttgttttgctcggattgaaacttcacgaatcttctttccccttgcgcaaacttcctttgaaatttgatgcaattctgtgtgttttttactgcgcggcactgccgcccctgtgagcggcattgccgctgcccggcattgtcgcccctccgcgtggcactgccgcttgacctaccttttgtttttagctctgaacttttgcagacagtttggcaagttttcgagtagcagtttggtatattccattgacactggattgagtattactgtgttacatggtttcagtcgtcccgtggggttgcgttgaagtctgggattggaagtcacagtgctgttctcgagagagaatttgaagtggctcccattcaccccccctctggtcgcctcaccggtccttcacatatggagtgccaccatccgtccttaatgacataacacaggacctctccgaggtcatccaatagttgaccactttaaggtgcagcaggtcgtcgtcttctcatgactggcaccatgggagccaccaggtgtcatcatcggcgggcttcgtagccctggattttccctccggatgacggggtatgggatga

SEQ ID NO: 7044 - DNA, 796 bp, Zea mays
gcgccggccggagcggcggagtggcggtggcgcgagctgttccacgagcacctcaaccccaccgacgaggccgcgtggatggacctcatgccgccgcctggcgccgcggctgcggcgcaacaccagcagcaccaccgccaggaggagctcgactgggtgatgctctaccggtcgctcaagggccagcagcagcagcagccggtggggggcggcaccgccgcagccgggagcacgccgttcctggaggaggtgtccctgcacgacgtgcgcctggaccccgacggcgacgtggcgtacgggcgcgcgcagcagacgaacctcgagtacctgctgctgctggacgtggaccgcctcgtctggagcttccgctcccaggcggggctgccggcgcccggaaccccctacggcggctgggagaagcctgacagcgagctcaggggccacttcgtcggtacgtgctctgtatccctctcctgtccgccgaaccatgcacatgcagagatgctccggcgtcacgctctctctctcgtccggacccggacacggccattacttcattacttggtggtgctccggacgccagccgagcagattgatcatccatgggcatggattttcccccaaagtggatgctgtcggccttgtccaaatagcacggcagtgcgacatgggagtggaaaggctggtgattattgtagttgtagggtatttcactgtctcatctcgtgcctcggtgttggcaagtgagcaagacgccctcatgaaaatattgacagggccgacattggagtagaag

SEQ ID NO: 7045 - DNA, 777 bp, Zea mays
agatgtgcctagcgaatctctccgtttgctattgtcttgaccttgcagattccagccgaggttgtgaagggcacatctttgtagcacgccacgagctcaccgttactgtgcagctcggcggccagcttctcccacgtcttgctcttgccactgagggaagcctcaggctcccccgagtacccagcaaaggtaacacgctcgcccacggcagcagattcgggtggctccaccaactcaacctttacaagcgtagtcggaaatcaaaatgactggtactgtgctgtcttacattgatggtttccaattgagagctaaaaatggttcggtgtgaagttaactgtatttgaaggttaatatagatgactcaccttcgtgtggtcctcattcgatgcagccaaaaccattgcatgtgattttataccacgcattgccacaggtttcagattgcagagtacgcaaactttccggttctgctgatccatagtagatgttaagtgatacagggcatcaaaagacagtatctagaaagatcaaaatgatgcttagaaagggcaacctgcatttcttcgagaggtatgaatttgacgaggccactgaccactgttcttggtgtgtcctctccaacatcaatctcctccacgtaaagggaatcagcatctggatgcttctctgcttttctgataaggcccactctaatatccaattttgcaaccgtaatatcagcatcagctgtcttcgatttcgaaccaccagaatggttctttggtcccttttttg

SEQ ID NO: 7046 - DNA, 769 bp, Zea mays
ttcttttagtgaaactgcaccaccctgcaaagaccgaagtatgagataagttaagtaataagcaacacagggtgctgccaaaacaaaaactgtcaaaggagaaaggtggaaacagatggttgttcacaagcacatgggagccaaacaatgttgggctgacaaacaagcagttatataatcagttgatcaatccagggaaaatacattcagtaaatatagaaccccactagcattctatctcgacatgcaagctgtccacctcggcagtccactatcacatgtaattacagctcattagcacatgcaattatgatatccacgccatcacgacacatcacccactaacatgcatttagttgtccacatccgtgccacaccatccacaacattatctataatagtttatcattttatataagtaattatatgtattctaatttacttataatagtttatcctttcaaagaagtaaccatatttattctaatttcattccaaattaacagcaattcctacaacaacgtgtgggtatgctcctagttatatctactgtagaacacaatactattggtgcatctatattccagagatgtctcacagtttgaagcaaaaggtcccccagataccagatatctatatcctacttaatcatgggccagaaacaaaataaattcaagtagcttggattaattgagaaagcaaatcaattcaatgtcatttttaatgcaaaaagtataagaaccttaccaattttttcgaaatagcatgg

SEQ ID NO: 7047 - DNA, 816 bp, Zea mays
atagtggtggtgaacttgctgaagtaaagggcggcattcaggagtgcctaatccaaggtctcaacactgggacgttggatttacaagtcaatggctggggccataaagtaaggctgttatctttaactccaaaaataaagccatttcctcgcaagcacgaatgccatcgtgtgggacctgatcacctctacgcttctttacaaataggctgcactagaaggtgagtacaaggagatctactcagaaaaaggtttgggcaaagttcagtggaaaccggccgagaacgaccgggcagccacttggtataaggtaagttgaaccacgaatacgagcactatagattttattcagttttggttgcaaccctcaccctcggtgtcactatgttcactgccatgccagagatactttgatgagccagatggagatgatcccgttgtacttgacatgagctcaatgagcaagggaatgatttttgtgaatggcgaaggagtgggtagatactgggtctcataccgaactcttgctggaactccttctcaagcagtgtaagtctgtggagttaaccttattgaggcaggtcgtatactgttcttggccaacaagcttgacaacaaaaggtcttttcatttgcccctcccactctcccttcaggtaccatatcccgcgtcctttcttgaaatccaaggacaaccttttggttatcttcgaggaggagatgggcaagccggacggcatcctcgtgcagaccgtgacgagagacgacatatgcctggttatcttcgagcacaacccgggacaaataaagacgtggga

SEQ ID NO: 7048 - DNA, 831 bp, Zea mays
aagcacatcaacatctgagaatcacttcatccgtgattgtgtcgatggcagatagatcgtcctcgagttcgtcgacacagtcagcagcctgcggacgtcctcaaaacctcttaggacctgttcgtttcgcatggttcgttgtttcgcatgttgtttcgcatggaatgaatgggtggaataaatctggtttggattccttcaataattactataagttttggagaattgaaattaatcctggtctgttccagcagaaacgaacgggccctcaagtgtcttcgattcttgggaacgattgtaagataattcaacatctacccttcactcattgcatgatgattattcaacatcggtctcaggaatttcagatgaatcataaatcatatagaaaattgacaggaatcagttcattttcacagaaaaaaatacagcaaacggaataatccccggattccaaaggggaccacctatatatattgtgacggttacctgaaacaacacgacatggaaggaaagaggggggaacacacatatttttcagatcagcatctacccttcactcatttcatgttagttcccgatcaagcacgttccaaccacatttcaattgcaatggcagaccaatgggtcataagcatcagtgccaaaccgaaggggacgaacaaacaaacgagctgaaacgtcaattagcagcatccgtcttgttctcaggcaccccttcttgcccgtcttccgaattctaacctggcacccccttagcgtgggcagttcgtttgatttggccagtttgattgtctccgcgccccgtaccacctggtggggaatccccct

SEQ ID NO: 7049 - DNA, 809 bp, Zea mays
atcttgcatgcctgcagaacagcagcctcttgccggcttcgagcatcgaggagaagtggcctgtagcccacatcgggaggagcacgatggttgggctcggcatgtcggcgtctaatctttccctccacgctggtgtgtgtcttaccggcgccgaataacattagccagttggttatatcaactattgaaggccattgattcatctctgtctggcccattcgtttcctcatttcctgtgatgggcagacaatggccttgtttggtacaactgctgcttgttgaaaaagcagcttatctgataagctggtaaaaagcagcttctgtttgttggctgcttttagttcattttgagaatcagctgaactaataagctgctgcagaagctgtctgtttggcagaacttcggcttaaatttgtgaagaagctaaaaataagctgtgccaaacagggccaataatgtatttagagggcgtttggactattaccgcatgattggttaccctcacattctattatgaatcatcgtgtgcgttaactttggtcgagcgtatgtgtgtttggttgcatttacgcgagaaacgatggctgcatgagtggatgtaaaaaaatcatttatatgcatctacatatacgtcagaaatgactgtatctggccagctaggctcacatgggactggatatgcgggcgcagtaaacgaatcagccgtttagactatctttaacaggttatctatccttatattcatatttaaactctactctacgaacaatgcaacctacaaggtaaaacaatgcttaatgcaacctac

SEQ ID NO: 7050 - DNA, 764 bp, Zea mays
aacgccgtggaggagggtggctcatcctactcttcactacgaaggctatcagagaagatatgtaaagtcgacaagaacctatgagtctgacgatgagaggcaattttacatcacattctttattgctgtaaactagcagtaagagaggatgtgattgattaaggttgagaataaattcttatcattgaatataaattagatgaatgatatattttatctaaaaataaagtaaaaatcaaacacctataatttggcaatttctattatatatatatttcaagtgttcatagatgcttagaccatagagccttggccttgtgtaattgtgtttggtacttaggtatcacgtatctctgtcgttaccttcaaataaaaagtgtaataagggggctgttgaaatcagatgtctaaatttgaatttgagtttcttcagtgagatggctattatatattctctccgctctaaaatattattcatacaatattatatatatatatatatgtattatatatgtatatagatttattgtcatctattgaacatggacacaaaaaaaataaagaggtagaatgaaccatatattaagacagagaatataatctagatagataatattctgtgcatacgaaagattagtacacacgtgcatttatggaatcttgatctttaaaatcaagtctctccggcacttatcctactcagtagtcagtactcactctctatcagtacattctacgttcatatatatacactctgctattaa

SEQ ID NO: 7051 - DNA, 845 bp, Zea mays
cgtcttgcatgaccatgcagttcggcaacgactacgtcctggggtactggccgtcgttcctcttctcgtacctggcggacagcgcctccatgatcgagtggggcggcgaggtggtgaactcggagcccgacggcagccacaccagcacgcagatgggcagcggccacttccccgaggaagggttcggcaaggccagctacttcaggaacgtccaggtggtggactccaccaacaacctcaagccgcccaggggcgtcggcaccttcaccgagcagtccagctgctacgacgtgcaggacggcagcaacgccgactggggcacctacttctactacggcgggcccgggaagaactcaaactgtccatagcccaagactgactgagctgagccgccgcctatcacactcactaccagagccgcctaaccttaagttcttaacacctcagctgtatcattcatgcatccggtcaattagtttatactgcctcagatttttaacttttttttttgttttcgttttgtttcgctctttcttgcttctacctaccccctagtttactgactcgtaccctaggtgagtgagcgtgtgtgttgttgacatgtgagattgttctctctctctctctgcctcagagagagtgagatgaaggagagatgtcggtcgtctggttctagggaagagaggaggactgtggcccgttttctgaagagaaaaacaaggcctcatggttgctgtgccttgtgcctgtcaaataattttgtttgtttcatcccatgctggactggactgctaatcctttgtttcctgtaataaaaagtgggcaatcaaatgcttaacctgtgg

SEQ ID NO: 7052 - DNA, 766 bp, Zea mays
gcagcttgcatgcctgcagtgaattgttctatgggttttgtctagggaacttaatctcaggttacaccttaccccgatattaatagtgatagtgatgggtcgagggtataataataaattcaagtgttctacttttttttttgtagctataccaagagagttattttcaacctgactactgttatatgacattgtttatttctgtagttctaaagttttggttcatgtgaggtcgcaattgagcttctttgttgtttcccttgcatcagttggaactttatacaattattcaatcacagctcctaaaatcttccctctaattcctctttcttaactagcccagccttatctatggcttgggctggacggacacttggaatggtgctgttattagtggcatttggagtgcttggcaaagaggtggtctcacacttgctgcaacatggtacggacatttaaatgttcagtccacgaagggctgaatattactatatcataaaaacacaaggataaagcgctggatgaaaggcttcaagacatcattcatcaatgcctggaccttggaatgtggctagagcgttggtcagcgggaaacttgttgtggcccaggtgggtacgaaacgtcgtcttggtgatgtcaccaaagatggtactcactgtgcaggtcaatcttggtgaagaaacgagcgcccttcagctcatccaagagctcatcaaccaccaatatcaaaaacctatcccttgtcgggtgttatttattgagggg

SEQ ID NO: 7053 - DNA, 874 bp, Zea mays
  unsure (1)..(874): unsure at all n locations
aaaagccatctatttctgagagcccagttcatgttcttgagatcaagcacacaaaggccccctagttccttaggacaggccaccttaggccaagctctttcgcttcctttccacccctccaacgaaaagctttacgcagtttgtcaatggacttgaatgcccaagcaggcaagtctagagccaaagctgtatagataagtagataacccgagctgtcataacaaactgcacatgtactacccggccagctttgttcaataattctgcttgccaacctggaagagaggatgccaccttatcgataatatattcgtaataatgtgattgataacataagaaaagatcagcatcaaactttatacatacctattttaaaatattaaatttatcctaacaattcaggactaccactttcatccctattgaatagaaattgagaatatgaggatttgggaagcggaaccgttggagttagccttacataatcttgtccctggtatatatgttctcttgtcagtcatcaccagccttgtctgtcacgggaaagccaaagtaaatgctttctactaaagatccactaggactggtcgaagaagttgaactgttgagccaaagatgccctagaccgattgcatcattcagcaactgtagcaggttaacaagaacaaaacactaagataaggttataagcacacagattataataaactaagtaactcaaaatcctttacagcggatatttaccagcagccactatcccattcccacctgtgaatattcaccttatgtttcggttcgtccaaagcanagctcaaccaatcataaatatgaactatatcctccaccgagaggtactcttggacanaatactgct

SEQ ID NO: 7054 - DNA, 813 bp, Zea mays
atatcccgctggtgatgttttaagtcctatattctctcatctctctgattttaattactttctaccaaatctgtctgggaggcaaccagttgctgtgagtaggttttgaatcagtaagcctttggttcctgattcactggtaggataaggattttaagagttttaagtgtaactttctacttcattggtttgtttgtactgtaagctaagcttaacccttaggtttagctagtgggagatgaccactgtaattctgatggttacattgaaggccttcttgatattttgttggagcaatgcctagtagatgtttcatggtgcctattgaccctttactaattatgcaattcataatattgcatagcagaaccatgtaaacggcagagcatgctgttccataagttacaagtagccaataaatttgaggccaactgtgtcattatcattttcgagtagtcttctagattgaataatcaagaatgctttcttgcgcactgaaatctctaccagaccagtctcacatcccctgtttgcatcattaaaggcctgctggaagcaaaactagcacaccctattacctgtagagcatgacttgtaggcactagcattgaacctaaacatctgattcgtagctgcacgtattgaagtttgtatccagacatggatgaatatccaattggaatcatcatatctgtctaaatctaatcaaacattcgacagcacaacctgggtccttgtcttttctctttcaccttttggtattgcggttcttttacagttgatgcattgtctacaccattggtatagaccctg

SEQ ID NO: 7055 - DNA, 868 bp, Zea mays
tcttggcccggggaccctctagagtctacctgcagcaattcaagtgcatcaccgttgttacttccataacgtgctaacaggtataacactgtagtttctttttagtatgcactagtcaagttactgtcagtgctccagttatagtaaaaagaaattcatgggagaaggcactggtgataatttagacatgtcaattctaacaagaattgctacaaacgatgtaccgctgttgaaaatttggaattattctgagtctgttaaagtttaggtctatcgatgtgaaaagtgcctctagtttcactgctatccttgccatcaaaatcgtgttcttgcgttattgtcactcatgtccatcatgatgccctgggcaccttcattgcttaatcgtgaagcaagctgcaatttttctaacatctttgcgctctgtcctgttcgtcatgtgcatcataccttgcatgtttcaatcgtccactttgcacattgcatatttactgagctttgtaaggttcttgctctgacatagggctaactctgaatctggtgccgctcagatgctggaatcattgataccacccgaatattgttcattttttgtagtagttagaataacaccttttttttcctttgcattatgctgcctagtggtgtggtacccatggtagtattcccccatcatggatcatcacccatgttggcatgttgcactcactcaatgttgttatgtacaaatttaagtgcatcaaagttgttgcttttatagtatgcccacatggataaccctgtgattacttttatgcagtcaaatttggcaagctactggtgatgcttcagatttagtagaaaaaccatgggaagaggttagtggatg

SEQ ID NO: 7056 - DNA, 835 bp, Zea mays
gaacggcttcatgttcctcgtcttgggaacattgatccctttccaagaacattggaaagatcttgtcctgtccttgggaaaaccttcctcaagtagcatactacgctcctcaatccccaatcctcgacccgatcaactcgaggacatggtgactatgatagagctgtgaagacccgttgctgccaatgagatgctttgtcttccatttttaggtctcgttcatttcggcctaatccggccgttccaggcctctttccggctgaaaaaaattatccagtttggaatccggccctaagctgttcgtttcaacccgaaataaaaacaaaagcggcccagttcgaagtttccccttcctccatggcccggtaggaatccggatcccttaccatctggatcaaatcctgggctggattgagtggtccactgtttcctggcctggaaccgtttccggcctggaaccgttttcaggcaaccgaacggggcctaagtgctcctgctgctgcgcatgtcagttggtgccatgctgctcgtctgtctgctgctcatgtgctcgtccgcaccctgtcgtcctgtggagaacccaatccagttctcaatctgctgcccagactcggcacatgccacacctggggtgccaccaccacagggcattgcccccatccctctccaagcttccctaggacaccaatctgccacaccaaacaggcttgacctgctgccccaacctggtgcccaggccaccctactctaagatgtcacccgtgaagacaagagtccattagcatgccaggcctcagccatggctctgttcaaacagatcttcccactgggccct

SEQ ID NO: 7057 - DNA, 776 bp, Zea mays
actcttccagattacacgattgaagctgagtctgtaaaggcacaataacttcaagtggattctattgggaactgttgtgttagtctattatcttcacatctcaatcaggtcagaaccctggattcctagtcttgtacccatagagtagttttcattatcacctctatggagccatagtaagtccttagaactagaaggcatttgtgtccatgcccttactttgaaggccaattgcgattttgcctttgttaattcaactttgtgattttgcccccactttttcaaaacgaagattgagtttgcccatattccgtttcgtgcacttaacatcatcaaagcagttgtaaaaggaaaattttcccctgcatattttttccttcgttttgattagtttgtacttttatccctgttttgatatgaaacatttagatagcattttgacagatttctaaaaatgtaccaagctatatcatcaattggtctatacatgtggcaatttacacaagtatacgtcatcagccaatctacatcttcacctacacgtctatctccctaatattaaagtgaatagctttcttcttccatgcatgttatgtgggcccacttatggcaccccatgcctgacaatgtacgtttatgacgtcaggtgcgagtagacttgcaagctgcatacaaacgcgattgtgtaggactccatgagtatgaataagtgtccaaggtacctttggttgctaacacccctggctgggtttcctagcttgaaattcaatgaacgg

SEQ ID NO: 7058 - DNA, 822 bp, Zea mays
atctcaccatcctcagtgcagggcactctctagtggacatcaccatggtgcttgatgtccatgagcaagcaatgccacctgcatgaggtcatctcttagggactacaccaggagtgaagctgtgctccatgcacataaccgtgcgcgtgggggtggatgagggagagggaggtaaggagacagcaggtttgatggaatactatgacaagcaatcaggaagggaatgtgttctatattataaaatggataactgagtttggacatcagtattagcaaaacagattgtggaaaatgctatcgaggcaacttcacctttttttctactctcatccagcagttgttccagattttttttatatttagggatacatttggtttcgtagctgaaacgagcttgcttagaagtgcaagctagcagatttaaccaatccatcctagcaatgtgttactatttatttgttttcttagacaattgaattggttattagcagtccgaaattaccatccagaattaatgcctgaaacaatgtttggaacatagtcacgaattttgtggatcaacggtgtcgaggcacatggtttcctacttacaaacttgcgagaggtttatacacgacagtgttgaaaatatttctgtgtacccaggtcggtatgacagttcctgggttttgggtcgatgccttcaacgtttgtttctgtgagggtttggaataaattctcggaaaggcgcccacttgcaagcacccattttttttacaagaaatgaaatgtttaaaaaaactaaaaggtgtcatggatgcccttagatgaaattttgctatg

SEQ ID NO: 7059 - DNA, 830 bp, Zea mays
  unsure (1)..(830): unsure at all n locations
tgactcctgatcgcccggctcagtctccgtatccactctgttcgaattgccaacagaggagccgtcctccttcccaaacagctgctcggcaagatctcggcaaggcttcagatcgtcctcgctccgtgctcctgtcagcttacccagcagctcgttcagttccgtggctctccccatcttctgcgctgtgctgaacttcatcggggtcggggttagacgatcgtccagacttgggccagacggttcgtcaccctcactggcgctttggctcccgcgcaggtccttcagcttctggtccaagatagtggcaaccctctccctgaagctattggcagcttcgttatccgacttcaacctcgcctttgccgccgaaaccaacaggtccatcctttcttccnnnnnnnnnnnnnnnnnnnnagcctcaggatcaacatcagcatcttcttccatgggacagaatgcttcctccagtaacccgacgttctgcgtatacctctcgtacgcttcgttttcagcgtcggtatctccttgcatatgttcctttagcttcataaacctccacttgtttatacccgcaacatcctagaacgaaaggaaaagtcacaagcaaaacaaaaaaaaaaaaagcggttcagaacaaacagagcacacggaaacagacaatgaacctttttggtaactgatttctttgtttggagaaacttcagaaagtgctggggaagcttttgcaaggcagccagccttgacgcctgactgtgaaaaaacacaatcaagcattaaacggtgcaactgtttgaaaatagattaattctcgagttaatgtttatgaa

SEQ ID NO: 7060 - DNA, 836 bp, Zea mays
gtcacgaggcatgatgggcgagtatccacaggcaattttggtgttctttgtgaacaggtagcaattctagtccaaactttcataatgttccatcaaagattcttagccaaatatgttagtttataggatcctctgtggaggacaccctaacaaaatattctccgcaatgctttgcaggtgaaagagataaatgctctaggatacgaggtgatcattgtgtcctcaggtgctgttggtgtggggaagcagaggctcaattacaggaagcttgtcaatagcagctttgctgatatgcaaaagccacagacggagctggatggaaaggcttgcgctgccgttggacagagtggcctcatggctctctatgatatgctatttactcaagtgtgtttgttaacttgctatccaaatttgtcgtcagttctgcgccttgtccatatgttaatgttgagcttcccatgatgcagcttgatgtatcctcttcccaacttcttgtgacagacagtgattttgagaatccaaacttcagggagaggcttcgtgaaactgttgagtcactattagatcttaaagttgtaccaatatttaatgaaaatgatgccatcagcaccagaaaggctccgtatgaggtttgtgttgtaccatgcatgacattaaatttcaacaatatttgctgcactgcttgataaatgtgatatcgtgctacttatgcaccttgaccttaaccaatgcatgagtctggtgattttttaaaagcattttcgatgtcatactcataaacagtttgtttttgcaggattcatcgggtatattttgggataatgacagtttaaccg

SEQ ID NO: 7061 - DNA, 942 bp, Zea mays
gtttaattacttgttaaattatccatggaaactgagtggattttgtcagaattccgctgaattttaccctatgcaccatattctgatgtttacttctattacttgactagtcatttactgccctgccatgtgctctgcaatggatatggtctaagatacaagttttcttgctccatgttcagttaaattcattggttaactgctaatttgtgcatgaaagagaatatttggtgctttaatccatcaccatagattatttcataaccatgttatctgtaggttagtacaagcatcttgctccctcaccagcagcagaccttcatggctaataataccataatagtaaaagcctctctatctgtctatatggttgcagcactccctaggcattgctagtcaacaggttgacttatttttcatggaaagaacatttttgcaccacgacatgacaaaagatgtgtgcacttctataatctgtttggccatgcttaacataacagctagtgacagcattaagatttggatttttcccagggtctcactggaaaattgataccatagtcattccttttttttttgagtgtcctgctgtaatccaatattgttttgctgcatataaagtgcagcaacaattatcttactgatttctgacaattttcccttagcaggatcatactgtcttttggcgtttcttctccggctctttttcgtttgcctgtcggttacaaggtggaacgtcttcagaagcttctccactagattagtgtaaatagtagacttgttcagggttagttttgttgggaagaataagttcctggttcgggttcatttctgctagcaataatggctgcgatgaacggaaaggtattgggtaaatggggaaggaacatgaatagtctcaagagaaagcgggagaaccccgcttcatatgatgctgacata

SEQ ID NO: 7062 - DNA, 787 bp, Zea mays
gcaggcaggcagaggcagaggcagaggcgacgtgctgcggaggaagcactcaaggcgaaggcgaaggcgaaggcgacgaccgacgtgtcggctagtgcgcgcgcggtcggagtctcggaagatccggcaacagtgacgacgatgtggatcgctgacggatcgacaggtaacgcacgcagagtcaaacgcttatctgaggaggcccgacccgagggcgtgtccggcaaccgcgcacgacacgacacgacacgacacgacacgacagatatccgccgtccgtggctcctccctctttgcaggtcgtcaacggagccaaatcgacaagcacgtcctgtcacgggctccctgcaacgcgactgcggagagcaggatcggacacgtaggcccgatcgcgttcacgtgattcggttaccgtgagccagccaatttgcacggacgactctctctctctgtgcggcgcaaaacttcgcaggccgttaatatacctttctttctcggcgggcaaatgatctcgcttttgactccgccgtacgtggatggaaaagcgggcatgaaagatgaaacgcacaaggtacagtgcgtcccggaagcgatgagcataccaggcgaccgagcagcgtgcaggatcgtgcgccggtccgccaatgatcgctgtgcggtgcctgaagagtttgttgatcatccatcaacgtcgcagaaggcgtcacactcgcataatactgccagacgccgtcggctaggctacctaaaagactgcaatcagtcgcgcgcacagcacaaagatcag

SEQ ID NO: 7063 - DNA, 727 bp, Zea mays
gagtttgttcgatggctgtttgattacttgctttgctttcacgtgctcattgtgttgctatccctgcttgcttggttctctatgtatcctaattctcatgtttggtgtccaggtatccaactgatagtgacaagcagatgctggcgaaacagacagggttaacaaggaaccaggtaattaagttgcattgaatgtaaaagtaaaactaagaataccactagaattttaccaccagaaatgtttccaaatgtcaaatgaagacaaatctgctgtattgaaacgccattctgtccctaatatataaaagctcgtgaattcaccgagcaggtgtccaattggttcatcaacgcaagagtgcgtctctggaagcccatggtggaagagatccacaacctggagatgcggcagctgcacaagaccacatcggtagaccagaatcaactcggcatgcagcagcagaaccaccactcgtcggacggcagcgggaggccttcctccgacccttcgaactcccagcggggccaaagcagcggcatgacaagaaacctcagctctcgggcaccacgccacatccaggacgacgagctctcccagatgccccacgacatggcaggacaggtgagctttgcgtacagtgggctcccccccgcgcaccacggtctcgcgctgtcacaccaccaccacccccagcaagcgcaagctgaggcggtttgtgttggcggcgtgg

SEQ ID NO: 7064 - DNA, 860 bp, Zea mays
cttgcatgcctgcagagaaatttgaggatgttaagtacacaattctaccaacagcaacaaagccttttagtcccaagaaatttggggtaggctagacaaaaacaacaaacaaacaaaagccttttaggggtagactagagttcaaaaaaattgtagttaacttcaaaacattttttgtcagcatctaaatcagctataggaaaacagtaagtctctacagcaaaacaaaattatcatttaatgcattgtcagtaaaggaaccagctctgcatacacatcaacagccacggttctaatgagcatgtggttatgtactgcaaaaatggggggaaatggaatccgagtaccatggttcatgaagatctcgaaaaggttttcaaatttattgaagaagtatgccaatatgtcttctcgtttcaatatgggtgatgtatgatttgcctcttgaagtgcagcattcaagcatgtggtaggcttctcattgtcaacattcaaaccaacacctgattaagatcaaaggaatcccatccttgtcaaaagaaaaaaaaaaagagatcaaatgcttagaatgggcaacattggaaatgcattttaccagtacaaatattgtacactttgggttcataagatgaggtacatagaatgccaccaacttttaatcctttcagatagagatcattaggccattttattctcacatcaagttctggtagtccctgagttttatcacaaaggcagaatgaaatggcaactgaggtagttagcataaaggaaacaggggactcaaaatgcaatcaataagcagcaaacatgacaacactgaactataaacctacccttggcacggcacagcttcttgg

SEQ ID NO: 7065 - DNA, 792 bp, Zea mays
cttgcatgcctgcaggcttgttaaccttcacatgtttactagggaaattaattgtcctcagtgtctcttgggtttcatctgtaagtcgcctccttggtacacttaaaacgaaagcagcctgatcacaagtagcagcagctgcggttatccagtaacccctgtcccaccttttatgaattccctcgctgggatacaagaaatccagttcaaccacctggaaagtaaatgccaatagttcaataagaaacaaggttttaaagtcgggcgactagtcgagaagtcggtgcagaggtgatagtcgatctgaacgactcgactttctctactagtcgctcgactagtcacagcagttgggtcaggcgacttattcgggcccatgtataaaaatgtgagcccacccagccatctcaaccctggtaggtaggatgctaatggacaagttttctaccttatttatctatggatatggaatgattcatgacttgatgaggaccaagacaaatgatagagatcttgtgaggcatgcaactactctatttgcaacatccttccttacattggctaatatgtgcaaacaaagacaagggttgaaaaatctctttgttagtaatgaatggtgtgagagcaaattgaagaacactgaagtaggaaatgcacgtgttgtttgtcactcttgcattttggcaagcagatgaagtaatttctattgttgataagaggtgggatagtcagatggataccaatctgtatagaacaactttggttttgaaaccaaacaaattttttgaaact

SEQ ID NO: 7066 - DNA, 758 bp, Zea mays
gacaagaccgtccggatctggaagcgcgcccctgacggcgcctggcagtgctcggtaactagcgccaccctcgtccctcctctccccgaagtgtggctccgtccgtttggtttaaaattacgggtttgacgcgtgtcgtagcttaatctcgtcgcttggttcggggcaggatgtgctggaagacacgcacaaccgcacggtgaggtcctgcgcctggtcccccaacgggaagctgctcgccaccgcgagcttcgacgccaccacggcagtgtgggagtacaacggcgccgactttgagtgcgtcgccacgctggagttgagtttgctaagcttggcaaggatcaggatcggtgcccacaccacttgctgtgctttctgtggatgctgacctctgtgctctgggcgtgcaggggcacgacaacgaggtgaagagcgtgtcatggagcccgtctgggtcactgctcgccacatgcagccgggacaagatggtgtggatatgggaggtgctgccagggaacgagttcgagtgtgtctcggtgctgccgggccacacgcaggacgtcaagatggtgcagtggcacccaattcttgacattttggtctccgtcagctatgataattccatcagggtatgaacctgtccaactctgaacagatgcgtccattgtgccaattgcgttcgcttatcctatgtatcatgttcaaattttttcctgcccaagttgctttgctattttgggttgctattacttggctgc

SEQ ID NO: 7067 - DNA, 784 bp, Zea mays
aaaaacctgtaagtagataagatggtgttaatattgaatcgtcaattttagaaagacactctagcttggttcttgagaacaactaattgtagatcacatgaacttatgccaagatgtcatggtaaactaaaactaggcatagaacattatacgtaccgtaaaaacacttttccaaccagattttatattgttgacacgactcagaaccatttgggagacacatcgaactataagttcacgaacttctgaagcattgctcttctgcataacaaccgcaaaaggttgcaggaattcattttggaaattataatttgccagttcttctctttccagaaacttcatagctagctgccttaaagagtccataacaaatattgcaactgaaaggttctctgacaacccaacagaaacaaaaaaatctgacagaactttccaaatacgggaccaaaccaaacgaatgcggttcatattgtaatgcctgtgcaatgaaacttcgaattaggtcgttttggaaaatattgtctacaaacatattcataatttcatgtagcttgacataggtcatagattataagcttacgcaatctcaacaatctttgttaggcagaaaatacgaggatctgtaggagactgcaactctgtcattgaaactttgcaaagagctttcacaaaagcaacaatagcatcactatttaatcttgggctatgagcaaatatgtgatttaactcaaaaatgccaatctggtctagcaggtttatgtttgatatgaaattattaatctgt

SEQ ID NO: 7068 - DNA, 794 bp, Zea mays
attcaagaacagcctccatgctaggcctctttttgtcaaagaaacatccaaccccaaggatgatcaatgaattcaatccttcctgtgccacaccatggacatgactacatatcttatgtcaccaaggtccaaaccccaaggatgatcaatgaattaattagaatgaaaaccctaaccttaatcagggttgggaatgcatatatataagccaagagtttggccaagcccattacatagaggggtatacaggtaaatacacaaggactgacccaaagccctaacagtattctaacagaattcatccatgatcagtggatcgcctaccttctctaaatagcttaagcttttgagttcaattggttagtgcgtccactctaacaatatgcacgactgttgcaaaaagggcttgagcaaggccccctcatgggcgagcagaatccatttttttgtagccataaccaatgaatgtgtagagcccaccccatagtttcaagattgagaattccaagaccaccatattggagcggtctttgaacgttctcccaagagacaggacaattacctccatttgccttttcttgacccgaacacagaaaacctcttcgaccttttatcaattgctttgatcacctatttcggtgttttggggatggttctggcactatgcattaaagatgtgtttggttgtaatgactggatgagacggataggatgatccctagataatgctgttcggttcaaggttaggggttggtacaggaatattccagtgccatctccatgtgtctgtcaaa

SEQ ID NO: 7069 - DNA, 1220 bp, Zea mays
aggaccttcccagcttggtgaccatttcccgaacttccggtctttattccttagaggcagaatggtcttccacaccaggtcccctacttgaaatgattttgctttgaccttcttgttgtaggccctagctgatggaataagtcttgagcatctagaggacagcctgcttttgactgtcctctgtagtcctttagcatctagaggacagcttgactgtcctttgtagtctctttagcatctagaggacaacagtcgctttttgactgtcctctgtagtcgctttagcatctagaggacagcagtcgcttttgactgtcctttgtagtctctttagcatctagaggacaatcctgttgtgtagtgtgtgttagaaggtgtggtagtgcagcccctagggctataaatatgtgtccccaacccctctaagggtatggcattgtgtagagtttgaggaaataaacagaaaattgccccagctcatagtgtcatcctctcgatgagagttagagtcccgttgcttacacacgcagccttcaacttgggacatgtccaattattacccaatagtgataggggaaaaaaccataatggagtactcagttactcaccatggtccagaaagtccattcatggaaaaccccatatttccttatggcttctccatctggtgaccgataggtacttgctaacaagcacacacttccaataaatgacatttctatagtcatcatgtaagaggtatgctttttaacctgaagcattagtgaacatgttagtactagccataaactgcatcctggaaaataacaaggtacgaaagtccaacctgagatgcccactgacataatgaagaggccaaaccagacagcatagaagcgactgtaaccggaatgatcccatatagcaagatatagtcagagccaccaccatttgaacctttgctagtactctccccaacacttaaaagaacagcggcactaattaagagggccaatgctaaaatttgcttggatgattgcttttgcctgcacaatgttgcaaaaggaaatcaaactaatgagtgctggaattactagtccagatctgcatgatgttgcaaaaggaaaatcaaactactgagtgctggtaggttgtttggttaatcagaagagttaaatggacgtgattattggtggatggaagaagttttaaaaatggaaccttaagaagtcccaaagttt

SEQ ID NO: 7070 - DNA, 779 bp, Zea mays
acggtctgctgtccaacatcttccaagatcagcaagccatagaaagaatttacatttgggaggagaccaagtttttcaaactagtgtttttgaaccttagaagcgaatctagaaaatttgggctcctagtaaaatgcaacattcttatggcttgctgttcggaacagggttgggagtgcattaatataacatagttaggtgggccaaggcccattacaatagaggcattacaatagagcatgtggttacactaacaggtggaaacgagcagggtaatgctggaacagtgatggcacagaaatgttttttgacgttgacttaatacgttaagtggactaaatggaggtagatcaagcaaaatttcaagttacacaatcaggggcaatgatgcgtggtcgaaaaatgaggccaaataggtagttggagttcaaaacagggacaaccatacaattacccatcatattttgacagccccgaattcgttttacattttaccttgaaggtcggtttcccaacaaggcctgagagtgaggacttggcgctaaggtaaagagacacatgaatctgctcagtctggaagctgcatgggaaatagaatattggtgaaaataatatagaaatagtagagcggattctattttctaacatagatgaatataatcagatatataattattaaaagtgtaaggactacaatatgtagtaaaaattctaggagtattgaaatagctagcatgtgctattttagacagcttacgggggtacggctgcacatgctt

SEQ ID NO: 7071 - DNA, 863 bp, Zea mays
ttcctttaaagtcgacctgcaggacctttgttggttctttcagaagcaatttagcattgtcaggaataccataaaatggggaagcctcattagcagcctgaaaattcaactagatttggataaaaattcaactagaacaccatactgtttcaaacagtggagtatatacatgacagtaaatgaataggccgaaatggttatacctccacatgaggattaggaaacacatgcacagcagtcagtacacgtccaccaagcatcatcccattgaggccagcacatgccttagaagtaacggagcggtcggcgtactgtccatatcaaattgatcagaagtgactatgatgatcatatactctagcctacgcacacagcacttatacctcaagaaatgcacagggtccaccgagctcattgttaaaaagaaagcggtatgcagccaatgggccaaatgcactaacaatctccattagctgaaagagaggggaatgcagtaacttttcaggaacataagctataacattcacacaaagaacaaaaagatacttaatatataaagcaccgatactgatgtctatcatattaccatcttagatgagatcactccagcaatgcccgctatgaaaatctgtaaaaatcaaaggtgaatcagaaacatgtgcattcttaaaaaaatgaacagtcaaatattcttatgcttaactattctgaatcagttaactcttttttccacaatgagatgtgagatggcttccgctggatatacaagattgtccctaggtaaaaatagcggttgaagaaattctgacatgacatcagagtaacttcatagctgtaacagccaattctactcaaactgagtt

SEQ ID NO: 7072 - DNA, 809 bp, Zea mays
gagtccttatggtgttcagttcatggaaacattaggaagacagcttgtacagcatggttcaagtaaatgtaatattagcaaagatttgagtatgatggttgctaagtgctaaccttaattgtgcaaatatctacagccgagtgcaatttggcagcaagggctgtcatttagacattgataaacttcaaagttattctgcatttagtttaacaaactttgactttactttttctcttgtttgtgttcaatctctaacattttcctgttcagcttatttcatggatattgccttacatcttagttcctctatttttgtctctggcctcaacttggtctctttacttctaaaaagacaagattagttcctttacttgtataggtagatatggttagtcgttccacccatagccaataatggaatatatatcacagaaaataccagtgagatagaatcatagaaggagataggttattagtctggtccagtttggtttgcttgactagattgctttgttttgtgctgtatcactataccaacatgaatagctaaacactaggatcatgcaaatatgtgatatgtctcctcaaggaccaggctttcctctacacataacgatggtccacaatgattattttccatcactattagctgtccataatatctgggatagtcaacagcagaaggaaccacactgattttgctgtattatattgagagtgttacaacattgtttttttgagacctctcacctctgttttaaatgtggcggcatctagatttttagatattttattttaaatatcagctc

SEQ ID NO: 7073 - DNA, 722 bp, Zea mays
gctcctgctggccaggtaaaagcctggaacaccgccctctcaggaaaggggaatggtttgatgttttgccagatgccgagtggtgtgatggattttgaggggagcgagagggatgattttttccccccctaagtatttgatgaccgggtggcgagcagttccacgattgctctgttttgttcttttattaatagcccgaagagcttggaaggtgttggccttggaggaaaaatggtgtgtaattcgggggacgaggaggattcatggctcgagacgcgatttcttccgtgccttgattagttgctgctctgcccagtgcccagttcctgatggccagaagattttttgcatgaacaggttaacgtgataccatggacagtattctggtgtttagaaaggattataatttccacggtgtgtagtggaggggaatgctattctattcgttgctgcactagtcaaatagtgaccgaatcagacctccactgaagcgcaaagttggcgggagaggctagcgagaatggcttctgagtgaagcatgctggcttaagactgtcaagtgtttatttggaattccaatggcatcggtagatatgccctatatgtgtatcctacgttgacagttccactgcatgaggggtctcaatagacaatagtcaatagctttatattatcctgtcaagttggcggaatgggcctaggccctaagctgcaaatacttg

SEQ ID NO: 7074 - DNA, 889 bp, Zea mays
attctagccctagctatgaccttctgcacgagttcttcgctctagacctgtagggtgatcgtgtctcgaaacttgattggagatataacacacttttttcggtaaacaattgaaatttttatgctaatcactgatttccaataaatgccttgccatcatatgaattgtcagcactcagcaatgaacactagaagattctgtatgtcctaatgtccacacgattttattctcttgtatcatttcctgtatattgtttcttaccttgattggctctgcatttaaatatttccttcattaccaggcatgtactaaataattaagctaaggactcaggtgttgtagagcagcattactagttactatagggtcaaagctataaaccttgctttagtattaatttttaatctttcatactgttttgcaacatttttagcgcaaccatttttgcaacatgtcgattgtttgttaggaggtggtacttactgttgttattattgccacttagatgttttaatttatcctaaatatttgatgtcagaagaatctgtgcatttgtattgattgcattattttgtgaatcgtagttttgataataatatgatcacaactccctacttaactaactcaccctttgttcaaacatagcccatgcataaaactggcttgtgctttagcacgtttcgaataaaagaatataaaaaagtaggtggatgatgggaactcagctaatccgcacagggcggagagcagtacaccacgaagggtgcgctagcagagtggattgtgtggaggaacgcaaggaatagggcacacggtgtggtgactggggaacgagatcaccagaaggtgtggagctcgccaccgtgatcaagtaagcgcaccatgcacg

SEQ ID NO: 7075 - DNA, 841 bp, Zea mays
atggggcaccgagtggtttggtacctcaggaccttggcgcactcactgcacatgcactgcggtaaaaaatggaaataaaatgtcaggggttaactattgcaacattaaatcagttccaagaaaatggaagttgcttagacatcagtatggaactgcccgctttcctggaccaatattccgaatatggaatactgtagatcataccagttggggatctgggaagcatatattattatcaaaagataactctgtttaatctagaatacagttaaataatgaaaacttataccaagtttcttcaagaatagatcgttagtttctacacacacacaaaatgcaatccttgaatagattaccagcagacttaccatatgcctacatggcaggacagtagtatcccttggttctgagaggcaaataacacattctttccctggatcatttgcatcagcatcaccttccatggagttccctatgccatatatttcttgcagttcatacctagttccattgacccagaggatctggcaaacaactcttacttgataatccccattttctttcctttcaaacacggcctgggtgatctgtgagttaggagttatcatcttttggtcatccccttctggtgggtgatcaacagataatgttgtttcagctttaactgcaagtggatatacatccatgtccccctgctttaaataaatctgattcttcaaacactgaaaagtcaattcctgttcctgaaagctgcctgaatttttgaccaagacccttttgaagctaacagtaatgggcttaattaggtcttctttcactgttgttagattgcagttgagct

SEQ ID NO: 7076 - DNA, 826 bp, Zea mays
tccccgcgggtcatggagcacggctcgcccgcgccggaccggtcggcggcgtgcgaccgcatccaagccttgacgttggtgcagccgaacctggtggagccgcgggagccgccgccgccgccgccggagaacatctcctcggggatgggcacctccagcaccgtgtccagcgcgtcgtcgcgctcgaggttcgggcagagcttcctcatcagacgggcgggcgggaggcggggcgcgcacgcgcgggacagctcactgccttcctcttctccccgttggttgcgccgtggtgcggacgagagctctttctcgctggcgttgtgtgatgtgcgtgcctgcgtgaggcggtgaggcctccggaactgaagcgcgcgttatggtgcctgtgcctccccctcccactcccagtactgggcctctctcggtggacttgtaccggttttgacgagtcgtgcgagcagctggcaggtggggcccttccttgatttcgcgacaggtttggtcgtggccgcacgctcacgtactggtactgctgctacacctgttaaaaaatttgagaaaaaaaaaaactatcttggtccagatttcgtcgcgcgtgtggacatacgactgcacgttgcccttttgcgagccccagaccttttggtgtgtgctgtctgtgtagtgctactgctcgtctgttcccatatatccactccggtttccgagagcgcgcatgggagtttctgtggaccctctagcagcatgcatgatatcgtgggatagttggcgaagtaccaatacgcctttttttttgaagaataagaaagaaacatcgacgcttgtt

SEQ ID NO: 7077 - DNA, 755 bp, Zea mays
aagaaaatggcacattaaaagggtccatataccatggacaattaaaaagcaacctattgcaaagaggaaattgtctggtcattgtgaaaggtactgagagtatttctaagaacacctagatacgatgtcatttagtccgaacctggaaagtaccttgaagaatgtaagctaagacaaaaggctgacaaagcaataagcttcctctttgacacgagccataaggttttgcttgacattgcaccacggtcacctgttgccctcattgacctggaggattcagaaacaaaaaataaagagaagaatccaactaacaagtaaaatcatatgataagaaaactaaaatctacgcgaaccgatagcaacatctatagcaactgcacagagtgacagaagtggaaatggtatgggggtatgtagagtatttttaacaaatcatgactttttttaataaacacgctcttatcttgtagcaaccagccaaccacaaccacttatctgatgccaaacggaagtacggaactagtttaccacaggtgccacacaccacacattacacttgaagaacaaaaagaatgggaattggaatggaaaccgccaagtacaaacacgagcaaagtatgtagcaacccagaactgcttggttctgccgatcaaaatcaagtcacataaaaagaaaagagaaaaaacatcctggtgggcggaattgcggaaacaagttgtgagaccttggaggcgcttcctcgctgtcgtgggtt

SEQ ID NO: 7078 - DNA, 750 bp, Zea mays
agaccccagacttggctgcggcaaagcgggtgagcgcgttgtgcgtcttgccgctgttcgtgggcccgcagtggtacacgatacggcggcgcatagcgcgcgcgaaggggtaccaggtgtgcggggccgtgaggtcggccgcggccatgaccgacctgtgctgcctcagcttgtctgcgaagttggagaagcagaactctgcgaaggccgggaggaggagctcgtgtgcgtcctcagcggggagcgagaggagatgcgccgcggactcccgggagagtcgcgggaggatgaacgcgcggaagcggcggacgtaggatgggaaggcagaagaggggacgtagagcgcgagcgcctggtcggatatggccggacttttggcgaagccgcggacgaggcctacaatggcatcccacgtggccttcggcaggcggcaggatccgacggcggggtccgaggcggatagctcgcgccatagcttcttcgggtcaagagaagacgtcggtttctgggtgggatcgccggctgattcgccggtggagaagaagcggtgttggggtgggagccatggggacgagggttgcggaaaggtgcggtggaggtgagagaggagaggtaatatgagacggtggtgcgaggtggagcggcggacaagcgccgcggcaatggcggcggccatgaggctggttggttaggccggccggcatgaggctggggcctggggggaagaaccactgaacgagggatccaaat

SEQ ID NO: 7079 - DNA, 851 bp, Zea mays
tgcatgcctgcagcaccagctccgcgggacggtgcgcctggccgccgaaggcaagtgcgcgctcgagctcacccgcttcgacctcctcgccgcctccccctccgcgcgcttctgggcctccgacggccccaccatgtccgacctcgccgccggtcgcgcgttctcgccgctcccgctcaacaaaaccttccagaacgcctccctcgagctccccttcgctcgaccgctcccgcgcctcctcgcgctctacgaccccgacaccttctcggacttcgggcacgtcttcctccccaacggcacagatcccggcctcgatgccgccgccgagccggcgcccaccatgttcgacaactgcatccctctctcggaggcggagacctaccgcctccgctggacgctcaatgcctccgccggcaccgtcgagatcggccttgaggctgccgtgggctccgagtactacatggcattcgggtgggcggaccccaaggccaactcacccgcaatgatccacgccgatgtggttgtcgccggcttcacagaggaaggtactccatttgccgaggactactacataagtgactacactgagtgcaagcttgggaaggaggacactccagtgtctggggtttgcccagataaggtctatgagggcgggagcaacgattcaatcctggtgtatgggcaccgccaggatggagtgtcctttgtcaggtatgcgaggaagcttgatgctgaggatgccaagtatgatgtgccaggtgggtggccacggaggacatggtggtgctttgggccattggtaggttgcggccaccagacacaatgcgcccacactaccttccacagaccct

SEQ ID NO: 7080 - DNA, 809 bp, Zea mays
atagacatgtatttggaaccacccatctccttttaagctcttcaaataccgggcagccattattccaccaggaagcaagattccccaggcaacaaacatcataaacccatgaacagccaggacaggacgcaaatcctgttctgcctcagctgaacctctcaacaacaaaacacgtataggccgactgcttgtgactgaatgcatgttactgtctgtcagatcatctcccgaccagcttgcacccatggcccagacaaccttaagtggtgtagttggatcgatgatgttcttgcattctacttttccggtacaagaagggttaagagggcgagtaaattcaaatgtaataatgccattttctgacttacaccgaacaaaagtgatgttctcagatgttgggtgaatgcctgttgcactctttccatcaatccaataagtttttactcgcccaaccccatcattgcccacccaagcaacataggtgaagctattcaccatcccactcccaaacccaatagcaagatatccacttttcttctcacctcgagctgctatagatatagatttataatccacggagagagtccaaaacaacgtaacctgttgatcatccaaaacaacactgttattgtacatgtcgctaaggcctccatcaaccacttgaaccttccatcccatcttctgttcatacagtgactgataatagactaggtcaggcgtgttccgatcaggcagccaaacaagctcttttggggtagctagtacaccatgggcatcaggcccgccagcatatatgacctctgttttat

SEQ ID NO: 7081 - DNA, 811 bp, Zea mays
gtcgacctgcagcctcaccggcgggatcccggactccctcgcccgcctcacgggcctccagaacctcacgctctcctacaacaacctctccggccccgtccccgccgcgctcaacggctccgccatccagaggctgtggctcaacaaccagcaaggggacgccaagctctccggcaccctcgacgtcgtcgccaccatgaccggcctccaggagctctggctccacggcaacgacttctccggcccggtccccgacgccatcgccagctgcaaggagctctacaccgtcaggctcaacaacaaccagctcctcggcctcctgccgcccggcctcgccgcgctccccgcgctccgggagctcaagctcgacaacaacaacctactgggccccgtcccggcgctcaaggcccccactttcaccttctccgggaacgagttctgcgccgccaaacccggggaagcctgcgccccggaggtcatggcgctgctgcacttcctcgacgacgtgcagtacccgaacaggctggtcgggacctggtccgggaacgacccctgcgcgggctggctcggcgtcacctgcgtccagggcaaggtcactatgctcaacctgccggggtacggcctcaacggcaccgtcagccagagcctcgccaacgtcaccacgctctccgaagtgaacctcgccgggaacaaccctcacccggccgagtgcccggacagcctcaccaggcctgggcctcgctccagaagctgggaccctgtccatgaaccaacctgtatgggcccggctgccccgcatttcagtcccacc

SEQ ID NO: 7082 - DNA, 764 bp, Zea mays
ggaccctctatagtcgacctgcagtttttggatctctttggggatgcaaagtcaatcaagaaggctttaactcggcatacaactcttttttcatgtaagagaagcattctgccatcaaagaaacggaaagcagatgacactgttgtctcagacagggacaaatttgctaaaactgtggttactcagtcagccacgggaactgatccaaatgcttccaatcctcctgtttggcctgcaacttctgaagcatctgggcaacaatggggagcttcttatgcacagcaggtcatacattcatttaaatctgcttgttagttctatgattttgtttgctgcactgattaagataagatgcatttttggaaaagaaaattgtcattgctgattgtatgtctaattcctcgcaaactagagagaggtctgatggttatttctctcaatgcctcttgctattctttgtgaatttgaagctattgcaatgttgaaacatcttgattctggaaccttttgcgagatattttttattcctatgattcttttataagcaacgggactgttactgtcatcgagaggatgtcacaacgagttgggtcaatttttcgtttatttctcacacacgaaaaattgccccaaatcgtagtgtcatcatctcctctcgatgagagtaagagtcccgttgcttatatctttgcttttgatttttacaaacagtcaatcttattatttgtttggctataaattcgtgctatagtgatttgattgta

SEQ ID NO: 7083 - DNA, 831 bp, Zea mays
caatcttgcatgcctgcaggctgtgggtagctttgttgtgtataggcctacgataagcacaacagtttgcatcagacaaaatccttcaacaatttcaaagctactgtggtgaccaagatagaaacaagattactggacagttagacataccaagtagctccagttaaacatgatagctaaatgctaatagcgagcatgaatgcatgatacttactcaagaccaatgcgcatgtaacacacgtaactacataaaccacaggtggttcatatcagccaatggttacaccggctgtatactcaaacaaaatatgatgtggccatatagacaacgctaacaccaagctgactaaactatgcagtttctagtcagatatatatcaaacatatgatgccaaacaactaaaccagtgggcccagccatccgtgacggagtcagctgctcgccccatccccacccaacatccacatctccagcagcagtcctgattcctgaattcctgataccctccagtggttccatttttttctcccccaccctggaataatggaatgacctatcccaatttcaatgtgatcctagtgcaccacccccatacctgcctgaactgctgctccctgtgcacaagcctaatcaccggaggtcaaagaatcttggcaacccacacagcccctctaaccctatatctcccagccacaagttttcagtccaatgagtggattctcgtactgaacaataattgtgctagaagaaaacagttattgccagtagacttaatgttatgatcagcttaattaaacagatcacatgcaactacgaaacagtgccatata

SEQ ID NO: 7084 - DNA, 820 bp, Zea mays
  unsure (1)..(820): unsure at all n locations
tatttggggctccccctatccttgcataagctttctcggcagcagttccaaccctttgttgaaagaattgcagatcaactccctaattggaaagctgacttaatgtctagagcaggaaagagaattcaggtgcaacatgttctcacaggcatgacagtttatttagcaatggcaattgacatcccccaatgggccttagatgccattgataagataagaaagggttttctttggagaggcacaaaggaagcaaagggaggacgctgtttggttgcctggggaaaggtgtgtcgtccccttcagcttgganngggnnccttgggaatctctagtctccctgagctttgttgggctctccgcatgagatggctgtggttgcagaaaacagatttggggcagccttgggcaagtcttcccatacaggtcccaaacaaagctagggcttttttctctatggctcttgtttctatggttggggatggttcaaacaccttgttctggaatgatagatggctgcatggcactcgaatcgctgatattgcaccctagcctgcacaagtcaattccaagaagaattgctaacaaaaggacggtgaaagaagcacttgtaaacaggaaatggatttcagatattaagggggctcttacagtaagagtcttggttgattatctaaacctttgggaatctctttcagggattgagttacagccaaacataagggataagcatgttttcagccttgctttagatggtaaatacacagcaaaagcagcatataaaggcctgttcttaggacctgctacctttgaccactacaaa

SEQ ID NO: 7085 - DNA, 744 bp, Zea mays
aagaacattggctaccagagtcccagtgggcagccatttcaaggatctctgtttgccaattccctggccattgagccttgccaggtaccagcgtaaccaaacacctggaggtgctaccgagcagcccatccataggacagcaccatcagcaagactatgcatctttactacagtcagcacaatgctcaaaatccaaaagaaagacatcaaaattatcatcactgacaaaagcactgactgcttagccctggtattcaccctccagtgctcccagtcatacttgtgacctatcaaactcttctccctgatgtatttcaggatcaaactccgtaggcgctcgcccgtctcagcaccaaccgtaatggactcgttgacaatgaacatccctgaaaatcagtgttgttagccatcagaaggattattttgttcatatttttttgtttgataatatctaatttaagagatattgcacttaatcataaaaatgatgatcagatacctagtactacgcccgctatagcatatacccaatggcctttggaagacaaaccaaccattttctggttccacccactgaaggttgtaaggcttcccatgtatccagttgtgattccgacaataagatggtcagatatgtatcgtatatcagccttgaaaatgattaccaaaccagcccatcaagaaagacccaagctgccccaagcaatttggcaatcaacatgagtttagtcatataaaatcccc

SEQ ID NO: 7086 - DNA, 837 bp, Zea mays
ctcctcgatcttcagagctgtgatgtgatttgtccagatacctacaaaaacgtaccaaatcctatctttttgtcctacccattgtttggttcccgtgcttccagaatttatatggactgtggattttaatggaaaaaaagaaaggaaaaatatgaatcataaactactgactcatgtcataacattgactttttgtgtagggttgttatctgtctttgtagcagaagaaacagtcctaaaaaagaatggagagttcctcagctaggagcaacgtttctcaggggaaccaccttggttatgcgagaagcacatccatggattccactggtcctcagttagctggtaggtctagctcaatgttgagtaggagaagtagcagacagggctcaagggggtccatcagcctctcaagggagatgggggactccatactgagctcaatgaggcattctcttcagtcggcggatcaattgctaggagacatcgatagctcagttctggctcaactcatcgaaagtggtcgagttctatcacccgaaggcgatgttgatgaggatacagtaagaatctctgaacatcataagattggccctgttccagatgatgcaataaagcaaaccagtgacaattttgcatcagcacctatatcttcagcggagacaaaagatactatttctaacgtcctagcagattcatctactaaggtaaagatagtagtggagttgagtagctgcttgtcattctcatacgtgtggttgctccgttgatatattgttgaaaagttattttttatgttatatgtgctggcatgaccatgccttcatcttgctgtaggtg

SEQ ID NO: 7087 - DNA, 805 bp, Zea mays
ttcttcagcattaagacgagctaatgcccatgggcttatttgcacagcccctgagcccttcttcctctttccctcgtcttcttttctcttcatagcagaattatgcgaagaagcagcctccgatggaataacatcgaactaggaggttcagtaatttcatgtcagtagtgagttaatgagcacatgtgaaatggaaaatggtcacccatttcttttctatttatttaaccatacgtacagctcatgatcaggcctacgtgtgcaattgctattaattgttagctatcagttagaacagtcagtacgagttataagtgaccaaaacttccattcacttgctatactacgcatgtgccatatagatataggtacatattcagcctgggagttacattatctgtttaataattcatgaagcctaaggattgagattcgtacctgatcctcaagaaacagccttggtggagtgcaccatgaaccacgacgaagtggaccaaaggaactagtactgctgagtccagtgtacgagcttacacgagacatctgtggactctgctgcccactcaaatcatcttgttcttgctctctcagcgcaatgatgtagtcataggtactgattccctgcataaggttgtcattatgatgcttcagtttcacataactacaaaaggctatgatatcacactcaaactattcatggtgtctgcatgtagtgcttactcagcggcaacagtttattggtttaatcactattttcaaagaacaaaagtttcaaagtggtactataagaaaactccatgttggt

SEQ ID NO: 7088 - DNA, 799 bp, Zea mays
agcttgcatgcctgcagctccccgagcctagctgggttgttgtcccaatggcgttcggttagtgtagtatcagcatgagcattgactggtttgaggcttgactgtctgttggggttgtcggttagcgccaactgtagaccttgcggcgctttaggtctgtgagaggttcagttcagagtcatgccgattgttcttccacagataacagttgttcacaagttcatcacttttaaacttggccagttctcttgtgataaaacatgtttatcggtttcgccttgttgacaggtgtccggttcacctgcatgccattagtttgagtgcacgcttaccgtatgtggccagtgcatctatgaattgcattttgaatgttatagcactccccaaagccagttgccgctgcgataggatttgcaaaaagcttctacatctttcagttgctcttgttcatttagccatgctatggacatggtgtatgatctacttagccactggaattcctggtgaacatttggaacaagaacccttttagacattgcatgctgttttactgttgggatttgggagtacgcattacatacctcctgttgcaaagtgtatgcaactgatgttaggtacttccgtactagcatattctgcttcaaaacttttgtgaccatccagattgagcatgggtggacccagccttaggccatataggactaggactaccctatattttggccaaaattgttaataccggttagttttagaaggtccaaactaaaaatgtccaacatctttaagtactccagtctgt

SEQ ID NO: 7089 - DNA, 1144 bp, Zea mays
tgggctggcacccagcaggttctggctctcctttctgggacaggtcacggggtcccatgccatatcatctccgaacgtgcgagccagagacgtttgtgttttaacaccatatagaattatgaataatagtacaagtcctacgttgacgttgctacctacgttcatttgttggagaacccatcccaacgagacggagaaagaaaaacaagagcgaggaagactgccgtccgcgttgacgcggtggcctagtagcgcgtaggcccactctagtggccatgtgggttcgtggcggtattgcagtcactaataatgggccaagctcccgttccactagtagcagcccagtacgcagttcacaggatagattccagagcatcgccaagcagtcggtatcagtgccctggaagggccagttaaaacatgggcctcatgcattgggcctcccgcctccgtggacctgtacagtggtgtttaatctggaggctattaagatgtttaagggagttatttgcattgcaaaaaaatcttagagtcgtctcttcgtgaagagacgtctatgactcgtaaatcaagtagtaacggacgtctcacttcccactgtacgaatttgtcgtctgttctatcgatctgatgctatacaaatacatttaattctgtatttattaataaactacgtttatagacactccattgtataatagagtctcttagttgtctcttgtgcttggagaactgttttggtgtctcttcactgtacatgcccttatttggcgcagctaaaaggccggggaacaaaaaacttagagaaacatttaaggtctgtttgattttagatcatttatttgtttcaaacttgagctttaataaaatttagatctagtgaagaaaggaatcaacctcagtccagattcgcatgcagggcgggaggacgtgtgtggtgtgcatggttcatgacgaatccaattccttccagccacattttccttgcgggaaaaacaagaaacccactaggaaaaattaagccagtttccaagcaagctttaatttggctttctcgatcgggcggcgacggtttgcaaattccatagaccctttttcattgcgttaatttgacaactagctagcgaaccttccttcctaccat

SEQ ID NO: 7090 - DNA, 802 bp, Zea mays
aaataaatggtcaaagctagtgtacgccttacaaaagagaatggagagagagattaatactcttttccatagacttgcattgtatatagagccattggtagttttaccattatcatttgtgagcttcgctaatacgctatcgggcccacaaatcataggcacagatgattccactagtcataaacacgagataacataataacaggaagctaaaactgagagtgacaaaatttaaaatttctcgttgtatatatatgatagtttaattcacgacaagctcagctccattatttttttgacacatactacgtatacgtgccaagcagctcaaagcatgtaaaacatgcaagttcctgcacaaaagtcggcgcaccatatgcatggattatcaacgtgacaactttttttttgggtggccggccggcctagctatcgcgtatatatatacgtacgtgcagcctttttaacggccgcaatttgcacagcgaaagcgatcttatatagttcacgcacgttatacatttacatatatgtctgtccccattagaccattagtgtggtgtttgtggcacgtgacggattaataatctctgtccccacttgcggcatgcatgccacgcacaaataaaagcgagtcatgcatgtgacactataagattgctgctgctggaagaatatgattgggcgtgtgtgtcgttggtggtggtgcgtctgtgtttttctagaaagagacgtgtagttttcactgtcaagtctcccatgtgccctgaggcgttgactactatacaatcagactctacct

SEQ ID NO: 7091 - DNA, 772 bp, Zea mays
aaggaccagaccaggaggtggcactgtggcacacacgcagctgctgaacatggaggggttgcgggccataaagctggtcaggcagcggcaagatcaaggcatggcgttgggaagttctgctccttccgtcctagtcaagtcctgatcttgttaccgctcaaatgcaaggtcgacttagtagctctgtactgcttgatgaaatgaaaaaaagacagatctagtgttggcggctcccacacgtaagtgggatataacctcgacaagttacctttcatcttggctttaatttataccgacttttacagtattttgtctttataaattataaagactacagttcaaacagctgactttaattcgaaacgaacacccccttcatttttgagaggttacgcggacacaggacttttggctcagtgaaaccacttctcatcattactctacgtctatccttgtatctatactacatgattactccactaatcgaatctaatcgacgactaaccataatcagttgtctaatcagtacccatatgactaccactctctctcgaaatatattatattcacattaagcatttgcataaaaaacctagtcctacgcagcaggccattcatgttgtataaaaaaaaacaacaaatagcagaaccgtggtctactcaaaagcagagtgtgtaatgattccgtcaagttctgcatgctaattaggaaactaatgtcgtgttccgcactaataaacaaagcgcacaaagcagagtgtgtaatgattcc

SEQ ID NO: 7092 - DNA, 787 bp, Zea mays
actagacaaggagaataaaactcatcatctgcacttcacaccagccaagggctcagcgttaattgccgggaatacattgggagctctgcaatcgcaagctagtttgctgtcaacaacgtgcatcctttgttgagaggccatatcgattagtttgaagacgttgcaagaggtcagccatcatggctaagagggatggctacatggacagctcttgtggctactctaatggaacccctaaaaggctggtgcaggattgtagcagtcatgtgcaggcgcaagctaagaagtaagtacagatcatgttatgtacactaaacagagttaagtatgtgcacattatatatactaaacagagttaagtatgtgaaccgcaaatggaattacgataaatatagaaggaaaaatagttagctatgtgtgtttttcagttatttcttttgctccacatgatgttccttgttcttatcacttgtgctattcattttgtttcttgttatgtttccaagttattaatggtcgtactttcctgagtaggaaagttcacattagcacaagaactcagcacacatacgcaccgtatcatgatggctaccagtggagaaaatacgggcaaaagctgatccgaggcagtacctacccaaggtatgcctaattaaccattcaatctttttatcttgcattttctaacaagtggagttaatagttacagactcgtgtaatatgttaattatgttgaagtacgacaattcattacctaagaactactaccttggctaattagcaccga

SEQ ID NO: 7093 - DNA, 713 bp, Zea mays
cacgaacctacccaagcaaacctgcttggcctcgtccgtccccagcccagccggggccccctcctttaatttcctttcctgtggtgacgacgacgagacgacagcgagtggtcgaaagcagcactactcccacaggccacagctcgctcgcgggacatgctgcctgccccggccccggccatttccaacaaccaatgagctcgcgcgccatggatcgcgaccggcctcggctataccaatagtgtcacgcacacacactatagctactagtcgtcgtcgtcgtggcggtggtcatcgtcctctctctctctctctctaaccagtctagctactagctccgtagctactacgcgtacgatcgagaagaaataagaagcctgcttcttagccattcgtgttcctcgtggccgtcgccctcgccgtcgtcgtcacttgaacgaacagttgcatgcaagtacgtgcgtacgtacactcgtacagggactagctagctagctagctaactccaagacagtactaatacaaaacaaagagagtatgtagcagtggacagtggtacgtactgcggtagtagtagaagaaggcgcctgcggcggcgaggtgtaataaggaggatgttcggcggcggggagcaacaagtggtgcgcggcgccggcgccggcgtcgacgggcgcctcgaggcggtactcgtgcatgatccagtcggacttctg

SEQ ID NO: 7094 - DNA, 744 bp, Zea mays
agcaaacagtgtgtggtggttgcgttgccgcggtggttttgtgcgcccgacatgcctgatcgatttcaccccggccggccagccgggcccggcggtgctttttcgcagagatttttaaggtcgtgcgtcacggctgccgatggcggccgctcgcctttctctgctcctcttccgcgctcgctgccgcgcgcgcgcggccgggcctcgcgacctctccctcctccgtctccctctcttgcccggtcaggggtccacatagctttggttgcgcgcgctctctctctctctcatggttggtggcacttccctaccctagcgaaactaatcccactaggcggtgtcaggggagctatatataaccacctccattgtagcttgtttccttgtacccggcttccctcgtcaccggctccggctccggcaccggctcaatacaatcccatcaccgatcattcattccctttgcctacgactgctacctccccctccttccatcttcgatagacgaccaaataatggcggtattcgacgtctgaatcctcgtactgatcttatactgcatacagacagacagacccttcttcttccttagttccctatagctagctctagctaggagaccgatcatgagcatctcggtgaacgggcagtcggtggtgccgccggggttccgtttccacccgacggaggaggagctgctgacctactacctgaaaaaagaaagtggcgtcggagcgcatcgac

SEQ ID NO: 7095 - DNA, 847 bp, Zea mays
agtcgacctgcagccgctgccgtcgcagcactcactagctcaggctctgccgagctacaacaacttggggttcggggagcccagcttgtactggccctgcccctgcggtgacccgggggagcagaaggtgcagcttggcagcaagctggaaatcgtggacggtctcgtgcagctggccaactctgctgcgaactgacagtgctatctgaaatgctggttgttttgcttgtgtggctcggggtcgggggttacgttcatggaactgatagcctgagccctgaagatagcggggtataacatacattgtgccgtttgtttgtcgtattttggtgtatcgtattttggtgtacaaaggcatccaagagtctagtcaagctaactagatgatattatcgggtgtatgatctctctaccggaatggcttaaggcattcaccacagacgaagtgctacattgttaatgagaaacaacactggatgtgtggttagtctctcccgtaatgagcattcacctccgtttagattttaaattgtgagatgttttagttttcttagatacgtaactataagacattttgtttttttaattgtaagacattatggttttttttaaatatgttactctttatcggctttaaagcattcaccttcttttagattttaaattatgagcattttggattttttttccttttaggttttaaattaagatatatattttttacttttcgataccttactataagaaattttgaatttttaatatgttacttttaccctttatttttttatattaagaatatatcttagtgaaatctttagtatttaaacaaagcttaaaatttttt

SEQ ID NO: 7096 - DNA, 845 bp, Zea mays
tgcatgcctgcaggggcatgtttgacaaccaatatggctagcgtgtgttggttctgtgccaggtgtttaccgccgactggccctgtgtatatttggttggagagatttgagatctaattgatgttgtttccataaaccataagatctcatccctttatatatgtacactaggtctctcaatcaatcaatccacacaatctcattctctttcagtttagtttgtagctttaaaatgatttgccttaaattctggttgttccttttgacacatcataaattctgttttttgtcagagtacatgtcatcccttcttcaagtagaagtcatcccagtagatggtgcacctagttcaacatcatttaagcaagaagagtgggctcagaacagtattattttgtttgaaaatcttctgaacttcacaggagaagttgctaattgcaaagatttttctcagaagcttgcttcaggtgccatgatatttgtcaatgattctttctcactgtctcataagattcttgcatcaactgttgggatcacgtgcttctgctatgcgtctcttgctggtttccattttgaagaggagcttatgaaattgataaagatcacggactccacgaggcgcccatatattgccattgtaatcattaacctatttttcccgatgtatatgtagctgacagtctttattcaagatctagctatcaaaaagcaagtgcctattgttttttaatgaaatatgttgcagctttacttccagtattctatcaatgtctgtaaagtatgctaattcaggctgtaaagatgaatgacttattaagaacaaccaaaatttcattttcttatcc

SEQ ID NO: 7097 - DNA, 851 bp, Zea mays
atgatgttctctttgaagatagcgaattgcgttcatctcttcatgagtactctgtctttttgaacagcccaatcatttgtctctgccccacccattcattttcaggaattatgctaactcattaagcgatattggccttgtaccaaatgatttatgcactgcatcggagtgtttttttttttgcctctccatatcctgcttagtctttgcttcagagaaaagggacaagcaccagcatcgcttgagcctttcttggccgaaatttgcttctccgggatcctggtgattcttacatcgtcatgctatagaacaggatatgaagtagtgagttatgacgataatatttgccaatccatcacttgtggttccccaggatcaaatttcgatggtttggggtggggacagtacgctctgttaagttttgagcaatcccctatcctggaggcttggccccaggaaaaggaatacaaccagctagccttttggttttcggatggctggatcttagtccctaagctgcttcggttattcccctggtgatttgaatgccacactttcttagctgttgtcctctttcttgttctgtggatctgattctacggtctctgaattctcacattttcgttttgtaggggtgtgtgtgcaagtcagcaattacctaactttgtttaggcattgtacgtttgcactcgcaaatatgagaagaagaaaaaagagagatattagagttcttattggtgaccaatcactatattcacttgaacttgcattcaatatctgtgcaattatgctgaatttgggaatccattttaagtaattcttgaaaagatctttatagtccttcagcaact

SEQ ID NO: 7098 - DNA, 767 bp, Zea mays
aattccagcagcaccagtaccagcacctacagcgccgtcagcttatcctcaacaacctgcggcagctcaaccttattatggcacaacctactactgataagtagagtagtcgtggatggtgatccgatgagcctgttaatctaccttttcgcatgtgtgtggttcctctgtactgccattgtttagctcgcctttagacgaatgctagcgacgagatgatcacttgagaacaaatctgagatttgtacaatcagcatttttgtcgctaggagttgccattgttttcatgcaatagcataatctactttagacgaggtagcgttgttaaccatgaatatgaacataatcgacataattcagtgttcatgcctcctttcgtactgtatttttaccccaccagtggtgatggcgggattcctgtcaagcacgctcactggtggagccctccgaacaaattgtcagctaatggctcacgatctgcgactacgcagttgactaatttatactgtgtcaatgctcaacagatcagctcctagagttactctccggtaagacagccagatgatgatgtccgctggttggtagttgaaaatttatgtatttttgcttgtgctatacgagatgaaatttagcgagggcaattataatgacccaaataagccttgtttcacgggtatctgagcaattcttgttgcttttgcaaactcatgaattgtctagttcgtcgggccatcttgcatttccggccatgctactcttgtttggtt

SEQ ID NO: 7099 - DNA, 737 bp, Zea mays
acacatggcacgatacaactggttgcagcagaattgagtcaaggatgacaaataattcggtcatacatagttttaaacaaaatactaacaaaaagaaaaaggactcccatagccagcagagccttcgtcttcatactaatgaaccaccacaacagcacgaggcctaggcagctacaaaatttcccaaaacatggcataaagaaaaatcgcatattgcccgagaccacgactttaacatagaaaccccaccgaccttatcactcctcccccacaatatttcggcaaaaccaagccttaccagatcacccccaccacctttcttttagttctgtttttcttcaaaatgatcacagaaggtcagcgacgttggcaggcagctcctcaatcaacacgttgtagaacttctggatgtcgaacagcatccgctcgtcgtcgcgggtcacaaagttgatggcaacacccttcctaccgaaacgaccactacgaccaatgcgatgcaggtaattctctggctgggtggggagatcatagttgatgaccagggacacctgctgaacatcaataccacgagcaagcaggtcggtggtgatgagcacacgggaggagccagaccggaactccctcatgatgatgtctctagtgttctggtccatgtcaccatgagtggcagaaacagtgtggtccctgctcctcatcttgtcagtgagccagtccaccttgcggcgggtgttgacaaa

SEQ ID NO: 7100 - DNA, 811 bp, Zea mays
gcgtccgcggccctccgccctcgccctcccccctccccacaaatctcgcctcctcacccaacgccatcagcgctgccctccgctccatccctgtagcgcagaccttcgccaccgtccctgcccttcctcaccgcgcaatcaccgcccttcccgacgtgcctcggccgccatccacggcatcaccttccttccccacgcgcgcgccccctcctctgtgcgtgccccgcccccgttctttgctcacccgatgccccgccacctccgccgcgatagcctcccccacgaagtgcccccgtgatgtcttccattcccttcctccctcattcgtcccgttgcagcgattgctcccagtggctcggcggcaatggaggcaccacctgacccggtcgtcccatcctgctcgacgagatcgtcggcgacatccacggtgtggttccagattttcctttgctggctgccagggctatcaatgcagctcagcgagctagccccactgccagcttagttgtcgtgacagccattggggctgcacgccgtcagtggggtgaaggcgacagctgacgagatgttggccgaagcggagaaggcaaatgtcctagctgcaaaaaaaattgatcgcctgcttcgtcgttgacctcccatgatgtaaggttgaatcagttagtgttcatgtctaaaatttgatttttggttccaattgttttgctgggatgaattaaattgtacttgtttcatgtataagtataactaattgtagaaaccttgcaacatatggttacagggtgggtttatgctatgactttcttgaagg

SEQ ID NO: 7101 - DNA, 1003 bp, Zea mays
acctagactactgacctcagttggatagcagcagctactatcagtgaaaatgcatctaacgtgcagctaagatatatgtaacaggaacattgttaaggaatgtgtatgattttgtatgatcgtttttttgtgctcgtacatgaagaatatatagattagatcaattgttttccttttttctttcctcctaccatgttgttgatctgcagccttgactagatggtccgcaaccacgctacaggagcggcttctttcttgcatgcttccggacggtctatgcctagggttcggacggtccacgatgtgtagggtcttcttctccgcaaaaacttgaatctcacctcccgagagggaccccattggaggaggtgagatccaaggttatcttggggtcggcagaccacccaagatgcctctaatcgatgtagagccgaatagagatgaagatttgatgtagagaaaggctaaactagggctagactatggctagattactcctactcctaaggaatggaaagaacaatgcagataaggtaaatttaataaatagatttaattggatcgttgtggggttcaatcagtcgtaccccttcatctatataaatggggtctggactcgttacaagtcggctcgtaaacaaattcccaaagaaataaagaactctaaatgattttgttcacgcgcggaccgtccacgcagccaccgcggaccagtgctcaacacatgcattttagattttttacaagtcatgtattgaggattattctcatttatattaacatagaaccatgatctttgagggacatcaagttttacccattctcatatggtaaccagagtcgagttcactagctatttgttctttggtcgcttcaaatttctctgcgttgtcagttgcctccttaattgcatatctggtcaccgagaaactggcgaagaacaaccatgcactatggaaaatgtaggtcctctttgcactccacgttgtgcaggtggcgcacc

SEQ ID NO: 7102 - DNA, 806 bp, Zea mays
aacagagaacatagacttccgttgttctgcttaaagtgcaattccaccatgttcttgtcgtgctgctgatttagggtccatccttgaatcaccagattaggtcattcaacaattcatatcacagttcaatcgtttctttgtgatcatccttgttattgtcaaaactacgggcttgtttggttcgtggctaactacgccacacattgactaaggtttgtcgttcgaattgaaaaactaacattagacagaaaagttagacaaagtgtggcaagttaggcagcgaaccaaacaggccctacgtcttctcatcatcctatattgtgtagacacttgtttcatggatgccttatcatgttcattcttcttcaggttcgtggcatctgtgtatgcggcgatgctgggatcgcgacatcatcgagggaccgtactgtgaagttctggacccggaacccagaaaaggagagcgaatatgttctctccaagacactcgcaggacattcgagttttgtcggcccattggcttggatacctccttcagaccgttttcctgaaggtggaatcgtctctggtggaatggacacatttgttttcctctgggatctgcaaaaaggagaagttgccgagacaatgaaggggcacagttcgcaagtcactggactcgctgtggacactaacggtgacatcatctcttcatccatggattggtaaactctcatagacaagtgtaatcctaaattcctaatgctacatgttcttgtggcatctttccttggcttgcttgcttattttaagttcattctctgcgt

SEQ ID NO: 7103 - DNA, 779 bp, Zea mays
tcgagatcgccggccgctccgcgccggtgttcatcccgcacaacccccgccggaacgcgtctcggatcgctgcacccaacgcgccgtccaccgacgtcgaccgcatcatcaacgtcttcttccggcacgagctccggcacccggagggcgcggtgtcggtgcacccgttcaccaccatctccccgtactcctccatgcacgacgaggtgtgccgcctcgccgtcgagaagcgcacgtcgctgatcctcctccactaccacaagcaccacttgctcgccggcggcgtgcacgcgtcagttgggctgcgcgtcgtcaaccgcaaggtgctggaggtcgcgccgtgctcggtcgcggtgttcgtcgaccgcaacgccgggaacgtggggctgtgcaatttcattcccgggccgctgcaagactgctcgggctcctccacggctagcagtggcctctcgtcgagcgggccccagttccgcgccgccgtggcggcgctcttcttcggcggcggcgacgaccgcgaggccatgtcctacgtggcgcgcatggcgcgccatccgggcgtgacagttgcagtagtgcggttcctaccagcccgaggcatcaaggacgacccggcggatcggcgggtggacaaccgcgccatcgaggaggtgaaggcgctcgcggcgaggagcaggaacatgcaagtccgggaggagctcgttggcgacatggagaggatcgtcgaggtgctgaggggtcttgacaaggccggctatgacctggtcatcgttggcatg

SEQ ID NO: 7104 - DNA, 748 bp, Zea mays
aggtagaacattagcttgctaaatgatgaaaatagcgaacttcaatcctcagcaagaattaatgttgctgcggaattgtacagaactaatagggaggttgcttgtgttgtagttatatgctttggagaaacgaagttatcccatgctcctagaatttgtcagttcgtttgtaagtaccattggatatcagggaacgtaacattatctgtagactgtactagttgatacccctggagtaatcagagcgatgtcccatggtctttcaaatattacaaagcataaaatatatgtagctgtaagatcattgttgtttaatgccatcatattaagttaggaaggtgatgatgttgagcttgttattgagatgctgtggcgatttaattactttctctccttgcccgtgcacgcactcatgcaatttggtttcagttggggaagcaaaataaccaaagggaaaaatatgtagtttgcctactgtgttctcccgaatttcaacttcggactcagaaacgtcagaggaaacaagaaaagtaagatttgtctgtaccctttccttccaaaaccgccttacaaaactaccaaagaggttattcagaaattcagtttttgttactctttcaataaaaaaaacttgaactgtagcttcaaaacatcgcacttctccctttgtccgagtggtacagtgcgtcatttctcatcttccgagaaatcaaacatttacaactttaatcaaatatataaaaattat

SEQ ID NO: 7105 - DNA, 801 bp, Zea mays
ccctccaatctttacaagttgaaaccagaactgtctagaaaacacacatgagaccaacaaatgattaatggactcatcatcttgatcacaaagtgggagacaatctgggtgatccaatccgcgccttgcaagcctatcagcagtccaacatctatcatgctccacaagccaaataaagaatttgcatttccggggagcccaagacttccacaccctctctgctggctcaaacccaattgacccctgaaaaagagccttgtacgcggagctagctgagtaatttccagaagcacaaaattttccaaatatggcggtctgtaataccgggctgaatctccatatcttccataacctcacagagatccataagctcaccaataactgtaacagagagatttccatgcagatcagccatccaacgaagttaggcaaaacatccttgaccagcctcctgttagcaaggaggatgggcaccaaatcagccactgatggagctaagtctttaatacacctaccatccagtcacttatccttccaaaaaagggtattggcaccatccccaaccttagcaacaacagcttcagcaaacaatttctgcactacaacacacactttaattgagaactccgaccaaggctttgaatgatcagttttttgtagccatggccatggaacccgcaaggcccaaccaaggttccaaagatcactaatccctggactgcctcacagtcgctgctggacagcagaccgcctagcaaagaaaggactgcctcaccctcaattatgtcccctgtgtgatca

SEQ ID NO: 7106 - DNA, 745 bp, Zea mays
ggacaccgcctgcctcagcagctcgttgtggtagctggagaggttgttgtagctcctgaggcagccggcctcgtcgtagtcgccgtccttgctcgagcccgggtacagcgtcaggtacagcgggaagcacccgatcggcagcaccccgggcaccaccacgtccaccgcgcccagcccgatcagcgtctgcaaagcgtgcgtgcgtgcgtgcgcgttcaggttgcggccgggcggcggcggcggcaacgatgacgagtcacgacgacatgttatgtacttgtgtgttacgtttgcaggcgataacgacgataagtacctacctccacgccgcttgcgatccggtccacgatctccggcacgtagctcctgacctcggccatggccttgccgccgaagagcggcgcgttgtagtcgttgcccccgaactcgcccacgacgaacagggagctgttgaagtagctctggcaatctgcacgcaagtacatacggcacggcacattattaattcactacgattaattcatcgtatccactgataatcgcgcgcctgatgatcttggttagcgatggcacacacgacgagagtgaaacggtcgtcaccggcgccgcagatggagggcatgagctgctggaaccactggatctgggtgccccagggcccccgtgttccaaaatgctgctagccgaggccgtgctttattgaagaaattcaggtccatggtgatcgcggccaatgatggccatg

SEQ ID NO: 7107 - DNA, 763 bp, Zea mays
acagccatgatgctcggacttgcgtctcagtgggacaagttgagtttcatggctgcttcaggctgtcacagatgaatgcatattatggtgctctaggagcttttggtcaggtcgttagcttaataaccctggcctttggtagattgatggtttcctggttgttgaacaggaccgtttgtttctagtttttctctattcctagtgtggtagcgcgagtgagagatcaggtatcaccagatcatggttgcaggatttctctctctctctattgatatgagattttattaggaattaagaatcttgtaggaatttataggactcaaatgaaagaggttcctttatctcactagtttgttacagatcataaattttagaagtcggttattgatcagcgtcctctgtctcatatctgatattttctcactattgcaggttggaaatgttgatgctttgagctgctattacgctcacggggagcaaaatccaagtttccagagacggtgtttctggatgctggaaccgtaagattattttttcattcagttagctcaaatctgtgaaattatgatctatggcacatttaagtagtgagtcacaattgtgctgaattactgtgtaatttgttactttaggtatacattgaattgtttctaacatctgtccttaagaaacaaaaaacagtggttgcaactttcaacttcattgatttgtcttattctctacttttgcagtgcatacgaacacattgggctggtacaatata

SEQ ID NO: 7108 - DNA, 786 bp, Zea mays
aacctgacgtcgctgtccgatctggatctgtccttcaacgacctgcaaggcgaggtgcccgaccgaggcttcttcagaaacctgcctcgctcatcggttgccggaaacgaaaacctctgtggcggaatgcctcggcttcgcctgcatccgtgccccacgtccgcttcggggaagaacagtcggagcaagaggtggccgccgctgaagcatgttgaaatggctctggcgacagtgggcgcagtcgtgttcttggcatcattattagccgcagctactcagctcgtcgtctgtaggagccgtaaacaaaggcggcagcagacgaagaggcagcccctaggagccccagcgagcgaccggagagcggtacgagagggtctcttacaaggagctgtcggaggggacgaaggggttttcagacgccaacctgctcggaagaggaagctacggcacagtctacaggtgcgttctcagccgtctcaccgacgatggcggaagaaccgtagccgcctccgccgccgccgtcgccgtgaaggtgttcgacctcgagcggtccggatccacgcgaagcttcgtggccgaatgcgaggcgctccggagcgcgcgccaccgcgtgccttgtaaggaccatcacgtgctgctcgagcgtggaccgccaggggcaggagttcaaggccctggtgttcgagctcatgcccaaacgcaacctgaaccgctggctccatcccagcccgaaaaccgacgaggcccaagcccaagtcgagaccgagaacacgctgagcctgaacc

SEQ ID NO: 7109 - DNA, 772 bp, Zea mays
aaagacgtaagacctatagatgaataacattaggagtgttcatgggcatccgtgtaattaacaaaacaactaagctatacaaagtaccttgtcacagtatgctctggtcacccaattgttgatgtgtttaactagaaaggcctgaagagctccattcttctctctcttgatatattccaggtagtttgtatgaactacaccaacaacatggttgaacttgtcagtccagcgtttcccatgatgataccaattgagatgttctggttcttccaatattgctatatcagcttctcttgacggtatgaactgagacgtatcaccagctggaatgatgctacgccgctcttttgagaactgtaaaacatataacatgtcaatatcaagtcattgaaaatatcgaatttgagtatttgacataatacacattaaatgtaaccttgccaggataaaaggatatcttgaagtttgattcaaatcctagtctttcctccagccagctccttatataagtttcctgctcttctggtgaactgaacgtcatgctatttgggtataccagttcttggtctgatttgcaaagccaaggcactaccagtgtcacatcttgtctagtaccttttgcgagatatgctgcacggaacaatggattaactgctgttcctgtcatccatggtaaacttgctgtggtgactatagccacatgtcttttatcgtctgagacctcagactttgtaggttcactccagaaaccatcatcagcatgataaccaga

SEQ ID NO: 7110 - DNA, 945 bp, Zea mays
catcttgcatgcctgcaggagcagttcggggtcaccgtcaaccacgtccacgcgatcgccattctcatcgccaccttcaactacgataagtccccttccgctatcgaccaggttcgtcaccatgcattcgcccccctcttctccgccattgctcttgtagattgctatgccacggtatcaattggcagttggtttagcaatagcggaccccgagatcctacacattgttctgtgggttgtctcttttctttaaaggagcaaatagaaaaaaaaggggagaaatagagagatagagatgcgttgtggtttgttgacgcttaccgtcgtttagcacgccatgattgctgtggttggctgggacaggtgctgttcatagtcttgtggaaagaaaaaaaatgtccattcctgcggcggttaggcggggattttttaggcttattggagacgtagctgaactgaactgttgggttggtggcacattgtttgttcatagagtgattagtgtgttcgctgcaaaaccatctggggggttactttgacatccattggggtgtgctcttttgccaaccttttgattccttgtttattctgagaaaggtccctgtcgcagagattaaattatgttagaagctgctttctgcctctcttttcttttgcttagattattgatcctcaaagccgtcctttcctgcatctacacttcgtttctctctccccccccccccttttttttgtcgatttacctatagtttaggcgtgcagtgtcatgggcccatgttatttgaagacgtgctcgtttttgcatacaatgaccaatcttattcgttgcatcattacttttggtaaatcaaacagatgtcttcttctgattcttgcaatttatagcatattattgtccagaattctattttggcttaataaataatgtccgacacaggacacttt

SEQ ID NO: 7111 - DNA, 908 bp, Zea mays
ttgacaacattagtggaaaacaaaagcagccaagaaaattaagatttacagataaggactaccaacctgcacctcatttcatgcctcctaaacggatctccaaaatccagcatgctaacatgcaagaaaggcacgcgctcatccgaactagaaggtccatacaaaaccatagcctctgaagcatttgtgacatcatagacattcaccacaatatcctgattgccagcaagtttgctcagcaaattctccacaagtgactccacatcaaacgctccaccaagatatctgggagcacacagcaaattattctcttgaaaattagataagcatagagtatcatttgattaaattgagacaagctgcaatgattataacctgcatgatttattactaaatgtgcctgccataactgccataagcacgctataccttttttaaaaaagaaacacattgtttctattatcacctgttactagacatgttaaggtcatcatagtcaacctaaattcagtattgatcagtgaaccacaaatgtggcatgatacacgatgacaagatattacatgatcaaataatagtgcacaaaattttattcatacccacatgttaaacatgagtcttaaaggcgacaatgctagaatatttggttaaaaataaaacaacaaaggatgtgagttagaacatctcacccaatagttgctttcacacgttgctcaactgatgcatcagcggggagatcagggtggtacacaccaaaagtgagaacttcttccaaggggtttgatccaaacacaccaaatgggtttgttaccccacttttgccagaaacctgggccccaaaaagtttctcggccctctatttcgaaaataaaaaattggtttacataaaaaaatcaaagggcataaac

SEQ ID NO: 7112 - DNA, 779 bp, Zea mays
  unsure (1)..(779): unsure at all n locations
atcttgcatgcctgcagtagtatgtattcatttttcgaatttcgatgaagaataatacatgcgcgataattacaagttacttgtcatgcactacatccatgggttggccatgtgggaaggaaaagggagaagccatggtgtgctggtgggatggagaaatatgctagtttcactttctatatttattgttctccttcatcattgaatatttcaattcttggaaatacttgtcctttggagcaagttgaggtcatgagcggtaggtgtcaccatcgtcatggcgtaaagctagggatggttagagatttctatctgagagactggcgtgtctagcctaccacacacatagctatccatactggaaatttccatcactgtttggagaaattgcaggaccagctgcatgagttctaatgcagtaaaaagagggaaagatggagaaatgtagttgtagttgtagactctgcatagtagacatttgtgatgttcataggtggtaatgtggtatggttctcttgttgatgggtgttgcttgttgatctacatatgtttcattgatgcgcctcacatggtatttgtatgttgcctagttgcctactacagttgtatggttgtgttatgcttgctaagtgcgaatgtctactccacacactcaaactgtacagatacatagatgctacgttatagattagagctacaagtgtaagttgaatcataacttgttaagattgcatggactacagctggtctgcaaatntctctaaaagtnggccttcacc

SEQ ID NO: 7113 - DNA, 924 bp, Zea mays
gcacaccaagtgtgcaagggcgttaagctcagccaggcaggcaagcaactctcagggctgagcaagtgacgactataggcagggtggcaacagaatcagcacggggatgggatttatttaaccccagactgaaattcgctcccacagggagtcagacttaggacttgaggagtgctatacataccacctaaccaactcagccagaggccccaatccaggcacacaagatcaatccattggtgttccctccctcatcagttgtagagcattgcttccttgccggtgcaatgtgcacctttgcagttgtccgcgcatgatgccttacatatcgcgcggccatggccacggccgagccctatgtgcagacgtgcagttgtgccacatgcttgagcctcacgtgcatccgtgccacacacctaccaataccaaggccccgcgccatggccgcctgggtcctagaggtagagagaaagggaagggaagggaagagaaataatagaaagggagggaggaagaagggctaggggtaaaatgtcatttcacaatagttctctctcctccctagatgaaaatgaatattttagacatggtgtcttttagaaaaattgacatagactagagtgtccactagcaaattgaactttttccgtgtccgctgacaaagtgacttcacttttagtgttatgtagcatttccttattctaaaataaacagacaaaaggatgaaatgtcatttagaccatatatatcatcgtctacataaaaagatcattcctcactcttattttttatttgtaagattagttgtagacatgtctaattgtgtgttgatttctttcatgaaaactcacgtcatatctcatattatacttggagtgaatgccttcatcttgaaaatagtgaaaacagaacttacatgtcatt

SEQ ID NO: 7114 - DNA, 833 bp, Zea mays
atcttgcatgcctgcagccacaccactccggctccggccgggtaagatggcatcgatctttctgagagcaagccatgcggccacgggccacgggagatggaaacgtgaaagcgaaaagagatcagagacccgtttcgtgccccgtgcacacaccgaaaccggcagacaggcgcggccggcacacaggttccgccgcctgcatgcccggctggccggggcgtgcacggtgcacgagctcggcacatagcatcgaaagcgacgcgcgccagcccggctcgggtcggcgacgggcgagagagagagtctgggagcgctggctgagcagctgtcgcggtcgtctgtctcgtcgctagggcgcgtgcatgtgctgtgccgtcgcgcgcaggctaggcgctagctagggatttgcacggagggcgtacgcgcgggagctgtcacacccgggcagggccgcgacatctatcggtctcagcagcgttggcgttgtgttgcgttgcgttgcgtagcacccgtcacggccggccgcgcgcgatggctggctgccagcgtcagcgagcccgtgagggaggccgcggctcccatgccgcatcgctgttcccggcatttcggtccatggcgcccggcaggcaactcctgtgtctgtgtgcgctgcgcgcgcgcgccgaaaccgggcaacgcttttcgtagtccggggccgctcaggtcacgtgcgcgcgccccacgcaactccaattggcaaccagaccgatccttcgaggccattgaattggtagcaagtgagacccgcgcgcttgcgcttgagggtcgaacactggcactggttgcggtttggg

SEQ ID NO: 7115 - DNA, 759 bp, Zea mays
gccatcatgaccaactttcgcagtcacaaactgcaagcccttgagcgcaacagcagcaccgctcttgcttctgtccaatctcttcctcacgttctttcccatctgtgtctgtggcgccttattgcttgagttattcatctttagcccatttttcacctgcctaaactttgatgctagcttgccgctccttgacgaggaaggtgacacaagtgacaggccgtcaaacccaccaccatgccctgagccgccatcatcgactaccctgacatcttcgattgccatggaatcgcgctgtacgatggtgatctccacaacctcatcatcatctttgaacctggcggccttcacgcccttccggcttgatcctcccaaattgccactgtgtgggattaatgttgcagtgtcatcttgtgacctccttgaactgcccgtgaccgtgtctgccatattcttctttaccgctgaggttcaagttcttcttactctctggtcaaaagataaaatgagtaaccaggacgagaacacgggaaaaccttgcaataagttctgaagcaaaaacttgccaactgaaatacatttctcatctatctgtaatcagtcaagtaagaacaactccaagagatgagcaattcgtatcacgtagtgcaattattgatatttttacaagattactgaagctgagtttgcatttctgaattgttccatctcaggacaagtctttcagttttatgtttatgggggtgtaccctgcacggcatg

SEQ ID NO: 7116 - DNA, 798 bp, Zea mays
cttgcatgcctgcaggcctatgaactggttcaagggaatcttgtaagttttgcattcacgcaaattatctgtcattagttgtaaaactagcttgattttgattttttttgtccaatcgacataaatcaaattcaacactttaacttcaggttcagtggaattcatttatggacaaatcaatacctgatccaccaacagctgttcttcttcatggcatccttggaagcaggaaaaactggggtaaatgaggagtcctcaatgtgtctgtaatttgtcttaatatttgtattggcccattttgtattttgttataggtttgaagttgagtaacatacttgatttttttatattttggttgtgaaccacatgactaacaaagtaacaaacaaattgtctgtgaaggatcttttgcgaagagattggctcaggaattcccaatgtggcaggtcattatatctatcattctgatggtggcctgaattactctacaatgcatatatcatatatgaaaaatgattgacatttctggtttctctttatgcagttcctcttggttgatttgcgctgccatggcgactcaacatcaattaagaagagtggaccacacactgttgcctcaactgctcttgatgttctaaagctggtttgtagctttttgcgtcagctatttatgtcttagctctttggcttctcattcttttcaatcttcatttttatcaatagaactagaagtgtagcttgtttgaaaatgaactctatctgtgtccaacgtgcttgcacaatatctgcatattcatt

SEQ ID NO: 7117 - DNA, 751 bp, Zea mays
ttttgctacggtggcggcgctcgcaagccacagtggaggaggctaaaaggatggagaggaagagcaacgacggaggaagaaggttgcgaaaggaacgatcgggcaccgagacgcggagctgggagtgggagtggctgcggttgggcgtcgctatcatctagctgaaaatatctcggctggcggccgcagaccgagcagtcccgcacgcgctgatacgggacccagtgctgagtgcgatggcgacgggatcgatggatgcatggttcttgtcctattagggcttgttcgtttattttcaatccatatggattggaggggattgatatgaattggaggggattttgacttactagggattgaaaccccctcaatccccctcaatccatatggattggggtagaatcgaacaagccctagtggtcctgtttattcgagctttttttaagatcagactgctaaatgtatagctttttagtacgcgttcgttttatgagaatcacattagttaaagctacagctatggacgtttttttatctctttctgttcataatctttatgatacttagattttatctatatttagaattttttttaactaaattatcagaaaagctcataaaaaaaagaagctcaacatccaccctcgctttccatttctacgctgtctattttctcttggcaattccttcgtacaacttttggacttgctattgagcccttatcttcttatctgcgaaagtgcgaatccct

SEQ ID NO: 7118 - DNA, 811 bp, Zea mays
atactgctccagctgtagcgagtgcaaccgatgttttggaacagaagtacataaaaatcggcaatctaaaatattcctacctaatatatcaggacagtcttattaatatttcgaatgagttatcttggaatttggagctctagctccgtctatgttgtccaatcatagcacgtcctaaaccctagcaaaagacaactgatagttggccctcaaagttttccaaaaaaaaaaatgcaaggtacgtgcaaatgtagatgtatcacagttgacaggcgttaaccataagcatgctaacacaaatccagtcattgattacccaaatctgaggaaacacgacccaataatcaaatagataacgcttcttcttcccaacgagaccaaattcttcatttgagtcttgacaaattgcgaatgtcttactgctccttcttgggttttttcttccttggcccagctgcttctattgacattcgctttgtcctgctacagtagttgaaaaccttgcttatatatgagacagcaggcattattcatttaatcgagcgaaaggtatgaagataccttgaagcaagttccattgattcagcatcatccttgtcagccgtatcattgtcatcaccaccatcatcatctgcgatacaagggaaaattcatcgtttaacagctgatcacgccatgattgaaaaagagacactatcacaaatttccagaagcaaggagtgaactgctgaacagcattagataggtacactctctgttctcaattataagtcgctttaactttttttatatagagattttgctatgtatc

SEQ ID NO: 7119 - DNA, 747 bp, Zea mays
agccaacggcagcctcatcagccggtcgtccttctccccacggccgagggcctttgctgagcttaatcagacatgatggcaccaatgtgaggttacttggatcacgaggcttcgaccaaattatgaggatttacgtttgttggctgttacaattggacagaacttatgattagctctattccttagacgcaaatcaattcaagcttgagtatagccttgggcatcctatgttttttgatggtacaaagacctacaggacgtacaggtatattaaaacgaccgaaagttttaaaaagccagcgagaatatacaaatgaaaaaaagggagaatcattttcagagttctgttctcaagttgaccagcgccgatgacagcatgagcctgctatgttgttgctatgccaacacaggacaggagcacctgaagcttagctaaggccatggacgcgggctcgcggcgcacacctgcctgccccatgcgtcacccactcgtgtccccggcacccaatgcgcagcgacgtcacgcacggcgccgggcgcgtgcatgccaaggtgcactagtacagagaagttctatagtggcggttgtaaacctatttatagtggcgtttttcgtaaccgccagtgaaaatcaaacatattttaaaaatagttaaaaaatttatttttattaggcccacccacccggtatttttcgcaagtcgcggcattttttcgagcaaaaatcgcgcgctacgcggttgttag

SEQ ID NO: 7120 - DNA, 727 bp, Zea mays
cttgcatgcctgcagggagtagcgcctgctgctgacgccgccggtctcgaaacagtgcgggccagtgttggacacggcccgttaggcacggtgggttttcgggccggtccggcacgatctagacatggacgtgccgtgtttgggcacacagctgagcacgtgggccggcacggcccgacccgatctattaacgggtcgtgcctggcccggcactatttggaccgggccgaatcgggttcgggtcgggcccgtgccgggtggcccgtttggacatctataatatatgggcacggcgcatgtgtttcactgtggctagcttagtggtggccgagcttttgacgacggtctgaaaggagaagcaagggaaagggactcgtcggtggcgcgcgtgatctgcatggacccgaaggatcgtggatggatggatctatacattctcgtttgtcgtccttcacggcccgcctgtgacgctgccatgccaaccggcgcgcgcaccccgcgctcgtgcgtacgtgcgcggcggcgcgcggcggcgtggggacgccgccagagcgatcaagggaccccgaggcgtcaccaccactagtacaaaaaggctcaaagcctgcggagacgatatatttttacaggcggtttcggttatccaccgactgtgttatttctagtgacggggtccttaaaaaaaacgggagttttaaattctgtgtgtgcctgaaggaggggaatt

SEQ ID NO: 7121 - DNA, 806 bp, Zea mays
cttgcatgcctgcagcgcccttgcggctgcccgaccggtgcggcagcggggagacggtggcaaggaggacgacggcgaggacggcggcggcgacgacgacgcagaagatgatcctggcgagcatcgtcgtatcatttcttatctgtggtggccaaatgcgggagcgggcagctgcccggtgagcatttcaggaatcgcaggtgcgacggagcggtgatcggttgtgatttcttggattttgttcagacgacgatgggttcggagaaagatgctcggagagcagttgaatcagcgctacttaatccattgcggtgccttgtggtcaaacataaactaaaccattgacgaaaagggtaatgcgaataaacaaagcagatgatttgggtttagtgtggttggaacgtaagccatgggcgcctaaatggttccactttgctagtttctgttttccactatatcctacgtgcgcacgatcggcctagcataatcttagcaactctggaacttacattattgtgattttgtacgcttaatttgggcacaaataacagatgttgtctatttgtcatcaacctccgttttgcccatttaacgtggtgccgtggttgtagatgttcgttcatactttctcgcaaaaatgtaatttaacttgcccttcctagccagattaactggaaatttgatctaatactcgttccagaaaaaggtttaagctaatttttattaagacaaaaataaaatttatattgcatgatagattcaataagaacctatttgatttaattaatactatatatattgatatt

SEQ ID NO: 7122 - DNA, 831 bp, Zea mays
tatttgatgcccacaagatcaccaactctgctgataacctggaagtgggttgcgcagacaggaaacacatcagttcgttatgtcacccagaatgaaatgaagtatttatgccaaaaaaaaacaagatacagcactcacatcaagggctttcatcaaatcctccctagtgtgtgaagccgaaatgcagatgcgtgccctagcaagaagaagaggtgttgctggaaacgccacggtaacaacggcgacctgaaatataagtgtcttattagccgcatgacaaagaggaagaacaaaaccgatgggtgcaaatagtgatggataaggactacatgcaactgctattagcacccgacttctcaaagtaatatttttaaagaaaactgtaccaaaagcatagtgctatctggatcttcagaatagtctgacaaactctatgactgaccttttgtctaaggcactccctagagaatgcagggatcttagccggattgtaaagcattatgggcataacaggagagtcattgtcgccaagaacctcaaaacccatcttcttgagttcggacctaaagaaattaccgttctcacggatgcgtgcaagtttttgggcaccttcaatatatcacaagaaaaaaaaacatttaattgaacactaacacagctgcaaacgaaaagggcacaaataaaagtgttagaaaaagctggtttagtacctctgctggagccatcctccccaaaggataaccttaaataagcaaaagataactttgttggaactgctggggggtgaccatggaccgttgcggtacaagatggggctgggcaacctatgct

SEQ ID NO: 7123 - DNA, 851 bp, Zea mays
acctgatacaggtagctcaaaaaacacaccaggaacatgcttaaataatgctgcaaaagggaatgacaagttgatcagaggcagcagcaagctacctgatacatatagttcacaaaacacaccaggaacatgcctacatactgctgtaaaagggagtggcaagttgatcagcggcagcagcaagctacctgatacagatccactggagtcaccttgcagcaactttactgaggtcgacatgattgtctcaccttcaccacttgtctcatggaacactggatcttgtatggtcgagagcggaaagcagttgtttctcttgacaccactgccaaaaacaaaagcatgctcatcaaggtgccaaacatcaaaaacccagatgaagacagtttctagcactgaccaattgaacaatcttctaaggcctgtttcaaagctaaccatttctgataataatcatcctgatctagagcaaagtgtgaaggtaaaggaatcatggactagcactacgacacctcatgttgctctagcaaacaaggcctcactagaagacaagctctgttcgcctcgtactttctcagttcagaagagcagaacactgcctagatcatgcctgaagacagcattatctagcaagcagcagctgttctctccaatcccggagggaaggaaggaggaagacattgacagcaatggttcaattggggatgacaaatgctcatctgataaaatctcaaaggatttagcatcaagatatgatatttatgggcttaatcaatcaaacagacaagtcgaagatcctcttcagtggtttctgtcaccactgaagacaatggtgtttatagatccatcag

SEQ ID NO: 7124 - DNA, 765 bp, Zea mays
aggaccatttgtttcggctgctcgacgattttgtgcttcagtttttggaccattcaatagtaaaaaaactcacgaagtcaagaatccaaagctccctaggatgagcttttaggcttttggattatgagagttgtttggaagtccaaaagttagtggtctaaaagtgatctgaaacaaacaggccataagcacaaccatagaaagctgaaaacaaaaaagtggaaagcaacagacatgcagagctacagagactgaaaggtgttatgtaggcaagcagaacggcaactaacacttattaacagaactacgcgaccccattgtggtaaagaataaaatgaacacaagacaatgcagaaggataatcagttttatcttagagcctagatttataagcacaatggactactgtagtagttgcaacacttcatgccattcagcacaaacttcgagacctcaggctgaccatggcaaaggcactctgccgtaataacatttggcaactctgctgttgcattcgagcagttcagttcggctttaagcactcagacatcgcagtgtgcagtcccccagtcccagtcctaggcgtcttgttacaaccaaaaaaaaaaaactaacccaagtgccaaccgacctactgtacattctagaatcacgacgcctcttcttcaagcatgtccagaaaacattttgcgtctgtctgctggaagcgcaccttatcaaagtgcagctcattggttgaagccgcctcaaatcgagtccacagtt

SEQ ID NO: 7125 - DNA, 888 bp, Zea mays
tgcatgcctgcaggcttcgtaggcctttcgcgccagacctggcgctggatgttgttgtaggccatcttgtcttgggatcatagagctgcacgaagagacatttttaacatctcttttgcactgctgctactccttccactctaaattgtaaaatatttttttatctttttattaacatattatgtttactagtatatgtttatatatcgtgtatataattaaaacattgtatctagcgtcttataatttacaatgaagagtataaatatatgtgattatattgatatttatacatatatctatgttgttgtttcgacgaattcataaaataactcgcttgttaggacttgtttagcaataatgtttctcaaaatcatagttttacaatattatactttacaattgttatgataataccgtagtattggcagttccaaaaaataccatggttttaagaaatattgtttgaatataacattgtaaactatggtataaacaaaagctagtcatgctttaaaactttaggttggactagagtttttaatactccaaaaatacgatggtatctataataccatggttttgaaaacatagctttcaggattgcaacaaaacactacgatattgctaaaaactatggtattgtctagaaactgtaaaaatacttcacttctaaacagtgcatatgtgtgtggagggtgtcttggacatataaaacacgttttccgtgaccaaacaagcagtgatgagtgaaacgtgctgacgatgacaagttgacaagtatctttgagaagctaagcaaactcaatttcaacgaaccattgctggggtaataatccttatgattagaaaaaaatttgagtaaattatttttgggaggttttttaa

SEQ ID NO: 7126 - DNA, 792 bp, Zea mays
catcttgcatgcctgcagcagtactgggccgccgcgaacgcctcgcacgcgctcctgcacgccaccacgcccggcgccccggcccccgcccccgcccccgcggcgacgcgcagctccgcggggcacgccgcgttgaggtcggcggcgcacgccgcggggcggcacccgctcccgttggcggcgcccgcccgcggcgcgacgagcatcggcacgttgaagccgtccacgaggctgacgtcgtagaagtcgtcgtcgtcgtcgccggcgccggctagcgtgagctcggccagcgtggccggcggcgtggccccgcggccggcgcactcgacggcgcccgagccgcagtcggcggtggcgcacgcgaaggtggcgcccgaggcggcaggcgacgtggcgcagagcgtgcgcgcccagacgcggcccgaccacgccgccgctacggtcaccgcggccgaccgccccggggccagcgcgaagcccgtggtcgacggcgccggcgcgccggcgttggagaggaggcccggccacaccgtgtagccgcagctgttggtgatagtcaatgtcgcggcgtctgctcctggtgatcgcaatgctctcggttatcagtaacacatcgcggtttgtatactctgagcatcgtcaagcaacaggagctcagacgcgtgaacataagcgcaagagaaaattttggccattggttccgggaagaaaacaactccatgtaatgtaacgcaaggaacaagttcaaatggaagtgttttttttaagcatgctggatgggttgactctgac

SEQ ID NO: 7127 - DNA, 756 bp, Zea mays
aaagattctgcttatctggtcgccactcttttgttaaaataattctattgttcatggttgtaatttttgccaggcagagtagaatagtgactcggttatcgaatatcgttcattttttgaactaaacggtgacaaataaaaaagaaaggagggactacgtgctagcatcctgattccttaaacatacatgaattggtgcagtctcgtctctcggcaggaaaataaaatctggctatgtcctatgctgaacttactgagtttattggctccactaagtagttatagctattagttaagtactgaattttgggtgtgttctacctttaaactcagaagtgtatgaatcttgcaggtttgcaggcgatacaaacaatactaccagcagctgcaatctgtgatctcctcgtttgagacggtttcggggctgagcaacgccgtcccctttgcttccatggctcttcggacaatgtctaagcatttcaagttcctgaaggggatgataatgagccaattacggaacacaagcaaggtcgctgccagtgatggtattggcaaggatgatatggcgaactttgcgcttatgggtggtggagcagaccacctgaggggaaacagcgtgaacacgttcagccaggctcacaacatttggaggcctcaaagagggctttctgagcgtgcagtgtctgttcttcgctcatggctgttcgagcacttcctacattccgaagtatatgaatgtcatatcttcttatcttg

SEQ ID NO: 7128 - DNA, 857 bp, Zea mays
gcatcttgatgcctgcagaacatagtaatcctgattctcaaagcacgcaaactcaagaaacaccgggtgctgttgcttctggtccaagctcaacttcagctgttgcaaaccgtgtgacttctgtggctgagggcaagcaagaggcaacggactgctccttgcaggtggctccatccaagccaaatgatccatctcccgctgatctggtgaagaaactgtcaggttcgatagagcagattgaaaagatggtgaggcgccatatgaaggaaactcatccaaaggctgctcagccttccaaggtagttgtccaaaggcgcatactgatgtccatgcgatgagctcagcaacgatttctcttgtctgctgcgttcttggccgctagtcaaggtatgtctagggatggggattcctggttctctgcttgaggacactgtggtaggagtaaaagagggatttctagcttctctgcttgagagcatggctatctgttggtacaacttgccatggtatgcttactgcatacgacttcagttggcttcaccagaaacgaaccactgttgttcacgtctttctgtttgtgaagtataagacttcactgcgtagtagtaaggcgtactagatatttgtggcgtttagttcaccgaaaagatagagcagttacgagttgtagtaacagcttgaattcttgacacttcaattgatacagttagcccttgctttattgttcccagattttggtttgcggttgggcctcatcaaaattctaagattctgagttgatatccgaaaaatggcatgaataccctttcattttcgggttttttttttttctggcctcgtttttactgggatgccag

SEQ ID NO: 7129 - DNA, 778 bp, Zea mays
aagacataactacatataatttctattgttatctttcgggggtaccatgtgcactaacacatactgcattcgtggatctgtttattatattgtgcaggttaagaaaaagttggtgaatctgggtcatgcacagaggtacgtcgtgatttgctaatatgtaattttaagaaaagggcagacccggtatcgaaggctcccatgtgagtggggtttggggagagaaaccgaggcaagtcttcctccacaaatgtggagaggctgcttcgaatcagcgactggtgcctcagtgagacagctctcaccaccgcaccaggcgtgctcttcgtttactaatctgctatttaataaagcacaatgaacagactaccatctttatgttcaaatcgaaaatagtgaggaatcacttcatttgctgattttaagttcctggcctaatctaaatgttagttttttaaggctttgaattccatacgaatattgggaataatctgaaaaatgtcattttttattcttatatggaagttaggaaatatgcaaatatgacaaactggggtgaactgcaagtcctgtgctactatgatctaaatggttacatttttaccagtttatatttctcaagattttttttcttcgtttgatgagttggtcagtgtccatgatcctcaagctaagctgttcttatattctcatctccagtttgtctgatgtctatgttcagctgtagataaatttacttaattggtagttatgattatatgcattatgccttaagtcttga

SEQ ID NO: 7130 - DNA, 791 bp, Zea mays
ctgcattccgcaaggcaaagcattcgtcccaccttgccaagggaacaagcactagtgcccaggtatgctaagggaacaagcactggtgcccaggactccagtaaggtcgatgctttgactgagctgataaatattaaatttataataatatgggcgtttggggcttgagcctgaaaaattggaactttcctatataagaaacaggaactttctccgatataaaaacgggaacagagaatatggtcctgattatcctattttttaccctgtttccatattttactgaaagtacgctaaacaatcggtaaatacgataaacggtgtcgatcggtacaggacttctctgtcatgtttttatctccagctccagctgctatggaatgcattagttttgttggaaaagtagaatgcagtaacttcatagcattcttttgtatgatgtaatctctatatgctgattcagaatcatgtctgttgcacaggttgctcagatatgatgaaccaatctctcttcttggttggagaaatcgggggcaatgactacaacggacctcttctttctggagttcccatggagaaaatccgtgccatcactccgagtgttgttgcaaaaatttcttctacaatcagcgtgagcattagttttattgtaggtgttgtagctgctaacgtcatatatagatagtaatttacaatacgttgagtttgcaggaattgattcggctaggagcccaagacttttgtggttccaggaaacctcccaattggatgcatcccagactatctgatga

SEQ ID NO: 7131 - DNA, 841 bp, Zea mays
cttgcatgcctgcagactcccaatccacgtgtatccttccattgattcaggaagcgttgtagccaggtaatagaagatacaggctgctgtgtgcgtacagtagagctccacaactatgagcttcactatcctagtgaagaggtagttgatacgtatgtccttctctaaacgccagaagaattctgtgaccttggtaacccgtgtcaagcgaatccacagcaggtatcttacttcttctttacttccacaagcctgttacggaattcatcatgagagaattaatcataacagaaaaataaagaaaggtagattacagcaaaagacaccgatccagaatttacgagctcaaagctttctttagcaagagagagctaccctgtagatagcatcccatgggaagcaaccaagaagatcaaagatgaagcttgatttgcaatatcggagggcaatagcggtgggactgtagacgattcggtacgtgtctgggtcacggtatgccacgaaaaatttcacaacaatgtcgataaggaacgcagcctgtccaactgtgtccaggaagaagaggttttctgggagccctctgaagaagccgaattccaggggcgtgaagaaggaactgtacaccgcccaacccagtatgaacttggtccataactgataccatctgaagaaaaatcgaaaagtaattcacaaattcagtaaactatcatccttgtgaccatatacacgtttagacagtaataaaaattcgttgtaggagttggccagaatggtatgaattagtattatacaagcgaagcctcggtgctctccatgaagctcaaagtgaaaaccaccaatt

SEQ ID NO: 7132 - DNA, 832 bp, Zea mays
tttgcagagagtaattaagatacttttgacggcaaacatgctgtagctttaagggagaaagaaaggggaaaaaatctaaagcaacctatgtgaaaatcctcatgaaagtcaaacacatctcatgcaggttcattgatctcagcatgtttttgacccatcacgaaactctcatcccccacaaacttcgacagcgacgaccggcaagttaaatggagttctggtcatttgagctactgagaaatcatcaccccagattctgtgagtagtacactggcgggtggttcatgtaaccagttcgggactggacgaagaacggattcggcatgtaaggattggttactcccgtttggctttcttgacttgatggactgacaccagccaatgcgccaaagtttgcgtacacaggcatggatccagcagccctctcccttggcaagattgggatttgcggtggaaggcagtaaaatggacgtggtggcgtattgtttggtatcgagagtgcgggaggtggagcaggggggaaaagcatgctagcttgtggctcagttctactacgctcaggagagtccttgatcacaatcacttctttcatcatgtaggttggatgatgcatggcaggcataatatttctgtaggacttctgctgggaatgatgttcaggttgcatcatggaaacgctgtgcaacggaggagcaacaaggccgctagcttgaacacttggtagaggaatctgatgactggctgcggttggtggcatgctgataaatccaaaattaccgagatgttggtagcttggaggattaaaaccaacaggtgcctcgaattccctcta

SEQ ID NO: 7133 - DNA, 719 bp, Zea mays
aggcgggtggagacggatacacacgaggaggaatggaagtacatctcagagccaggagggatggacgacgacggtacatacaagcagcgaaaaccaaagaacaagagagagagagagaagccaaaatgaagcggaatcactagtaccccgcaccgcagcaacagcactagaagcctcggcagagacggaacctgctgccccacggccgcggctgcggcccgaaccggctgggccgcctaggcgccggcgccgtggtgcggctcagcatctcccacatcacgtgcacgtcctcgtactcgcacgtgctcacctcctgccgcagcctccacagccctgcaacaagcagcaaccagcgacggggtcagtcagcgcagcgcagcgcagcgcagcgcagcgcagacgggagattgtacgggagccgccgacgaacgccgagcctcgccctcgcgccgtaccggtctggcgaaccccgaagcgggacgcgacgccgagccaggcccgccgcaccggcagcacgacgcggtcccaccagtagcccatcgacagatatagatcgccgtcgccccctaccgacgccaggcagtcagcccgcccgccggccggacttgcaccgcaggggaccggacgggactaccctagggcctaggcctgctcggtcctccctcttgcttccttcttcctcccccctcgctgcgtgtccggtactctggtcgggcctc

SEQ ID NO: 7134 - DNA, 831 bp, Zea mays
tgtaataaacacctattttttgttttaaatcctcagaaacaacgctgtacgctttgcatagtatgctacagttgtacataagtctgcatgaccgtttaaactttgaaggtttcactaatatgcatggtagctactttctgcatcaggctggagggtgtttttctttaatctaattctgtagtgtaaatgcaaagttggaaaactaaaaacacttgatggaaaatgccaataaactctgatgtgattttaactgcactaaatagtttgtctgttctgctccgttatccttcaagccacttatggtttatacttgaggtgatgatcatttaatagcaatgaattttacagctaataatttaaggtgtccagttattgaatatctagaatattttttctatggaaaagtgatgggtggttcaaaatgaatagcgggaatcctttaagaagaattgccttccttttactttgttgcatgttttgttattcttttgtactatttttttctgatctttgttatgctgtagcgatccttcatgccaaaatgatgcatgttatacattgactaaatcaatctgtttttttaaagttcacctgaaatgttccttaaagaaagtacttgattattcatagtagtgtttgatcagataatgaacaagtaaagatctagcgatctagaagggaaacatattattcacctttggagtacctctttctcaggtcactggtagcttccaatccattcaggatgcattacttcatattactggaaggattagggatgtcatccttcccaagccacaccccagtggaggcatgcctccatatcctcct

SEQ ID NO: 7135 - DNA, 827 bp, Zea mays
cctccagagtcgacctgcagataaatatgactaagtgttggtattgcatggactacattctagtgaaaggatgaactggcagggtgacagggtctttaactcgataatacaagttaaaggctgtgtgcatatccttgttgccttgatgagcacaaggcaacaagagacgagcatagatgaactggatgttagataaataaaggaaaggactatgtaccttctctatttcttcaatttcactgccattgtttccacagacaaagcctatataattgcaaggaatgataacttcagttgtgcctgttggtgtagccacttggttttcactggtcaggtaaaacagacaaacagtcaaaaccgattttataagacaatttacattcagttatcctttccttttgggggtcaggatgacacagctacacatttgtttatttcttcacgccttcttccacttaggttcaaatacaaacatttcgaagtctttaggatagatagaaaccctatttttttagaagaaagttcataggaactacaattcaaaagagaaacgtcaaacataaaaagaacacttggcagttagcttacattgccactggtccctttctgaaatctgtagctggcactgcatcagacatgtttctgggaacttcactgtttgtccttggtgcctgtccatgaaagtaattcaaccactacagcccctaaatcggaatgaaatgctatgtgggaatggtaacagccaagtacaggattctataaactctgaaaatagccgttccatattaggctgcacatgtcaaaaactcataaagaatacatttgtg

SEQ ID NO: 7136 - DNA, 816 bp, Zea mays
cttgcatgcctgcagtccccagtgatccatagggatctgaagtcatctaacatacttttagattctgacttcaatgctaaggtacgcttcccttttttctttaagtacaactcactattcgtactgttcttcgtttcacagtgctgtgaaacagctgaatttgtggaagttcatatcttttttttttgcccacatggtgcagatttcagattttggtcttgcagtgaccagtgggaacattgacaagggaagcatgaagctttctgggaccttgggttatgtggcccctgagtacctattagatggtattgtgtcagcttaattgtcaacttcgactcacatacataaacaacttcattatcgacagtgaagttctacttccatcccgtatctttcagctactgtgtcgatttcagggaagctgactgaaaagagtgacgtatatgcatttggagtggtgcttcttgagctactaatgggaaggaagcctgtcgagaagatgagtcaaactcagtgccaatcaattgtgacgtgggtacggtgcacacaaagttacactaaacatagtatatctctgatcaagtcaaattccacaacttggaactttagtagtaatggacaattgtcaactctcattttcacgcaatgtttattgcatcttagttttattttatcatatactagaaaaacatcgactttcaccatcagtgctaacattttaggagtcaaatgcagtttctttgtgtgctgatttttgacatgctgaaaaaaaaatgacaaaacagccatgccgcagctgactgacagaaccaaaac

SEQ ID NO: 7137 - DNA, 850 bp, Zea mays
cacccggcgatcgtatcctgtcgagtcgacctgcagtgatattttcttaacttatcttggctgcctgatcagccttttagttgattcttcatttttttatttgttattcttatttctgtatgtggtgaacttgattttactccatggctttcatgtgcgttgatagctattttcatgtgcgttgatagccatatcagggatcattatggattgctccgtggtcacccattctacaatatcatatttttgcagaaactgaaaggcacttagccttttagttaacattttgtcaatttagatgtgatgctgccaaagcaagaatatctgatttggttcgtgtttgattcaattttcaaccttagttccaacaaaggcgatcgtaaacagtgatggcatccctgaaacgagtgattctccacatgtggtttgctttggtgaattgctaattgacttcgtcccaactgtcaatggcgtgtcactggcagaagcacctgcctttaagaaggctcctgggggagcacctgccaatgttgcagttggaatagctcgccttggtggctcgtcagctttcattggaaaggtaaaattgttgtctttgtactgtttaacagaaaaaaggggttatgagcatgtgtgcttttatgtttgagacctttcaaagtaacaatgcatgataggatttagttagtatctattttacgttctcatacgtacaaaataatgctttcactgaaccatgtttcatttgaattgttggtaatagcttgcgcctatcctttttatgttcaaaatagaccagagtcttgtttgcaatcattatgtaattttgtattcctgagtttttttttac

SEQ ID NO: 7138 - DNA, 822 bp, Zea mays
actgtaatcagccaatgaaaatctgaagtagcagcaatcacatagtatttgcactacaccaggaagcctgctttacaattcctttgcttcacgatgctgctgaacgtgaattatgacacacccaattaaaataccctatttgagagatttcaatatggccgtcagacaggaacttgtccaatgatagaaatatatgccattaacaaacccaaaacagcaactctattactttttgcaccattaataaatctaaatatagctaattttaactcgtaaaagatacaatgaaacgtacatatatttcaaggttcaccatgcaaaaaaaaaggcaccaatagctaaccaatcaatgtcaggattctcacttccaactgactagagcatcaggtccacagcaaaacatggcatattttatgcaaatacgcaaacttcaaactgcacccataatcactaaatcaactaaaacttgtggaaacaaataaataatgttattgtcactatggttttcattaccgagccattagcatgcaaaacaggttaggtgataaaaggaattaatgaagagatcttttcatttttttttataaaaacacaaacagctgttaaatataatcaaccaggtagtgaaaggcatctagctgagttggttaggtggtatgagtaccactcctcaggttctgagttcacacacttcgtgggagcgattttcaggctaggttaaaaaaatctcctcgtctgccccacgcccaaagcacatgtctaaggctcagtccccgatcacggtcgttctcgcatgagctacgatgcccgatgtgtatggat

SEQ ID NO: 7139 - DNA, 709 bp, Zea mays
tgcatgcctgcagcaaacagcatggatgattagaaggacaggcttggcgcagtggtgggaagacttttcactgagccaaaggccctgtattcgacgcagcctctgagaaaaatgcaggggtaaggcttgcctcggttattccttccccagaccccactcatgccagcaatgggtctgtccattttttacaatataaaattaatatgtggtgtgctctactattaataaaaacaagattaactacaagtagcataaaagaactacatcttcataaagaaaataaatacagctcaatatacaaaaaaagtcaagatttgtgatttgggtcagaattactgcatacaacagtataaagcgttatatatcatattcaaaaagcaacagaaacataaataattaacagatgcaagcaggagatattactgtgtgaatattatcaatttcacattaaattttcaaactagggtcttgcttgtgtgattagggttaagggctatgtgaatagcatttacaagaaaaacaggatgagttgcataggggttttattttacctgttcgggagttttttcatggtatcggctttgttgcacaccttgtgcaagcaattctttcaccctcccagtagaatagagctcagtcaagcaaccatgggcttcatttatcaaaccagccctgaaagcacacagccctaactgggccatgactctgt

SEQ ID NO: 7140 - DNA, 850 bp, Zea mays
gtctgccccccgtcgggctttccacatctccaggctccagcgcgcgtcatcaccaacctctacatgcaccgggaccgcacgaatcccattccggcaccacccgcatagtctcatatgctgcttcccaagggtgttgttcatctagtgaccaaccagtagtaaatggcgacgtgcgctaagcatggctttcacattctggcgctattccatgttgcgcaactctcccaggtgctcaatacctatcgtggtggtctcattgatctgagctagcgcgccgccatggagaaagggcatgccggccttctacagaaccacgcctgggatctcgcgcctctgtcacctcaagccaacgtggtgatagacagatgtgtcttcaagcataagttcaatgccaatgtgacactagagcagtacaaggcatgttgggttctttgaggtttaacctagtgtcctagtgtggatttctttaagacattcagtcatgtggtgaagtcagctacggttcgcacagtcctctccgtggctctaccctagaggtggcccatgcaccagcttgatgtgaagaatgcttttctgcatggcactatatctgagaccgtgtactgcattcaaccatcccacacatactgatcttgtttatcgattgaacaagtccctctatgagttgaagcaggctcctcgtgcatggtttagccaatttgctatatatttgctctccctcgggttttgttgaggaccagtctaacatgtcactcttttctattttattcggggatccccccacttacttaatttggtgccttttagggcgaaaacaacttgttcttcccctggttaacttggactggcc

SEQ ID NO: 7141 - DNA, 760 bp, Zea mays
acagggatgaacttggatttccagcgagttccagggaaagtcaggttgatttttagcaagccataaccatctcatatgaagagaccaacccaacacctctaagttatgaattgcaaggcctccaaggtggagaggcctgcacacccgctgccaaccaacaaggcagtgacctccttttacatctttacgacccgtccacaagaattcccttcttattttatcaatccttttaaccacccattttggagtttggacattgcaatgcaataagctgataaataggaatggctgagaggactgacttgattagtgttgctctgccgtccggatgtataaccacagctttccaaccggggagtcggtctgcaattgcgtcaattaggggatagaaatcattcttagccagcttcttgacgagagaggcattccgagatatttacacgggaattgtgtcaccttgcatggcagcacatcagttaccaccaccaccttctgcggatcacaacgaatgggagttacagagctcttattgatgttggtgatcagcccagtagcctccaaaaattctgagaacctccttgactgctagcaattcatcagttcgcggttgcacgaagaggacactgtcgtctgcatacagggaagtctttgtccgttgcccctcctaaacagaggctggagaaggttgaaatccaaggctttctggaccaaaaaattcagcacatgcatcacaatgatgaacaacatggggatagaggat

SEQ ID NO: 7142 - DNA, 808 bp, Zea mays
agctcggcctcttccatttctgatcactgtccgttgttactcggattgcatgacttctttatgggtaggagatggtttcatttcgaaagcttttggccctggttggatgggtttgtggaggaggcccagatgtcctggaatcaacatgttgatgctaactgtcccctgaaaaagatttgctgacaagctaagtcgactttctagtgatttgcagtcctggaatcacaaaaaaaactggtcatattaagcagcaaattctgttggctaaagaaatcttgcaccgcttggaaatcgcccaagattccagattgctctccccgcttgagacctggctgcgcaggaagttgaagtgccattcccttggcctcgcttccctggaaagcaccatggcaagaacgaagtcaagattaaggtggctgaaagagggtgatgctaagttgctaacacggtctatttccagcaacacacccggtacaggaagaagaaaaacttcatctcaaagcttcaagttgatgataggttgattctggaccaagaggagaagaaagaggctgtttggggcttttataatgagctgcttggaactgctagacagcgagacttcacccttgacttgctggcctttcactgtccggcttcgaaactgtctgatttggagctactgctatctgatgaggaaatctgagccaccattaatgttttgccgcttgacaaagcgcccagggcccgatggctttactggtcatttcttcaaagtggcttggtcagcaatcaaggaggatttcatggctgctgtggattggctcat

SEQ ID NO: 7143 - DNA, 593 bp, Zea mays
cttgcatgcctgcaggaactcatggtaatgggaacaaacagggccaccttgcgatgtgacacccgacctgctttagtttgctcatgcagtattggagtccttaattcattacatctgattttcttcttcttctgtttattgggcatcgttttgtatgttattctacatataggggtagtaatagatcacaacctgaacgtttcttcttaattcgtttgagctctaaattaactttagctcaaaaataaatagaagtagagctcgattttaatccatccttaaattttatagtgtaaaatttagagtatattaccaccactaattatgcgtggacatataaaaagcaattcaacggcgtggtgaaatgtcttcgtacaaaacaatgcgatgaaagaacatgagcagagaggcctatatatacctagtacccacactaccggaatccgggccttcgccgagtgccggcggctttgccgagtgctttttatcgggcactcggcaaatcagactttgccgagcgccacactcgacaaagtcctgcgctcggtaaagagcttgtttaccgagtgcaggacactcgacacagcgaagca

SEQ ID NO: 7144 - DNA, 801 bp, Zea mays
aactcatggtccttgcaatgggaacaagcagggccaccttgcgatgtgacacccgacctgctttagtttgctcatgcagtattggagtccttaattcattacatctgattttcttcttcttctgtttattgggcatcgttttgtatgttattctacatataggggtagtaatagatcacaacctgaacgtttcttcttaattcgtttgagctctaaattaactttagctcaaaaataaatagaagtagagctcgattttaatccatccttaaattttatagtgtaaaatttagagtatattaccaccactaattatgcgtggacatataaaaagcaattcaacggcgtggtgaaatgtcttcgtacaaaacaatgcgatgaaagaacatgagcagagaggcctatatatacctagtacccacactaccggaatccgggccttcgccgagtgccggcggctttgccgagtgctttttatcgggcactcggcaaatcagactttgccgagcgccacactcgacaaagtcctgcgctcggtaaagagcttgtttaccgagtgcaggacactcgacacagcgaagcactcggtaaagaaccaagacctgggcaccggtataggttctttgccgagtgtaatgtctatggcactcggcaaaaaagcacgctttgccgagtgccataccagtcactcggcaaagtacctgacatgggggacccccctctggcgggtttctttgcccagtgcccgggcacgggccctcggccctgggggtatatccacattattccctgcttcacttc

SEQ ID NO: 7145 - DNA, 829 bp, Zea mays
gcagcttgctgcctgcagtcctcttccattgcggtcggtgaggaatccttcctgcgcttgttacaggtggctgtgatctccatgccatccccagaactgtgattggatggttgcgtcgagaggttaaggccagaaccgttcagcaacttcttgtggtgtccatgtgaactgctctttgcaggagccgcggttgctggcctctcgagctcaaagtctgtgctcggcagattcctccaggactcaaaatcactcgcctcagttgggaccgagaaattggcgtccctcccagtgagctgcatccacctctttaaatcagcctcaggtacacccgccaaatttggcgccctcacgatttcgatcccatgaagacactgtgggttagagaggccacggtagtgcttgcgctgcatccggtgtgagcgcacaaaccctttgtctgcgctgaatgggaactgtggctccccaaggcgtgagtgcccattcatgaagctcctcagctgcatcttccccagggcattctccggacgctccttaaacacccacatgtagatgttctccatgtcgtgctgcaccaggaaagcgtccagtgtggcgctattgccgttcccgccggtggtggtggctgccttcgctttgccagccttgtccgcagacatgactggcttgaagtagtgggtgaagaagaaccacgctccccagatgctaacattcctcttgacacacttgcgcgcagcactggaaccggagcccttggtgtgggacacggccgaccatggtggtccgctgctgctgcccgggccccaaacttggcccaacggccaccggggcg

SEQ ID NO: 7146 - DNA, 815 bp, Zea mays
tatacttggatcaaatttccttcaaattgcagcacagcgcagcaaaaacaaaaagaagagcctgtcagacaacccatgggctggctgacacaggaaagaaaacaactgttgcgacaggaacagtttgatcaaatttccttcaaaatgaaacaaagcaaaaagaacttggtccattaattgcaaatggaatattttgatcaaatttctttgatggtaaaaagcaaaatgaaaaccaaagcaggaaaaaaggagcctgtcagacaacatatgggccaggctcccccgtttctgaactggtacgactagagcgatccgtggtccatgaaaattctgagcacccagttaagtggaggttgctgacaatctagaaaaaggagctttgttgtcgaagaacataaaacggttaccagatggcacgtgatgattgaagagagagctgctccagcgccaaccatcagtacatgttagctgaagaattgtactctaggtgccaaagaactgtgtgttggagacttggagtaatgcagttgcgatgtgctgttgtaagactcccttgtgggcaattagccttcttattatcctcttatgtcatgcccggcagtattggataccacgactgactaaaagcccacctttctaactctgtctatatctctactcctttaaaagtacgagtttcgtgcattgtctattgtgcgtcacatgcaaagtgagtaaggtgatctattttctcccctacatctcggctaataaataagtttgttaccttttagatagggccgtgagaaacacctaagcctaatatgatacgaaac

SEQ ID NO: 7147 - DNA, 737 bp, Zea mays
tcttcaaactggcagctgccaaccatccaggcacaaaaaactgggaaagcaattagaatttttatatatatagagggagaccaaaaaaacgagacgaaagcagtcagggctggtgggtatattcacgacttcacgtacggcaagattagtggttgtggttggttggctgatgaagttcataaatccgagttgtactagagcagtgccgcctgcgcaatgaatggcatctaaatggtgtgggtgagctctcttgaatgcgtggcacaagtggcagcagcaccccccaattccatttctgctgtgctgcctacaaaaaaaagtcattgggatgcagcagactgatggttgtgcggcggacgaagtcgcagggaaaccaggaggaaggctagtgcagagaatcagagctgtctgggtgaaagggcaaaggcaagcagcagagggaggccattacgtgtctccttcctccaggttcctctcggggctgccatggatttgctcagcagaggggcggtgttcaaggccctggtgttcctctgcttcatcagatcgtctcaaggtatatatattccgacttggacattactggatcatctatccagtttttttcttttcttagtcctcaagtggcacatatatacatcacacaagctgctgaatttgcaggaggagatctgaatctccctcccttggtgaaggcaagcaggttccaaagcgaggggtacgactacatcattgtc

SEQ ID NO: 7148 - DNA, 823 bp, Zea mays
gggatcctcttagtcgacctgcagcaatgcttgccatcctgtttaactttgcatacagttcctgcaataaacagcagatgacattcatccaaagactataatgttatctatgatatgcttgccccatgcaaagaaaaacagctcattttgacaaaagaatcttcactatgaaacctgctaccttaataaattacatccagtatgaagcatataagcaacagaggcagcctatttatcaaagtggtaagttcatatgaccctcttttaccttttttttgtctgtgcgactattccactcaaattttgatagtgcaaccttggggcttgggctattaaaattgtgctaatatgatttttataatatattccagggatcaactagaagaattgtcaaaattaaggtgggtaatataggcttctccttcagaattctacatgaaacacaatccattctagtgaaataaatccataatgtcctcttttaggtatatgatcaagataaaatgactggttataatacataaaggatttgatccaagcaatagaatgaaaagatgtacaatggtctcaaagttggtatcttatagacagatgttagtttggaaagggaattacgagtgtacaatagcatatgataataatctgaaaattatctaaaatctcaggtatttacacgaggaagaccaaattaagcccttacagtaagtacctggaaaattggagatggaacccactctggttcttcaacagtattgtccatgctgatatacatttctgcgctgagatgagtatcaccttcatctgtaaatataagttcaagagc

SEQ ID NO: 7149 - DNA, 837 bp, Zea mays
cagtttgcatgcctgcaggcgtgtgtgaaggaagaaacgccgagcgccctgctcaagtaccgggaggacgagctcggcgcgctccggggagacggcgagacgacggagcgaccgttccagccgtgggaccgcgtgtacgactacgcgctgtacaacgacctggggaacccagacctgcgccaggacctggcgcgccccgtgctgggaggatcccaggagtacccgtaccctcggcgtaccaagaccggccgaccagccgccaaaacaggcccgtgcccgttcacgatctccgtttcccaaaaacgttccgttccagcgagccgccacagcaggggaggatctcgctcgctcgctcgctagctctctcacttgctgcctcgtcgtgcgtcatcagatcctcggtcggagagcagagcgccgctggacgaagagatctacgtcccctgcgacgagcgcgtcggcttcgccagcatccccgcgccgacgcttccgccgctgggcgggcacttcaggtccctcgccgatgtctaccgcctcttcggcctcgacgacctcggccggctcccggaggccaaggcggtcatcaacagcggcgcgccgttccccgtcgtgcctcaggtcatttcaggtgcgacagcaataatgcatggtgtgatgtgctcaagggaaaggaaagggaaaaaaaaagaactgtatgtctctatctttctgcctggctggggcagttaacccgacacattggcggaaggacgaagagttcgcgcggcagatgatcgccggggcgaacccggtgtgcattaagcgcgtcaccaagttcccgcttgcgaacgagcttga

SEQ ID NO: 7150 - DNA, 790 bp, Zea mays
cttgcatgcctgcagatgaattaggtgtggaaggtgaatacatttgcagagcaagacattaatttgatacttggaaaagagtagacttactggatcagggaaccttgcccttcaatgtagtaatcagcaggagatgagagagcaaggtccgaaaaacaggaaaagtctgcatccgccgtgtacaaaaggttatccaacccaaccgccctttgcagttgtctacatcaaatataagaatggatatcaatgagcatgcatggctgaatgcaatttgcatttgcacaaaaaatattttttgcagaaacaaaagtaatcatcatttaagcttacattatgggtggtgtgcattcaaatttgtcaggtctaaaccaaataagtaaagaagttataaaaaatagtgaatacttcagctaccttgatttctccaaatcttgaagttcagtgacccatccattgtagcggagctggacagtgacaacagggacaccatctaacttgtagatattgtcaaacatttcccattccctccattctgatggaagtaatcttttgatacccggaacatcacaggctgtggaacaccaagttaagtgtgtatggttggacatgctagtaaaagaagaaagacaagacagaggaaaaaaaacctgcgacgtatgcatcagctttgattatctctctacttgtagcctaaaaatgtcccaaatgaatgaaattttagtaataggggctacataatcgtgcaaagctgtgcagtgatacactgataagaaagcatgccttggtgagt

SEQ ID NO: 7151 - DNA, 817 bp, Zea mays
aagtcacttgtgaagggctaccctcaaatgcctcattctagatcctccaaggattaactactctggagagctagcttcaggtctgcttcttcttggatttgcttctctgcacaaacgaagtgccctgcaaggtaaatgagggaaggggcgcgttagctcttggcatgggtctcatttccagaaatgtgagtttaccccagcttagtgaccaagatcatacctccagccactcatcgatgttggcatcagttgttccagttccgagctccaccttgggggccttcttcgttttctacaaccaaaaaacaagtcagttaagaaaatatacaactcaaaagagtttgtgtgttgatcagtgccataacaagttgatgataactaaataagcaaattatgcaccacacgattttattgtctgatttctagtctgtgtattcaaagtaaactttcttcgactacttgaatgtagtgggattcgggtaaatcacaaagaaacagcctgaatttccacctcgctatggtttattgaatgctgaacagattatatttactgaagaaagctacaaatgacccttagaaatgtagaacacaggcttaccttcgagagctgctgaacctggccatatgcccataatccaaagagaccaagaagagcgattccaagggtgatgaggaacacagactcaacactgagtaagccctccagcctcaacgacctcaatagtgccattgtaagaatacattctggtaagggtgctggtcgatctcatacactatgtacccaaccagatcataagcctcaggcttgcaagggcca

SEQ ID NO: 7152 - DNA, 835 bp, Zea mays
  unsure (1)..(835): unsure at all n locations
cagtttgcatgcctgcagataaaaaaaaaaatctcagtccaaaatgtggttctcttaaatggtcgctgattaagacagtactgtacagatgcaaccagaatgtttcattgattcacatcctgcctcccaagatttcctatctagcatgtcatgagcatctaaccaaaaatctatgcagatagaatttactataaccaatgcaatgttaggagagctcctaacaatgttcaccaggcaggcacaatagcagcccagtaattgaaaccttggttttgcaacaaatgcaattagaatataagttacttgtgacaatgtacaagcttgcatatgcagataatatctggtggggcaggagcatcaaaaccttacactcgtcgattggagctccggcatcacattgttgttatcctcctaaaatacaataacactagtaaagggattccagataaaaaaatatattcctcaaatcataagctaaaagaataacttgtcacctcaagtaataaatcttttctggttatcaatcctacaacacgagaaggcctaggaacaacaaatatatgtctcaatccaagttgacggaagagattgtacacctgaaatattgatataaagattaccacacaactgactcagcaaaatagatacaagatacaaaagtaaaagacatgatttaccttcgccaacgacatgtcctctggcactatgtatggtgaaggatttaaaaatggggcaagatccaaatacaaccccagttcatcctctgtcaaatgaatatcatcagtngactttgccttactggatgctggtttaacaaagtcactaaaattgtgcc

SEQ ID NO: 7153 - DNA, 864 bp, Zea mays
atctgatatttccatctgttttttcttttcttcagccaaaaggatagttttgtctacctccatgcataatgtttcagataacttacaagggaactcccatggcaacatttttggcactgtagaatgtactgcatctaaatctagtgagaaaggaccacacaaacattcctttggcctctctgaaagtagaacagcaacatgatcagcagttcagcacttctagagttaaaacagcacggcattgcaaatgaaacaaaaacggaaaagaaaaaatatttcatggtcaactaccaactagttaagcagtacatggaaaataactacaatagctcttctggaagcacaagagtgcacaactgttagtgtggggtgccaacagttcattctgacagatctaacagactaaccccacatcatttactgaaagaatgaagggaagtatctgcaacatgcagataaaactttctatatatgaaattcattttagccaaaaaaaacaagccctagtaaattaagaacctcctaggcctagcttagatttataaggtgactaatgcacatgtcacacatgaatcatgatataattctcaaaactgttgcagggtgatgctctgcgacaaaccccatcaatctactccattccaaaatgtaaggtgttttagttttgtccaaagttaaacttctataatagcaaatagccctatcaagacatttcatgggtggattttattaaactaatttaatgttgcagatgttggtgcagtttttgggcaaacctgggccaaaaaataaaagaaaccaaggtttgactttagggataaaagcttaaaaccttcttacatttcttaaatggggggggggggc

SEQ ID NO: 7154 - DNA, 835 bp, Zea mays
cagattcatcacttgtggcttctggaggcaaagatgataggggattcctgtggaggattggatcagaagagggtgccctggagctgactggtatagttctctttgtttttttttgttggatggcaattattatcgaaatatctctttactagctctgagatcttcatgcttttatttgttttgtatgtgaaatacaccctcccgctcttgatttgtttgaattcatgtattttttgttctcttcactcattattgtttatatccagaacattacatgatatgaactttgttcttgtcatgtatatagtgatggtacatgtatcatgtatgattttccatatttggtattgtgctcgaatttcatgtcatctagatcttcttcatggatgtaattcactagctaatttctatgcttttcctgcattttacatctgctattagctagcctctgctcatgtagtattttactattttcccatgttgttgacttgcaaactcagaagtcaggaaacttacagaataactgttcttaatacaggacataaggatactgtcggcacagtggctttcagttcagatggaaatttgttggcttgtggaagttttgatgggcaaataaatgtgtggaatacagctacacgaactctcaagggaaccccttgagggttccgggtcaggttttgaggtgagatattctgatctcattgaattgaacttatttctattgtgaaacccttccttagtacatcactatccaatgattagtctcagtgtaacttacatgtttgattttgtagtggcttaaaagggcttctcggggacctttgataatcgc

SEQ ID NO: 7155 - DNA, 767 bp, Zea mays
acaacaaagtcacaatctgcaacaaaattgtgttgccatttgccaactaattcgagaaactaccttgacgagataccaaggcactcaatagaattggtgtggcctgctaatgagccaacgacctgaaaaaaaacaccaagcattgatcaaaaagggagaaatggtgagggaagaaacaccacctttaactataggctacatctacctggcccgagtttaaattcacaatgtgcacagaactgtccttggagccgctaacaaccgtttgtgaatccgaagtcatcgataagcatgtcaatccatcagaatggtagccatggcctacaatagaggaaacagaaataccaaagaaacatcatgtgtctgcttgattgaacacattgaaaactataagtggtcactaccacatattcactgttccaaattatactttcactttggttttgtcctaaaacaaacttccctaactttgtttatgtttttttaaatgaattaacacatattccctatgttccaaatgataagatggtttgtcctttctagatacattgtttttactatgtatctagacacagtgtatatcaaaatgcatagtaaaagttacgtatctagaaaagcacaaaatgtcttataatttctaatggagggaatacaagtctatgagttcaaataaatgctctacaaaaacacatttcatagaattttgtgaaaccgatgtgatgttctagatgtcaatgcatttttttataaacttggtcaaaataaaa

SEQ ID NO: 7156 - DNA, 789 bp, Zea mays
tcaatttgcagtcatgaaggactgattgacaaactcctgcaaacttgtccatgtacaacgaaacctgaaaaatagatacatatgttttagcaccatataaaacataactgtgcacagaaactttcttgtggcaaagcattagtgcttttgcaattcagggacacgctgagaaatcaaaaacataaatgcaaataacagtgttattaaaactacgtttaaacgtcaaaactctaattagaggttgaaatcaatgttttagcgctttggcgttctaaactgtaaaacgcagtgttttatgcattttagaccattagctatttttgggcccggtatattagttacttttggggttcaatccagctagctcatgggtgaagttttggtaagccactaacctctctgttttggtatttaacttcatattattatctgaaattatgatatattggtatttttcctatgttgtttaaaactacgtttaaacaaagtttaaacgtttaaaagtcaaaatttcacccatgagcgttccaacgttttattgttttaataagcttggtaaataataaaaaaaaacaggtagagagcataaactttaaatgatttcctaacttaccagctcaaaaacttggcgaggctcaataattgataaaagatcatagcaaaagaaagcaagtgtgctgttcaagcgttttgccaagcttaaaccctttttacaacgctcatgaacctcagttagaaggcaatcaaagagctgcatgatgcacctgaagacaccttctttcaattgca

SEQ ID NO: 7157 - DNA, 821 bp, Zea mays
aataaacctttgccgctaaagtatgtcaagttccaaaatgttcgcaggtatatacatttcacgatatatatatatatgcttttgtttcttgtcactgtttttatttaacggccttctgttattatttcagcctgactgtatttattgaggacaatcaatctggaagtgatgtctcgaaaattcaaaaggttgctctttatggcacaacgtaaggttttcgcttccacatgtttacgatgattgccattgtttccatttggttggttctatttccttttccacaagtgctagattataaagttttgttggtgtgaagataagaaaaaatgataatgttactgaaggagatccaagctggaccagtactaactatttgggggagaggagaaattgcaattctggaacatgaacaagaattggaaacatgtattctttgatctaataaaattaattatgtttgcgaggatatccatagaaattgaagcttagtgatcaataggatatctgcgtgatatgcaagtgcaacagttggatattgatgacagctatatattttgccatttctctgttcatttgtacaagcagggtacgtttacaacctgtatagaaaaagtagctggaattcttcttggtctaataactggctattttattttagccaaaattgaaaggtgaaggaaatcattttaccaaatcagataggaatgtgcttaagggagggggtgcattgacaagcatggagaacatgaagctcttcctaaattcttcacatatgcatatatgatggaggtggtccattttcctgaatctaaattgctggt

SEQ ID NO: 7158 - DNA, 824 bp, Zea mays
agccgttatacagtaaggatttcctctttctctctctgagttttcatatcaaatgtatgccatcagctgatcagctcagctgtaagtactaaacattattccgtttttcgttcaggcaaaacagcctgccagcagatcaagtatccgcgacaaacgaggctgcctccttggtaaaatagtctctccattccttaaaacaaggccaaacttttttgttttggataagaggaacaaaccatacaggcatcccagtcatataggaacttatatagtgcaaaccaatcccttcgtgtaaccgtacaaacttataatctgaaccacatgatgttgatctaaggaaacgtgagaaagagtggaaggaggatttgaaaaggtgtgattagcaacgggcagttaagcgtaaaattatccacgcctctgcatcccttggattaacatcatgtgattcggattaaaagtttacacggttgcatggagaagttggtttgcacttcccaaatatatagtccatggatgaacacagaaatgtgtacagcacagctctcttttggtgcagacgtgcaattcaaaaggacagacggtccatgggtgcagtatatgttaccagataaatgtttctaaatttacggtataagcaatgtatatttcctcaattcccagcgtcacaaccaatgaacgccctatataataatttataatatgagaccgctcttgtaataaccgccagccaaaaaataggtaccagacgacaaaaacaaagcgctgctaataatccaatgcgatacgctctcagtatttggtatacttgcatgatgttatgcttt

SEQ ID NO: 7159 - DNA, 781 bp, Zea mays
agggggcgcccatgcaaaaaggttggcacgcaccaaaacaaatcgcgtcaacctgtgcgtgcgtacgtgtgggagcctcagcctagtctacatttgcctgcccaaccccgaccgcagtccatctctttcgtccttcttccccacacggccacaccacacgcactgggaggcggcggcgttctcattgactgttcccagcacaagttgccgatgaacaaacaatgcatgcaggacctgttgcctgttggttggttggtgttgacccgcgcgcggagaagacaagagaaggttaacagctggcaggcaagcttgttaggcggccctacagccgtaggtgctgcaactacaatctatagagcgcagctaccttgtaagctaaggcattatagtcataaagctgtctgcaacagttactgcgcttcaaaagacccctatatactgcaacggtgttctctacccatcctctatgccagatggatcaaaccagcctaagcaaaggcatcgataatcaagacgaaaagatgtctgcccgatggatttcttcaaatcacgcaggacaagagagagggagcgcagatgagaattcaaggatacgcaaaaatgggtgacgcagtcgcttgcatcacgtatagagagagagagcgatattttgctttccatttgcaaaaaaacactcaccccttcagttttttccaagtccagtaatggcaggccgcccagctggtcatgcaacagttgtgacggtttgcagcgctagaaaaagaaaagatcatatagtacc

SEQ ID NO: 7160 - DNA, 773 bp, Zea mays
actgtaattaccctgttatatagtccgtgttgtaagagtgcgaccgttaagtgggggcagcaatgtactttgagctatctactcctgaacgaccttataaatatataagtcatccgatagcgggacggatacgtataacaagaagctaccgtctcgctgtcgtttatcttgtcgtgcacatgagttctcattcatcatctctgagtatttgggtccatctgacagcgcccaacatcaatttactttgaactccacgttgacatatgaaattaagttgtgtggattatctctttagttgctcctccaaaatagtggagtaccccaacttcacgttttttttgagagcaaagttgctgaagtttagatagtttggaaagcaaatcaaacattgaatatattccctgttacgttgtctcggtgactccatgtcaagttctcacacacgtcctgtcattcgtatcaattaggccatcctgttacgacagaggccgaaagatgcggtggctcgctgacgtcgtcgttgtccacctacatgtgttgccgtcatcatcatcgtgtcgtctaaaccaatgtattaattaattagagcgatgcatggacgacggacggacggacggactagaagcagactacgtactatatcgcatccagatttttgctgatggagaaccttggattgtatactttggattacttttgggtacaaaatcaagtcagtagtattacttttgtttaacgcgtttctcttacgttgcaaagtttggcaaaaggag

SEQ ID NO: 7161 - DNA, 775 bp, Zea mays
ataaagcggctggttgccctggaagccttgcggtggagacggtctcggtctcggatccaggggagacacgcggatttgctgccatggtgaggtggggcgagatggtggaggaggaagaggacgacgagtacgctaagctggtcaggaggatgaatccaccgaggtatacacacaactgctcttgtatgtatactgtatatactattgctcatgccgtttaaatttctgtactgttttttattaaaaaaattgattttgtgtttgtatgattgtgacttttgaggatgatgttcttattctcgtctacggtttggtactttggtctgcaactctgcgtgttgattgatcttcctctttagtattttcctatcaatatcaaaatcattttatttattcatttattcatacttttaataatcgcagatggttttttgggttgttggatcggtgtattattatccctccccgaattctaatatatacatatcagatttacatccgcttttcccaatcgctcctaggattccgctttattatattgacaaacactcgtaggattccactggattattctcagtcagtcacttaggattgagtatactgtgtgttgctagcttacttgtggatccgacgagttcatgtacagtatttccaaacttagattacctgtgccacaaatcctttctgacacaccaattcgtatctttcacctgaggaaaagaattctagttcatattgttctgcacatggcccgtgggatctcctttattctttg

SEQ ID NO: 7162 - DNA, 820 bp, Zea mays
ttgcctgcaggtcggcgagcgcgcacagcgtgtcgaacagcagcttcggccggtccctgcaccgcaggatcaccaccgtgtaccgcctctccgcgcagtccatcaccacgaccttgggcctcgccacgccacatccacccctctcgtcaccgccgccaccagcctcctcggcaccgccgccgccgacgctgtccagcatcagcgtatgcaggcgcctctccgcggaaattcccgtgccgccgtggttgcacgtgccgtcgccccgcatcacgtcgcggagaagctcctgcaccctggacagccggcccgcgtcgtggacggcgcgcccggtggcctcgtcggtgacctggatcacggcggcggtgcgcccgtcgtgcgtccacacctcggccttcacgatgttgcagctcagggcggcgagcacggcgcacacctctgagaggaggcccgggcggtccgcgcccgtcagctcaatggaggtgaactggtcttccggcagcgcataaccgttcgccggaggaacaaggtagccgtctgattccaggcactgttgttgaaaggccacaaggtgtaactgtgtaaggcgtcttgtagaaacatcggagattagcaataaatatagcatgcttactttctgaatatggtcaatgacctccctgttatgaagcttactcccgtcctgatcggtcacattgaacactgaacacgacgtgaaccaaaacaaacaaacaaaaaaccggagaaattcatcgtgactggtcaaacaacccaaacatattactaagtcaaaattcatttgaaaaactaagcttttataacc

SEQ ID NO: 7163 - DNA, 860 bp, Zea mays
tagtagtaatagtggccatgcctgcggcgatgcccgcagaagagatggcgcaacaatccgcggacagcattcctgaccgacgccatgagctcgtgcactggcccgccgccgccgccgccgccgctcccgtgaagacgaccaccacccagctggtactgctgctgcggggtacagccgccgtagtatgcaccgtgcccgtatccgtatggagtaggagtaggtgggccgtgtccgtatccgtatccgtatgccggcggctccgttgttgggtattgcgccacggcctgctgctgtggaggttggttcgtctcgccgggattattaacgttgatcatcagttgcccaatgtatatgtccttgtccatcatcccgcctgccaaaactatacaacgtaactgttaaggttagttacattagcgtaattaacgaaataggctgttcttgtcttatatatatatatagacagggattaagaagacataccgatggagagagagatggattattattgatgtaggcggcagattattagccatagctagctatttatatattactactccggtataggcgatcgaggagtgagtccggcaacgttaaccaacggcatgcaatcctggaaaccttacacaaagcgatcgagattcgagtgtatgcattgcatggatgtattattgtacagaatataatatactataatgatacggcgaggagcacgaggccggtcggacggggaccacgaccacgaccccggtaaacggaagaagtccacccctggaacctcgaccccctcaacaggaagcaacccccaaattattaacgggggtcgaataaaaaaacgcctatttaacctatttaac

SEQ ID NO: 7164 - DNA, 839 bp, Zea mays
atcttgcatgcctgcagtaatgagcatcatcttgatcacgctggttatgaggttgtcatatcagttgacatcttcatcacaaattttttagagctagatcatatactcatatgacaagcagcaagcattcaggagaacacagttaattcactcttgtaccaacacaaacagtccgcatgacttgagataccaaacatagcaaataataagcagacagtttgccttgtcttccctatgatgctcctggttatttcttgccacgcagcttcgttcccagggccctctcgagcttgccaatgatctgctggttgggaattgccttgcctgactcatactcctggatcacctgtggcttctcattgatcatctgcaatgaacaccatatcctcatctcataaagaggccaaccaaggatcaagctacttcccagctatcaatggaactactacaatacaacagcatagacttttagtcccaagcaagtcgggatagactcaaacgacaaatcaaggttcagacactatgaatggaactgctgaagttctaaaatctaatgaatccacagaaatacctgagcaagctgtgcctgggtcaacttcttatcgagccttgcttgcatgagatttttcttcaggtcacttggaactcgctcatctagcataagtgaggagagcccaagttattactatcatgaaaaggatatcatgcagaaagcttagggcaatcttctgcatgactcaactcatgttcaggttcaatagttcgacaattttgaaatccttgtagaaaaaccaaatctaatctgtagtaaattttcatatccttgcgactaaaatgag

SEQ ID NO: 7165 - DNA, 833 bp, Zea mays
cttgcatgcctgcagtactcggttggaaagcacttctcgcttcgagctgtaacggggctagactgccacagatttctgttgctgcgtcgctgtagttgctttcggtgccgcttgcagatagagttgcaagtgggtcaagagagagttcagcagggaaacctctcctgtctagccgtctcttgtagctaggcaaatggtctggtttgctgctgttctctggggcgccatgttttccaactggtttcaggattttggatttcttccttgcctccgcggctgcctttgagacttcctctgcattaagccgcgccaatgtccatggactgattttcactgctccagcttttctccttgctccttcctcttccttagttttcttactgcctgaattccgtgaaatgccaatctctggaggaatggcatcgaactgcgaaagagaggaccaagcaataagtatcaactgcaaaaggtggaagaaagataatgcatgctgaatcctagtggaactacagtgttgatttatcgtctgattgtcaccaaaatattatgctatttgtttgaaaaaaatagcatacttcactaatgatgaatcaagacaacttcaagcacatacaaatgcaagtacttgaaaatgtagttactactatcaagaagtcattttcaccatataatgaaatctgatttcagttggcatttatatatacaacacaatcgatgaaaatgttcaagttactaacaaaacaacgcatgcaatatccggacatgtatatgatccatggtccagtcatatataacgttatggtggctttgggtttatcaagatttccattccc

SEQ ID NO: 7166 - DNA, 834 bp, Zea mays
atccggcgacggccaacgccccaaccaaggcaagtacaggcaagccacgccgccaccacagcgcgccagccgcacgcgtgggtgccgacgccgcagaccagctacgaccacgcgagcgcgcaggcaccgccgcagcagccgcaaggccacccgcccaagccagcaacagggaggagcggcggaaggcgaccagccccccagatccgggcagacagcccgcagatccaaccaacccaacgcagatcaagacgccgaccacctcatcgtagacgcagacgagtggaggtcccgccaccgccaatccggtcgactgcgcaggcccaccgacgcaccacgccgaacaccaccccggcacatgcccgggaccagcctgtcgacgcctccgaaggctggcacgcggaggccgcgaaccccacgcgcactagattccagacctccacgcgcggcgccgctccctgccctgggggcgccagacagcaccttctccgcgcctgcgacccacggccggccgcatgcccccctgctgcgcgaacacccatccaggacccgcaacgcccggatgtgccatacgaacgtcgcgctcactgccgccaggatgccgccgaggctgagccgcgccggcgaaagggcgccgccccacacacgccggtgggcaccttctggaacccgactagatccgggcagacgcgaccaaaccagagaaaaatcgcctcgccggcacctttctttggggggccgggcggacatccggcggcgccctctggtgacagcaaggttggatggattggagggagggggcctcctttttcctagggcttatattttggattgttg

SEQ ID NO: 7167 - DNA, 787 bp, Zea mays
tttcgtagcaacccagtttttaaaaaaccagtttttatcttttagctaggagagaccagctttttgatttttaagaaactgaaaatttaatttttataaactggtatgtttgaaaccacctcaatttctataaacaaaattttaaaaactgggtgtttccaaacatggcctaatagtgagtagtgacacatagccaactggaagcagtgacaggcacaaagatagatattaactaaggatgctcttccgtcagcaacagccttaatcacattctcaaaacctccatgtccacaacttgaacgtaatcaagcaccacttagttgaaggagcagggaagtggggcctcctactggtcagcttcaaagtcaactgacggtgagtggcctgggaaatggccaaacttccggagaggaaaattatgccaaccactgcccgtgatccacctcattgaacattctacatgcaagatcgacaagacccttttgttccaacaccgtgtgtaagacgtcatgacaaaaaggagcacaagcacaaatgaaatgggtcaaagttcagaaaaccattcaggtccatgtcaaccaagtcagtggaacagaatagtctgacagaaaaacatttacaagtgcaaaagaacacggttatactatgtaggaaaagagaagaggggcaatcaaacctcagaaacaaaatggaatacagataagcttgacggtaatgttaaagagactgtagcaacaccctgattatttttcagaccatccgagttaggttattggatatgttatat

SEQ ID NO: 7168 - DNA, 823 bp, Zea mays
gcaagagccggattgccaggtgcttgtttcgtttcgggctgtgtaggtgctcggatgctgatttttttcttctttcttttgtgatgaattgtactgggccgatgaaaccgtatcggattgggttctctgacgaggaaatacataactaataaatacacatacactgagctgaggttgaccttgcacattcttgttgatagagtttatattgctgtcagcaggttcagattagtttgtgttgtgctagtaactaatgcagagcacagcgagtagcaattaaaactgtgagttgcagaggagagtgggtgtattggttgctcaatcaatctatgttggagccagtaaacattcttctctccctcctgcactggctctagatttgttccttccatctctttcttaactcttgcctgacatgattttacttcattcacgagttgaaactttaatcagtataaggcagaagccaaaatgatcatgctagctaaggaacaactgctctggatgaaattactgtttacatggcattagcatcagtatgttcaatccaatatgattgttgctttctggaaattcggctatgatatacatcactccgattgtctttatagaaggattgttctgtttctgttaaattgtttggaagcaattagttattttggaagtctaattgatggatggatggatatctttgacatattgttattctcgtgataattttgagtctcttggagacaagtggtatctgtgattctagacaattcattatatttattttgactacatagcttatcgctacaggtcagtattcaaaaatgggtga

SEQ ID NO: 7169 - DNA, 756 bp, Zea mays
tcttaacctgctctcctcctcctccgatcttcagcacggaagccatggaggtgcagaggggggaatcaggcccgaagctaactgctgcttggtttgcttttacggacaacggaaacagggaagcctctccgccaggattagctacactactgctgcctggaacgggaatcaacacgctgcggcaactcgcgctggagctcttgctcttgcgcctcccagcaccaacggggatgtttctcatgcttccgcctgcggtccagtacctctgacagctcttgcagaaatgccttggctgcttgatgttgtagttgttgtagtagcagaacttggtgtccatgctgttgcagcgagggcacggcaggatcttgtctggcttcttcaggacattctctccgctcggcgcatcgccgccctgatcagtcttggccatctccaaattggactctggttccgatatttcgtcgttgctggctgtatgattctcacactcactggaattgttaaggctacaactatttgtctgaccaacatctgattcccgatgtgtgcatggcttttcgccggtgacactcatgtcccctctatcttcacatacatcctgacaaatacacgaagactaagtaaaatacatgtattgagatagaaggaaatatgattgtaagatgatgtaaaatatgtctattacatttactggcaaataacataactttagaaatcctagcaaataacagaactttagagatccaggagccaagc

SEQ ID NO: 7170 - DNA, 883 bp, Zea mays
gcgacggagctggaccctacgatgacattcccgtacaaatatcgtgcgtgcgcgctgctggaggaggacaatgctgcgtccgcgatcgcagagatcagcagggtcgtcggtttcaagatggcgaccgattgccttgagctccgggcgtggttctaccttgcgcttgagcagtgcgagctggctgtgcaggacgtgagggcgatattgacgttggatccaacctacatgatgttccacgggagaatgcacggggagcagctgattgagctcctccgaggacaggtgcagcagtgggatatggcggattgctggatgcagctgtacggtcggtggtcggcggtggatgacatcggctctctggcggttgtccagcagatgctctccagggaacccggaaacagcagcttgcggtttcgacagtcacttctccttctaaggtacagtacagctgcatctgagaatatataaatcctttttcaaactactgattcatatgatatgacatgtttgctaaatccaaaacttgatggagggtcaataattagaattctcgaaatcagatattttatatctagggaactgcaagataacaattagttgaactactagccggatttatttagattcaccccggctaatctttaccgactagctattaattgagtggatggcctctaaccaggacctttgaacaacttataatagttatttctttttttatatattgcaggctaaactgtcagaaagctgccatgcgcagtttgcgatatgctcggaacagcacgctccatgagcatgagaggctcgtatacgaagggtggattctgtatgacagtgggcatcgcgacgaagcgttagccaaagccgagcagtcgatcggact

SEQ ID NO: 7171 - DNA, 791 bp, Zea mays
attgttgtttcttattctatggactatggagggtaggttaggttagctacacatcatggcaacctacttttccgttaagctggttggttcaattgcaaaaggctgaccttggggctgcgttttgcaacaactagtagccgtatgacttacgagggttcaatttgtctctgaacaaccgatgcttcggtttttgtgaggatatgcagagagaagatcagctacacgtagtggataggcgaattccctttccccgcttgagtactcattaaagccatttcttgatgtggctacccgtccggttctgtggaagtagtgtttctaaacagcttgggtacgtagggctctattctatcccttgtcaagtttagccttgtgatgcagaattgcaaaattgctttactgttgcaagtttttattttgtagtttcttgatttgggtgttggtagccagttttggataggttgatggggatcctctataagctttttaaccttgatgctatgattcgcggagccaaaaaatttgagaccacctcagtacatgtggattggggtgaatactagagtgcccaaacaaatcctaaaggtactatgaaatcttggtttggatccacatgcagttatggtaccttggatacagttgttcctgagcatggatttgattgaggtcgaatttcccaaaatactgaaacaaaacgggcctaccccgctatgcggctactagagttaatggtcctatgacaaggaataacaaccataagagtaacactcaagtactaaatgtaaaagtcc

SEQ ID NO: 7172 - DNA, 783 bp, Zea mays
cttgcatgcctgcagccaacgaggagcgcgcggcggcagcggaagaagaggccgacggtggcatcgatgtcacggcctaggtagatgcctctgtgctctctctgcttgtaagttaacggatgttacttgaatgggatacgcgcatcatttctccctcgatgcatgcagtacaagaacaatcgcaagcaagaacacccatacatagttcaggaggtccttttatggacacgtggtgatgcacaaaccatgcacgcctcatgacaacaatatgtgaaaaatatgtaacgtaatgtgagcctaccactacaatctccaccactatacacacactagttcatccatctagtagccaaaaaaaaacatcaagaacaagaagagcagcaacacagatcccccggagaagtgaaagggatactagctagctagctagtatctatggcacaagttctgccttcgttctcgactccacgggcttcccgcagtctcctgcccacgctgtgatgaatcacgttgagctgctgggctgctctgctcctgccaacgctggtgctgctgcatccgccagctcctgctgccagctgagtccaccaccatgtcgccgcccccgccctccagtatgcgcagaaccttccagagagacaaggcgtgcgtgagcaccatatatatacatgataggcggatgaatgaatgactttattattattattattattacatgggacatgcgcggcctgagatgagggtcacgccgtatgcacaggtttgccgcgtgcaccatgcagt

SEQ ID NO: 7173 - DNA, 822 bp, Zea mays
agtccgaagtgtgtgtgtgtgcgcggtggtggggtggggggcacatgagtcaatctgtaatcggggcaagcccttttagaagactggcatgtgtgtgtgggtgttggaggtgtgctggtttttaggagggatggcactagggaagaaagacaacgtttgagacttgcttaggcatagatagcgacgtctggttttccagcgatgatattggtggctactttggcagcggtgaactgtatctctggtatcataactgttgagcgctaatgtatccaatactaccttacagaaagcacccatagatgcaccaaatgccagtggctgaagttttttcttccatctaacacatccaatggtaccctagcttctgaatttgttgacagcgccaagctttctatgctcatgatttttaattgtttcttcattcttacgttactttgttacttgacttacttcagtcatgttcgttggatgatcacacccgttcacctatttttgcattactaggatctgtctaatgtattgcagtgccacatgttttgaatactgagttgtctacttccttgttgttgaattaagcatagatgatgggtaagagtgtttatgcttatgctcaaatgttagacatgcatttttcaaatatcgacagccatatggacacatatgttaatggctgccaaaaaactttaaaggccacatgttaactataattttagacagatgtggtagggcatttatcattttagatagctgcaaacgtaacttaaacttttaactacctaacgtcccagacccatcacaagtgtatggtattcattttat

SEQ ID NO: 7174 - DNA, 756 bp, Zea mays
aacctggtcccattcgctgcaccaccccgcatatatgctcctcactttcatgggctatataatcgagcggcggcagcagccagctggcatgattccacccctcaatgtgtccacaccatccataattctgtcggtccaaacttttgcttggtatacgctcccaccaagccattccttgtgcaccgtggacagccacttcggtactgaaataaaaaacgtgaactatagataccgaggaaggtacgtgtgatcgattgaaaaaaaagatccaaacctgtgcctattggtagctagttgtggggttgggatgaccactgctaaaggctaaagctttctcccacatttagaatctgatcccagatcaacggcacttattgcctgacccccattaattattccgctggtcattattcaccaaagcaacaactaatgtaacccccacaagcatccagagagaggagatcagggtggcatcagtctgccaccagcactaaactaaaccaggaagtttctttatttgataactgctgggcgtatcaaacacaaagcctcgccagaaaaagaaacaatagcacagcgtgcctgccatggaatagcctgacagttggtagaatcaacatatggtaaccaaaatcttgattattggatcgctaggttccatggacaaccatgtggtgataaagttcacttttcaagaatgactgctatggtacgagttctagaaaaaataaaaataacatcgaaacaatcacatgg

SEQ ID NO: 7175 - DNA, 829 bp, Zea mays
tgcatgcctgcagtcccagaataagcgggctatgatcagacaacatagaggccgagctttgcaacatacagtctgggaacaaatcctcccaatccaccatgaagaaaaccctgtccagccgcaccggcatcggagcagcctgctcatttgactaagtgtatttccttccatgcagaggaagctcgataagatgcagatcattcaaaagcctttgaaatctccccatcattgccctattcaggttgttgttattcttgtcttcagcgcgataaatcaagttgaaatctccgccgatcacccatggcccaccacaaagagaacgaatagcttgcaactcttgaagaaattgaaatttgagttcatctgattgggggccataaacacccgtgaaccaccagctggagccatcagcatacacaatctcaaccgtgaccgaaaaggagtccaccctggagttgaggattttacatgaagtccctttccaagccaataacaccaccccgagtgccaattgcagggagataaataaaaccatcataatcactaccaagagtagacaacaccaattgatgagaaatagattcttttttagtttcttgcaagcatacaaggtctggacaggtagagtcaatcataacccgcactgcatcatgcctagccttcttgttcagccccctcaaattccaaatcagtatttttgatagatccattggaaaaaacaataaaaaaacaaccggaatgagagggagattagtacaagtccttcgggttatatccccaggccaaccagcccctccgggcaggggtgatctattaggaactgaccatc

SEQ ID NO: 7176 - DNA, 797 bp, Zea mays
atcttgcatgcctgcagacggttgtttcctcgggttcgttctctgaggaagacgctgtttcagatctggcggtttcgtggtttggatctggtaggagttacggttgtgctgttgtagtggccgaggaggatttgcgcacctaaatttcgtttccgttgctcctctgatggctcagcgtttcagatcttcctggctgatcgctgttaaacgcctgttcatgtacaagtaatttcgtttcagtatgtcggcggttatggatctgtatcctgccattcattcattctctttaggtggttctgtgtcatgaaaactatagtagtgtacataacgggaaatggatcacaggtgcctggtagtatattttgtggttacttaacttgtctggttcgtctaaggaaatgttttagaaagcattaatttctgatatattcggtggagaagagtgatatggggccaacccaatcttgaccagcagaaagcctgcgatatgccgtgccttctttaataaatatgagatctgacttggtaggtagacgttgccgatttctgtacctaataatttatccgatctcctatttgttcagatcagatcacttaagtaaccttcatagaacatgtctggctatgctctgttgtgtcagtcgtgcactagtagtgttcaggatctggtgcatttgccagtgaattctgacggcttctgttaacatgtttggctatgctctgtagttttagtcgtgcactagtagtgttcaggatctggtgcttttgcttgtgaattctgactgtttttgttagtt

SEQ ID NO: 7177 - DNA, 802 bp, Zea mays
tgcatcgggtggtcccagtcgaacttgttcatggccaggtcccgctggatctggtcctccgtcacctgggggtcgtagatgctgatctgggccttatcacccagcaggcccttgcagacatcgatggccggggtctccctggtgtcgccggtgtccttcttgaaagcgaagccgaggacggcgatcttcttgccggcgacggtgttgaacatggacgacacgacgcggttcacgaaccggctcttctggtagtcgttgatcttgatcacctgcttccagtagttggccacctcgggcaggccattgcactcgcagatgtacaccaggttcaggatgtccttctggaagcaagacccaccgaacccaacactggcgttcaggaacttggggccaatcctcgtgtccttgcccacggcgtaagccacctcagtcacattcgcgccggtggcctcgcagagagcggagatggcattgacagaggagatcctctgtgccaggaacgcgttggcagcgagcttggagagctcagcagaccacaggttggtggtgaggatcctgtcctcgggaacccagtgagcgtacacatccttgagagcctggacggccttcctgccctcaggggtctcccggccaccgatgagcactctgtcaggcttgaacaggtcctcaatggcagtaccctccgcaaggaactctgggttggaaaggatctggtagttgatgcccttgctgttgtgggtcaagatcttctcaatagcctcaacggtctttgacagggaacagtggactttttcaccacccc

SEQ ID NO: 7178 - DNA, 655 bp, Zea mays
agagtaccttgtcatcattttatagcgatttatatactcctctccgtatccccgtttttccataagctgtggaaggagggaagttataagtttgtgtaatcagctgaggaagtagcatgcagcagggaagggaagcaggaaggtacctaaccttgaacagattagcctctagatcactctgggatctgtaaaataaggaagtgcaggagttagagaaaaaaaagaaataaaggtactagcatacaatataacatgttgaaagctaataggatagttagatggtggggtaggggaatgggagagaggaagaagatgcatatacatacacatcaagcaggctgttgtcgacaagcagcttcttgagctcaagggcaatcttgatggcgacatgattaggaatctgtgtgttttgtttaaaaaataagagcaaatacaaggggaagggagggttaattgattgatggatggataaaggaaagaggaaattagtagtgtaccttggtgactgtgagcatcctgctgaggaggaacctggagaggacgtagtagtggtcggcgttctccccgagccagaccttgaccttgacgaaatcgtacttggaggaggcgttgcgggaagggatcgtctgcgttgcggaccaagcggcggcattac

SEQ ID NO: 7179 - DNA, 788 bp, Zea mays
gtgcgaagctctgattgatcacttgcgtcgaagaagacagagtcgcgagtcgcgtgcgtctcgccaccgtcgtcgttgacgcccatcctcagcgggaactggacgtagcacgtcctgttcccggactcagggtccatgaggaagcacattgcctccctcaggacgccgctgttggctacgcagtggtcggggtccaggttgagcacgtacgagccgttcgtcagcagagcggacacccggagctgtcgaatcgaacgaacaactcagaaaaccgtcacaggctgagaacgctgctgaagagcagacccggccatgacggcgtactgctggtgctggacgacaacacacgtaccagggcgttgagggcgccggctttcgtgtgatgctggaaccccggcttcttctcccgcgacacgtacagcagccgaggcagctcgttcccctcggcgtcctgatcgccgggatgccccagaagaacctggacaccgtgaaccaataaactccatcagtggcacgttgcccgttggcccgttgggggtgaggcgcagcgcagggaagtactctctgacctgtatcattgcagggtggtctctcgtgttgttcccgggccacggcgtgccgtccgacatgacccacccgtcctccggcaccttccgcgccttcgcagcgaggcagttcatcctgaccttcaactcctcgtacgccctttgcaacacacatctacttagtcaaccacgcacgaccagctgggccagtcttcctcgctgacctactacgactacgaccga

SEQ ID NO: 7180 - DNA, 807 bp, Zea mays
atcttgcatgcctgcagctagcacacaaacggtagttctgtcctgcggtgtcgtcgactgagaccgcctcgcaaacaccgaccccaaccacggaattatctgggatcttgcttcttactggatgatgaagacagagggaggaatcgaacagaaagagacttcttcagatggagacagttttcgttttttttttccactggccggccttttgttatacggtttctttcttgcactggatcaaatgggtttattactgagtaaactgaagtgttcgcctgttagctacgatcgtcgatcaggatggacgagcatagcccagagatcgtgcctgtcaactccccggccctagaccccgaccccgaccaggagcctcaatcttcagaaaggtctcgctattccatcagttcaatgctgttgctaatgcacgacgtatctaccagtttcgttgtcgcgcagggttacccttacctgtttgttttggtttatttcgcaaaattagattagaatcacggggcaccgcaatcctgttgcagaatttgtgcgtgccgaactgggcctttttgccttaccatggctgaatttgcagcggggaagaaggtgaccgtggaggcccacgcccacctgagtctctcagcgacaagctgccactcccgccggccgacctcaacctgtaccgcgcggccgtcgcgctgcgcctgctcctcctcgccgccttcttccggtaccgcgtcgcgcacccggcgcgcggcgcgccctggctctggctggccgcgctcgcctgcgagctgtgcctcgccctcgcgtgct

SEQ ID NO: 7181 - DNA, 781 bp, Zea mays
agacttgtccgttcaaatggagccgcgtcctgctccatattcgcaaagcaacgcttgcttcagtctcagatcatctagtaatttcgagcaacagatgatccagcaaggactagcagaaagcagcctgtaataaattctagccaccgggaaactgggcaaacgctgccaatcattgaagccatcactggatatgtgtgtccatctccatcatctcacaaacaagagccacgcagtcggcacacacacagagaaaagtcactgtctcgaagtgtcggtttcgaactcgaacagggcaggtgctcgccgtccctcttttactagccttcggaaagcgcggcctgtccgcctgtgtctccggcctttgccgcttccacagggagtccggggccatgcagagctccgtaaagctcgcggtgcttgctcttctgctagcggcagcagctcaccacggtctgctgccgctgccgacggcgcgatgctactggctcaacccggagatctacgacgccggcgggctgagccgccgcgcgttcccggatggcttcgtcttcgggacggccgcgtcggcgtaccaggtcgaggggatggccaagcacggcgggcggggccccagcatctgggacgccttcatagaggttcccggtaagtaagccggccgaccaggttcagcaacacaaccatgggccgccgccttcttcttcttccgattcttggttgggatggtggcactgatacttgaaattggcttcttgttgatccggggaatgaaaaaaacaaggga

SEQ ID NO: 7182 - DNA, 769 bp, Zea mays
agcaactgattcgcatttcgaaatgcgttatttgttattttgtcagggtgacaatgtaattccaaaaatacgcgcatgtccgtcgtttggccactaattttttgtttggaggaaatacggttccaactccaaaagcaacgtgagacaaacatcacgtgaaacgtgctggccattgtcgttgaagcgccaaggggacccgatccacggtcccactcttcacggtttgtttcagtttttttaagcttgtagccataaaaaactgttgcggaatattaaatggcaagcattttagtccgtttttactccaaaatcaacatgaacatcggtcactttctacctccgatatttatattcttttcacagttagatttctcccacagccaaattctcaaaaaaaaaaaaaactcgaaaaaaactaatactccatttggatatagatatttaagactgaaattgggatttggaatcagaaatcctgaattcccttgtttggctggctaatgaattcagagctggaattaaagctcaatcccttataattggactttaaccagatagtgtttcttataattcagagccaagactttaggtattggatggaattaaattctaaatacatccaaacaagatatttatattaaaatttattttcagtactaaacagttttagtattagatctaattcaattgcaacatctctagtatctgtatccaaaaggacccactaatcatgccccgttgaaggctgcgcagcccgcccgggtccccc

SEQ ID NO: 7183 - DNA, 788 bp, Zea mays
gtttgtattctgtaccctgtctatatatatttgaactttgtccttcctacaactctgtatttttcatgaaaattgtaaataaagttcctaaaaattgtgatcggcaaggaattaaggcagtataaattccaaacaaacagagaattgggctgtattgtagtgtggccgaacaggcaatagtcgatcattttgatgtcatacaaccatttacatctacagggtgtttggtttgagaaaaacaattagtccatcattttttgacttctcattttttttggtttgtggaatgaaacaagttgattcatcaccatcttattcctcatagttagttagtactaatatgagtaatgtggtcatctcaccaaatttgagaaatagacttataattcaccatcttattttagatggagtgattcctcaaatcaaacactccctaagtcttcaactcaacatacactcgctcacttctaaattataagttatttcatttttagacagtcaaaacatataaagtttggctacatttatataataaaatagtttttatgaaaatttgataccataaatcttgacaaaacatattttatcgtagaactaaagatgtctatttgatatcataaatcttgattaaatttaaaatagtttgacttataaatgtgccaaaactgtattattttttcttttataggataaagcgagatttttttgttatttaagtgatgtggtcattaacagcttgacgtcaccataatttgattaattacgtgatttttcatcccatatactca

SEQ ID NO: 7184 - DNA, 763 bp, Zea mays
acgcgatggcgacgatcgccgacgaggccgcggacgcgggggacgcggcagccgcactcgccgcgctctgcgaagtgctcgccgtgtctggttcggcctccatcctggccaccccgcacgcgggcctcgccacgcgactgccggccctcctcgccggcggctccggctcccagggcgatgacgtgccgctgctcgccgcgcgcgccatcgccgaggcctgcgacaccgcggcccagtgggcttcgcacttcgcgcgccacggcgccgtcgaggcgctctgcgacaggctcctcgccgacgactgcgtcgaactcgccgaggaggttggttaattgcctgctgatacagcacacttctccctcgcctcattccttttcccctgttaccgagccgtgccgcgccgtcgtacttataaaccctataccgattaaaaaccctgtctgcttgccttgatagtaatactgtaacgctctcttgatttaggttactcgtgtacgttatttttaatgatccattaatgcaagtgtcgcgagctgtgattaatctgttgtcggccggattattatgcaatgctttcctttccatctatatatatgagccccgtgtagtcgcgccggctaatgaacctcaccatcatatgaagtagtagctggtgccccgttggcccttgggtttagggttttaggttttaagaactaaaaacaggaatagttgggcgtacctaaaggttttggggtttccttttaacaccttaatggccaca

SEQ ID NO: 7185 - DNA, 772 bp, Zea mays
tacgtacattaattacagtacgtacgtactagcttgctagttaataaacaactgcgtgtgtatcctagctaatggcaattgctaatataatctggagttagttggctacatgctatgagttggctggctccaccggcggaccaagtataatcttatctgaaataacacatgcatgtgtaagaccaacctactaccttcggtaccacttagtacatatataatgatcgcatgcatatatgcgcgtggtgcatgcagttgctcggcagtcaactgccgctcagagttgtgcacgtacgaccaatcatatttaaatttaagcaatagtctatattattatatatatcgtcgtatacataatgatagattcatataaatgggagactgtactgtttacaagtttgaaatgagagataaggatgagtaagggtggggaatcagcccacagagaccgtgcaaattaatgggatgtgaccgctttcctttagtattcagaagattcaattacaattcgttgcctgttgtccagctctcctctcccactgtctcggcttatatatatatatgtgccaaatcagtcgctcggtacagccgttgcctgtttgtgcgaatttgataatgcaagtcaatgagcttgagcaggactttatgctacaaacgtaaggtcaccctctgctcagtaagatggagtacaatcacgatttgacggtgctgcaagtatggccgccattcgtcaataattgccataaagattgccaaacactcctggatgaag

SEQ ID NO: 7186 - DNA, 868 bp, Zea mays
gttcctggcctcgttgcaccaccctcttgccggcggcggcggcggcggatcactacagcaccggcgcgtcaaggttagggttcccaggactgagctcgctggaccccatggactatcaccagtttggcgcgggcgccggcgccagcgccagcagcgctgccatcgggctagagcagtggcgtctgccgcatatacagcagttccccttcctaagcggccgccccgacgccgtgcaaccaacaatgtctagcatttacccgttcgacttggaagggcacggcggggacgctcccagcttccccggcggacacatgctgggtgcctccaaggtgcccggctcagccggactaatcacgcagctggcatcggttaagatggaggacaacccagcgtctgcggcgatggcgagcagctcgccgagggagttccttagtctccctgggaacctccaattctggggcggcggcggcaacaacaacggcggtgcaagtggcaacaatggaggaggcgctggcaacggtggtggtggtggcggcggtggcgctgtcgctccgggcagcagctgggtggacctgtcaggattcaactcgtcttcgtctgggaacgtgctgtgacatgccctctggtctgcatgctagctgcactcgaaaggtagccctattatttatgcaaagcccttgaatcttcattttagtcatggcttctgagaaagttcaacagaaaaaaggagttgtggttgcaagattatagggggctatatataccttaataggtattcgcctgccggtgacaaatcgatggcgggatatgggtgaatcgggcctctaaaaaatgggaggccaaaccgaaatttatttcaggttcttca

SEQ ID NO: 7187 - DNA, 791 bp, Zea mays
taggacccatggtgatgctgatcttggagaacaagccttgctgcacctaattgagcttgagcctaacaacagtgggaactacatactcctgtcgaatatttttgcagaacaggaaaggtggggtgatgtgagcaaacttcgaaaggctatgagagaaaggggactgagaaatgtgccaggggcgagttccattgaagttgatggcatggttcatgagttcacttccagggattggtctcatcctttcatacatacaatatgtgaagtgttatgtgagatcgacactaacatgaaatctgttggttttgcttctgttttccctggagtactacatgttattgaagaaggctaagatcactaagaaagcacattattcacatcattgacagatctgtgcatgagatatatgattctttatatgacatcgatgcttaaaataaaaataatactagtggtaaactgaattcattgagtatatgcattactctatgaattactttcttttgtggaagaaggattgaataatttttttttagttttttacactcagcaaatgtatatatatttgtgtcttgggatgtgatgaggctctgcaaaggattttgacttgagagtaggtggtgcttggtacaataaagttaaactctaaaactctgatctactatagacttctgcacaatagatttgatttccttcaatgccaagttgtttggtagagttctggctcctggaaatttgtggatttcttggagctaaggggatgtttgggatggctttaagttcatatcaat

SEQ ID NO: 7188 - DNA, 805 bp, Zea mays
  unsure (1)..(805): unsure at all n locations
atctactctgtatatatccttgttcaagaagttggtgcaactacagtatgtgccacttctacaggaataacaggatcaaatatgactaggtacagttacgtaatgctatgatgtaaaagcgattagtggcaaaaaaaattgatgcatcaaagttgaagtaaaaagtggaagtaaatgcttttcagtagctcttctggatagtctttagagctagacgtgttttcttattgcacttcatggtaacttccaggtgtcccagttacttgtagatttattcattctcaaaaggaaaagctggtaaaagaaacttgtttatctaaaaacaagatgattgatattgttttagcaattggagaatatcattttctgcactcttatacatatcaatcacttgagtgaataagataccaccaagtttgttcatttttttngctattttatgcttcaaatatttgagctgcatgtttttaatttttttttagattttggatggtaaccaagaggcaagagctatttaagttttcatgatgtatagttgtatacatgttcaaagtccatatggaattacctggtatcccatttagggctcatgcctcttctttgtttctgttatcacagagcatccctggcttcaaaatgctaagaaagctccaaatgttcctcttggagacattgtaaagtcaaggctgaaacagttttcaaggatgaacagattcaaaagaaaagctctaagggttcgtaacctttttctttatcacggaactgatctagtgtgttttagtgcaccctttttctagataccatc

SEQ ID NO: 7189 - DNA, 857 bp, Zea mays
cagtcttgcatgcctgcagaaacaacaaaggttattgcgacttgaaataattaataagatttgaaggcagcagagctatctcaggggccttaggtgaaccgttaaccttatctgtgtcaacttcttgcaatatgtcattgaccacgtccatggtatcagctcccccgtcctccatcagggcttcctgaagctcctcgggctcaatgaaaccattgccatccttgtcgaaaaataggaaggcccgccgaaggtgctcatcgtttgccatcctttgtaaatgaagtgagacggccaaaaattcaccataatctagtgctcctctaccatttgtatccacctattattacaaagacaaagatatgctatgcaatcagcacctgcttcttgttaataatagatgaagccaatcatgtcacctagttctcaaattgacaccaagtcggaagtcactgacatagcaaaaaatgaccttatctgaatctaagcaacagaggaaaaaataaaagcgtaactaaattctaaacaaataaatagttcaatggcatgtcacgtatgaggccctatattatcagctttcaagaaatctaaattgagtaaaaaacacaagtccttcagggaaatgggagtgaatgtttcattatgtgtatgatgccacaatgacaacctccaaattcttcaggaccaccaagcaccacctggtgcaactataactaaattgctgggttccatcgaaaaccaacaatccaacatactccctctgttccaacttccaaaatagaagtcgttttagcatttttaaaaatgcattcaataactgatgtatgtgttttgaatgtgtctagattcattgccattca

SEQ ID NO: 7190 - DNA, 779 bp, Zea mays
gctcagcttcactcagagcctacgggagtcttctgtatatgttagcatcgacgcccgggttttcctgtgcggcaccagagtccagacctacttcagccatctgctacactacacttcatctacggtagttttgttcgacctgtctagatcttcatgatacgtacgtaccagctcatgagaaggggacgagaagttctcgtcgtcaggttcttgcatcgctgatccggagacgacgacagtggtggtggccgcaccgtcgtttcttgacagatcatcgtgccacgagttctgcgatctcctcccgaattcgttccaggaatcgctggaactcactgatgctgtcgtaggcggcctcctgccgtaggattcatagagccgagacggcgtaccgatgttgatggtttcgtgggagggatacagcagcagccccgcctctgttcgcgacctggtcaggtcatgccttggacttccgttcgagcttgacccgtcactctctgagcgactgagtaacattgatctcagctggctagcaacgctgcttactgatgatcttgatgcgctcgtgagtgcaggtgatggtggtggcatggcgggaacagttgtgttcgcttccctgcggcgttcagaacttctgattagacacgcaaactgggattgaccacttgtgtgatacaggactactactagggaaggtaaaataaaaatgaaaaaatccttattgtcttaacctggtgcatatgagatgccctttacagggtaaaccatatcttacacgatgg

SEQ ID NO: 7191 - DNA, 811 bp, Zea mays
ttcttgcatgcctgcagcaaggcatcgccgccgccaccgggccatcgtccggagacagcgacctgggtcttctcaagcgagcaggcctcgcccaggcagccaactcctacccctcccctttcctcgaccaacagaagatgctcaggttctccaaggcggcggcggctcacacgtcgccctcaggttcgtatgccttgccttggccttcctcagtcctccgcaacgcatattcccttccctcgcgcccatccattcgttcctcccttcttggatggataccttctctgcgaaacatgatagacagcggtaggccactctgatacactacactcaagaaaatggactaacaagactattcacaaaaaagaaagaaaagcaaaagtcaaaaggacaacagcagcattcatggaacttgatgagccctcatgaatgctagctaggagtatctactatatatggaggggcctggcctagcggtaccggccatagggatttggcccaacaccacccgccgctctcctctccttccctccctccccggccaagaaggctgcctgttgtaaaacatttcgtctgctttttcacctttattacgtacgcttttgtcctggcgctccctcccttcgccatgcccatgcacgtcccagcgttttcagattttcggtcagactaaaatattctccttgtttcaccgtcatccaggcctagaccttcggaggaggcccgagcgagcaggctttcctgctgtccaggaccaagcggccgttcactccgtcgcagtggatggagctggagcaccaggctctcatat

SEQ ID NO: 7192 - DNA, 780 bp, Zea mays
agaagtcaagttccagttacattcatacgtgggttcagtcttgtccatggctgaaggtatcaaagtaggaggatgcattattgtgttgcacgtggcattcagctatctcagaattttcaacttgggttgccatcctccatcttttgcattggtttttaattacgttagagaagaagaacatgccgttgcttgcaaaacatcgctgtcgtttgaatattgtttttttatcctacttggggcgagtcaaacagattaaaatgtgttaggtgctaatgactagttaaaataagctgtattattgttgtatttagctgataattatttttttaaaaaaaaatcggtaccatttgatctcatcgagatttgtttacctgctgtaggttctgagagatggccgatggggcgagcaagaggctgcaatcttggttcctggtgacatcatcagcatcaagcttggcgatatcgtccctgccgacgctcgtctcctcgagggtgatgcactcaaggttgaccagtctgcgcttactggagaatccctcccggttaccaagggcccaggggacgaagtcttctcgggttccacttgtaagcagggtgagatcgaggccgtggtcattgccaccggagtgcacaccttcttcggcaaggccgctcatcttgtggacagcaccaaccaggtcggacacttccagcaggtgctgacagcaatcggtaacttctgcatctgctcgattggggtcggcatcctcgtcgagatcatcgtcatgttcccaatccagc

SEQ ID NO: 7193 - DNA, 825 bp, Zea mays
agtgtctctcctatcagcgcagcataacagaatcgacctggccgattttcttggctctcctaccagcgcagcacagtggtgtggccgtgtgggtcggggatttgcacctggatgcaaaggtagcttcacacatgttttttaggatgaaggggggttacatcacacatactatatgcaaatcaagtgggacaatcgtatgcccacatatctagctaccaagtagggctatcctaacttgtattccttcggtccacaaatatctgtcgttatagtgtttgtgccagtcaatttttttaagagatttatagaatatgttagaaatatttgtatcttcaaataattttaatacaaaatagactcaaagatctatctaataatactaattatttactaaaagtattaatattttcttatataaatatggtcaaagttaaaaatatttaactactcgaaaaatgagaacgaccaatatttatgaatggagagagtattcttttcttcctaggaacattgatgtggtgtgccttagctattatgctgctccacggtaggtttaggattaaaggatatgattccatattcattaggcctaaatgttgtcaactcaatgataatgttgttggaagtgcaaccaaactgtaaggggttttaccaatgatgaccacacaactaaggtgctaatggcttttctaagatgttaatatcaagacaaatcatcgtgggtgcatggcatgtgcaaggacaaacccccaaaaaattcaaaagtagtggtgtggaatctcaaaagattagtttaaattcatttgatcatttgaatttaagttt

SEQ ID NO: 7194 - DNA, 790 bp, Zea mays
atgtgacgtttgagacaattgcattttggacaacaaacagcgcgctccgttagaggcaaaagtgtctcataactaagacacaaaatacacgagattatattagaaaaggaagagaatatattaaatggcaacttaatcaattacaagatgtttgtagtcccatttttgtgaagcaactgtttgagatgacattattgcgaagcgcactgtttgtagttccaaaaatgcaattgtctcgacgttagaatagtcaattagaggggactgatgtttacataaccttaaaaataaatattccacctttataaatcaggatagattgttgttatgctagtaacaacgttgctgactaaacttcgtaactccgattaatctcataatctaatagattaaactagataaatatataaaactattaactgaaatcacgtctatcggacttctagatctaaagttattaacgaaataagaatgatgttccagatgctaacgaaatttaatcaagatctaatttcagaattaagtaataatcagaaaaggttaatatcccaaactttgtagatcaataaatagatgctccggtaatgatctagattaatcaaatgaacagtaataattgaagaaagcaaaccaatctaagatcaaaagtagataaacaatgctcggagtacagctacacacaaccctacggactcgtatgccgaatgaacgggacagtacgccatgctcagagtacgggtacacacgaccctactgacgacatcagaaggactatggcaaccaaaaacaa

SEQ ID NO: 7195 - DNA, 839 bp, Zea mays
aatgtgagaacgaccatgactgggtccggaccttaaacctgtgctttggcgtgtgacagacgcgagaatttttttaaccccggtctgaaatttgctcccactggaatgaggagtactactcagaccacctaaccaactaagtgagagaccttttcgccagtgatagtggcatagcacgacagcatgacctttattgggaggctgacttgtttctataagatacataccagaaatggtgtaagctttgctgactttcacccttaaaagcagtttttgcaaaagctgcatagaacctgcccaggtaacatggtcaatacaagacaaatgatattaaaactttaaaagacatgcaaaactatttgttgacactaacattcccagtgtcatgacagtcaaaacaccagagacctccagtgagtcttgtgcctgatacaaacgaacattagcaaaagcaaagtctctcaaaaaatagagggatgtaaggacttacagtgaagaaagctatataactgacagcaagagtaagtgcaatctctatgattgtatcgttaaaaataaagcccagccacagtattgacatgattccaaatgcaaggcccagagcaacactggtcaaagaaggtactgattagcgttatacacacatccatatagttcattttgaatgtaacaaagaaattccacatacgctccaagtgaaacttcagacaagaactttattattgagccagcatcaaaggttcttccaagcaccattcgatagaatagctgataggcaacaatagcggtcctgtagaatttgaggtcattttaagcatggattttttttaaagggaccc

SEQ ID NO: 7196 - DNA, 842 bp, Zea mays
cttgcatgcctgcagctgatccactgtccaacatcttcctatagcagccagccataagaaaaatttgcatttcgtgggagaccaagacttccatattctttcacagtgctcaaatttggttgatccaataaagagaccttcatatgctgctttggctgaatattttccattagccgccaatctgaagatatgcttatcttcttggtctggatgtaaagaaactgcctccagaacatcccagaggtccaggaagtcagcaagaacccccactgtcaaggcgcccctaatatccatcgaccattttctgtctgttagagcctattggactgttttgcaactcttgattcgcttagggactgctgcaaatagtcttgggtcgaggtcttctattttctttccatgtaaccaccaatcttgccagaataaagttgaggaaccattaccagtatcagtgatcatagctgtggagaagaaggatcttactttgtcagggaactgcatatgcagaaaattccaaggtttctcagaggaggttttggccagccacaaccatctcatcctcaaagcccaaccaagttctttgaggctagcaatacctgtctcaatccccttctaatttgtatccttcctcctggaattccatttagaagaatctgtgtggatgaggttgccaatagtccactcaaaatgtccttccaaatctgtccaaaacccaatttctgaaggacctccagtagaaaagaccaagagacagaatcaaaggccttaataatatcaagtttgaggagaatccttgcccaggaaatggtctcaatgcagcaaagtgcttttattcagggaag

SEQ ID NO: 7197 - DNA, 760 bp, Zea mays
  unsure (1)..(760): unsure at all n locations
aacgtggcctgattaattccaccactgccctgcacctttaagtcacactcaagcaaccattccgatcaagaaacacaaaccgagggaaggtcccgctggacgagatcgcctcacggtacaattcctcgaaatgcccaaccgcagcttattgttgtgaatgcagtatgattactggtgatggagagctagcaatgcaccacactatcatgaattcatcatcaaccgtgggttattaggagttaggacccatcttggatcatgtatccattccatgctatacattgctattccagttcatcagtaatcggcagctctgacttgcgcgcttctcggagcaagatcgatcgcgagagatgagataacaataacataaacaaagcgcccacatgcagtttacgccgctcgccgtataaaaccccgcgcgtcggcgtctcagtgcactgtagacgcggtgaggaggacgatgagctctacatcggcagcgggaccgatgacgaggccagcaccaccatcatcgcaggctctagtgcttctcgccgccgtcgccgtctcgctccttctttcccgctccagccatgtcgctgccggcggacaccctgattacgcggacgcgctcgccaaggcgatactcttcttccagggacagaggtcaggccagctgccgccggnaccagctgtcacgtggaggtccaacttncgcctntccgacggctttcgcgcaacgtacgtacttncttctgcttgtcttgtcgaaacatgg

SEQ ID NO: 7198 - DNA, 773 bp, Zea mays
gtcgtggtcaccttcgtcatggagcgccgcacctccgtctggaccatcgggttcgacatgaacctgctcgccgccgcctacgccgtaagggatccaatccggccatggccaatgactccgccactcgatgcatgacgacacttagcttgacgcgtgccgtatgttccgttcgtccagggcatcgtgacgtcgagcatcgcgtactacgtgcagggcctggtgatccagaaggccgggccggtgttcgcctcggcgttcagcccgctcatgatgatcatcgtcgccgccatgggctcgctcatcctctccgagaagatctacctcgggggcgtcctcggcgccgcgctcatcgtggcaggcctctactccgtcctctggggcaagcacagggagacgcaggagaaggaggaggccgccgacgccaagatggcgctgccgacggcggcagcatcctccatgcaagacgctgccgccggtgtcgctgtagatggtgcggggtgcaacgtcgggaatggcgtgacgaggtcatccttcaatgccgccgccggcgctgctagtgcagtttgattggccccatcaggcttccaataatttgccttcggtgaatgggcgcgccgggcgtcatgtcatccgtgatcaaatgcggaactgatcgtctagcctacgacgagcacactggtcttattagggaaatggtgcccaactagctggttgggaattggaatggagaatttcgggaagaaatttaccggtcgatcgcttcctccaaactc

SEQ ID NO: 7199 - DNA, 799 bp, Zea mays
aattcaggtcacccaggtgaaacgcagtaattcaggtcaccgaggtgaaacgcagaatggggataacgggattgctggctggtacactatccgtgatggatcctgcttttatctagcacattcgattcgaacaagcaggcgtggaacctattcgcagagtccattcccacatgatggcgtttatcaccttggaatatggccttccacaacaatattctcgagcaccaggcatgtggatgtggcaacctgggtggagagatcccccttatcatatagcataccacccggtgagatagtgcgtttagttgcgggtgcgtttagttgcgggacagttaggacagaaatgtcccatggtgtcctctctcgtccctccaattttaaaggacaacatgaaacaatactaggatattcttgtctcaatctttgacccagaaccaaacaacctaatttgagggtctcatctcatcccgtcctatcattgcaaccaaacgcacagaaacaccacatagcacctccggcacgcaaagctatggtagtatcatttcagcaaaatatacgtccctggcgcacaaaaacagaagggcagacgcaccaaagaagattacagtcatattctctagcgggctcacaggaccctcacagcgggagcggaatggcacgagaattacaaaaggtagagctcagtgggagtgatttgggttggctgctcctattgacaaaaccctgggaaaaactggtgaccgcaagcatagcttaaagatcctcagggccattgacatcctggagcaagcagaaactg

SEQ ID NO: 7200 - DNA, 769 bp, Zea mays
ttggccttcttttttggctttaatctctcacaaggcaacttttttgacgaatgtgtaggacacagcataacaaagttctcctggagcaaatcacatttgttcagtgatatggtcaacaaatactttaccacaaaagggcacgcactttttgtttaatacacaatggacagtgcagattttaaggaacaatacttacttgatcccatttgcagcctttgatgttgtaggcacatgggacatgaaaacttttgcggcagctcttcacaaggcagccaagtgctgcgccttttaagccacaaacactgcatttgatcttagaagcacgggccaactcaggccccaagttgtttgcggtgtcaccagtaaagaatgcttgaggagccctgtattggtattataacttagtgcagtaagttttattttggaaatagtacactaaatgatcactacacaggtacagaatgcaaaaaaaagttcaaactttgcacctaaaaagaaccagaaaacacaaacttcctgtctcagaatatggagtatgtgtacaaatcagtgcaatgaagtatgtgctcaaaaatattatcatgaaagttgccaggaacataccattcaatgcatttctcatggacatgctgaacacttgatttccaagcttgatcagcttctactggctccccattcaaataatgtgacaaagggccagtacactgtaaataacattttacattagattcttcgagtatacaacaaacaaagcagctggccatataat

SEQ ID NO: 7201 - DNA, 914 bp, Zea mays
  unsure (1)..(914): unsure at all n locations
tttgtttcaggaggttaatatttgttcatgtactttcactttctttatgaattggagatatgcactgaatatacaagaaatgcttcannttcttttttnnaataaagatcacaccttctagtaccacaggcaaaatggcaaaagtccaaaatgggaaatgcatagttcacgttgtaaccaaaatgaagcaagatctcaccttatacgctttgaattatgcatgacatcatcactgtcagattccgctagagtgtcagatgtgttaccatcagattgttggtcgtcctcgctaacactatcaaaatgttcttcaatcaggcgaggctcctttgtggctgcctgaggatgaagtgcgaggtattcttttgattcttcatcaatttcaaaatcctgtacataagatcaatgggattagaaatcaagtaccacaaaaaatagtactgattagcttacaatattacagaaaattaaatagcacaagtagggcatagacgggttagatccagaaagtagttaaattacagctcaaattctccatattctgtaaaaactaaacatcgcatcatcatcagctcaaaattaaataaagagaatgtgtacacgaagtttcacatgctaaaacaaacagcagcagcattgcacaggcataggataggatcagataaaaatcaggataaaaggattgagatatgttgtaatttctttttatatacaactaccaacatggacagtacaaatctgtgtgcaagactgcaacctaatagcagtacggaaaaacaaccagttaaaattcacaccttattttaaaacttttttttgaaccgatcattcatccaaaaagggccctatatcagagcaaaagaatgccttttcctccctcgctaaaaacactgaatgtatgaaacatattttcc

SEQ ID NO: 7202 - DNA, 783 bp, Zea mays
aataacatgactagcattgaaccagatggtggtgctatcaatgatgtctgtgtcttccggaatagtggtttagtgctattagccctggacaatagccagatacctgcccacttcattcctgcgctcggcccagctccaaagtggtgttcacatcttgataacttaactgtgcgtgagactgcatcaattggcttctagtaattgatctaataatttttaactgaacatttcatcatttgccttcctccatttataggaggagatggaagagaaaccagatacaacactgtttgatgagtacaagttcttgactaaagaagagatggagcgactgaaccttactcaatacattggcagcagtgctgtaagagcatatttacatggatttattgtacgttatgaactatacaagaaggtaaatttggcttcttttacacatttacatacaactcattacatgaattacacatttatcttgtgctggattttttttatagttagcaattcatttagttttgccaacgactaggtgtttgaattcctgaatttaaggtactttcctttgtttgacacactagattgttctttgtaaattagatctctcatctctgttactctgttaggcatctaactatataattgatctccatcatggactggttacattctttttctgtatgatcagatgagttacagaaaagacgcaaaacagtatttaccaggatttctctttctttgcagcaacgggcagcaattgcttctgttgaattcgaaacattaaag

SEQ ID NO: 7203 - DNA, 767 bp, Zea mays
tgggacaggtatttcctgcaaccctcaatacccgccccgcaaaactgtctttgtggctcatgcggattcgacgtaattgttttgcgggctgttccaccaagcccataatagattcaatgtgtccgcaaagagatcatgagctacattaggccctctgctgacagcgatgggtggcctggttgaagtcaggtgccggtgcagggacctggtgatgaggcaagtgacgccatggcctcctgaagtgtccgtgagcatggcaaggatgcagttgatgttggcagtagctctacctgtctattggagaggaagtggtggagggcatggaagatggaagcgcaggccggcatggacatctggcagcggctggtcatcagagattggaacttgcttgtgaagcgcatgtggtacttttacgaatagctgaggatggtggaccgtttattcctttgctgctgcttcgttgagtccagttgactggatggattgttgattgaattcagaaggaatgaatctgatctgcgatgctttttggagtagtatttagccaccgctcaccgggcatgttgcattgcattgagctattaactattcactgattagttgtcaattaggtatatgagatgagattcagaacttgagccctgacagatgtggatcattatgggtatgctggcaacggtcatctgcactctgctctactgcatctactactgttggaatgagcaatgcctaatgtgatacggatcctggtgaccacatgcaggttg

SEQ ID NO: 7204 - DNA, 785 bp, Zea mays
tctaattttggaccaacaaatatggttgatcaagtcttacttcgtgaacatgtatttaatgaactgcaccagcagcctcaccatttgcaaaggcagcatgatgcagctattgaacaacttattcaagccaaatttggtcacgggcttcatagggagcaccataatgatatgttggatgttctctcacgttcaaatcagagacaaatgcttcctttagagcagcaaattcttttaggccttcagcatgagcatgaacaacaacttcagtcccaacaattggcaaatgctctgcggcaacattcaggcagggaagaagaaaggcacttaagtggggtctggccaatggatgatgctgcccagtttatccgctcaggaaccagtccaaatcagagacacggtcgtttcgatctactggagaaccttcagagatcgtcatcgtttgatcatcatgaccatctagaccgcagcttatcgttacaggaacgattgcatatgggtggtctaggtattcactccctagaacgatctgattctttgcctggtggtggtcctggaccaaacacagatgtcataaatgccctatcacgccatcatggacttgggcagttggaaacacatggtgatgtattataccctttgggtcaaatgcctatgctttcttcaggtgttcatcctcagcaacataggcatcaggaacagcttcctggttctcacataggaaggcgtgaaaggcactggtcagatgccaatggtcagttgcaaaatagtctaatgcaatctttaca

SEQ ID NO: 7205 - DNA, 745 bp, Zea mays
  unsure (1)..(745): unsure at all n locations
gaaggggacaaggaagagatgggctaaggcaggacgctctggtgtgggagaggcgggcggaggctggaggaccaggcaatggcagaggagaggtgggccttggttggaggacaaggccttgatggggagaagcagacagaggcaggagaaaaaatgagtgcagggtggaaaaaggcggtagatgcggctggggatgctccaccatctcttcatagcatactaactatatatactaaactacttcccacaaaaaaattcttgggctggcccaattagtaatccagatgacctgattagatgtaattagtcatcaatcatcatctcttattgagcagtgcagctgcaatatcataattagtttccgtatttgaccaataagctcagtccttctttaattttaagaaacttatttgtcttatgttctgtatactatttatccctttactacatatgtactataaatgatggttacaattctaactgttccagcgtgtcaaagtataccgtttggctgatggtgggaagtgggacgatcaaggaacaggttatgtttctattgattacattgaggtatgaaaaatttctttgctaatatgtgtggcacctattatttcttatttatggctctacctaattctgacactttctcctgatttgttttggtagtgcccaaacatttgtttgcctcttaagtcttaatctactttcagttttgctgagcatctncaacggttttcgaaaaata

SEQ ID NO: 7206 - DNA, 759 bp, Zea mays
tgttgctcaagtgtgtgtcgcggacttcggagagagagagagagagaggcggacaccggacaagcccgcacggcgggtggtttgtcccgtcggctccagccaaggctcaaggacaaacaagcgaactactccgcgggcggcgcgaatcgaaccagcccaacgtagaaaggcagccaccaggtaaaagtaaccgaccaggttccaacggtcccgcaccgcacctacatcattctgttgggcccaccggcagactgggccgggagtagaagccacgcgtcggcgccgcacgtggaacaagtgccgaagcccgcgcctgggtggcagccgcttataagctggccgtgccaccggctgtttttttcccaaccttgcaaccctccctccctccctcctcgagctctgctcagcacacaaggacacccaaaacgcgcaggtgagagaggcgagggaatccctccccctcccgttccaattcctttcctccgctcgcggctcgcctcctcgaccgacccccccaaagcggcgctctccttttcggccattgcgccacccgcccacaagcgattcggattctcccccccacatcgtcctttccaggtgcgcgagcgtgcgtgcgtgcgagcgatccctaagctattcctctgcttttaatctctcttattattgctctcatgaggtttcgaatcctggtttatgcgataattatgagcgggggagatttgcgcacttcttccaaaaaaaaatccccccctgttggtg

SEQ ID NO: 7207 - DNA, 970 bp, Zea mays
cttgcagctagaggcgacaatatgctctaaattttacactacaagatttaaatatcggatcggattaagatcgaaccatatttccatgcatttttaactaaaatttatttagaactcacataaagaaatatttagatcactgtccattgtcacccacctgcagcctgcacacacccatctagagttcccatgcccatctgttctctcttcatgggttagacggacccggctagtagtcctgtttgacctgcatccagtgcagtgcaatgcagcccagccacaccattaagataggggttgaccggtgtcattaatcacaaacataaagtcgggcctagtgtttgacccatcggcgatcgagcgtccggtcagagaccccggaatggacatggtcaaggtcagccaaacggatcggggcaatccccccgaacggaattccaagcgcagcaggccgcccggccgagatgcgtcagctcactcgttcgcctgtgtacggacgacggaaaagagcgagagtttcgttcgggtcagagagacgcatcaagcagcctagctcaacgtctataccggttttttctgtgaatcttctcgttggctggaggttctggcggttaacacaaccgctggtgttggcatttgaattgaatgttgatgattagtgtggtcaaggtcaattgctggtctttgatcttggaacctactcgtgcttagcagttgtatttatttattcagttttaaatactgcaatcagcttccttttatgtgttgacagtgacttccctgcatccagtagagctgctggtccgatgcagcgtgccgccgatgcatggattggccgctggctaataataacaaataaaataatgcatgcccgcggcttagtagtttctttcaaagatagactggaatgcttggagggcaattcaattggacggacaagggaaatctcgtcaaaactaatcatattaag

SEQ ID NO: 7208 - DNA, 841 bp, Zea mays
agtttgtcaacagaagacagaagaacctctggtcgaccttggatgtagatgtcgtggtgatcttgcaaaagcacatcgcacatgcattgatttttggtttcgtactagaggttcaaacaagtgtgagatatgccagtaagtgttctacatagaaggttcttgactgttgcttcaaatgactttgccaccataatgattttccttactatacaggcaggttgctgccaatatcccccctccagaaacgcaatcaagtgtatgtttactattttgcactttatatctttcgatctatattggatcatttggagaatgtatgtgtcctaatgcatatgtatatccattgtcatttattctcgaactaataaactggtctatgtttatgtctaaccaaattaaactacctattgtcagttagtatctatttgtagttttatgaacacctcattaaatataataacaactttaattggctttgttttggaagacttctttttcacaattacataaatgaaggccatcctgaaatttgaggaggcacaatattgataaaagtacaagtcaatttccattttctattatgaaatttacttgttttcattcaacagacaagttattgggtttggagggttgattcgacttatggaaggggacgaggaggacgagaaagggtatttttatcactggatatgataaataagaaacaaatgcagtaacctgactctttatctgcaaaaatgattaatgatcatgtaatcatgtgcaatttttctttttggtgagcctgtattcattattccgcttcatattttattttgtttctctttttgggtgtaaggat

SEQ ID NO: 7209 - DNA, 901 bp, Zea mays
cggcatctcagtggctagctttggttctcgtaataaatcaactaaaaaaattgagctcatgcattgtacagcattattccgcgagatcgaagaaacactcactgaaagtgcccaagtacaggtccttgtttccggccaccctgccgatcctcgcctgccaccggccgtgctgatgatgcctgtcaggtcagacataaacaatcccacacactgttacaaagattttgaccatgcaggggatatgcatgcagtacactgctgctaccgctgttcaaaccgcaaatcatgttcagacaggccggccgctctcttgcatttttttttctttttcttctttcgcgtgctctttagctcgttaagtcattgccatgaatcatgcatgaaagaatctaaccttgtgactcctctgtagatggaggcgcctcgtgagaagccgctgctcttcctgacaaaaaaaaaggggtaggaacgagagcacacggagggtcaacatgtgagagcgagccaaggaaagccgctcaggacaggcagaggcaggcacatgcgactgtgcgtgcgtgcatgcacgcgaacggcgacgtgtgtacgtgtggaaaaggatgcggccggcgcgcggtgagtcctgtgccgcggcatgtgatgtgagtgtcttgtgtgttcacctgcgcaacgacgcgatgaactcctgccgcgtcatggacttcatctcctccagctccttctcgtagttggacacctacgccatgcatgcatggatcattcaggtaaagctagccatctctcgcagcaaatatgtgttgccgcccgagattgactttgagttctctttaccgggaagttggtcgtggttgtaggcccccagtacttgagccgcggcgaggtcgtaagctctagccgcctt

SEQ ID NO: 7210 - DNA, 810 bp, Zea mays
ttctcctcgtcctccctaactcttgtttgttagcggctaatttcagagcttttgttggcaactgggggaaccatagtgcgggggttcctcgcccccctctttccatgggagcttagaagctgttggatctctgcaagtgaccatgagccagagtgagtgtttttcttgtgatttctcgtcgtttatttggtgattcttgattgccgcggccaagacatcatctttattgtacttcctgggggtggacctaggtagggcgatgagagcagcggttcttgtttcttggcgggggctcttgattgcttctgatgctgctaagtggatcccactacccgatatagggagaatagagaaaagaaaacatcggattcttttgagcgcttgtgtttcttcagtgattgatggaataggcagggcgtttgttagattctttttgagctcatgctccactctggctcgaattcgtcgttgagcttttggtacagctgtagcggaataacggatgggatgttcgtacaagctcttggaagcataaatatgccctttcctaccgtataaaggtgcaaatcttggcaaggttcatggcttatgttggggtttcgacactgctgagatcagtacattccctagacgagcttgaaaaacatcggaatttttcttttttataactttatacaatatacctttatattgagatgggaatgatttctttaactaatcatattccatgatgaggttcatgttaatgttgaaactttatttggggcccattggggtttaatagaaaattaaataatgcccgcgccctaa

SEQ ID NO: 7211 - DNA, 800 bp, Zea mays
aggaaagcacagcagcggcggtttgcaaaagagcccgccacctctgtctctctgccctgcgctgcgccgtccacaccactcatccggcaacctctctctgtctccactcgtacagtattaatttcctcgcgcctcctccgtcctccattttttttgttgggtgccgtgcgagctccaagtacccctgtctccctcccgtcttgcgggcttgcctttgcctgttccatttccggctcctccagttggtagtgtcgtttcaatgcgagacgccgtccttcacgagcttgattgcccttgaaagcgaagttggtgttggtgtcgttgccggtgaggaggaagaggggatatatggctcccacggaaggtattcttcatttctccccttcccctctccccctctccatgagagattctactgcgcggagcggatacaaagcttgctcctttcattttcatcggaatcatctctgtacattcttccgtctattttggttgggcgggagaggacaaccgcctggccttgccgccggccatggtgaaactgaaggagtttttcctgcttggtcccgcagaggcagcaggggaggacgagcggctgctgaaggatcttctcgcttcttcgtcagataaggaaggtgagcggcgcttcttttggtggcctggccttacttccccaacttctgtggctcacagcctctgctggatcttttctttctccattttgatgctcgtcttggggaaaccatcatttctgacgggtcccctttttttgtaaacccggaatttggttttatgggctt

SEQ ID NO: 7212 - DNA, 805 bp, Zea mays
  unsure (1)..(805): unsure at all n locations
gtatgagctgggtcacctatccactacctcgtggtgccttctaacctccacagggcaaaaacaaaaatccaactgctacagaatccagttgctttctgcctcgtacggtcgtaccggtacgtaggtagaaatcctccccaagatcacgtaaacggacaagttaaacaacggctctgcacacaaagacagtaggcgcatttcccagtcccatgcgcgcggagtccacatgggagcatggggcgagaggaacggtcgatcaaaaaacaaggacgtttgaacgcgagccgcctggccggcaccgaatccccagcgcgcatattggcagacagtaatcatgcgcttattggggccggggccgcggccacgatcttgatcgccgttcttttacccgtggcgaatcattcacgctggcaggtaaagcacagtactagtacgtagtagttttaacatactccactgtactagttgttatgatgataacagaaccgattaaaactttttaaattttagctagatttataaatgtattagcaatctgtatgtctttatatagaatttattgtaaaaaaaatagactcaaagatctatctaatactaattatatgtaataaaaagtatattgattaaaatttacaatagttgattcttggaaaaccggcagcaatgactattttaggatggatcctcgtcttggctaccgtgaccgtgatacttcgcctggatcacgttatgggcgtaatgtttttccctttccccccctccctgccgtncgaagcgcgatcgattcggcatgggatccgggctt

SEQ ID NO: 7213 - DNA, 1998 bp, Zea mays
ttgggcgcgcgggttgcgcacgccccgggccctaccgcgagttccatttccgcggccctggggggatattcctggcggcgaggggcgtcagcagcggggtgctggttggcgatgttgtgcacttgctgttgattgcggccgtctcgaccggagtcttgctgcggagtcctcgtccacgtgcggctggactgtggagcatctttgggcttcctctgagactcaaccttgcgctggtggagctcttcggatttggcgtatttttcaaatagctgatataattcctggaggttcttgggcggatctctgatgcagtggctatagaggacgccggcgcgaaggccactgatggcgtagtggatggcgatctggtcatcaactaagggcacctgtgacttgagtgttagaaatttgcggtaatactcccgcagagtctccttttccagctgcttgcagagcgagagttcggccaaggcgtcggtgtctgggcggtacccttggaagttgagcaggaacttgtcccggaggcttctccaggaatcaatggacagcggaggcaacctgctgaaccaggtgagagctgggccttcgagggcgatgatgaaagacttggccatcgtggcgtcgtcccctccggaagatgcaacggcgacctgataactcattatgtattgtgctgggtcagtgctgccgttgtacttgggataggtccctgcccggaagttggcgggccaaggcatcacttgcaggtgtggcgccaggggacttcgctcgtcgaggtagttgaccccttggaatggcgcgacgtgcgggaaggtgtagtcgcgctgggggaaacgcgggctctccggccgcgcccggtgatgcaggggtgggccatgctgcaggccaaggtggccttcgcgcgtgtcttccggttgtgcgcgctgctggaggggtggctcttgttgtaggccaaggtggccttcgcgctgcatcagcgcgatctcgcgctcgaggtcttgggccttctgctcctcgtcgcgtatcatttgccgcaccttggctagtgcggacacacgctggcgcttggcctccagtatctctttctgcctctggagattgcggttcttgaggcgcagggcgcgcagctgtagctgttcttctgttgagacgccgaggacctcgccgtcctcggtgaggtccgcgccctccagtggggcgaagcctgggggcggctgcgattgtccttcggttccgcaggtgcggaaggtgtcgtcttcgccggtgtggggaacattgtcttcagtgggctcttggtgggtggattgggtgagggcgagggccttgccctttcttgcggccagcagtgctgccttcgcagcctcgtcagccttggggttagctctcttgggtgccatcgcgggtggttttgtcgtagcacgaacggtgggcgccaaatgttggaacttgctctctgctgcaagtgggccaacgggggtgaacaatggcgacaacagggttacgtgcacgggggcaatagctctgttgatctagcctctcacgggcactgtgcgggggtatttataggtgtctgagcgccccccgtcttgtctcagggacccatgtgcccctcagacgcctactttattcccggaatttttccattaagcagggtctccacagctgtcattacaagtattgctttacaggtcaggcctctaataccacaggcggccaccgcgggggccccgttacaatgcgccacaatcacacccctggccctttgtgggttgatatgcaggccccccccccctgtgacggcaactaactcccccccagggatgtctcgctctacacgttgtgtccaaaccactctcgcctaaaggggttggttctcactttgctcgcctcctttttctactttctcgtcccggcgaactccaacactgccgtttgtgcatcactccacaatgtgcctttcctgaacgatctcaataaggcggcacgctttcatcttcc

SEQ ID NO: 7214 - DNA, 871 bp, Zea mays
agctttctgacgaaagaggcatcgacggcggtgaaggagctgctgccggggtgggccggcggcgagctcgcggagacgtgctcttgggcggacacgcagaggttccggtaccgctggtccagcccgctgcacttcgccgacacgccaggggactgcgagttcgactacgcccgtaagcttgaaccctgctggtatccattatgcaatgttgttgccgtttcatagagaattgagatcaggtggtccgtcgtcgtgtctgtctctccgttaacgcacaacaagctttgctacctcctgcctgcctggctatccatgtcgtggtcggccattattgatgcgaacacacttcgcttaaagatcgaaagctaataattaaggcattgggcgggcgagagtagctagctagctagcttgagatgcatggaccgtggctttagatggcacgccgctgtcatgccgtgcgtttactcgccagagaagcaaccggctggccggcgtctgccatgcagtgccagtgccagccaacgcaaacggttgggtcgttgtcgttggagttcgaggtccagacgacagtgttcgcgcgacagaagtacggtgttgggcgcaacaagtttcccatcctttgtaggatcgatctcgagggaatatatcctagcacacgcctccttccttgcttgcttgtatgggtgggcaagccaggttatgcttgtttgcgtcacaaatgccatggaattgcaaaggcttttaagccaacgagggttagttaagggctgttttgggttgggtaggcaaaaaagccgattgttgggcgcctttgtaaggagttttccgttaaccctcctttttttaacacaggaggctcatattttac

SEQ ID NO: 7215 - DNA, 885 bp, Zea mays
cttgcatgcctgcagcccttctatttcaaatttgtgtcaaaatttaacttcgcccatagtaacaagtggtgtgcattctagtaagtagaaagataaaaatagaaagaggtctaacagtcaatcatatatgcgaatagcgaggtgaggttaaaatgcttagctaagactaagtttgcgtttgaattctttaccagggactgtttagccttgctgagagacaatgcagaacagggacatgcatttgaatagttggtaagcctatcttgaggtctgtgctgccaaggatttaccgtgctgtggtcagaaagcaaaatctgctcaccttgcctagcaaaggttctctagcctagcatagcaaggtaaggaaaactagctagggaaccaaatgccccctaagtcttcagaagtttggacatattctagtatgcaatagcagtggactactaaagtgaaccagtctcctcatgtagagcttaagaaataccgataaaccatgatcaatttaattgtaaactaattctccaactctctctcactaaggcaaccacgaccctaagaagatatcataatccttttagaatttagagcaacaatcatgcgtagtaaactcggccgataggggaaagaccatccccacggtattatattaaaagaagctcaatcggagttccaaccgagaaaggtcacgaaagctggccccccgtgcaacgtgagggttcgccccctataggccgaatctttactcgtgctttgagccctcacagcccgtacacgaggatccgccccctataggtgataggtcagtccatctcgtgtgcacacaaccaggggaacccacgagtgaccttttttaacctcagcctaaaatttcgctccccactggaa

SEQ ID NO: 7216 - DNA, 805 bp, Zea mays
cttaaggcctgagatggtccgggggtacgtggggaagatggacgccgaggtcaggaggcagctcaagctcaactgggttggtcgcagcactgtcaacgtacgtacctacctgtgattatcataaacagctgtgtgttttagtttcgttgttctatctatattgtcgtctatcgttgtgagctttgaccaacaatttactaaaattctccagatagatttacaacgcaaattaagttgatgtatatattcatcatatgcaaagcaattagttatctctattcaagttctacatcttcatagacattgttagtcaaatactatagccttgtaaaaatgtattggtataccatatataaccaaccgatcgacgacttaattgaaattataaacgtgtgttcttgctggccatatatatatgtaggtcctgccgatggcgaggagccttacactaggggtcatctgctccgtcgtcttcggcgaggaagcagccgccatagtagacgccctagctactgacttccagcagctaggtgacgcgatcctgtcgttcccagtcaacatccccttcaccaggttcggcaagggcatgcggtcgagcgccaagatcagggaggccatcacgaagttcgccaggaagaaggaggaggagtactccttgctgctgtcgcaggacgaaagggtgcaccacccgccactgctactgctacgactttagccgccaccgacttcgtcacctacatgctcctcctgcgctccaaggggccgcgcacttcccttttgctggcggacatcgtcgacaacgtgg

SEQ ID NO: 7217 - DNA, 869 bp, Zea mays
ttcttgcatgcctgcagccacatccgcagccaacagggcctagagctccaacgccaatgcctgtggaactatgctcttcccgttccacagcttccaccacggcttcataaagctttgtccacgagcaaccatcgcctgtcacaaccgcattccaaaacgtcaaattggggctcggcgtggcgactaccatgtcagcgatgctgcccactctggctactgatcgtgggaagtccagcgccaagttgtcgactttgtgctcgtagattttcccgttcctgtcgaccttgtatctcgacgtcccgctgaagcagccgtatgactcccatgggacacggggagtgccccacagctcccaccggacaacgatcgagttctctgtcagctgccagatgcgtgatacatcgagcccgatttctctgaacagcaggcgcccgtgaaatctgagtgcccagaagatggtcttgtagttgtcaatgccgtggaaagtgtttagtgggtcgacaaatgtgatgtcttcactgcaacagatgtaaaaagaatattttcagttttacatgagtgtaagaagcatgcctataaagaatgcatttgcaagcgatagcaattcaggcctagtgttcttatcagagataattaatagcatagctgttgatggtgactcgcatatggcatttgtgctgaatttggtttgacaaataaagggttttattaattcaagatcattacatcaagttgatacaattactgattatatatgttgggcaaacttctgatctgcaaaaggcacagagcccaaagcacaacacaaagagaggtcctgggcacctaagactagatccccatccatatgctgaatttgtcgttgtcac

SEQ ID NO: 7218 - DNA, 771 bp, Zea mays
acatccgcagccaacagggcctagagctccaacgccaatgcctgtggaactatgctcttcccgttccacagcttccagcacggcttcatacagctttgtccatgagcaaccatcacctgtcccaaccacgttccagaacgttaaattggggctcggtgtggcgactaccatgtcagcaatgctgcccactttcgctactgatcgtgggaagtccaatgccaagttgtcgactttgtgctcgtaaattttcccgttcctgtcaaccttgtatctcgacgtcccactgaagcagccatacgattcccatggaacacgtggagtgccccacagctcccaccggacaactattgaattctctgtcagttgccaaatgcgtgatacatcaagcccaatttctctgaatagtaggcgcccgtggaatctaagcgcccagaagatagtcttgtagttgtcaatcccatgaaaagtgtttagtgggtcgacaaatgtgatgtcttcactgcaatagatgtaaaaaaatattttcagtttcccttttcaaatgagtgtcatgcctacaaagaataagcttgcaagagattgcaaaattcaggcctagtgttcttgtcagagataattaatagcaaactgttgatgatgacttgcacatgcctttgtactgaatttcgttcttttggcaaagaaaagattttattaattcaagatcattacgtagagttgatgtaattacaattatcttgaacacacttttaacctgtgtaaaaagaacac

SEQ ID NO: 7219 - DNA, 763 bp, Zea mays
cttgcatgcctgcagcaggttttgtgaaaccaaagcccgcgaagaaaaatataaataggtacgaaattccagatcgcgggtaggtaggaggagcagctagattgttagatgaagcacgcaagtggcagctgtatatattgatgaaccactacaccctcgccaccagtcaaacaacgccaagcgcgcctcccgtgaacccagcggcccgtcaagtcaaagcatggacgtgccgctcccgctgctgctcggctccgtggccgtttccctcgtcgtgtggtgccttctgctccgccgcggcggggccgggaaggggaagcggccgctgccgcccggtccccggggctggccggtgctgggcaacctgccgcaggtcggcgccaagccgcaccacaccatgtgtgctatggcgcgggagtacggcccgctgttccggctccggttcggcagcgccgaggtggtggtggccgcgtcggcgcgggtggcggcccagttcctgcgcgcccacgacgccaacttcagcaaccgcccgcccaactccggggccgagcacgtggcgtacaactaccaggacctggtgttcgccccgtacggctcccggtggcgcgcgctacggaagctgtgcgcgctccacctcttttccgccaagggccctggacgaacctgccgcggattaagaagaagggccgaggggtaaacgcttcatgggttgaaggggaagccttcggcccccggcaagggaaaaaagccaagggaacgggggccc

SEQ ID NO: 7220 - DNA, 744 bp, Zea mays
ataagttttgatgatctgcctaatattatgccattgacattacacaatcacaacatatatagaaacctaaactaattacaagtgacacctatatatatatctacttcttcagtgtatatacatctacacatgaaaactgcacacccaaacatatccatgcactcttcttaggccaagtattgctggacggacaacaatggtttggccacagccaaacaagcagcctgtacattttacaatcaatgggcgtacaatattaaagcatcatttcaagcaccatcagctattatattgcaggggtttttctcagctccagttccactggacatccgaaaacaggcgtaggtttgggatccttgttgtaggcttcgtcttcgaagcgcagcttccacctgaaccgcgtcactagatagtgcatggccaccatggtttccaccctggagaactcggttccagggcacatccttggccctcccccgaacggcaggaagctgtacggcgggatcgacgagcgcttctcgaagcgggacggatcgaacttggtgggttcggcgaagaacctgggatccatgtgcgtgatgctctgggatgcgaagacctgccatgcatgcattgcatgttgcgaagcaaaattaaagctttaatttcctgatcaattgtgttctgatgaaaacatatatatatatatatatatatatatatatatatatatatatatgcaggaaagaaaaagatgcctacttt

SEQ ID NO: 7221 - DNA, 872 bp, Zea mays
acaccttgccttgttggagcattggggttggtctgctgctgcaccatcttctttgggcactgcatcgcccagtggccttgttccccacagtggaaacatcctctgcctcctccttgtgctggggctgcttggttgctctgattcgctgctggggcaggaaggcgaggtgcctggttgttctgcttctgatactgattacctccctgctggctgtgctgacgatactgctgctgctgctgtgggtactgcctctgaaactgctgctgatgcggacgctgattctgattctggtatccctgtgggtgaccaggcctgccttgctgagatgaactgcctgagaaacgtggacggctgatgcctccggactggggtccactcatcttgcgcttccgatcttccatatccttacgcttcttctcagtcataactgccctatcgatcaggtgctggaaggtggggaaggtgtgattcatcagctggtaatgcaggggatccaccaaacctctcatgaacctgtactgccttttagcatcagtgttgacgtcttcaggtgcataacgagacagctgcagaaacttgtctctgtattcactaacagacaggggtccctgcttcagagccagaaactcctccttcttcacgatcatcagtccctctagcacatggtacctgcggaaactctcgctgaattcttctcaggtgatggcttccgggtcagcatgtgtggcgaggtaggactcccaccaggactgggctgctccccttagctgacggggaccatacagaaccttctccctgtcatcgcattgggcggtgcgcagttcccctttcactggacgccaccaggcttctgcattcctggggtcaacgga

SEQ ID NO: 7222 - DNA, 851 bp, Zea mays
agcttgcatgcctgcaggaagcatgacatcgaacccaggaacccggacagctacttcaacctgaggagagatcccttcaagaacaaggtgaagccagacttcgtcaaggacaggaggcgcgtcaagcgtgagtacgacgagttcaaggtccgtgtgaatggcttgccagatgccatccgccgccgctccgacgcgtaccacgcccgcgaagagatccaggccatgaatcttcagagggaaaaactgaagggcggcggtgacgagccgccgttcgaaccggtgaagattcccaaggcgacatggatggctgacggcactcactggcccggcacctggctccaaccttcgcaggatcatgctcgaggtgatcacgcaggaatcatacaggtgtgtcttgtctgtcgtccacttgtatctcaattcttcattcaccacaaatcatcatgtatctaacgtctgcatattcctcaggtcatgctgaaaccaccaagcgacatgcccaccaccatgtacgacgcggcttccaagacacctcttgacttggcaggagtggacactcggctcccaatgctggtgtacatgtcgagggagaagcgcccaggatacgaccacaacaagaaagcaggcgcgatgaacgcactggtccgcgcatcggcgatcatgtccaacggcccgttcatcctcaacctggactgcgaccactacatctacaactccaaggccttgagggagggcatgtgcttcatgatggacccgcggcggcgaccgcctctgctacgtgcagttcccgcagaggttcgaaggcatcgacccttccgatcgctatgccaaccacaaacacgtttttttcg

SEQ ID NO: 7223 - DNA, 808 bp, Zea mays
atggttgagctacacggtccttatgagcttcccgaacagaagatgcaaatttgtcccaagagattgtcttgttggtgtacagatctagaagttcaactaatttccggcggtctagcaccacacttctccgaaaacccaggaacctgaaggaaatgatccgaacaagtaccacgtaatcaactactgtatattttttattctaaatgagcaatcggtttcacaagctggcctctatatgtatattcataccttcggtgaccttcaacaagctttgccatgttaccatcgaaagtgggaatgaaaacatcgctagctgtggatacaatgaagtcaagtgcagccatctgggaagagtgattttggaattgatgcagaacttcagagtctagcagcatctcctttcgtacctgaaaaatattcaacactgcttatacagcgaatttggttgaaatgttgaataaacgaaactgaaatgcagtgccggcagaaaatagagaaattcactagttatggaacatttgagaactgcgggagatttattgctatgacacaattaaggacattataattgaatgtttttttacaaagaaaggatgcttacaaggtttggaaaagcagaccgtagtggttctagtctcctatctcccccataaatttcaccagctgcgatgtacataagagcatccttttgaaatcctagagctttcaaaacaagtgatgcctcctcaggagtaagtgggcatagtccttgcgacctcttggcttgagaatcaatttctttatctctccccatggataagcatatctg

SEQ ID NO: 7224 - DNA, 578 bp, Zea mays
agcttgcatgcctgcagcgcctcgacccggccgttgaggatattctcatcaccgcggctcacgtcacgctgtacgactttgacaccgatgtcaaccagtgggtgcgttatgcgtgctcaggcgcgcgcctgtctgattcgcctgaccctgtgattcgtggtgaataatttggctggttggaccttattgtgtgctcgtgttgcgtgttttatgtagagacggaaggacgtggaggggtcgctcttcgtcgtcaagaggttcgactcgtctctttctcagatgcctaatgagatgatcttgcataaaaaatgtgtcgtttacagtttgtcaacgtcgttcgttttagcaatttctatctactaaatcattagcatattgattagttgtttggcataggaaactaaatgcaaaatctgattattgtagtggcaaaagtatgttcaattgtgctgtgaattgcttctctctatttcctagatgcagagcagggctttaaaacattgtagtggcaaggcccccgcgtcgtcctcctctgggcgatatgggcggctcctgttcgatcccgcccaactccaccc

SEQ ID NO: 7225 - DNA, 764 bp, Zea mays
tgtgtccgactccgacgacgatgccacctgcctgaagaggaagcgctccgttgcgtccacgtgcggcaccggcaggtgcttgacggagacgaagagcaggacggcgtggatggacgggatcttgtccaccaggtgcgggaacacgggcgggatgccctgcaccaggtccgtgtagaagaggccgacgccggggacggtgcggcagcgcggcagcaggtcccgcaccacgctctcgtgcgacaccgtgcgctccagctcgtacttgtaccgcttcacgtgcacgtagtgccacagcaccatgacggccaccagcaccgcggacatggcgacggggatgtacccgccgtgcgcgaaccggtagagcacggaggagaggtagacggactcggcggcggcaaagacggcgaagaagagcgcgacgcaggcggcgttgacgcgccacaccaggagcatgaccagggtgagcagcagcgtggtgatgagcatgacgaggacgacgcagatgccgtgcgcctcggcgatgacggccgtggtcttggacgcgagcgtgacgacgcaggcgacgagggcgagcagcaagttcacctccgggatgtagagctggccccggtactggcgcgacgtgtggagcaccttgaccctcgggaagcagcccagcgcctgcgagtgggagatggtggcgaaagcgccaggagatcatgggcctggctgcccgatgaccgacgcccgccagcgccagcacgaaagtgggccagaagatggac

SEQ ID NO: 7226 - DNA, 866 bp, Zea mays
tgaagttgctcggctgggtgccgggtaagttaaatggcagtccttacattgctcaaatttgggatgtttcaagccctaatgaacaacattttacgtttattttagatggtggtcttatttttatagtaaacatgttacttctgtttcattatccctccaggatatttctcctcctccagctcataagcatgctccacttcatatcatggtgcaataaacgatggatgccagatcctggatcaaatcaatggtaaggattgagctagttgtgttggaacttgtggcatcgcagttacttcagtcttcaggtcctgaagctagaactgaccatggcgtgtcacccttatgtgattctcagtgggttgtttgggttattcttgtcaaccatctcctacattgcttcgtttgttggaattggcgtgctgtatgttctgtatgtccccaactcctcttgtgcgttcaacatcttcactattacatggacggcaatcttggtgactataatgatggcagtatcattgcactccaaggtacgaagatgcaagcagctccggtcttagatgtagcttacattgtgttgaaaaccagtgtcaagttttggatgtgaatatctagttgcaatcctgatagtagccttgtttctattagcatatctgagcccttacggtaactaacaagtaaaattctgtaaaacttttgggtctttgccctgcctgaaatgtacaaggtttgtgattttagttcatttttgtttgctgagaaggttaacgagggtcttctctcttctgggatcatgagttcatatattgttttccctttgtggtctgcactccacaagttagtctgcatcacctgggaactattga

SEQ ID NO: 7227 - DNA, 859 bp, Zea mays
atagaaacagtagttcgaggtagcacaggcagttgagatggagtagtttggacccatgaaaccaatgtccattccaagcagggcagaacccatgtttgtgatagcatatgggatgaagaaaggagttatctttctgtatcccttctcaatgagattctggacaccatccgaaaacaccgtgaggccacccataccagtgcccacaagcacaccggcccgggtcttgtcaatctgccagagagaatattttaccaattagcatcaaatgtagcattaacagtgaaaaaatcttatagtactagtaaaaatatcaaactaccagatgaaactactatcaatacagtacaaaccatagtttgatgtgctagaagacaatttgatttaatccaaaaatgctactccctctgacctgtagggcgtgtttattttgaagaaaccaaactcgtaaacccaaccaacaattagtcaaattatgtgtgtttggagtacaaaagctatatcaacagatttatactcaaacaacttttaatgcgacattgattttgcagagactagcaatattataaaacaataatggttaaaatatgcttctaatgacactatccgtccacaatatgcctggaaaaaggtagtactttgctagaaaaatcaccataatgcaagtgaatcatcaaacgaaacaacagattttcgcagagctatgttaatacgaattaaacctgttgtgcctatgttaatactgttctaattgtaagacacttgtcgttttgccctacaccacggtttgcaatggaaatcgatgcgctaattagccaatagccactgtagcattggctactactcaaaatgagctgtctat

SEQ ID NO: 7228 - DNA, 845 bp, Zea mays
  unsure (1)..(845): unsure at all n locations
cgcgctccacaatgtggtacgggatgccgtgctcgccgaggcatgctgctacagcaaggcctgatggacctgcaccaacgatcagaactagcaccttctccgtcatctctttttaatttattaactgctgctagctggatgggaaagatgttggtggtcaggagatcttggtttgcttatgatgatgagtgggtccatttatagtacaaacagcagggctatgtgcattgacgtatatgtccccttgttttaaggaactttaagtctggacctcaatttttaaaactgtagtattttaaactatagtattgtcttgactaaactatcttatagtatttcaaatactttggttttcaaaaactttgttcccaaacagggctttagtgtgaacgttaagcaatgtttagatgattatatatcccttacatttatgatgtcattaattgaggtggatggaatcttccggccagtaattatctatatatccattctttatcatataaagttatatgtatactttaaattcttttttgaggttctattaaatttaaaagtacctatattggaaaattaaacctataataatgcaagttaaacagtatgcacattttttaaaaccttagtgtggggttccattcaaagtttcaaacacatacaacaaattctttaattcgaacaattcacttatactcattgctagaaccacccacataatgtaacccacgcccttcattggntttgaaaatttccctctattggcccgtagaaactttttgcaaccaccttatgcttccccctatatacaaaaaaccatacccttacgggggcggtaatggcaaccccct

SEQ ID NO: 7229 - DNA, 802 bp, Zea mays
atacaccacaaggtaaagttcatgttatctatgtttcaatttcttgttttagttgtgtggttcactcaccataattctggtgtttcctttcttctgcattggagctcataagttactgaattaaactgctgctgtgtatccacctctcaaaatttgaactcaatgatgaatatgaaaccaattgtggtgccagagttacatcttatgcgatatactagtagtcacatgatgcaagaggaatttgcacaaatgaacataacctttgtgttgccatatttcttttaaatttgtctttttttcccttttgacgattcttatatctaccacattttgttttaaggtcagtgagtatatttcaaatgatgcaagaggaatctgcacaaacgaacataacctttgtgttgattgttttggagtgccttttttttttcatttctcattcattcacgtaaatctgacctttttgctgattttattttctgcttgatgcccttacgtagattcacatatttttccccagggagggtgcaagagtagtctggggctatgttgatcgtattcttggtcagccatcactgataagggagtcatcacgggggaaatatccctggtctggttccctatcacgtgctacaagtaccctgactagcaaattgaagagtggaagcaaccctagggaaggacgggaatgggtttggtgatgttattctaaatccttctctccagaagagagtgaagcagcttgttaatgccacagcccaatacgaaacttcatcaagctccttttaggaacatgcttttc

SEQ ID NO: 7230 - DNA, 818 bp, Zea mays
aactactacgcatcgttggaatggatctaacctgtagatgttgatgaacacatcaggcaccattccgataaccgaaccccatatgtaagggacgaacttcatctccgtcacggttacagcgtagttgaacaacgcgtatgggaacggcgagatcctgagcaacgcggccacgcggaactgctggaaccagctcccttgacctaccagtttgatcagagcaatctgccgtggccatttcttctccagccagagctgcgcgtcaacgaacaggtgagagaagaagggtagcaaaactaggaaccagggcatcgggaccaaccaaccagccgctaaggaaatacaccgaatcgtagcgctcatgatcagatggaagcttagagacattacgtttaggcggtcgcggaacagtaggccgatccagtaaggtatggacatgccgatggtcaccccgaccatgatgatcaggaagccgaaaccgtagccgaaaactattccggttagccacattggtggaccggagggcagcaacaccaccgggaagatcgctagagaaacgactatcaccaccgctaacacggggaggccgaaagattttgcttcccattcaataattggcatgatcacctgcattgtcaagcgcacataaaatagaacacagagcatgaccacgacaaatggtgcggaaaacttaaatgtcatccgctgcacaaattaggaggaaaaaaactgaaagtacagtaacagctagcatgacaattgtgatgtggataacccatcatctgcttgataatatgacatgtgaaacttgtctgctggat

SEQ ID NO: 7231 - DNA, 842 bp, Zea mays
cccctagagtcgacctgcagaggcaggcgaggcgagctcttcggctgcttgcttttgttgccttcctcccgctccaatttaatgccaccacaccagccaggagttggggccgcgcatcaatggcgtcacctctcgcatccagatctcacacctcgtcgtagctactaccttcgtctcactcctcctcgtccccttgctgtcgttcgttcgttccttctacctccatctccacttctccaccttggggttcttggcgcaccatccgagaaatgctgttctcctttttcggttttccattctacaagtgccagccttgccttgtctcggagtgttgacatctctacgtgctctggcccgccattaattccctcctccctcacactgctgctgctgctgctgaccgagggcgcctagccagtcacgcacgaaatcccagcgttccaattcaaacacacccttccttcttggctgctcctctcgacgacgcgaccggagcggagggagtcatggtggcggagccgctggtgcacaaggtgctctccatggcgacgtcgtcgtcctcctcctccaagaaggcgcggccggcggcggcgagcgccaacaagggcggcgcggctgcggcgggcgacggcaggctgggcatcctgtccctggaggtggccaacgccatgtcgcgcgcggcgaacctgtaccggtcgctctccgacgccgaggcggcgcgcctggctcgggccgctctgcctcgggtcccgcgccgtgcgcgcgctggtcccgggcgacgacccgcgcctactggcgctcgcgctggccgagaagctcgacgcgctgaacccgcgtcgcgg

SEQ ID NO: 7232 - DNA, 860 bp, Zea mays
agaaaaactggtgccattattataacgtggtaatctggtctcatactgggcactagatatgaatgtgtatcttgtttttgctgctatgtttagcagaaaaattctgcatttagattgcatgttctgtttcctgtccccatgcatcattctgttttgctttgcagccctcgctggttgctgaagcaagaggtcccaaaagttgtcaagtctatcaacaggcagttacgtgaaaaatcaatcaagacaaaggtcagtccttcagttttcctgcaattcatggttctggaattgtaagtctgattatattcctaacattttccaggttggggcattttcagtactgaaggagcttgtggttgtattaccagactgtcttgctgatcatttcgggtcacttgttcctgggattgagaaggctttgaatgttagctgtgactttcactccctatttttttggacaaaaactttcagcccttaaaaaacttcttgtgaaaccatttttttaacttagtcgatttgacaggacaagtcttctacctccaacctgaagattgaagcccttgtattaacaaggcttgttatggcttcacattcaccatctgtgtttcatccatacatcaaggtattgtagtctatcaatgttgagtagaatttggagactatcggagtggctactgattgtaaatcaaatttccaggctctttctgcacctatactgtctgctatcagagatagatattataaagtcactgctgaggctttgcgggtgtgtggagagctagtccgtgtccttcgtccaaatctcgaggtcatattggatttcatgccttgcggacattgataccctgttactttttatt

SEQ ID NO: 7233 - DNA, 826 bp, Zea mays
gttgcacactcagacatgtacaaatgaatctgcacatgcgccacacccattccttttacaaattaataagcagctgaagaaagacacaatccagtactgctggaatgtgctacaaagtatgaaactgtatgtttggatgtcattcagtcaggatcaagttttatgtgagtgtgtaactgaaaattggaattggaacatgtgtctgtgtctatggctgaaaccgaaacttgtggctggaactaaaagatgtgcttgtgtatgcgttgcttgcttattgtcgccagaagactgtaaatgagctgaaaatgtgtctctgctggtcactgtcggcttacctccacatctcggttcaactccgccgccgcgaactccaaccccgaccgtctgcaattggaggtagggatgaaaacgggacgggtacagccggatacaaggtcatctcgtatcctatcctaatatatttctcttagatacaagaccagatacgtttaattaagattcgggacggatataggacgagatagagtaataatccggcgggtaagaaacggataacggatactactcggttaggtaccggataattatagggtagttcgtcccgatgatattaattgtccaaccatccaagaaacacataaattaagcaatacataatcatgtatatgatatatcaaatgtaggaaatgaaaccgataaaattgacatcatgcagttcaaagttactaatcacaaggacattttagaatcaacaccataatattaaaaaatataaaatattctagtttcactcaattacaaaaactaataaacattttatatggag

SEQ ID NO: 7234 - DNA, 852 bp, Zea mays
cttgcatgcctgcagtagtgtaattgcatctccggcatcttttgtggtcactagtgcaggccctgcaaattaatgtatgaagacaacagtgttagttgcacatcaaaattcgtaaaaaaaaagaacaaataaaagaaactttaacattttccagatgttaataaacagactacgaaggaataaccaataccatataaatccagcaaagcaagtgtcgtcctgaacaacattatgcgatttccttcaaaaaggatgacatcccaaatgcgaagtactataagagaggtaaagtcttacttagatatcgatagcacacatatggtaacagaatatgtaacctacaaagacataagaaaattttccatatgctgatagtgagatttaaatgttagtgaaccagaaggggattaaccaatattacagtagtgaactaccaacaaaaatattggaataacacatatcataatgaaagaaccaagacactgtataaaacctgaccactttcccatggaagcatattgatgaaaattgaaagaaaccatggtccagttatccatcccacttgaactcccaagaattccatatgtttggctgaagaaaattgcaattgatgtaagtgccaagtaataaccataacaagaaccttcaatagaaaaaacatttaggtgtagatattttgagatacagtgccttcaaaatattaagcaatagtcacaaacatatgtgtgattttttttaacatataattaaacatggcaaagacaaatatagtgacatcattggaaaacatacccaatttagggaacctttctcgtacaaccttctccagggacgagttggtcaacctgtgta

SEQ ID NO: 7235 - DNA, 842 bp, Zea mays
caattttgcatgcctgcagccagagctgagatcggtgaatttgtcgagtatgacctggacaatgaagatgaggagtggcttgaagaattcaataacgagcggaagaatataaaccctgaaaagtaagagaacactattgaactagataacttaagaatatatataaattaataaatacattgtcttaaataaactggttgacttgttaaaggacctaaggatggaatttaacttgtggttagagtatgcaccatgtgcatagaatattagagcgaacttgagacttatggaccactccttccattctaaattataagatgttttgtctttcctagatacattgtatttactatgtgtttatacagtgtatatctaagtgcatagcaagctatgtatctaaaaaagccataacatgatttcgaatggagggactatatgttttcaggctattttaattttttgtcaattgaggtcggcatattcaacaactaagcgttgcagagatgcatatgttgcgttggatatgtgactacacaagattggaccgagtgagaaacgatgacatacacgattggctaggagtagcgccagttgaagaaaagcttattcaacactagttgagatggtttgggcatgtccaccggagaccccccagaggcaccagtgcacataggcgtcataagatgggacaataatgtgaagagaggtagagggcggccaaacttgacatgagaggaggcaatcaaaaagggacttgaaggaatgggaatatcccaaatgagttgtattttgatagaagtgcttggaaagaagctattcacatgccctgaaacgggattagg

SEQ ID NO: 7236 - DNA, 865 bp, Zea mays
atttatgacatactattctcatctaacttaatatccgcaaacattagtaagcaaatccatggtggcgcacacactaaaaactaacagtgttgcccacataattctactcgctgcaaaatttctttgataatccataatgggggcgcaaagtttagattatgtatgccatattaaacaccaatatttttcaataaacagcaaagtcacttctgttttaaatatcttgtactgctgtgttaaagagtacaacactgaaaaaaaatataggagttttgaatttgatgcataagtgttttcacacatattggacgctgaacatcaaacatcagtacattatacatcctaacataaacatcaaacaaaaaagcattcatacctgacgtatatggtatgaacgatgctgctatatcatgaagatccactaaatgaaatataatctgcatgctaactaagttatccccttaaagtttccatttagcatgtggttttacctctatagcagcatctagctgcaagaggactggcactggtcctatgaaagttggtgttatggctcctgctctttcacgagctttgtggtccaaaacttccaacttgaatagaaggacctccaacctgtgaacggagttgaattaaatatagaaataatggcacaaatgataaaaaatattggcaaactgttcttttgcacaaaatcgattgaacgtaggaaagggaagttgaaatctgaactacacccccccttctgaaaatggtcagagaaaatattaccacacaccataccaatattatgtaatcctaagaatattcttaatagtacaggtgtccaagggaaaactaaacctatcctattccatttcacata

SEQ ID NO: 7237 - DNA, 795 bp, Zea mays
ttgcatgcctgcagctcttctcctcgctcgtattcatcttcctcatcttctgcatcgaccgcgccgtccgctccaggttctccagtaccaccgcctaccgcaacgtgcccgacccggaggcgctcgtcgcgccgccgatcccgccctgcgaggacaagttcttcatcaagtccccatgctacgacttcctctggagcgacggcgggagcgcccgcatcaggggcctcgtcgacgccatccggaggaacaaccccggccgacccatagcacccgaaaaggtcccgattccttccgatcccccatcagttgtgggtctgggttgggcgagattggattttattaataataagtgcatccttgtgggggaatttttgtttgtgtgcgatgttcgcctgcggagttggtttacctgtctcgcgtggggattttggattttctctctttttattttttgagatcaagaatctggattctgggtggggaatggtcggatttaagctcatgagaattttttttctcgacgagaaagaaaaccgcgcgataatttcctgtttgacatacggaattggttgctgggacggtggaagctaagctatacatcggcatgagcctcttggttttggaattgtaaaataaatttaattcaacttaaatgtattaagggggcagctctgctcttagcgagaatcacttctagaaaactccatagtgcactagtattcattgtgtactaaggtgggagctaaaaaaacctgctttcctctactcctaacatctctaacccctcacgaatca

SEQ ID NO: 7238 - DNA, 828 bp, Zea mays
agttcatatgttctgtccaaaattgatatatttaaaatgcagctggtttccgtcagaatcttacctaaatgccacaatctaaagttttatgacatgaattctgggcattctaaacattataaaatatgaatgtgttcgagtgatcagaaggtcgcaataatggtgcaatagggcaaataaaatgcatgtggaattggccaaaaaaagatcaccttgcgtgcaaattaaatgtaaatagtcaattagattgtatcaggcaataaaatgcaaagtggtaatcaaaggatgcaaaccaatatgcattatatttcatgtagacaacatagaaatttcctgaatgaaaacatgatgagatctactcacaggacggagggggagacccagagggctcagtatgcagttagactttggtccactgaagtattgaggatgatgatatttgcaggctgccccatatttacaggttccagtcttcatgtaatgttcacattcaggctgccccggtcgctctggaaaggcatattcttgtatgttgctgcttgaagtcccagatgaagaatataattgcgcataatgactgccataagtcatggcagaggtaggcccctggtgcgacaaaccataagatgcccctactggaacagcttgctgtcctccagctggtgtaacttggttcataggtggctgagaaccatatagagtaaaaaaatcattaggtgatcagcggtctcttataatcatgactacaattgcattttcaagacatgaaggaattactagcatccaattatttgcggccttataaaatctccattttaaggcccattg

SEQ ID NO: 7239 - DNA, 841 bp, Zea mays
cttgcatgcctgcagtgttcaagctttacgctgtgcattcagggcatgagccagggccacttgatggcaatgcacgaattgttcacaggttggttggtcataagggaggtcttgagtttgatccagacatttatggtgtcagtggggaaggtgatcctaccttttcatcaaagggggatgaatatgttgatattgatgattcgcaccaggcagtcttgcagcaagtacgggatctgagatcagaagttctcttgctagaaggtagggtggctaagatgcacccagaattgttggggtcactgtccaccgagttgtctgaggttttgcacaggattaggaaatttaatttggagggtaatgtctaccaacatgagacattgatggtaggcaatgaagaagtcaggggatgggggtcagcggatgtatctcaccagttagaccaacatgatcgagcattctgcaaggatgatgagatgcttgatgatgatactgacttcggctcaagccttggacctattgtctcgtgggataggatggaagcagagtgcgaggatagaaagatgctcatgggtgatagcccaaagtgcgacaagtggatgcttaaggatgatgtgggtgaatttgatgcgaagagtattcttaactgtggggatgatgatggcgtgggagattctaaggtcatcaaaccattgatgcatgatgacaccatggtaactggcccaagtttggtaggtattcatgtacgaaggattttatgccggaacaaaatggtatgattcacaaggtttggattccagtgttgatggaggggatagcagttttagcatggcggaatcgtgtg

SEQ ID NO: 7240 - DNA, 1228 bp, Zea mays
agcgcaaggagcctacccttccgccaagacgtcatccccggagcatctccgctccacctcgagagccctgtgccagaggtccctcaagacgagaacaagaggaagccgaagctggacacgaaccttgtcaggggagtgcctccgcccgagatcctggagaggtgcgagtttctggaacccctgtcagataaggcgctggaggactaccagtggctgatgtctcgggtgcagagacctcgtcttggtttgtttgggaacatgttgcagaagatgtcagctgtacttgacttcaaaagaagatcttagagccactgtactgtgattgaccaagtttttttttctttttacttcgtggtgcaactcttcgttccgtatgtttcattgtagcaatacactcagaggatgggcagatctagaccgcccaggaaggaaaggcagcagccttctttaatttttatcaagggttacttggtactacagaaataagggatgttactgttgatctggaagctctggggatgccatcttatgaccttgatgcccttgatgcgcctttctcggaggaggaagtctgggatacaattaaggcccttccttcggacaaatccccgggtcccgacgggttcactggtagattttacaaaagttgttggtcggtaatcatggctgatttcatggcggcagttcactgcatttgggctagaaatttcagaaacttgggtccactgaattcagctcttattacacttctgcccaaggtggagggggccactagtgtgagagatttccgcccaatcagtctggttcatagtttcgcgaagttggtgactaaattgttggctaacaggttagcaggccggctgcaaaatatggtttcccccaatcaaaccgcttttattaagaaacggtttattcttgacaactttatgctagtccagcagacgaccagattcttacattgtcagaagcaggctcgtatccttctcaagctagacatttcaaaggcttttgactcggtatcgtaagccttccttctcgaggtcttgaaaaaacttggttttggacagatctggtgtgatataataagcggggctgttagctacctcttctaccaggattttactgaatggtctgcccggggaatgtattgggcattaacgcgggctgaggcagggtgatccactatcccctatgttatttattcttgtaatggatgtcttgaatctgc

SEQ ID NO: 7241 - DNA, 811 bp, Zea mays
tacgttgttctcatccctcggccatagtttctccatgtatatactggcttccaatattttgtcctggctaacattggccctgtagaatatcatttgaggcgtgtgtttatgttagttattgggtccacttgttttacctttttttttataaaaaaggacttgaatctactgcaaattatccaatacctctagcagaccttctgggctaatagcttggttacccttctgttaggagatgcttttgtctggcataactgtgatttatatattgtaattgctatatcagttttccaatttcatatgttttgatgaatttgttcttcacttcagtttgcaggaagcacaaaaaaggatgaaaataaaaaaaccaccaaacattctagtaattcatctcaagcggttcaagtatattgagcagcttcagcgctacaaaaaactatcatacagagtggttttcccactggagcttaaacttcttaatacagttgataattcggacttggaatactcccttttcgctgtggtagttcatgttggaagtgggccaaaccatggccactatatcagtttggttaagagccacaatcattggttattctttgatgacgagaacgttgagatgactgatgagtccatggtacaggcattctttggctcaccgcaagagttcagtggtaatactgataatggctacatactcttctatgaaagccttgctgaaagaagttgatgtccttctcataccatgtgattagttatacactttccttttccttccatttttgctggggatatatagaaaattaatgaa

SEQ ID NO: 7242 - DNA, 750 bp, Zea mays
agggttcacttttaccctgataaatcaatcacattgctaatgaaaaacatgtataacggtccaggccttgctttggagcaagatgaagggcttgaggtttgttagaggaaattctctaatgcataactttgtatccttaaactactgtttatttacgtttaaggatgctcaattttggtttcatgggcagtgccattttaagttgtgatagtttaatactaaagcaagctcatgtcaaaataacaagcattccactttaagcttgtaagccttaataagaagacatgagtataaataactgactacttggaactatttgaatttttttaatctactgctcaagataactcttaccccaagttttccttggctactatcagactcgcgacagattgcatgttctttcgtgttatcttcagaacttcgacttgaggcatacagtgatcagaccagttgatttcacttgattgaggacgtcttgaactttgatctgctaatgtatcctaaattatcatggtcttgctgatgttgctgagctttttgatgttttctattgctattagaaatgtgcccaatatttgaaatcggtacatgtattgggtatcatttatcaagtagatccttgacaattttgataatattcgggaaattttaaatgttgaaccgttgaggagtatttcttttattggacgtctttggtgaccattaagggtgacaggtgaatctattttgatcctctgtgaaaacaaa

SEQ ID NO: 7243 - DNA, 841 bp, Zea mays
ccaacccggcgatttctgtatattcgacctgcagtgacccagaactcatttacctgacagacggcgccagcaaaggtgtgatgcaaatgctgaatgccatcattagaaacgagagggatggggtatggttgttcttgaaagaaaaaaaaaacatatcttttccactgatggatgtgatgccacttctactgaagagcaaaggataatttcgttgatataaatcttctgtggcagatcttggttcctgttcctcagtacccactttattctgctatcatttccctctttggtgggtctctggtcccatactacttggaagaagaggctaactggaaccttgactttgcaaacatccgacaagcagtggccgaggcacgttcgaagggaatcactgtgagtgttctgttgctcttcattgtgctaatcaaaatttcccttctcttgctagtaattccagcgattcatgcatatggcattatgtgcttgccttttcccatccatagttacatgtatacatggatatagaaagtgataccaggtaaaatggcgacaccatgccgttgattgattctagcatccctagtatgcatttgtcgtgaacactttgtgacatgggcttcaaataatgtacatacatatgtatgcattcattccgctctgatcatttcccccccttacctacgatgcttaggttcgagcgacggtgattataaatccagaaatcccactggccagtgcctttaatgaagccaatataaagggaacttgtgccatattgctaccatgaaaacttaattctgcttgcagacgaagtggattaacagaacgtttattaagatga

SEQ ID NO: 7244 - DNA, 640 bp, Zea mays
tggttgaaggtgaggtacctcgagtactcccgcaggccgatggagcggaggaacagggtgcagctctcctcgccggcgtggttgccgtcattgctccacatgagctgcttcatccggacctggtggaagaccttccggacgctgagctcgccgaagtgcaggtacggggacagcagcgacgtgctggcgctgtcggccttcttgcggttcacggagtagtccatcagcgggccgttgaggaaggccgtcagcgccttgtcagcattctgccaccctggtgaccacgcccgcgcgagcagcgcgttgctgcccctctcggactcgtcctcaaagaccagctcgtcccacgggcacctggacaggtcacctgtgaagcgatcgaagcattttccatgtcagtgactggactggatccgatctgcacggaccggatccccgcctacagtatgacggttagagctctgtcggttgtgcatttggatacctgaattgatcctcttgggcggcagcagcggtgcggcggggtccggcatgcacaggcacctgttccagaatggcgcgaacatggtgaaggggcggcggtcttcgtcgagggacctcccaccggctcgtacagcagatcggcattgaaaggactgca

SEQ ID NO: 7245 - DNA, 781 bp, Zea mays
tgatcaggtgactggggatggacagacacagcctggcaatgctaccatcacattcgggtgagtcaacagtcaagtcatatcagtttaccgcattgtaactttttttttgttggacaacattcatgatgggctattttgctgcctgaaaagtttagcatgatccttgacctgttcttctattaggatgaagttgatttttatcccagtatctgataatgaagttatattcttgacccttcatccaggctatgtgcttgtgctatcacttcattgaaaagataggtatctgggaaagcataaaccctgctgtggggtttactatgcatcccacactctttatcatattgcagtagaagagctgattaggaaacaagcatcaaccggttagcatttgttaataggtgctgaagtgtcaaatggagatacatgattcttctttcctttgtaggtgtggtgctcagcaaggtggggatttgggcaactcaaaccaagctcttgatggaattcttggttttggtcaggcaaatacgtcaatgttatcacagctagctgctgctggtaaagcgaagaagatatttgctcattgcttggataccataaagggtggtggaatttttgctattggaaatgttgttcagccaaaagtaaaaacaacaccgttagtagctgacatgtatgtaccttgtcgtactaattatcgttttggatgcattacactcatgggtgaacctctctagaagactagaactagttaagttaatttcagtttctgaaacttgtt

SEQ ID NO: 7246 - DNA, 812 bp, Zea mays
tgctagctacagtgtgcaacagtgcggtgtgcgtgcgtgcgtccgcgcgcgcgcgccgtttcagtttcctcccatggcgtccgccgacgactgtccgaggacgcgtggtcctcgacgacgacgaggaggagggccagcccggccgggccccaccgggcggcggcggctgcacctttcgcggccggaaaggaaagcggtgctgtggtgttgtagtagtagctagtagtgttactacccgacacactccccggattctccgccacgtggcgaggcatgcgccgtccgctggagcctagacggtcgggatggccccacggctatacaccgtacccgtacccttggggggttttaaactcgcccggctacgcccaccacaacttctcgaccggctgaatgaacctgagcgcccgttccgttttcactttactcttctcccgctcctctccttcctccctttcttccactgctggcctgcaaaaaaaaaagagcttcccggcgggtggtacggtgaacattcttcccaacagtttttgggagtgcgtacgtgcaacacttcctgtctgatgcgtgtggtagggggggagtactgctctatacgctgtagcatgcaatgtaaaaggtttttgtactgttcaattcatgcatctagcctgcaaataaaaaggtgttttgtgaatatgcattactgcaaggaaaaaaaaaagaaagaaattggattgtttgcagctggtatgctccatgcctgtatgggggacaccacacttttgagttttgaccctacctattagctaagtgggaggacccatatatat

SEQ ID NO: 7247 - DNA, 796 bp, Zea mays
acctttaccaacatgatgcttttgtttttctataagcatgtgtggcacactagttatcagctccgcaggaactacatcagcattgtgaaattcatcggtagtggactgcctagttgaagtcatatcgttgttttcaaaattagcagccttgcttctggaaacattcgactcagtgctagacaagcttcttctcaagaagccccttcccttcatcttgaggacaccaccacccttttggtccattgatggctggagaatcttccatgtctcttcccaatagttgggtgtagacaagagagaatttcctctcgatgaggatgaaggaagatttgcttcaagggcaaaagattgcagtaacttggctttctcaattaagctctttaagtcaatatcttctggaaaatttaacaacctcactaggcaagaagtcgcatgttcactccctaataaggaggatctgagatggagcatcattgatactgccatcgacaaaatcagtgcaccacgaggagaacataacactttaaattgataatctgccctactcctgatgtcagtacaataagaatggttaggagaagagaagatctcatcccaaataaacagaaggctgtcaagtgaaaattcacgaccaaataggacacggagccatcgtaatgcgaagtactgaggttcgactcctaactccacaaggtgactatgaagagaggaatcaacactagcaagcaaatgatatattgcagacgatgcctctcttacttggtgtaaacccatacttgattctggggcagaactt

SEQ ID NO: 7248 - DNA, 1023 bp, Zea mays
aaaatgttcaaaattagtagcgcttttaccattctaagggctagtttgtgaacaccattttctaaagggatttcaattttgttaagtaaaaatgaactaatttcccttaaaaaaataaaaatctcttcgaaaaattgggtttctaaactaaccctaaatgtatcatttacaacacacagaaacctatggctgctctgcttacttcgatccatccttacggaccgccaccacaggagatgggcatgtggccatgtggtaccgcggcagggaagcgaacaacgccggctgctggggacctgagtagggatggcaacggggacatacccgtcgagtaatatcattccatacccgtacccatcaaaaaaaatgctacccgtcggttacccatatatatccgcgggtataaaatcttactcatacctgtacccgtgcgggtatttttatacgccgggtaacccatacccgctaggaaagtcttaaattccaatataccaatcactcaaaatattaaataaacatataaaaacaacttcaacttcacatataacaaatcatatgattacataacttggtatctagacaaatgatagctagagaagggttttattttagttaagatgagctctattagatggttatagttgtattgatgcgggtatattttacccatgagtagacaggtatgggtagttccaacccgtacccgtacccgtctacccaacgggtagaggtttttactcattaacatacccacgagtagagaaattatctcgtacccgccttcatatcgggtaaaacccgtcgggtattctggtttcgggtactcattgctatctctagccggatccttatctagtccgatctacgttacaaaaatatttgcaattttgcaacccgcaagtggtggctatttgctattatgctatgatttattatgggtttatccgtgtctataattcgtagacctaatactatattagcgaagcccgctgcttgccggcgatggtcaaattgcaaatccct

SEQ ID NO: 7249 - DNA, 770 bp, Zea mays
agggatttgcaatttcaccatcgccggcaagcagcgggcttcgctaatatagtattaggtctacgaattatagacacggataaacccataataaatcatagcataatagcaaatagccaccacttgcgggttgcaaaattgcaaatatttttgtaacgtagatcggactagataaggatccggctagagatagcaatgagtacccgaaaccagaatacccgacgggttttacccgatatgaaggcgggtacgagataatttctctactcgtgggtatgttaatgagtaaaaacctctacccgttgggtagacgggtacgggttggaactacccatacctgtctactcatgggtaaaatatacccgcatcaatacaactataaccatctaatagagctcatcttaactaaaataaaacccttctctagctatcatttgtctagataccaagttatgtaatcatatgatttgttacatgtgaagttgaagttgtttttatatgtttatttaatattttgagcgattggtatattgaatttaagacttttctagcgggtatgggttacccgacgggtagaaattttttttgatagggtacaggtatggaatagtaatacccgacgggtatatacccgttgccattcctagatccggccaaatggatgctacaaacgtttggtttctctcaacactataataaatgggcaactacatattcgtttaagggtgtgtttggttgcgggggcagtcgggcacaaccacaccccccta

SEQ ID NO: 7250 - DNA, 766 bp, Zea mays
gcaaagtttgcgaaaagaaatggctacatatagtttcttttcttttctgaaagtgaaaaaaataaaatgtctagttttcactgtgcataaagacgtgtgagtgtgatcgttgacaagcgacgcaaaggtgcagtcctgctgggaaaggacacggcctatgaggtgaccaccgctacgaggcccctgtgacgacgactgagagggagagccggcgatatgccatagcattgtcacaattggaccaacatgttgcgcttggtgtttggcaacccatttctgggaggaaaaacaacgggccaggtacctcgagctaggctgcacctgacgatgtgcaatctgcctggccgtgttcatagatcacgcagatgaaagaaaaaaaaggaggcacgagcttttgtctcatgtttttggaatgctttgagattccctgcgggtgatgacaaggcgatcacgccggccacaccatccaaacgttttttttttgcgcaggaaaatcatgcagattaataccagtgtggtgtgaaagggacggactcctttatctacccacccacgaccacgagggccgtggccatcacttcttttttttttcaaaaaataaataaaccactgaaccctttttacagtttgaagaactacttttatgaataaatatatactcttactaatatatagtacagtatgatgaacatcttttatgactggctaatccatcctaagccactatagttcatgcattcatgccaccaatggaccaagcatgccg

SEQ ID NO: 7251 - DNA, 836 bp, Zea mays
cttgcatgcctgcagctacatgcaatagcccacgcgtcggcttgcctgccactgccaccccgtgtcctgctgccgatgcgcgctcagccgatcggtcacagcacgtcacatcattggtcagtactcgaccaggtccattttccttttcgggatagcgtgcgtgcgtgcgtgactgggtgagagacgagggagagggagacgcgacgcaagcaagcggcaaaggtactctcgaaggccctgatgcccaagtatacagtgggctgtgctgatcgttagcgatgggcctttgttaggccatcagccagcccgccagccagcccgccccacttttggatcttttcggcccttataggcggcccacctaccttttcccttgcaccaccagccgcgatcctcgcggttggcagaggacgcgccgaggtcaggaggaggccgagattgttcgactcccgtcccacttgatctcttccttcccctctccctttgcctcgccagccatgacgggagcccccgctccagcagctgctcccggcgccgaagcaaccgcggcggcgtcaccggcgggcgagcgcgatgagcaggcaagcacgtcagtacgcgtgcgggtctccgctattcctttcccttccctctgtccttcattctcattcggtcccgtccccgcgccgcgtggcgtggtggtggtggtggtctgattggggcgccatgcgcgcgcgtgcctattggttttcagcagctcgcgtgcgacgacgggttcgccggccgggcctggacgtccggaggcgccgagcgtcgctgggaccgggagagacggtggcgggaggcccgcggggggc

SEQ ID NO: 7252 - DNA, 813 bp, Zea mays
atttttctcctttcatctaacctctctgacagttgctgaatcatgctctctgtgctgcattctttcagagtctagacctttcaaggatcgatcggatcatccggcgctcccttggatcgcaaggtgagaggtggaagaatattcgttgctccaaggtagaacgctttgtcacgtgaatatgtaactgagttatgtggtgttcatcccaatcacaggcatcccattgcctgccgtcgagcccgtgccggaatctagtgtatccaaggtggaggacaggtctcctgaggacaaggaaagatggtggaagaaggggctcaaagccatctctgaggggaagctggctgttgtccttttggctggtggtcaggtactctgaatttttgagaagtttcttctgcaatatatacatggtatttctcctaatatatacatggtatattaggaactatcagtgaattgaaaaataatatgtacatggtatttctcctaatgttgtgcgcagggtactcgtctgggaagctcagatcctaagggatgtttcagtaagttgctttaacctgaatcccttgtattgtatggttagtacttcatttcatatctcacgtgtgttgtgttatgggttctgttttcctgttttggatccacaacagagatgtgtgctattgctgctgcgaattatttcttgctccatatgttatatatatattttttggtgaatgatgaccaccatgtattttattttgcatctatttatgccatggaactttatcaaaagggcaaaaaggcccaaggtgggttcatccttttatgggg

SEQ ID NO: 7253 - DNA, 832 bp, Zea mays
gcatgcctgcagcggtttagttcagcccttcataaatttttttcctggcccgtccctgatgtagagtatggaatataccatgacaagtcagtaagtcacacaatagcacagtctgcaccaaggtgtacagctgatcaggcagtcaaaacaaaatttgactgagaaaaccacaaaagactatacacgaaagaataaaaaatttatatctacaaaattggagaagatgtaacaagaccgaatgcatgcagatagaaagattaacaagaatttcattttacctttttcagctcctcaagtttgctactgtaaactgcttctgtctcatcatcaccttcttcgtaaagccaatcttcagtctgttgtaaattaactgagatttgttccctttctgaatcagtagcaaagctccggtacctctcagaaagctagaaaacattctataagccacaaaaatagttacagaaaaaaagcaaaaggttgcagatctaccttgttacgggtgtcatatacataagattctaatgcattcttcctgtcctttgtccattccacaagtttatcctgataagccaattgctgttcttgctcttgagcttccagcaattcatgcttgctcattgcaccatatatgtactcagtgattggcaactcctgccgctggatagacctttcacttcttgacttgtgaccctgcatataataacagtgagacacctcaataattgggcatagtcaacaaatcctaagataccttcaacaaacagagtcataaggttcttgcaaatttatcatcttaaataattaaaatggccctgtaaacccaattggaata

SEQ ID NO: 7254 - DNA, 815 bp, Zea mays
ttagccaaggactgcaaacttggagtcagcgtaaaattggcgacatcaagttacaactgagatagtgagatgacaaatgaacttcttccctggcttgaaattgcaagagaccatcgactgatcgacctctaactgatggtgaaaaatgctacacattctcctcaagctcgatatttccaaagctcttgattcaggggttgtttgtttcggcttattttcagcttctgcctgtcagaagctgtcgcggactgccaaatgcccaacttttcagcccgtttttgtgaaaatcattcgaatatttgatgaaaccatccaaaatcaacgtgaacatagaatcggccgagtcgtctaggaatatgtcactttctatatcataaaccctatgaaccacttcatcttcctctgcacgtaatactcacgatactcagctgcctacaaccagattttccccacatccacattattggaaaagctcgtcaggaaaaaaaacaggccctcagtctcatggtcctcctgctggggtttttaataaaaacttggttttgagcagaaatggtgtaatctcgtttgcttgctgctgttcacttcatccactagggtcctgatcaaagggtagcccgttgtgagtttgctacaccaccacggccttcggcaaggagacccactgtctcctatcctttttattctagtgatggaatggaagtgctgaactcttaaataggctaagcaaccccgcaacggcttcatgcagcctgacggcttcatgcagcctgcctgttgatctacagcaagttaagaatgtcatctctttttat

SEQ ID NO: 7255 - DNA, 851 bp, Zea mays
agtatcatactagcagtcatggtaatgcaattcaaacatcacgcgtattatgctgtgactagttcggatccgtcttcctcccctggtacgcgcgcatctgtcgcgctcgtccgcccgcctcgcagtttaactgattccacctgcccctgcttgctgatttttcatgtttctgttttaccatgtagtcgtagctgttcgcggagttgccaaaccggaggcagctgcgacgccggcgaggcgctcgcgccccatccctctggcttccgtggccggtagctccgatcttctcccgtgttcttgaaatgtttgctggcgcgtgttgtctgttcgacggaatgcctgtgagctgtgactgacatgagtgtgctgtccggtggattgcagtgtggagtctggttgccactggcgccgcaaatgctgccgagctatgggaccccttggccctggtgaggaaaatatcatgtgctttcctcacacaaacaaaaaaatgtgcttgctttcaaaattagtcccctttcgcttttcagcatgccttatggagcggtgttacccatgttttttttataaagaccatgcctagttgatgtgtcaggttgtgtttacagcgtgggtaattctgccaattagagctatccatattctgccaattatagtaacgagcaaacacgtactcatgtaatgcagccaactcgtacttcttggttctttcttgcttctatttgcagaaatatgaataatgtaagaatatcttagaccgttgctacaattattaattgatttctcgttaattccttcaaacggctcatttcttatcagcacggatcatcaagactcgacttggctgaccttgc

SEQ ID NO: 7256 - DNA, 798 bp, Zea mays
aacacacacacacacacaaacgagtgatgcagtacagcagtagaccgatcaaacgactctgtgcctcaaatctggaaactgtaattcttatcttagaccacgtttgaatgctagaactaatagttaattgataattagttgctaaaattagccgaaacatccaacatagtagttagctacatacactatcaatttttagttaactagctattaattctattgcattcaaacccccctattttgagtgtgaaaaaatggcattattccactagggcaatatgctgtagcctgtcataagtggcgtaacaacttaacaagctcaattgatgccaataagtcttacgtatcagctaagaaaacttcccatactagttttcatttttcctcttagcttcataacctacatgcataggacatactgataaccaagtcatatgctaaagctatcgctaaagccttaaacccccaaaagccatgtcatccctcccctcactcacctcatctttgatgccgcacagggccctgaagtcgtcctcagggatctcccacccgaacacctggatgttctctttgatcctttcgtccctggtcgatttagggatgacgcttgtccccctctggagcgcccacctgacgagcacctgccccggggtcttgtccagtttgttggctacctgtggtttaaacgcttggagtcagacctaggaacagcagcatgtagttttagtttaggagcttgggttcaactgaagtagtaagggaccttttcgacgagcgggtcgtgcgctaggttctttt

SEQ ID NO: 7257 - DNA, 832 bp, Zea mays
tgctagatttcctctgttccgcaccttgttaaattcagaagaaaccttgcattgtttaacttctctcttactagtctgacatagcctgcgtcattaaatttgtgcttcagattatatttcgcgacctgaagccttccaacattcttctcgacgacaactggaacgccaaactgtcagacttcggcttggcgagattaggacctcaagaaggaagccatgtctccacagtggtacgcaacaaaccatgttcttcgcacaatgtatataatttgatgaggcactgttcttagtgcctgtttcgatcatagtgctaaagtttagcacttcgcttttaacatcttttaacacttctgtttggatctctaagtgcaaaagtttaactaaaagtatagtgctcaactttagcacccaataacagtttagctcctcaagtgccatgggatccaaacaagcccttagtagcttctggcacattgatctcaaagacagtttcgcacgttcttcctcctgtacctgcaaatcaagtagccaaccccgcacagactcattccaccattctgatccggtcaagcaatcggtgcacgcactagaaaaactttccaatactagtggcctcgtgcccgtggaaacaacgagctgaccaatgtttacggtactccatctgttcttttttattaatgtactccatctgttcttttttattaatcgtgatttagttcaaaaaataaactagcggacgataaatgtttcgagaaaccggagataggttggtatccttctaccgccaatccaaataaaaaaattggaaaaagggtggccaccaaattgccag

SEQ ID NO: 7258 - DNA, 782 bp, Zea mays
tccactgacaataaccttggcaccagagtcagcgacagctttgataagctcctccaccttagcttcctcggtcttagcataattttctagctgcaaaagcacatgtattataaattccaacagatatttgcagatacagtttgcaatgtgctagagaagtaaagaaacaccatgttcccgatttttagttcagcatacacataagaaaccaattcacaaattataaaaaaaaggaacgtactgttgatgcacgtctacagaatgtaaaacacacaaagccaactgaacaatttgcaaaactcaaacctatcatgagcgtagtaaaagtaggaacacctttaacagaggccaaaaaagattctcagagtaagaacatacctgctcagcggaatggatcaacacggttccctttgtttcagttgccgaggtgtcgacaccaccagcaaatacgacaatctgaatattgattggttttagaattcaggaagaaacactgccagacatcatacagaaaaaagatgggtactgggtcgtaattggttagattcctctgcacattgaatttctataccatattataacatataactgcccatctaattaaaatcatagtccatgtccattcattgcctttagcagcaatgaaggaattggtttgccagagcttcatgagtgataatgctacatcagcatacatgattcacttaacagtaacaaaatatacaaacaaagaacatgtgacttaatcaccatggagtaaatgattatccttgagctttcaa

SEQ ID NO: 7259 - DNA, 870 bp, Zea mays
atagagattttagaagagtggataatagaaaccttaagaggttgcctggaaaccaaattacaaaattttggattgtttttttgccaccaccgaaactactgatattcgcaaaaaaaaaaacactgaaattttgaaccctgtctttaataaattttagcagtctgatatatgttccttatcgagatagtttcagcttcaaatgatgaccatttcatcttgtttctatttcggggttaatgcatgagaaaatatgttctttctgaacttgtcttccatggtgcaggagaaatctatctcgcattcttcaatctcgactccatgagcaggaagatgaccgttcaaatatcagaccttggaaaggttctcggaagaaaccttttggagaaaaacccatgtagctacactgaagtttggagcgggaagaatttcggcccggtgaaggaagagatttcagcggtggttcattcgcatggctccatggtgttcgaaatcatatgttgagattgcagtactgggcaagttgttcgagaagtttgcagtgataatttagttgtaagctccattcctgttgatcctttttaacgtgtagtccggagatggaagagatacgttgatgaaccattaactagatgcctgctggatttgacttgaatgaataacaaaacaaaacaaacaaacaaacaaacagggggtgaactgatctgtacagtattattttgcttcatgtcctattggactcgacgacttctatttagtggtacaaaattaagctattcataattaacagaggaacatctaacacgatttggaggttcagatgacaaatccctaagacatggctgtctgttcagccaacaaaagaactgaatc
